United States Patent Application Publication US 2011/0183924 A1 - sequence listing, part 279

SEQ ID NO: 853260 - protein, 995 aa, Homo sapiens
WSRCYLVTRAGLLLYVTRAAAYPALKRLDLRDPAALFETHGAEEIRGLERQVRAEIEHKKEELRQMVGERYRDLIEAADTIGQMRRCAVGLVDAVKATDQYCARLRQAGSAAPRPPRAQQPQQPSQEKFYSMAAQIKLLLEIPEKIWSSMEASQCLHATQLYLLCCHLHSLLQLDSSSSRYSPVLSRFPILIRQVAAASHFRSTILHESKMLLKCQGVSDQAVAEALCSIMLLEESSPRQALTDFLLARKATIQKLLNQPHHGAGIKAQICSLVELLATTLKQAHALFYTLPEGLLPDPALPCGLLFSTLETITGQHPAGKGTGVLQEEMKLCSWFKHLPASIVEFQPTLRTLAHPISQEYLKDTLQKWIHMCNEDIKNGITNLLMYVKSMKGLAGIRDAMWELLTSESTNHSWDVLCRRLLEKPLLFWEDMMQQLFLDRLQTLTKEGFDSISSSSKELLVSALQELESSTSNSPSNKHIHFEYNMSLFLWSESPNDLPSDAAWVSVANRGQFASSGLSMKAQAISPCVQNFCSALDSKLKVKLDDLLAYLPSDDSSLPKDVSPTQAKSSAFDRYADAGTVQEMLRTQSVACIKHIVDCIRAELQSIEEGVQGQQDALNSAKLHSVLFMARLCQSLGELCPHLKQCILGKSESSEKPAREFRALRKQGKVKTQEIIPTQAKWQEVKEVLLQQSVMGYQVWSSAVVKVLIHGFTQSLLLDDAGSVLATATSWDELEIQEEAESGSSVTSKIRLPAQPSWYVQSFLFSLCQEINRVGGHALPKVTLQEMLKSCMVQVVAAYEKLSEEKQIKKEGAFPVTQNRALQLLYDLRYLNIVLTAKGDEVKSGRSKPDSRIEKVTDHLEALIDPFDLDVFTPHLNSNLHRLVQRTSVLFGLVTGTENQLAPRSSTFNSQEPHNILPLASSQIRFGLLPLSMTSTRKAKSTRNIETKAQVVPPARSTAGDPTVPGSLFRQLVSEEDNTSAPSLFKLGWLSSMTK

SEQ ID NO: 853261 - protein, 940 aa, Homo sapiens
MATAATSPALKRLDLRDPAALFETHGAEEIRGLERQVRAEIEHKKEELRQMVGERYRDLIEAADTIGQMRRCAVGLVDAVKATDQYCARLRQAGSAAPRPPRAQQPQQPSQEKFYSMAAQIKLLLEIPEKIWSSMEASQCLHATQLYLLCCHLHSLLQLDSSSSRYSPVLSRFPILIRQVAAASHFRSTILHESKMLLKCQGVSDQAVAEALCSIMLLEESSPRQALTDFLLARKATIQKLLNQPHHGAGIKAQICSLVELLATTLKQAHALFYTLPEGLLPDPALPCGLLFSTLETITGQHPAGKGTGVLQEEMKLCSWFKHLPASIVEFQPTLRTLAHPISQEYLKDTLQKWIHMCNEDIKNGITNLLMYVKSMKGLAGIRDAMWELLTSESTNHSWDVLCRRLLEKPLLFWEDMMQQLFLDRLQTLTKEGFDSISSSSKELLVSALQELESSTSNSPSNKHIHFEYNMSLFLWSESPNDLPSDAAWVSVANRGQFASSGLSMKAQAISPCVQNFCSALDSKLKVKLDDLLAYLPSDDSSLPKDVSPTQAKSSAFDRYADAGTVQEMLRTQSVACIKHIVDCIRAELQSIEEGVQGQQDALNSAKLHSVLFMARLCQSLGELCPHLKQCILGKSESSEKPAREFRALRKQGKVKTQEIIPTQAKWQEVKEVLLQQSVMGYQVWSSAVVKVLIHGFTQSLLLDDAGSVLATATSWDELEIQEEAESGSSVTSKIRLPAQPSWYVQSFLFSLCQEINRVGGHALPKVTLQEMLKSCMVQVVAAYEKLSEEKQIKKEGAFPVTQNRALQLLYDLRYLNIVLTAKGDEVKSGRSKPDSRIEKVTDHLEALIDPFDLDVFTPHLNSNLHRLVQRTSVLFGLVTGTENQLAPRSSTFNSQEPHNILPLASSQIRFGLLPLSMTSTRKAKSTRNIETKAQYDANC

SEQ ID NO: 853262 - protein, 940 aa, Homo sapiens; identical to SEQ ID NO: 853261

SEQ ID NO: 853263 - protein, 797 aa, Homo sapiens; identical to SEQ ID NO: 853259

SEQ ID NO: 853264 - protein, 797 aa, Homo sapiens; identical to SEQ ID NO: 853259

SEQ ID NO: 853265 - protein, 89 aa, Homo sapiens
VARSKVCRPRVGMASVRSRFGLLPLSMTSTRKAKSTRNIETKAQVVPPARSTAGDPTVPGSLFRQLVSEEDNTSAPSLFKLGWLSSMTK

SEQ ID NO: 853266 - protein, 962 aa, Homo sapiens [sequence omitted]

SEQ ID NO: 853267 - protein, 980 aa, Homo sapiens
MATAATSPALKRLDLRDPAALFETHGAEEIRGLERQVRAEIEHKKEELRQMVGERYRDLIEAADTIGQMRRCAVGLVDAVKATDQYCARLRQAGSAAPRPPRAQQPQQPSQEKFYSMAAQIKLLLEIPEKIWSSMEASQCLHATQLYLLCCHLHSLLQLDSSSSRYSPVLSRFPILIRQVAAASHFRSTILHESKMLLKCQGVSDQAVAEALCSIMLLEESSPRQALTDFLLARKATIQKLLNQPHHGAGIKAQICSLVELLATTLKQAHALFYTLPEGLLPDPALPCGLLFSTLETITGQHPAGKGTGVLQEEMKLCSWFKHLPASIVEFQPTLRTLAHPISQEYLKDTLQKWIHMCNEDIKNGITNLLMYVKSMKGLAGIRDAMWELLTSESTNHSWDVLCRRLLEKPLLFWEDMMQQLFLDRLQTLTKEGFDSISSSSKELLVSALQELESSTSNSPSNKHIHFEYNMSLFLWSESPNDLPSDAAWVSVANRGQFASSGLSMKAQAISPCVQNFCSALDSKLKVKLDDLLAYLPSDDSSLPKDVSPTQAKSSAFDRYADAGTVQEMLRTQSVACIKHIVDCIRAELQSIEEGVQGQQDALNSAKLHSVLFMARLCQSLGELCPHLKQCILGKSESSEKPAREFRALRKQGKVKTQEIIPTQAKWQEVKEVLLQQSVMGYQVWSSAVVKVLIHGFTQSLLLDDAGSVLATATSWDELEIQEEAESGSSVTSKIRLPAQPSWYVQSFLFSLCQEINRVGGHALPKVTLQEMLKSCMVQVVAAYEKLSEEKQIKKEGAFPVTQNRALQLLYDLRYLNIVLTAKGDEVKSGRSKPDSRIEKVTDHLEALIDPFDLDVFTPHLNSNLHRLVQRTSVLFGLVTGTENQLAPRSSTFNSQEPHNILPLASSQIRFGLLPLSMTSTRKAKSTRNIETKAQVVPPARSTAGDPTVPGSLFRQLVSEEDNTSAPSLFKLGWLSSMTK

SEQ ID NO: 853268 - protein, 841 aa, Homo sapiens
MATAATSPALKRLDLRDPAALFETHGAEEIRGLERQVRAEIEHKKEELRQMVGERYRDLIEAADTIGQMRRCAVGLVDAVKATDQYCARLRQAGSAAPRPPRAQQPQQPSQEKFYSMAAQIKLLLEIPEKIWSSMEASQCLHATQLYLLCCHLHSLLQLDSSSSRYSPVLSRFPILIRQVAAASHFRSTILHESKMLLKCQGVSDQAVAEALCSIMLLEESSPRQALTDFLLARKATIQKLLNQPHHGAGIKAQICSLVELLATTLKQAHALFYTLPEGLLPDPALPCGLLFSTLETITGQHPAGKGTGVLQEEMKLCSWFKHLPASIVEFQPTLRTLAHPISQEYLKDTLQKWIHMCNEDIKNGITNLLMYVKSMKGLAGIRDAMWELLTSESTNHSWDVLCRRLLEKPLLFWEDMMQQLFLDRLQTLTKEGFDSISSSSKELLVSALQELESSTSNSPSNKHIHFEYNMSLFLWSESPNDLPSDAAWVSVANRGQFASSGLSMKAQAISPCVQNFCSALDSKLKVKLDDLLAYLPSDDSSLPKDVSPTQAKSSAFDRYADAGTVQEMLRTQSVACIKHIVDCIRAELQSIEEGVQGQQDALNSAKLHSVLFMARLCQSLGELCPHLKQCILGKSESSEKPAREFRALRKQGKVKTQEIIPTQAKWQEVKEVLLQQSVMGYQVWSSAVVKVLIHGFTQSLLLDDAGSVLATATSWDELEIQEEAESGSSVTSKIRLPAQPSWYVQSFLFSLCQEINRVGGHALPKVTLQEMLKSCMVQVVAAYEKLSEEKQIKKEGAFPVTQNRALQLLYDLRYLNIVLTAKGDEVKSGRSKPDSRCRIL

SEQ ID NO: 853269 - protein, 987 aa, Homo sapiens
MATAATSPALKRLDLRDPAALFETHGAEEIRGLERQVRAEIEHKKEELRQMVGERYRDLIEAADTIGQMRRCAVGLVDAVKATDQYCARLRQAGSAAPRPPRAQQFCAFLLQPQQPSQEKFYSMAAQIKLLLEIPEKIWSSMEASQCLHATQLYLLCCHLHSLLQLDSSSSRYSPVLSRFPILIRQVAAASHFRSTILHESKMLLKCQGVSDQAVAEALCSIMLLEESSPRQALTDFLLARKATIQKLLNQPHHGAGIKAQICSLVELLATTLKQAHALFYTLPEGLLPDPALPCGLLFSTLETITGQHPAGKGTGVLQEEMKLCSWFKHLPASIVEFQPTLRTLAHPISQEYLKDTLQKWIHMCNEDIKNGITNLLMYVKSMKGLAGIRDAMWELLTSESTNHSWDVLCRRLLEKPLLFWEDMMQQLFLDRLQTLTKEGFDSISSSSKELLVSALQELESSTSNSPSNKHIHFEYNMSLFLWSESPNDLPSDAAWVSVANRGQFASSGLSMKAQAISPCVQNFCSALDSKLKVKLDDLLAYLPSDDSSLPKDVSPTQAKSSAFDRYADAGTVQEMLRTQSVACIKHIVDCIRAELQSIEEGVQGQQDALNSAKLHSVLFMARLCQSLGELCPHLKQCILGKSESSEKPAREFRALRKQGKVKTQEIIPTQAKWQEVKEVLLQQSVMGYQVWSSAVVKVLIHGFTQSLLLDDAGSVLATATSWDELEIQEEAESGSSVTSKIRLPAQPSWYVQSFLFSLCQEINRVGGHALPKVTLQEMLKSCMVQVVAAYEKLSEEKQIKKEGAFPVTQNRALQLLYDLRYLNIVLTAKGDEVKSGRSKPDSRIEKVTDHLEALIDPFDLDVFTPHLNSNLHRLVQRTSVLFGLVTGTENQLAPRSSTFNSQEPHNILPLASSQIRFGLLPLSMTSTRKAKSTRNIETKAQVVPPARSTAGDPTVPGSLFRQLVSEEDNTSAPSLFKLGWLSSMTK

SEQ ID NO: 853270 - protein, 864 aa, Homo sapiens [sequence omitted]

SEQ ID NO: 853271 - protein, 545 aa, Homo sapiens
MQQLFLDRLQTLTKEGFDSISSSSKELLVSALQELESSTSNSPSNKHIHFEYNMSLFLWSESPNDLPSDAAWVSVANRGQFASSGLSMKAQAISPCVQNFCSALDSKLKVKLDDLLAYLPSDDSSLPKDVSPTQAKSSAFDRYADAGTVQEMLRTQSVACIKHIVDCIRAELQSIEEGVQGQQDALNSAKLHSVLFMARLCQSLGELCPHLKQCILGKSESSEKPAREFRALRKQGKVKTQEIIPTQAKWQEVKEVLLQQSVMGYQVWSSAVVKVLIHGFTQSLLLDDAGSVLATATSWDELEIQEEAESGSSVTSKIRLPAQPSWYVQSFLFSLCQEINRVGGHALPKVTLQEMLKSCMVQVVAAYEKLSEEKQIKKEGAFPVTQNRALQLLYDLRYLNIVLTAKGDEVKSGRSKPDSRIEKVTDHLEALIDPFDLDVFTPHLNSNLHRLVQRTSVLFGLVTGTENQLAPRSSTFNSQEPHNILPLASSQIRFGLLPLSMTSTRKAKSTRNIETKAQVGAKSKRLIRGWVPTSHRATHDQLPFK

SEQ ID NO: 853272 - protein, 910 aa, Homo sapiens
MATAATSPALKRLDLRDPAALFETHGAEEIRGLERQVRAEIEHKKEELRQMVGERYRDLIEAADTIGQMRRCAVGLVDAVKATDQYCARLRQAGSAAPRPPRAQQPQQPSQEKFYSMAAQIKLLLEIPEKIWSSMEASQCLHATQLYLLCCHLHSLLQLDSSSSRYSPVLSRFPILIRQVAAASHFRSTILHESKMLLKCQGVSDQAVAEALCSIMLLEESSPRQALTDFLLARKATIQKLLNQPHHGAGIKAQICSLVELLATTLKQAHALFYTLPEGLLPDPALPCGLLFSTLETITGQHPAGKGTGVLQEEMKLCSWFKHLPASIVEFQPTLRTLAHPISQEYLKDTLQKWIHMCNEDIKNGITNLLMYVKSMKGLAGIRDAMWELLTSESTNHSWDVLCRRLLEKPLLFWEDMMQQLFLDRLQTLTKEGFDSISSSSKELLVSALQELESSTSNSPSNKHIHFEYNMSLFLWSESPNDLPSDAAWVSVANRGQFASSGLSMKAQAISPCVQNFCSALDSKLKVKLDDLLAYLPSDDSSLPKDVSPTQAKSSAFDRYADAGTVQEMLRTQSVACIKHIVDCIRAELQSIEEGVQGQQDALNSAKLHSVLFMARLCQSLGELCPHLKQCILGKSESSEKPAREFRALRKQGKVKTQEIIPTQAKWQEVKEVLLQQSVMGYQVWSSAVVKVLIHGFTQSLLLDDAGSVLATATSWDELEIQEEAESGSSVTSKIRLPAQPSWYVQSFLFSLCQEINRVGGHALPKVTLQEMLKSCMVQVVAAYEKLSEEKQIKKEGAFPVTQNRALQLLYDLRYLNIVLTAKGDEVKSGRSKPDSRIEKVTDHLEALIDPFDLDVFTPHLNSNLHRLVQRTSVLFGLVTGTENQLAPRSSTFNSQEPHNILPLASSQIR

SEQ ID NO: 853273 - protein, 841 aa, Homo sapiens; identical to SEQ ID NO: 853268

SEQ ID NO: 853274 - protein, 707 aa, Homo sapiens
MATAATSPALKRLDLRDPAALFETHGAEEIRGLERQVRAEIEHKKEELRQMVGERYRDLIEAADTIGQMRRCAVGLVDAVKATDQYCARLRQAGSAAPRPPRAQQPQQPSQEKFYSMAAQIKLLLEIPEKIWSSMEASQCLHATQLYLLCCHLHSLLQLDSSSSRYSPVLSRFPILIRQVAAASHFRSTILHESKMLLKCQGVSDQAVAEALCSIMLLEESSPRQALTDFLLARKATIQKLLNQPHHGAGIKAQICSLVELLATTLKQAHALFYTLPEGLLPDPALPCGLLFSTLETITGQHPAGKGTGVLQEEMKLCSWFKHLPASIVEFQPTLRTLAHPISQEYLKDTLQKWIHMCNEDIKNGITNLLMYVKSMKGLAGIRDAMWELLTSESTNHSWDVLCRRLLEKPLLFWEDMMQQLFLDRLQTLTKEGFDSISSSSKELLVSALQELESSTSNSPSNKHIHFEYNMSLFLWSESPNDLPSDAAWVSVANRGQFASSGLSMKAQAISPCVQNFCSALDSKLKVKLDDLLAYLPSDDSSLPKDVSPTQAKSSAFDRYADAGTVQEMLRTQSVACIKHIVDCIRAELQSIEEGVQGQQDALNSAKLHSVLFMARLCQSLGELCPHLKQCILGKSESSEKPAREFRALRKQGKVKTQEIIPTQAKWQEVKEVLLQQSVMGYQVWSSAVVKWIMDSPGLAQCPSRIG

SEQ ID NO: 853275 - protein, 77 aa, Homo sapiens
VSGSSAKSCSGGGQASHYGFMAFVFFPDVPKLFTQDVKNTLATSVIIFLGQLFCMKARCCSNAKVCLTKLWPRPCAL

SEQ ID NO: 853276 - protein, 351 aa, Homo sapiens
RVISSRPSGRGRGRRGCSGPPEPAAMAPAAASPPEVIRAAQKDEYYRGGLRSAAGGALHSLAGARKWLEWRKEVELLSDVAYFGLTTLAGYQTLGEEYVSIIQVDPSRIHVPSSLRRGVLVTLHAVLPYLLDKALLPLEQELQADPDSGRPLQGSLGPGGRGCSGARRWMRHHTATLTEQQRRALLRAVFVLRQGLACLQRLHVAWFYIHGVFYHLAKRLTGITYLRVRSLPGEDLRARVSYRLLGVISLLHLVLSMGLQLYGFRQRQRARKEWRLHRGLSHRRASLEERAVSRNPLCTLCLEERRHPTATPCGHLFCWECITAWCSSKAECPLCREKFPPQKLIYLRHYR

SEQ ID NO: 853277 - protein, 351 aa, Homo sapiens; identical to SEQ ID NO: 853276

SEQ ID NO: 853278 - protein, 351 aa, Homo sapiens; identical to SEQ ID NO: 853276

SEQ ID NO: 853279 - protein, 326 aa, Homo sapiens
MVVPCLPPAILQDSPGPSAALGAKKQGLLLHLPCSHSGARKWLEWRKEVELLSDVAYFGLTTLAGYQTLGEEYVSIIQVDPSRIHVPSSLRRGVLVTLHAVLPYLLDKALLPLEQELQADPDSGRPLQGSLGPGGRGCSGARRWMRHHTATLTEQQRRALLRAVFVLRQGLACLQRLHVAWFYIHGVFYHLAKRLTGITYLRVRSLPGEDLRARVSYRLLGVISLLHLVLSMGLQLYGFRQRQRARKEWRLHRGLSHRRASLEERAVSRNPLCTLCLEERRHPTATPCGHLFCWECITAWCSSKAECPLCREKFPPQKLIYLRHYR

SEQ ID NO: 853280 - protein, 182 aa, Homo sapiens
MRHHTATLTEQQRRALLRAVFVLRQGLACLQRLHVAWFYIHGVFYHLAKRLTGITYLRVRSLPGEDLRARVSYRLLGVISLLHLVLSMGLQLYGFRQRQRARKEWRLHRGLSHRRASLEERAVSRNPLCTLCLEERRHPTATPCGHLFCWECITAWCSSKAECPLCREKFPPQKLIYLRHYR

SEQ ID NO: 853281 - protein, 351 aa, Homo sapiens; identical to SEQ ID NO: 853276

SEQ ID NO: 853282 - protein, 351 aa, Homo sapiens; identical to SEQ ID NO: 853276

SEQ ID NO: 853283 - protein, 351 aa, Homo sapiens; identical to SEQ ID NO: 853276

SEQ ID NO: 853284 - protein, 351 aa, Homo sapiens; identical to SEQ ID NO: 853276

SEQ ID NO: 853285 - protein, 351 aa, Homo sapiens; identical to SEQ ID NO: 853276

SEQ ID NO: 853286 - protein, 110 aa, Homo sapiens
MPRGRVPHFPADVKHLASRTGFRQRPAQTMSCCLTYLGMRMTLYSWVSQGQLARDGGGRGGRDPLDWEDHQERHWGLRPGGQMPPWLHPSAPSPLLHCALAKRVRLPVTP

SEQ ID NO: 853287 - protein, 371 aa, Homo sapiens
RVISSRPSGRGRGRRGCSGPPEPAAMAPAAASPPEVIRAAQKDEYYRGGLRSAAGGALHSLAGARKWLEWRKEVELLSDVAYFGLTTLAGYQTLGEEYVSIIQVDPSRIHVPSSLRRGVLVTLHAVLPYLLDKALLPLEQELQADPDSGRPLQGSLGPGGRGCSGARRWMRHHTATLTEQQRRALLRAVFVLRQGLACLQRLHVAWFYIHGVFYHLAKRLTGITYQALRPDPLRVLMSVAPSALQLRVRSLPGEDLRARVSYRLLGVISLLHLVLSMGLQLYGFRQRQRARKEWRLHRGLSHRRASLEERAVSRNPLCTLCLEERRHPTATPCGHLFCWECITAWCSSKAECPLCREKFPPQKLIYLRHYR

SEQ ID NO: 853288 - protein, 139 aa, Homo sapiens
NLGKVEAGWLDHVLRVRSLPGEDLRARVSYRLLGVISLLHLVLSMGLQLYGFRQRQRARKEWRLHRGLSHRRASLEERAVSRNPLCTLCLEERRHPTATPCGHLFCWECITAWCSSKAECPLCREKFPPQKLIYLRHYR

SEQ ID NO: 853289 - protein, 351 aa, Homo sapiens; identical to SEQ ID NO: 853276

SEQ ID NO: 853290 - protein, 369 aa, Homo sapiens
RVISSRPSGRGRGRRGCSGPPEPAAMAPAAASPPEVIRAAQKDEYYRGGLRSAAGGALHSLAGARKWLEWRKEVELLSDVAYFGLTTLAGYQTLGEEYVSIIQVDPSRIHVPSSLRRGVLVTLHAVLPYLLDKALLPLEQELQADPDSGRPLQGSLGPGGRGCSGARRWMRHHTATLTEQQRRALLRAVFVLRQGLACLQRLHVAWFYIHGVFYHLAKRLTGITYQALRPDPLRVLMSVAPSALQLRVRSLPGEDLRARVSYRLLGVISLLHLVLSMGLQLYGFRQRQRARKEWRLHRGLSHRRASLEERAVSRNPLCTLCLEERRHPTATPCGHLFCWECITAWCSSKVRWEPAAVLGWSAAVPARCT

SEQ ID NO: 853291 - protein, 60 aa, Homo sapiens
MRSPPMKTAMTGVRPLTCDLSQAASWSVLLLPPWGWDSVSHTEPTTLPPSAWSLINRVFS

SEQ ID NO: 853292 - protein, 288 aa, Homo sapiens
MQKLTAEMPDQFEIAETVSRTDSPSKIIKLDTVRVIAEKDKHALLDVTPSAIERLNYVQYYPIVVFFIPESRPALKALRQWLAPASRRSTRRLYAQAQKLRKHSSHLFTATIPLNGTSDTWYQELKAIIREQQTRPIWTAEDQLDGSLEDNLDLPHHGLADSSADLSCDSRVNSDYETDGEGGAYTDGEGYTDGEGGPYTDVDDEPPAPALARSSEPVQADESQSPRDRGRISAHQGAQVDSRHPQGQWRQDSMRTYEREALKKKFTRVHDAESSDEDGYDWGPATDL

SEQ ID NO: 853293 - protein, 119 aa, Homo sapiens
MAVRFQVADMEELTIWEQHTATLSKDPRRGFGIAISGGRDRPGGSMVVSDVVPGGPAEGRLQTGDHIVMVNGVSMENATSAFAIQILKTCTKMANIVSRQPLAWPASLTPAWVVPLWGL

SEQ ID NO: 853294 - protein, 750 aa, Homo sapiens
VFHVLDTLHPGPGQSHARGGHWPVKSVLVKRRDSEEFGVKLGSQIFIKHITDSGLAARHRGLQEGDLILQINGVSSQNLSLNDTRRLIEKSEGKLSLLVLRDRGQFLVNIPPAVSDSDSSPLEDISDLASELSQAPPSHIPPPPRHAQRSPEASQTDSPVESPRLRRESSVDSRTISEPDEQRSELPRESSYDIYRVPSSQSMEDRGYSPDTRVVRFLKGKSIGLRLAGGNDVGIFVSGVQAGSPADGQGIQEGDQILQVNDVPFQNLTREEAVQFLLGLPPGEEMELVTQRKQDIFWKMVQSRVGDSFYIRTHFELEPSPPSGLGFTRGDVFHVLDTLHPGPGQSHARGGHWLAVRMGRDLREQERGIIPNQSRAEQLASLEAAQRAVGVGPGSSAGSNARAEFWRLRGLRRGAKKTTQRSREDLSALTRQGRYPPYERVVLREASFKRPVVILGPVADIAMQKLTAEMPDQFEIAETVSRTDSPSKIIKLDTVRVIAEKDKHALLDVTPSAIERLNYVQYYPIVVFFIPESRPALKALRQWLAPASRRSTRRLYAQAQKLRKHSSHLFTATIPLNGTSDTWYQELKAIIREQQTRPIWTAEDQLDGSLEDNLDLPHHGLADSSADLSCDSRVNSDYETDGEGGAYTDGEGYTDGEGGPYTDVDDEPPAPALARSSEPVQADESQSPRDRGRISAHQGAQVDSRHPQGQWRQDSMRTYEREALKKKFTRVHDAESSDEDGYDWGPATDL

SEQ ID NO: 853295 - protein, 928 aa, Homo sapiens [sequence omitted]

SEQ ID NO: 853296 - protein, 573 aa, Homo sapiens
PSPWSVSLCLWSSVPLAGDLPPCCHHKRGKVGQTGGEARATSLGFPPHHPCQAGTRALAPAACPEATQPPRQVADMEELTIWEQHTATLSKDPRRGFGIAISGGRDRPGGSMVVSDVVPGGPAEGRLQTGDHIVMVNGVSMENATSAFAIQILKTCTKMANITVKRPRRIHLPATKASPSSPGRQDSDEDDGPQRVEEVDQGRGYDGDSSSGSGRSWDERSRRPRPGRRGRAGSHGRRSPGGGSEANGLALVSGFKRLPRQDVQMKPVKSVLVKRRDSEEFGVKLGSQIFIKHITDSGLAARHRGLQEGDLILQINGVSSQNLSLNDTRRLIEKSEGKLSLLVLRDRGQFLVNIPPAVSDSDSSPLEDISDLASELSQAPPSHIPPPPRHAQRSPEASQTDSPVESPRLRRESSVDSRTISEPDEQRSLDGSLEDNLDLPHHGLADSSADLSCDSRVNSDYETDGEGGAYTDGEGYTDGEGGPYTDVDDEPPAPALARSSEPVQADESQSPRDRGRISAHQGAQVDSRHPQGQWRQDSMRTYEREALKKKFTRVHDAESSDEDGYDWGPATDL

SEQ ID NO: 853297 - protein, 952 aa, Homo sapiens
MNLCGLMPIFPAPLDQVADMEELTIWEQHTATLSKDPRRGFGIAISGGRDRPGGSMVVSDVVPGGPAEGRLQTGDHIVMVNGVSMENATSAFAIQILKTCTKMANITVKRPRRIHLPATKASPSSPGRQDSDEDDGPQRVEEVDQGRGYDGDSSSGSGRSWDERSRRPRPGRRGRAGSHGRRSPGGGSEANGLALVSGFKRLPRQDVQMKPVKSVLVKRRDSEEFGVKLGSQIFIKHITDSGLAARHRGLQEGDLILQINGVSSQNLSLNDTRRLIEKSEGKLSLLVLRDRGQFLVNIPPAVSDSDSSPLEEGVTMADEMSSPPADISDLASELSQAPPSHIPPPPRHAQRSPEASQTDSPVESPRLRRESSVDSRTISEPDEQRSELPRESSYDIYRVPSSQSMEDRGYSPDTRVVRFLKGKSIGLRLAGGNDVGIFVSGVQAGSPADGQGIQEGDQILQVNDVPFQNLTREEAVQFLLGLPPGEEMELVTQRKQDIFWKMVQSRVGDSFYIRTHFELEPSPPSGLGFTRGDVFHVLDTLHPGPGQSHARGGHWLAVRMGRDLREQERGIIPNQSRAEQLASLEAAQRAVGVGPGSSAGSNARAEFWRLRGLRRGAKKTTQRSREDLSALTRQGRYPPYERVVLREASFKRPVVILGPVADIAMQKLTAEMPDQFEIAETVSRTDSPSKIIKLDTVRVIAEKDKHALLDVTPSAIERLNYVQYYPIVVFFIPESRPALKALRQWLAPASRRSTRRLYAQAQKLRKHSSHLFTATIPLNGTSDTWYQELKAIIREQQTRPIWTAEDQLDGSLEDNLDLPHHGLADSSADLSCDSRVNSDYETDGEGGAYTDGEGYTDGEGGPYTDVDDEPPAPALARSSEPVQADESQSPRDRGRISAHQGAQVDSRHPQGQWRQDSMRTYEREALKKKFTRVHDAESSDEDGYDWGPATDL

SEQ ID NO: 853298 - protein, 94 aa, Homo sapiens
QTCHGVSNVGSMARAKVGDGMEVVIDLDSPCSGGSFEAPLSLSSKVDSRHPQGQWRQDSMRTYEREALKKKFTRVHDAESSDEDGYDWGPATDL

SEQ ID NO: 853299 - protein, 994 aa, Homo sapiens
PSPWSVSLCLWSSVPLAGDLPPCCHHKRGKVGQTGGEARATSLGFPPHHPCQAGTRALAPAACPEATQPPRQVADMEELTIWEQHTATLSKDPRRGFGIAISGGRDRPGGSMVVSDVVPGGPAEGRLQTGDHIVMVNGVSMENATSAFAIQILKTCTKMANITVKRPRRIHLPATKASPSSPGRQDSDEDDGPQRVEEVDQGRGYDGDSSSGSGRSWDERSRRPRPGRRGRAGSHGRRSPGGGSEANGLALVSGFKRLPRQDVQMKPVKSVLVKRRDSEEFGVKLGSQIFIKHITDSGLAARHRGLQEGDLILQINGVSSQNLSLNDTRRLIEKSEGKLSLLVLRDRGQFLVNIPPAVSDSDSSPLEDISDLASELSQAPPSHIPPPPRHAQRSPEASQTDSPVESPRLRRESSVDSRTISEPDEQRSELPRESSYDIYRVPSSQSMEDRGYSPDTRVVRFLKGKSIGLRLAGGNDVGIFVSGVQAGSPADGQGIQEGDQILQVNDVPFQNLTREEAVQFLLGLPPGEEMELVTQRKQDIFWKMVQSRVGDSFYIRTHFELEPSPPSGLGFTRGDVFHVLDTLHPGPGQSHARGGHWLAVRMGRDLREQERGIIPNQSRAEQLASLEAAQRAVGVGPGSSAGSNARAEFWRLRGLRRGAKKTTQRSREDLSALTRQGRYPPYERVVLREASFKRPVVILGPVADIAMQKLTAEMPDQFEIAETVSRTDSPSKIIKLDTVRVIAEKDKHALLDVTPSAIERLNYVQYYPIVVFFIPESRPALKALRQWLAPASRRSTRRLYAQAQKLRKHSSHLFTATIPLNGTSDTWYQELKAIIREQQTRPIWTAEDQLDGSLEDNLDLPHHGLADSSADLSCDSRVNSDYETDGEGGAYTDGEGYTDGEGGPYTDVDDEPPAPALARSSEPVQADESQSPRDRGRISAHQGAQVDSRHPQGQWRQDSMRTYEREALKKKFTRVHDAESSDEDGYDWGPATDL

SEQ ID NO: 853300 - protein, 376 aa, Homo sapiens
CIVQLCYYVQEGRVNHVDYCTVHELMIATTNAECWSVGRCCLKTTQRSREDLSALTRQGRYPPYERVVLREASFKRPVVILGPVADIAMQKLTAEMPDQFEIAETVSRTDSPSKIIKLDTVRVIAEKDKHALLDVTPSAIERLNYVQYYPIVVFFIPESRPALKALRQWLAPASRRSTRRLYAQAQKLRKHSSHLFTATIPLNGTSDTWYQELKAIIREQQTRPIWTAEDQLDGSLEDNLDLPHHGLADSSADLSCDSRVNSDYETDGEGGAYTDGEGYTDGEGGPYTDVDDEPPAPALARSSEPVQADESQSPRDRGRISAHQGAQVDSRHPQGQWRQDSMRTYEREALKKKFTRVHDAESSDEDGYDWGPATDL

SEQ ID NO: 853301 - protein, 92 aa, Homo sapiens
MSLTQSDLGSYGRHHCSPYDAIKVLGWEGPHLDCLQQENAPRHPSPESCLSFPPPPLQSLASSWAVRSSSSTLQIRAWLPGTVGCRKEISFY

SEQ ID NO: 853302 - protein, 413 aa, Homo sapiens
MLGTVKMEGHETSDWNSYYADTQEAYSSVPVSNMNSGLGSMNSMNTYMTMNTMTTSGNMTPASFNMSYANPGLGAGLSPGAVAGMPGGSAGAMNSMTAAGVTAMGTALSPSGMGAMGAQQAASMNGLGPYAAAMNPCMSPMAYAPSNLGRSRAGGGGDAKTFKRSYPHAKPPYSYISLITMAIQQAPSKMLTLSEIYQWIMDLFPYYRQNQQRWQNSIRHSLSFNDCFVKVARSPDKPGKGSYWTLHPDSGNMFENGCYLRRQKRFKCEKQPGAGGGGGSGSGGSGAKGGPESRKDPSGASNPSADSPLHRGVHGKTGQLEGAPAPGPGRQPPDSGPQWGDGDRGRLGVEDSSLLNCAPHKLRARGAGLCARLSPGTRLGTPRVPAAPERGPPLLLQPPVLHQQPHVLLGAAA

SEQ ID NO: 853303 - protein, 413 aa, Homo sapiens; identical to SEQ ID NO: 853302

SEQ ID NO: 853304 - protein, 153 aa, Homo sapiens
MSSSARIINRTGTAILALRLYVARQPASRQRLGDHQEPHRALSPGAGVLPRCVFQTRPKHFLAPGTGGFVWHSHAGSKREKINSKQNHTNQTVNSIIKSQQLFLFHFSCTTFPPVQKTVTLLLYSKFIVYITTKTTPNQFFSCSVYTDPQVYI

SEQ ID NO: 853305 - protein, 413 aa, Homo sapiens; identical to SEQ ID NO: 853302

SEQ ID NO: 853306 - protein, 104 aa, Homo sapiens
VYLTGPPQDSRRRLTPPSAPKAEILTKLFPATKTSIPFVSNQTVNSIIKSQQLFLFHFSCTTFPPVQKTVTLLLYSKFIVYITTKTTPNQFFSCSVYTDPQVYI

SEQ ID NO: 853307 - protein, 99 aa, Homo sapiens
MNSGLGSMNSMNTYMTMNTMTTSGNMTPASFNMSYANPGLGAGLSPGAVAGMPGGSAGAMNSMTAAGVTAMGTALSPSGMGAMGAQQAASMNGLGPYAA

SEQ ID NO: 853308 - protein, 893 aa, Homo sapiens
MATEEFIIRIPPYHYIHVLDQNSNVSRVEVGPKTYIRQDNERVLFAPMRMVTVPPRHYCTVANPVSRDAQGLVLFDVTGQVRLRHADLEIRLAQDPFPLYPGEVLEKDITPLQVVLPNTALHLKALLDFEDKDGDKVVAGDEWLFEGPGTYIPRKEVEVVEIIQATIIRQNQALRLRARKECWDRDGKERVTGEEWLVTTVGAYLPAVFEEVLDLVDAVILTEKTALHLRARRNFRDFRGVSRRTGEEWLVTVQDTEAHVPDVHEEVLGVVPITTLGPHNYCVILDPVGPDGKNQLGQKRVVKGEKSFFLQPGEQLEQGIQDVYVLSEQQGLLLRALQPLEEGEDEEKVSHQAGDHWLIRGPLEYVPSAKVEVVEERQAIPLDENEGIYVQDVKTGKVRAVIGSTYMLTQDEVLWEKELPPGVEELLNKGQDPLADRGEKDTAKSLQPLAPRNKTRVVSYRVPHNAAVQVYDYREKRARVVFGPELVSLGPEEQFTVLSLSAGRPKRPHARRALCLLLGPDFFTDVITIETADHARLQLQLAYNWHFEVNDRKDPQETAKLFSVPDFVGDACKAIASRVRGAVASVTFDDFHKNSARIIRTAVFGFETSEAKGPDGMALPRPRDQAVFPQNGLVVSSVDVQSVEPVDQRTRDALQRSVQLAIEITTNSQEAAAKHEAQRLEQEARGRLERQKILDQSEAEKARKELLELEALSMAVESTGTAKAEAESRAEAARIEGEGSVLQAKLKAQALAIETEAELQRVQKVRELELVYARAQLELEVSKAQQLAEVEVKKFKQMTEAIGPSTIRDLAVAGPEMQVKLLQSLGLKSTLITDGSTPINLFNTAFGLLGMGPEGQPLGRRVASGPSPGEGISPQSAQAPQAPGDNHVVPVLR

SEQ ID NO: 853309 - protein, 893 aa, Homo sapiens; identical to SEQ ID NO: 853308

SEQ ID NO: 853310 - protein, 893 aa, Homo sapiens; identical to SEQ ID NO: 853308

SEQ ID NO: 853311 - protein, 545 aa, Homo sapiens
MATEEFIIRIPPYHYIHVLDQNSNVSRVEVGPKTYIRQDNERVLFAPMRMVTVPPRHYCTVANPVSRDAQGLVLFDVTGQVRLRHADLEIRLAQDPFPLYPGEVLEKDITPLQVVLPNTALHLKALLDFEDKDGDKVVAGDEWLFEGPGTYIPRKEVEVVEIIQATIIRQNQALRLRARKECWDRDGKERVTGEEWLVTTVGAYLPAVFEEVLDLVDAVILTEKTALHLRARRNFRDFRGVSRRTGEEWLVTVQDTEAHVPDVHEEVLGVVPITTLGPHNYCVILDPVGPDGKNQLGQKRVVKGEKSFFLQPGEQLEQGIQDVYVLSEQQGLLLRALQPLEEGEDEEKVSHQAGDHWLIRGPLEYVPSAKVEVVEERQAIPLDENEGIYVQDVKTGKVRAVIGSTYMLTQDEVLWEKELPPGVEELLNKGQDPLADRGEKDTAKSLQPLAPRNKTRVVSYRVPHNAAVQVYDYREKRARVVFGPELVSLGPEEQFTVLSLSAGRPKRPHARRALCLLLGPDFFTDVITIETADHARPSSFQCQTL

SEQ ID NO: 853312 - protein, 893 aa, Homo sapiens; identical to SEQ ID NO: 853308

SEQ ID NO: 853313 - protein, 944 aa, Homo sapiens
  misc_feature (124)..(124): Xaa can be any naturally occurring amino acid
FLMISWDCRDVTNGDAEDVMIPRAPIPCISIVDCTTKSRRVRCGGRGKDATLRESYRLKGRLLLLVPPVCTNEMEQIHLTTDSDSTCNELVTETHMEFIVCMTPEWSLVCLILNCVTSGYSCVXISSLLYLQIIHWHDTNEYTHFTRTCNRIGQVLEKDITPLQVVLPNTALHLKALLDFEDKDGDKVVAGDEWLFEGPGTYIPRKEVEVVEIIQATIIRQNQALRLRARKECWDRDGKERVTGEEWLVTTVGAYLPAVFEEVLDLVDAVILTEKTALHLRARRNFRDFRGVSRRTGEEWLVTVQDTEAHVPDVHEEVLGVVPITTLGPHNYCVILDPVGPDGKNQLGQKRVVKGEKSFFLQPGEQLEQGIQDVYVLSEQQGLLLRALQPLEEGEDEEKVSHQAGDHWLIRGPLEYVPSAKVEVVEERQAIPLDENEGIYVQDVKTGKVRAVIGSTYMLTQDEVLWEKELPPGVEELLNKGQDPLADRGEKDTAKSLQPLAPRNKTRVVSYRVPHNAAVQVYDYREKRARVVFGPELVSLGPEEQFTVLSLSAGRPKRPHARRALCLLLGPDFFTDVITIETADHARLQLQLAYNWHFEVNDRKDPQETAKLFSVPDFVGDACKAIASRVRGAVASVTFDDFHKNSARIIRTAVFGFETSEAKGPDGMALPRPRDQAVFPQNGLVVSSVDVQSVEPVDQRTRDALQRSVQLAIEITTNSQEAAAKHEAQRLEQEARGRLERQKILDQSEAEKARKELLELEALSMAVESTGTAKAEAESRAEAARIEGEGSVLQAKLKAQALAIETEAELQRVQKVRELELVYARAQLELEVSKAQQLAEVEVKKFKQMTEAIGPSTIRDLAVAGPEMQVKLLQSLGLKSTLITDGSTPINLFNTAFGLLGMGPEGQPLGRRVASGPSPGEGISPQSAQAPQAPGDNHVVPVLR

SEQ ID NO: 853314 - protein, 736 aa, Homo sapiens
MTYLILDQQRRRSNTIDKCRPIGQWLTPVIPALCQGEEWLVTTVGAYLPAVFEEVLDLVDAVILTEKTALHLRARRNFRDFRGVSRRTGEEWLVTVQDTEAHVPDVHEEVLGVVPITTLGPHNYCVILDPVGPDGKNQLGQKRVVKGEKSFFLQPGEQLEQGIQDVYVLSEQQGLLLRALQPLEEGEDEEKVSHQAGDHWLIRGPLEYVPSAKVEVVEERQAIPLDENEGIYVQDVKTGKVRAVIGSTYMLTQDEVLWEKELPPGVEELLNKGQDPLADRGEKDTAKSLQPLAPRNKTRVVSYRVPHNAAVQVYDYREKRARVVFGPELVSLGPEEQFTVLSLSAGRPKRPHARRALCLLLGPDFFTDVITIETADHARLQLQLAYNWHFEVNDRKDPQETAKLFSVPDFVGDACKAIASRVRGAVASVTFDDFHKNSARIIRTAVFGFETSEAKGPDGMALPRPRDQAVFPQNGLVVSSVDVQSVEPVDQRTRDALQRSVQLAIEITTNSQEAAAKHEAQRLEQEARGRLERQKILDQSEAEKARKELLELEALSMAVESTGTAKAEAESRAEAARIEGEGSVLQAKLKAQALAIETEAELQRVQKVRELELVYARAQLELEVSKAQQLAEVEVKKFKQMTEAIGPSTIRDLAVAGPEMQVKLLQSLGLKSTLITDGSTPINLFNTAFGLLGMGPEGQPLGRRVASGPSPGEGISPQSAQAPQAPGDNHVVPVLR

SEQ ID NO: 853315 - protein, 487 aa, Homo sapiens
MLTQDEVLWEKELPPGVEELLNKGQDPLADRGEKDTAKSLQPLAPRNKTRVVSYRVPHNAAVQVYDYREKRARVVFGPELVSLGPEEQFTVLSLSAGRPKRPHARRALCLLLGPDFFTDVITIETADHARLQLQLAYNWHFEVNDRKDPQETAKLFSVPDFVGDACKAIASRVRGAVASVTFDDFHKNSARIIRTAVFGFETSEAKGPDGMALPRPRDQAVFPQNGLVVSSVDVQSVEPVDQRTRDALQRSVQLAIEITTNSQEAAAKHEAQRLEQEARGRLERQKILDQSEAEKARKELLELEALSMAVESTGTAKAEAESRAEAARIEGEGSVLQAKLKAQALAIETEAELQRVQKVRELELVYARAQLELEVSKAQQLAEVEVKKFKQMTEAIGPSTIRDLAVAGPEMQVKLLQSLGLKSTLITDGSTPINLFNTAFGLLGMGPEGQPLGRRVASGPSPGEGISPQSAQAPQAPGDNHVVPVLR

SEQ ID NO: 853316 - protein, 706 aa, Homo sapiens
MATEEFIIRIPPYHYIHVLDQNSNVSRVEVGPKTYIRQDNERVLFAPMRMVTVPPRHYCTVANPVSRDAQGLVLFDVTGQVRLRHADLEIRLAQDPFPLYPGEVLEKDITPLQVVLPNTALHLKALLDFEDKDGDKVVAGDEWLFEGPGTYIPRKEVEVVEIIQATIIRQNQALRLRARKECWDRDGKERVTGEEWLVTTVGAYLPAVFEEVLDLVDAVILTEKTALHLRARRNFRDFRGVSRRTGEEWLVTVQDTEAHVPDVHEEVLGVVPITTLGPHNYCVILDPVGPDGKNQLGQKRVVKGEKSFFLQPGEQLEQGIQDVYVLSEQQGLLLRALQPLEEGEDEEKVSHQAGDHWLIRGPLEYVPSAKVEVVEERQAIPLDENEGIYVQDVKTGKVRAVIGSTYMLTQDEVLWEKELPPGVEELLNKGQDPLADRGEKDTAKSLQPLAPRNKTRVVSYRVPHNAAVQVYDYREKRARVVFGPELVSLGPEEQFTVLSLSAGRPKRPHARRALCLLLGPDFFTDVITIETADHARLQLQLAYNWHFEVNDRKDPQETAKLFSVPDFVGDACKAIASRVRGAVASVTFDDFHKNSARIIRTAVFGFETSEAKGPDGMALPRPRDQAVFPQNGLVVSSVDVQSVEPVDQRTRDALQRSVQLAIEITTNSQEAAAKHEAQRLEQEARGRLERQKIWNWSMPGPSWSWR

SEQ ID NO: 853317 - protein, 359 aa, Homo sapiens
SFPILGLFVHRHFEVNDRKDPQETAKLFSVPDFVGDACKAIASRVRGAVASVTFDDFHKNSARIIRTAVFGFETSEAKGPDGMALPRPRDQAVFPQNGLVVSSVDVQSVEPVDQRTRDALQRSVQLAIEITTNSQEAAAKHEAQRLEQEARGRLERQKILDQSEAEKARKELLELEALSMAVESTGTAKAEAESRAEAARIEGEGSVLQAKLKAQALAIETEAELQRVQKVRELELVYARAQLELEVSKAQQLAEVEVKKFKQMTEAIGPSTIRDLAVAGPEMQVKLLQSLGLKSTLITDGSTPINLFNTAFGLLGMGPEGQPLGRRVASGPSPGEGISPQSAQAPQAPGDNHVVPVLR

SEQ ID NO: 853318 - protein, 415 aa, Homo sapiens
RLELVPSDKEAKHEAQRLEQEARGRLERQKILDQSEAEKARKELLELEALSMAVESTGTAKAEAESRAEAARIEGEGSVLPKLFSVPDFVGDACKAIASRVRGAVASVTFDDFHKNSARIIRTAVFGFETSEAKGPDGMALPRPRDQAVFPQNGLVVSSVDVQSVEPVDQRTRDALQRSVQLAIEITTNSQEAAAKHEAQRLEQEARGRLERQKILDQSEAEKARKELLELEALSMAVESTGTAKAEAESRAEAARIEGEGSVLQAKLKAQALAIETEAELQRVQKVRELELVYARAQLELEVSKAQQLAEVEVKKFKQMTEAIGPSTIRDLAVAGPEMQVKLLQSLGLKSTLITDGSTPINLFNTAFGLLGMGPEGQPLGRRVASGPSPGEGISPQSAQAPQAPGDNHVVPVLR

SEQ ID NO: 853319 - protein, 674 aa, Homo sapiens
MATEEFIIRIPPYHYIHVLDQNSNVSRVEVGPKTYIRQDNERVLFAPMRMVTVPPRHYCTVANPVSRDAQGLVLFDVTGQVRLRHADLEIRLAQDPFPLYPGEVLEKDITPLQVVLPNTALHLKALLDFEDKDGDKVVAGDEWLFEGPGTYIPRKEVEVVEIIQATIIRQNQALRLRARKECWDRDGKERVTGEEWLVTTVGAYLPAVFEEVLDLVDAVILTEKTALHLRARRNFRDFRGVSRRTGEEWLVTVQDTEAHVPDVHEEVLGVVPITTLGPHNYCVILDPVGPDGKNQLGQKRVVKGEKSFFLQPGEQLEQGIQDVYVLSEQQGLLLRALQPLEEGEDEEKVSHQAGDHWLIRGPLEYVPSAKVEVVEERQAIPLDENEGIYVQDVKTGKVRAVIGSTYMLTQDEVLWEKELPPGVEELLNKGQDPLADRGEKDTAKSLQPLAPRNKTRVVSYRVPHNAAVQVYDYREKRARVVFGPELVSLGPEEQFTVLSLSAGRPKRPHARRALCLLLGPDFFTDVITIETADHARLQLQLAYNWHFEVNDRKDPQETAKLFSVPDFVGDACKAIASRVRGAVASVTFDDFHKNSARIIRTAVFGFETSEAKGPDGMALPRPRDQAVFPQNGLVVSSVDVQSVEPVDQRTRDALQRSVQLAIEITTNSQEAAAK

SEQ ID NO: 853320 - protein, 665 aa, Homo sapiens
MATEEFIIRIPPYHYIHVLDQNSNVSRVEVGPKTYIRQDNERVLFAPMRMVTVPPRHYCTVANPVSRDAQGLVLFDVTGQVRLRHADLEIRLAQDPFPLYPGEVLEKDITPLQVVLPNTALHLKALLDFEDKDGDKVVAGDEWLFEGPGTYIPRKEVEVVEIIQATIIRQNQALRLRARKECWDRDGKERVTGEEWLVTTVGAYLPAVFEEVLDLVDAVILTEKTALHLRARRNFRDFRGVSRRTGEEWLVTVQDTEAHVPDVHEEVLGVVPITTLGPHNYCVILDPVGPDGKNQLGQKRVVKGEKSFFLQPGEQLEQGIQDVYVLSEQQGLLLRALQPLEEGEDEEKVSHQAGDHWLIRGPLEYVPSAKVEVVEERQAIPLDENEGIYVQDVKTGKVRAVIGSTYMLTQDEVLWEKELPPGVEELLNKGQDPLADRGEKDTAKSLQPLAPRNKTRVVSYRVPHNAAVQVYDYREKRARVVFGPELVSLGPEEQFTVLSLSAGRPKRPHARRALCLLLGPDFFTDVITIETADHARLQLQLAYNWHFEVNDRKDPQETAKLFSVPDFVGDACKIGPSTIRDLAVAGPEMQVKLLQSLGLKSTLITDGSTPINLFNTAFGLLGMGPEGQPLGRRVASGPSPGEGISPQSAQAPQAPGDNHVVPVLR

SEQ ID NO: 853321 - protein, 403 aa, Homo sapiens
MATEEFIIRIPPYHYIHVLDQNSNVSRVEVGPKTYIRQDNERVLFAPMRMVTVPPRHYCTVANPVSRDAQGLVLFDVTGQVRLRHADLEIRLAQDPFPLYPGEVLEKDITPLQVVLPNTALHLKALLDFEDKDGDKVVAGDEWLFEGPGTYIPRKEVEVVEIIQATIIRQNQALRLRARKECWDRDGKERVTGEEWLVTTVGAYLPAVFEEVLDLVDAVILTEKTALHLRARRNFRDFRGVSRRTGEEWLVTVQDTEAHVPDVHEEVLGVVPITTLGPHNYCVILDPVGPDGKNQLGQKRVVKGEKSFFLQPGEQLEQGIQDVYVLSEQQGLLLRALQPLEEGEDEEKVSHQAGDHWLIRGPLEYVPSAKVEVVEERQAIPLDENEGIYVQDVKTGKLKRQLS

SEQ ID NO: 853322 - protein, 317 aa, Homo sapiens
MATEEFIIRIPPYHYIHVLDQNSNVSRVEVGPKTYIRQDNERVLFAPMRMVTVPPRHYCTVANPVSRDAQGLVLFDVTGQVRLRHADLEIRLAQDPFPLYPGEVLEKDITPLQVVLPNTALHLKALLDFEDKDGDKVVAGDEWLFEGPGTYIPRKEVEVVEIIQATIIRQNQALRLRARKECWDRDGKERVTGEEWLVTTVGAYLPAVFEEVLDLVDAVILTEKTALHLRARRNFRDFRGVSRRTGEEWLVTVQDTEAHVPDVHEEVLGVVPITTLGPHNYCVILDPVGPDGTHPRSVIRPARSMESNLCTSLLARS

SEQ ID NO: 853323 - protein, 280 aa, Homo sapiens
MATEEFIIRIPPYHYIHVLDQNSNVSRVEVGPKTYIRQDNERVLFAPMRMVTVPPRHYCTVANPVSRDAQGLVLFDVTGQVRLRHADLEIRLAQDPFPLYPGEVLEKDITPLQVVLPNTALHLKALLDFEDKDGDKVVAGDEWLFEGPGTYIPRKEVEVVEIIQATIIRQNQALRLRARKECWDRDGKERVTGEEWLVTTVGAYLPAVFEEVLDLVDAVILTEKTALHLRARRNFRDFRGVSRRTGEEVASGPSPGEGISPQSAQAPQAPGDNHVVPVLR

SEQ ID NO: 853324 - protein, 321 aa, Homo sapiens
SFPILGLFVHRHFEVNDRKDPQETAKLFSVPDFVGDACKAIASRVRGAVASVTFDDFHKNSARIIRTAVFGFETSEAKGPDGMALPRPRDQAVFPQNGLVVSSVDVQSVEPVDQRTRDALQRSVQLAIEITTNSQEAAAKHEAQRLEQEARGRLERQKILDQSEAEKARKELLELEALSMAVESTGTAKAEAESRAEAARIEGEGSVLQAKLKAQALAIETEAELQRVQKVRELELVYARAQLELEVKLLQSLGLKSTLITDGSTPINLFNTAFGLLGMGPEGQPLGRRVASGPSPGEGISPQSAQAPQAPGDNHVVPVLR

SEQ ID NO: 853325 - protein, 106 aa, Homo sapiens
ACKAIASRVRGAVASVTFDDFHKNSARIIRTAVFGFETSEAKGPDGMALPRPRDQAVFPQNGLVVSSVDVQSVEPVDQRTRDALQRSVQLAIEITTNSQEAAAKSK

SEQ ID NO: 853326 - protein, 893 aa, Homo sapiens; identical to SEQ ID NO: 853308

SEQ ID NO: 853327 - protein, 112 aa, Homo sapiens
SSSRCRGIAQRGAQSPPPIFPKGGGGHPLLWTGPEMQVKLLQSLGLKSTLITDGSTPINLFNTAFGLLGMGPEGQPLGRRVASGPSPGEGISPQSAQAPQAPGDNHVVPVLR

SEQ ID NO: 853328 - protein, 893 aa, Homo sapiens; identical to SEQ ID NO: 853308

SEQ ID NO: 853329 - protein, 893 aa, Homo sapiens; identical to SEQ ID NO: 853308

SEQ ID NO: 853330 - protein, 891 aa, Homo sapiens
MATEEFIIRIPPYHYIHVLDQNSNVSRVEVGPKTYIRQDNERVLFAPMRMVTVPPRHYCTVANPVSRDAQGLVLFDVTGQVRLRHADLEIRLAQDPFPLYPGEVLEKDITPLQVVLPNTALHLKALLDFEDKDGDKVVAGDEWLFEGPGTYIPRKEVEVVEIIQATIIRQNQALRLRARKECWDRDGKERVTGEEWLVTTVGAYLPAVFEEVLDLVDAVILTEKTALHLRARRNFRDFRGVSRRTGEEWLVTVQDTEAHVPDVHEEVLGVVPITTLGPHNYCVILDPVGPDGKNQLGQKRVVKGEKSFFLQPGEQLEQGIQDVYVLSEQQGLLLRALQPLEEGEDEEKVSHQAGDHWLIRGPLEYVPSAKVEVVEERQAIPLDENEGIYVQDVKTGKVRAVIGSTYMLTQDEVLWEKELPPGVEELLNKGQDPLADRGEKDTAKSLQPLAPRNKTRVVSYRVPHNAAVQVYDYREKRARVVFGPELVSLGPEEQFTVLSLSAGRPKRPHARRALCLLLGPDFFTDVITIETADHARLQLQLAYNWHFEVNDRKDPQETAKLFSVPDFVGDACKAIASRVRGAVASVTFDDFHKNSARIIRTAVFGFETSEAKGPDGMALPRPRDQAVFPQNGLVVSSVDVQSVEPVDQRTRDALQRSVQLAIEITTNSQEAAAKHEAQRLEQEARGRLERQKILDQSEAEKARKELLELEALSMAVESTGTAKAEAESRAEAARIEGEGSVLQAKLKAQALAIETEAELQRVQKVRELELVYARAQLELEVSKAQQLAEVEVKKFKQMTEAIGPSTIRDLAVAGPEMQVKLLQSLGLKSTLITDGSTPINLFNTAFGLLGMGPEGQPLGRRVASGPSPGEGISPQSAQAPQAPGDNHVALS

SEQ ID NO: 853331 - protein, 841 aa, Homo sapiens
MATEEFIIRIPPYHYIHVLDQNSNVSRVEVGPKTYIRQDNERVLFAPMRMVTVPPRHYCTVANPVSRDAQGLVLFDVTGQVRLRHADLEIRLAQDPFPLYPGEVLEKDITPLQVVLPNTALHLKALLDFEDKDGDKVVAGDEWLFEGPGTYIPRKEVEVVEIIQATIIRQNQALRLRARKECWDRDGKERVTGEEWLVTTVGAYLPAVFEEVLDLVDAVILTEKTALHLRARRNFRDFRGVSRRTGEEWLVTVQDTEAHVPDVHEEVLGVVPITTLGPHNYCVILDPVGPDGKNQLGQKRVVKGEKSFFLQPGEQLEQGIQDVYVLSEQQGLLLRALQPLEEGEDEEKVSHQAGDHWLIRGPLEYVPSAKVEVVEERQAIPLDENEGIYVQDVKTGKVRAVIGSTYMLTQDEVLWEKELPPGVEELLNKGQDPLADRGEKDTAKSLQPLAPRNKTRVVSYRVPHNAAVQVYDYREKRARVVFGPELVSLGPEEQFTVLSLSAGRPKRPHARRALCLLLGPDFFTDVITIETADHARLQLQLAYNWHFEVNDRKDPQETAKLFSVPDFVGDACKAIASRVRGAVASVTFDDFHKNSARIIRTAVFGFETSEAKGPDGMALPRPRDQAVFPQNGLVVSSVDVQSVEPVDQRTRDALQRSVQLAIEITTNSQEAAAKHEAQRLEQEARGRLERQKILDQSEAEKARKELLELEALSMAVESTGTAKAEAESRAEAARIEGEGSVLQAKLKAQALAIETEAELQRVQKVRELELVYARAQLELEVSKAQQLAEVEVKKFKQMTEAIGPSTIRDLAVAGPEMQKTAPVPGPFNASGPYNASGYITT

SEQ ID NO: 853332 - protein, 893 aa, Homo sapiens
MATEEFIIRIPPYHYIHVLDQNSNVSRVEVGPKTYIRQDNERVLFAPMRMVTVPPRHYCTVANPVSRDAQGLVLFDVTGQVRLRHADLEIRLAQDPFPLYPGEVLEKDITPLQVVLPNTALHLKALLDFEDKDGDKVVAGDEWLFEGPGTYIPRKEVEVVEIIQATIIRQNQALRLRARKECWDRDGKERVTGEEWLVTTVGAYLPAVFEEVLDLVDAVILTEKTALHLRARRNFRDFRGVSRRTGEEWLVTVQDTEAHVPDVHEEVLGVVPITTLGPHNYCVILDPVGPDGKNQLGQKRVVKGEKSFFLQPGEQLEQGIQDVYVLSEQQGLLLRALQPLEEGEDEEKVSHQAGDHWLIRGPLEYVPSAKVEVVEERQAIPLDENEGIYVQDVKTGKVRAVIGSTYMLTQDEVLWEKELPPGVEELLNKGQDPLADRGEKDTAKSLQPLAPRNKTRVVSYRVPHNAAVQVYDYREKRARVVFGPELVSLGPEEQFTVLSLSAGRPKRPHARRALCLLLGPDFFTDVITIETADHARLQLQLAYNWHFEVNDRKDPQETAKLFSVPDFVGDACKAIASRVRGAVASVTFDDFHKNSARIIRTAVFGFETSEAKGPDGMALPRPRDQAVFPQNGLVVSSVDVQSVEPVDQRTRDALQRSVQLAIEITTNSQEAAAKHEAQRLEQEARGRLERQKILDQSEAEKARKELLELEALSMAVESTGTAKAEAESRAEAARIEGEGSVLQAKLKAQALAIETSQLKTEELELNKEYGRYAEWGLGVENLGKRRAPVDGPAQAPGPGCVIGPSTIRDLAVAGPEMQVKLLQSLGLKSTLITDGSTPINLFNTAFGLLGMGPEGQPLGRRVASGPSPGEGISPQSAQAPQAPGDNHVVPVLR

SEQ ID NO: 853333 - protein, 718 aa, Homo sapiens
MATEEFIIRIPPYHYIHVLDQNSNVSRVEVGPKTYIRQDNERVLFAPMRMVTVPPRHYCTVANPVSRDAQGLVLFDVTGQVRLRHADLEIRLAQDPFPLYPGEVLEKDITPLQVVLPNTALHLKALLDFEDKDGDKVVAGDEWLFEGPGTYIPRKEVEVVEIIQATIIRQNQALRLRARKECWDRDGKERVTGEEWLVTTVGAYLPAVFEEVLDLVDAVILTEKTALHLRARRNFRDFRGVSRRTGEEWLVTVQDTEAHVPDVHEEVLGVVPITTLGPHNYCVILDPVGPDGKNQLGQKRVVKGEKSFFLQPGEQLEQGIQDVYVLSEQQGLLLRALQPLEEGEDEEKVSHQAGDHWLIRGPLEYVPSAKVEVVEERQAIPLDENEGIYVQDVKTGKVRAVIGSTYMLTQDEVLWEKELPPGVEELLNKGQDPLADRGEKDTAKSLQPLAPRNKTRVVSYRVPHNAAVQVYDYREKRARVVFGPELVSLGPEEQFTVLSLSAGRPKRPHARRALCLLLGPDFFTDVITIETADHARLQLQLAYNWHFEVNDRKDPQETAKLFSVPDFVGDACKAIASRVRGAVASVTFDDFHKNSARIIRTAVFGFETSEAKGPDGMALPRPRDQAVFPQNGLVVSSVDVQSVEPVDQRTRDALQRSVQLAIEITTNSQEAAAKHEAQRLEQEARGRLERQKILDQSEAEKARKELLELEALSWLRWR

SEQ ID NO: 853334 - protein, 561 aa, Homo sapiens
MATEEFIIRIPPYHYIHVLDQNSNVSRVEVGPKTYIRQDNERVLFAPMRMVTVPPRHYCTVANPVSRDAQGLVLFDVTGQVRLRHADLEIRLAQDPFPLYPGEVLEKDITPLQVVLPNTALHLKALLDFEDKDGDKVVAGDEWLFEGPGTYIPRKEVEVVEIIQATIIRQNQALRLRARKECWDRDGKERVTGEEWLVTTVGAYLPAVFEEVLDLVDAVILTEKTALHLRARRNFRDFRGVSRRTGEEWLVTVQDTEAHVPDVHEEVLGVVPITTLGPHNYCVILDPVGPDGKNQLGQKRVVKGEKSFFLQPGEQLEQGIQDVYVLSEQQGLLLRALQPLEEGEDEEKVSHQAGDHWLIRGPLEYVPSAKVEVVEERQAIPLDENEGIYVQDVKTGKVRAVIGSTYMLTQDEVLWEKELPPGVEELLNKGQDPLADRGEKDTAKSLQPLAPRNKTRVVSYRVPHNAAVQVYDYREKRARVVFGPELVSLGPEEQFTVLSLSAGRPKRPHARRALCLLLGPDFFTDVITIETADHARLQLQLAYNWHFEVNDRKDPQETGPA

SEQ ID NO: 853335 - protein, 665 aa, Homo sapiens; identical to SEQ ID NO: 853320

SEQ ID NO: 853336 - protein, 357 aa, Homo sapiens
MATEEFIIRIPPYHYIHVLDQNSNVSRVEVGPKTYIRQDNERVLFAPMRMVTVPPRHYCTVANPVSRDAQGLVLFDVTGQVRLRHADLEIRLAQDPFPLYPGEVLEKDITPLQVVLPNTALHLKALLDFEDKDGDKVVAGDEWLFEGPGTYIPRKEVEVVEIIQATIIRQNQALRLRARKECWDRDGKERVTGEEWLVTTVGAYLPAVFEEVLDLVDAVILTEKTALHLRARRNFRDFRGVSRRTGEEWLVTVQDTEAHVPDVHEEVLGVVPITTLGPHNYCVKLLQSLGLKSTLITDGSTPINLFNTAFGLLGMGPEGQPLGRRVASGPSPGEGISPQSAQAPQAPGDNHVVPVLR

SEQ ID NO: 853337 - protein, 272 aa, Homo sapiens
MVEAGVDLDEGLQPLAPRNKTRVVSYRVPHNAAVQVYDYREKRARVVFGPELVSLGPEEQFTVLSLSAGRPKRPHARRALCLLLGPDFFTDVITIETADHARLQLQLAYNWHFEVNDRKDPQETAKLFSVPDFVGDACKAIASRVRGAVASVTFDDFHKNSARIIRTAVFGFETSEAKGPDGMALPRPRDQAVFPQNGLVVSSVDVQSVEPVDQRTRDALQRSVQLAIEITTNSQEAAAKHEAQRLEQEARGRLERQKIWNWSMPGPSWSWR

SEQ ID NO: 853338 - protein, 42 aa, Homo sapiens
MRMVTVPPRHYCTVANPVSRDAQGLVLFDVTGQVRLRHADLE

SEQ ID NO: 853339 - protein, 729 aa, Homo sapiens
MSGQPPPPPPQQQQQQQQLSPPPPAALAPVSGVVLPAPPAVSAGSSPAGSPGGGAGGEGLGAAAAALLLHPPPPPPPATAAPPPPPPPPPPPASAAAPASGPPAPPGLAAGPGPAGGAPTPALVAGSSAAAPFPHGDSALNEQEKELQRRLKRLYPAVDEQETPLPRSWSPKDKFSYIGLSQNNLRVHYKGHGKTPKDAASVRATHPIPAACGIYYFEVKIVSKGRDGYMGIGLSAQGVNMNRLPGWDKHSYGYHGDDGHSFCSSGTGQPYGPTFTTGDVIGCCVNLINNTCFYTKNGHSLGIAFTDLPPNLYPTVGLQTPGEVVDANFGQHPFVFDIEDYMREWRTKIQAQIDRFPIGDREGEWQTMIQKMVSSYLVHHGYCATAEAFARSTDQTVLEELASIKNRQRIQKLVLAGRMGEAIETTQQLYPSLLERNPNLLFTLKVRQFIEMVNGTDSEVRCLGGRSPKSQDSYPVSPRPFSSPSMSPSHGMNIHNLASGKGSTAHFSGFESCSNGVISNKAHQSYCHSNKHQSSNLNVPELNSINMSRSQQVNNFTSNDVDMETDHYSNGVGETSSNGFLNGSSKHDHEMEDCDTEMEVDSSQLRRQLCGGSQAAIERMIHFGRELQAMSEQLRRDCGKNTANKKMLKDAFSLLAYSDPWNSPVGNQLDPIQREPVCSALNSAILETHNLPKQPPLALAMGQATQCLGLMARSGIGSCAFATVEDYLH

SEQ ID NO: 853340 - protein, 729 aa, Homo sapiens; identical to SEQ ID NO: 853339

SEQ ID NO: 853341 - protein, 310 aa, Homo sapiens
MSGQPPPPPPQQQQQQQQLSPPPPAALAPVSGVVLPAPPAVSAGSSPAGSPGGGAGGEGLGAAAAALLLHPPPPPPPATAAPPPPPPPPPPPASAAAPASGPPAPPGLAAGPGPAGGAPTPALVAGSSAAAPFPHGDSALNEQEKELQRRLKRLYPAVDEQETPLPRSWSPKDKFSYIGLSQNNLRVHYKGHGKTPKDAASVRATHPIPAACGIYYFEVSVNMNRLPGWDKHSYGYHGDDGHSFCSSGTGQPYGPTFTTGDVIGCCVNLINNTCFYTKNGHSLAKFVSYCGASNTRRSGRCQFWATSFRV

SEQ ID NO: 853342 - protein, 436 aa, Homo sapiens
MPLFFFFLGIAFTDLPPNLYPTVGLQTPGEVVDANFGQHPFVFDIEDYMREWRTKIQAQIDRFPIGDREGEWQTMIQKMVSSYLVHHGYCATAEAFARSTDQTVLEELASIKNRQRIQKLVLAGRMGEAIETTQQLYPSLLERNPNLLFTLKVRQFIEMVNGTDSEVRCLGGRSPKSQDSYPVSPRPFSSPSMSPSHGMNIHNLASGKGSTAHFSGFESCSNGVISNKAHQSYCHSNKHQSSNLNVPELNSINMSRSQQVNNFTSNDVDMETDHYSNGVGETSSNGFLNGSSKHDHEMEDCDTEMEVDSSQLRRQLCGGSQAAIERMIHFGRELQAMSEQLRRDCGKNTANKKMLKDAFSLLAYSDPWNSPVGNQLDPIQREPVCSALNSAILETHNLPKQPPLALAMGQATQCLGLMARSGIGSCAFATVEDYLH

SEQ ID NO: 853343 - protein, 658 aa, Homo sapiens
MSGQPPPPPPQQQQQQQQLSPPPPAALAPVSGVVLPAPPAVSAGSSPAGSPGGGAGGEGLGAAAAALLLHPPPPPPPATAAPPPPPPPPPPPASAAAPASGPPAPPGLAAGPGPAGGAPTPALVAGSSAAAPFPHGDSALNEQEKELQRRLKRLYPAVDEQETPLPRSWSPKDKFSYIGLSQNNLRVHYKGHGKTPKDAASVRATHPIPAACGIYYFEVKIVSKGRDGYMGIGLSAQGVNMNRLPGWDKHSYGYHGDDGHSFCSSGTGQPYGPTFTTGDVIGCCVNLINNTCFYTKNGHSLGIAFTDLPPNLYPTVGLQTPGEVVDANFGQHPFVFDIEDYMREWRTKIQAQIDRFPIGDREGEWQTMIQKMVSSYLVHHGYCATAEAFARSTDQTVLEELASIKNRQRIQKLVLAGRMGEAIETTQQLYPSLLERNPNLLFTLKVRQFIEMVNGTDSEVRCLGGRSPKSQDSYPVSPRPFSSPSMSPSHGMNIHNLASGKGSTAHFSGFESCSNGVISNKAHQSYCHSNKHQSSNLNVPELNSINMSRSQQVNNFTSNDVDMETDHYSNGVGETSSNGFLNGSSKHDHEMEDCDTEMEVDSSQLRRQLCGGSQAAIERMIHFGRELQAMSEQLRRDCGKNTANKKMLKVNIFFLEKL

SEQ ID NO: 853344 - protein, 601 aa, Homo sapiens
MSGQPPPPPPQQQQQQQQLSPPPPAALAPVSGVVLPAPPAVSAGSSPAGSPGGGAGGEGLGAAAAALLLHPPPPPPPATAAPPPPPPPPPPPASAAAPASGPPAPPGLAAGPGPAGGAPTPALVAGSSAAAPFPHGDSALNEQEKELQRRLKRLYPAVDEQETPLPRSWSPKDKFSYIGLSQNNLRVHYKGHGKTPKDAASVRATHPIPAACGIYYFEVKIVSKGRDGYMGIGLSAQGVNMNRLPGWDKHSYGYHGDDGHSFCSSGTGQPYGPTFTTGDVIGCCVNLINNTCFYTKNGHSLGIAFTDLPPNLYPTVGLQTPGEVVDANFGQHPFVFDIEDYMREWRTKIQAQIDRFPIGDREGEWQTMIQKMVSSYLVHHGYCATAEAFARSTDQTVLEELASIKNRQRIQKLVLAGRMGEAIETTQQLYPSLLERNPNLLFTLKVRQFIEMVNGTDSEVRCLGGRSPKSQDSYPVSPRPFSSPSMSPSHGMNIHNLASGKGSTAHFSGFESCSNGVISNKAHQSYCHSNKHQSSNLNVPELNSINMSRSQQVNNFTSNDVDMETDHYSNGVGETSSNGFLNGSSKHDHEMEDCDTEMGLQ

SEQ ID NO: 853345 - protein, 329 aa, Homo sapiens
MSGQPPPPPPQQQQQQQQLSPPPPAALAPVSGVVLPAPPAVSAGSSPAGSPGGGAGGEGLGAAAAALLLHPPPPPPPATAAPPPPPPPPPPPASAAAPASGPPAPPGLAAGPGPAGGAPTPALVAGSSAAAPFPHGDSALNEQEKELQRRLKRLYPAVDEQETPLPRSWSPKDKFSYIGLSQNNLRVHYKGHGKTPKDAASVRATHPIPAACGIYYFEVKIVSKGRDGYMGIGLSAQGVNMNRLPGWDKHSYGYHGDDGHSFCSSGTGQPYGPTFTTGDVIGCCVNLINNTCFYTKNGHSLVASLTYRNCILLWLNTRRVAMPFGTPTS

SEQ ID NO: 853346 - protein, 328 aa, Homo sapiens
MSGQPPPPPPQQQQQQQQLSPPPPAALAPVSGVVLPAPPAVSAGSSPAGSPGGGAGGEGLGAAAAALLLHPPPPPPPATAAPPPPPPPPPPPASAAAPASGPPAPPGLAAGPGPAGGAPTPALVAGSSAAAPFPHGDSALNEQEKELQRRLKRLYPAVDEQETPLPRSWSPKDKFSYIGLSQNNLRVHYKGHGKTPKDAASVRATHPIPAACGIYYFEVKIVSKGRDGYMGIGLSAQGVNMNRLPGWDKHSYGYHGDDGHSFCSSGTGQPYGPTFTTGDVIGCCVNLINNTCFYTKNGHSLAKFVSYCGASNTRRSGRCQFWATSFRV

SEQ ID NO: 853347 - protein, 312 aa, Homo sapiens
MSGQPPPPPPQQQQQQQQLSPPPPAALAPVSGVVLPAPPAVSAGSSPAGSPGGGAGGEGLGAAAAALLLHPPPPPPPATAAPPPPPPPPPPPASAAAPASGPPAPPGLAAGPGPAGGAPTPALVAGSSAAAPFPHGDSALNEQEKELQRRLKRLYPAVDEQETPLPRSWSPKDKFSYIGLSQNNLRVHYKGHGKTPKDAASVRATHPIPAACGIYYFEVKIVSKGRDGYMGIGLSAQGVNMNRLPGWDKHSYGYHGDDGHSFCSSGTGQPYGPTFTTGDVIGCCVNLINNTCFYTKNGHSLGIAFTDLPLSC

SEQ ID NO: 853348 - protein, 167 aa, Homo sapiens [sequence omitted]

SEQ ID NO: 853349 - protein, 558 aa, Homo sapiens
MSGQPPPPPPQQQQQQQQLSPPPPAALAPVSGVVLPAPPAVSAGSSPAGSPGGGAGGEGLGAAAAALLLHPPPPPPPATAAPPPPPPPPPPPASAAAPASGPPAPPGLAAGPGPAGGAPTPALVAGSSAAAPFPHGDSALNEQEKELQRRLKRLYPAVDEQETPLPRSWSPKDKFSYIGLSQNNLRVHYKGHGKTPKDAASVRATHPIPAACGIYYFEVKIVSKGRDGYMGIGLSAQGVNMNRLPGWDKHSYGYHGDDGHSFCSSGTGQPYGPTFTTGDVIGCCVNLINNTCFYTKNGHSLGIAFTDLPPNLYPTVGLQTPGEVVDANFGQHPFVFDIEDYMREWRTKIQAQIDRFPIGDREGEWQTMIQKMVSSYLVHHGYCATAEAFARSTDQTVLEELASIKNRQRIQKLVLAGRMGEAIETTQQLYPSLLERNPNLLFTLKVRQFIEMVNGTDSEVRCLGGRSPKSQDSYPVSPRPFSSPSMSPSHGMNIHNLASGKGSTAHFSGFESCSNGVISNKAHQSYCHSNKHQSSNLNVPELNSINMSRSQQVNNFTR

SEQ ID NO: 853350 - protein, 69 aa, Homo sapiens
LMKYAILPNLYPTVGLQTPGEVVDANFGQHPFVFDIEDYMREWRTKIQAQIDRFPIGDREGEWQTMIQK

SEQ ID NO: 853351 - protein, 69 aa, Homo sapiens
RPQRLSCCWSALGSAPARPPVHTRGSRPGRPLGGDCGCAAGKGPGRSRRRDWGAAPPSLQTVMVMSGSV

SEQ ID NO: 853352 - protein, 129 aa, Homo sapiens
MQRADSEQPSKRPRCDDSPRTPSNTPSAEADWSPGLELHPDYKTWGPEQVCSFLRRGGFEEPVLLKNIRENEITGALLPCLDESRFENLGVSSLGERKKLLSYIQRLVQIHVDTMKGGVSSRMSSSRTG

SEQ ID NO: 853353 - protein, 626 aa, Homo sapiens
MQRADSEQPSKRPRCDDSPRTPSNTPSAEADWSPGLELHPDYKTWGPEQVCSFLRRGGFEEPVLLKNIRENEITGALLPCLDESRFENLGVSSLGERKKLLSYIQRLVQIHVDTMKVINDPIHGHIELHPLLVRIIDTPQFQRLRYIKQLGGGYYVFPGASHNRFEHSLGVGYLAGCLVHALGEKQPELQISERDVLCVQIAGLCHDLGHGPFSHMFDGRFIPLARPEVKWTHEQGSVMMFEHLINSNGIKPVMEQYGLIPEEDICFIKEQIVGPLESPVEDSLWPYKGRPENKSFLYEIVSNKRNGIDVDKWDYFARDCHHLGIQNNFDYKRFIKFARVCEVDNELRICARDKEVGNLYDMFHTRNSLHRRAYQHKVGNIIDTMITDAFLKADDYIEITGAGGKKYRISTAIDDMEAYTKLTDNIFLEILYSTDPKLKDAREILKQIEYRNLFKYVGETQPTGQIKIKREDYESLPKEVASAKPKVLLDVKLKAEDFIVDVINMDYGMQEKNPIDHVSFYCKTAPNRAIRITKNQVSQLLPEKFAEQLIRVYCKKVDRKSLYAARQYFVQWCADRNFTKPQDGDVIAPLITPQKKEWNDSTSVQNPTRLREASKSRVQLFKDDPM

SEQ ID NO: 853354 - protein, 411 aa, Homo sapiens
MFDGRFIPLARPEVKWTHEQGSVMMFEHLINSNGIKPVMEQYGLIPEEDICFIKEQIVGPLESPVEDSLWPYKGRPENKSFLYEIVSNKRNGIDVDKWDYFARDCHHLGIQNNFDYKRFIKFARVCEVDNELRICARDKEVGNLYDMFHTRNSLHRRAYQHKVGNIIDTMITDAFLKADDYIEITGAGGKKYRISTAIDDMEAYTKLTDNIFLEILYSTDPKLKDAREILKQIEYRNLFKYVGETQPTGQIKIKREDYESLPKEVASAKPKVLLDVKLKAEDFIVDVINMDYGMQEKNPIDHVSFYCKTAPNRAIRITKNQVSQLLPEKFAEQLIRVYCKKVDRKSLYAARQYFVQWCADRNFTKPQDGDVIAPLITPQKKEWNDSTSVQNPTRLREASKSRVQLFKDDPM

SEQ ID NO: 853355 - protein, 551 aa, Homo sapiens
NQLGTVLMSLVLKILEYSLGERKKLLSYIQRLVQIHVDTMKVINDPIHGHIELHPLLVRIIDTPQFQRLRYIKQLGGGYYVFPGASHNRFEHSLGVGYLAGCLVHALGEKQPELQISERDVLCVQIAGLCHDLGHGPFSHMFDGRFIPLARPEVKWTHEQGSVMMFEHLINSNGIKPVMEQYGLIPEEDICFIKEQIVGPLESPVEDSLWPYKGRPENKSFLYEIVSNKRNGIDVDKWDYFARDCHHLGIQNNFDYKRFIKFARVCEVDNELRICARDKEVGNLYDMFHTRNSLHRRAYQHKVGNIIDTMITDAFLKADDYIEITGAGGKKYRISTAIDDMEAYTKLTDNIFLEILYSTDPKLKDAREILKQIEYRNLFKYVGETQPTGQIKIKREDYESLPKEVASAKPKVLLDVKLKAEDFIVDVINMDYGMQEKNPIDHVSFYCKTAPNRAIRITKNQVSQLLPEKFAEQLIRVYCKKVDRKSLYAARQYFVQWCADRNFTKPQDGDVIAPLITPQKKEWNDSTSVQNPTRLREASKSRVQLFKDDPM

SEQ ID NO: 853356 - protein, 265 aa, Homo sapiens [sequence omitted]

SEQ ID NO: 853357 - protein, 586 aa, Homo sapiens
MQRADSEQPSKRPRCDDSPRTPSNTPSAEADWSPGLELHPDYKTWGPEQVCSFLRRGGFEEPVLLKNIRENEITGALLPCLDESRFENLGVSSLGERKKLLSYIQRLVQIHVDTMKVINDPIHGHIELHPLLVRIIDTPQFQRLRYIKQLGGGYYVFPGASHNRFEHSLGVGYLAGCLVHALGEKQPELQISERDVLCVQIAGLCHDLGHGPFSHMFDGRFIPLARPEVKWTHEQGSVMMFEHLINSNGIKPVMEQYGLIPEEDICFIKEQIVGPLESPVEDSLWPYKGRPENKSFLYEIVSNKRNGIDVDKWDYFARDCHHLGIQNNFDYKRFIKFARVCEVDNELRICARDKEVGNLYDMFHTRNSLHRRAYQHKVGNIIDTMITDAFLKADDYIEITGAGGKKYRISTAIDDMEAYTKLTDNIFLEILYSTDPKLKDAREILKQIEYRNLFKYVGETQPTGQIKIKREDYESLPKEVASAKPKVLLDVKLKAEDFIVDVINMDYGMQEKNPIDHVSFYCKTAPNRAIRITKNQVSQLLPEKFAEQLIRVYCKKVDRKSLYAARQYFVQWCADRNFTKPQMAML

SEQ ID NO: 853358 - protein, 478 aa, Homo sapiens [sequence omitted]

SEQ ID NO: 853359 - protein, 170 aa, Homo sapiens
MQRADSEQPSKRPRCDDSPRTPSNTPSAEADWSPGLELHPDYKTWGPEQVCSFLRRGGFEEPVLLKNIRENEITGALLPCLDESRFENLGVSSLGERKKLLSYIQRLVQIHVDTMKVINDPIHGHIELHPLLVRIIDTPQFQRLRYIKQLGGGYYVFPGASHNRFEHSLG

SEQ ID NO: 853360 - protein, 131 aa, Homo sapiens
MQRADSEQPSKRPRCDDSPRTPSNTPSAEADWSPGLELHPDYKTWGPEQVCSFLRRGGFEEPVLLKNIRENEITGALLPCLDESRFENLGVSSLGERKKLLSYIQRLVQIHVDTMKVRGSEFVMFFEYKVI

SEQ ID NO: 853361 - protein, 626 aa, Homo sapiens; identical to SEQ ID NO: 853353

SEQ ID NO: 853362 - protein, 626 aa, Homo sapiens; identical to SEQ ID NO: 853353

SEQ ID NO: 853363 - protein, 642 aa, Homo sapiens
MQRADSEQPSKRPRCDDSPRTPSNTPSAEADWSPGLELHPDYKTWGPEQVCSFLRRGGFEEPVLLKNIRENEITGALLPCLDESRFENLGVSSLGERKKLLSYIQRLVQIHVDTMKVINDPIHGHIELHPLLVRIIDTPQFQRLRYIKQLGGGYYVFPGASHNRFEHSLGVGYLAGCLVHALGEKQPELQISERDVLCVQIAGLCHDLGHGPFSHMFDGRFIPLARPEVKWTHEQGSVMMFEHLINSNGIKPVMEQYGLIPEEDICFIKEQIVGPLESPVEDSLIWCLILKLPVGFLAFQWPYKGRPENKSFLYEIVSNKRNGIDVDKWDYFARDCHHLGIQNNFDYKRFIKFARVCEVDNELRICARDKEVGNLYDMFHTRNSLHRRAYQHKVGNIIDTMITDAFLKADDYIEITGAGGKKYRISTAIDDMEAYTKLTDNIFLEILYSTDPKLKDAREILKQIEYRNLFKYVGETQPTGQIKIKREDYESLPKEVASAKPKVLLDVKLKAEDFIVDVINMDYGMQEKNPIDHVSFYCKTAPNRAIRITKNQVSQLLPEKFAEQLIRVYCKKVDRKSLYAARQYFVQWCADRNFTKPQDGDVIAPLITPQKKEWNDSTSVQNPTRLREASKSRVQLFKDDPM

SEQ ID NO: 853364 - protein, 411 aa, Homo sapiens; identical to SEQ ID NO: 853354

SEQ ID NO: 853365 - protein, 589 aa, Homo sapiens
MQRADSEQPSKRPRCDDSPRTPSNTPSAEADWSPGLELHPDYKTWGPEQVCSFLRRGGFEEPVLLKNIRENEITGALLPCLDESRFENLGVSSLGERKKLLSYIQRLVQIHVDTMKVINDPIHGHIELHPLLVRIIDTPQFQRLRYIKQLGGGYYVFPGASHNRFEHSLGVGYLAGCLVHALGEKQPELQISERDVLCVQIAGLCHDLGHGPFSHMFDGRFIPLARPEVKWTHEQGSVMMFEHLINSNGIKPVMEQYGLIPEEDICFIKEQIVGPLESPVEDSLWPYKGRPENKSFLYEIVSNKRNGIDVDKWDYFARDCHHLGIQNNFDYKRFIKFARVCEVDNELRICARDKEVGNLYDMFHTRNSLHRRAYQHKVGNIIDTMITDAFLKADDYIEITGAGGKKYRISTAIDDMEAYTKLTDNIFLEILYSTDPKLKDAREILKQIEYRNLFKYVGETQPTGQIKIKREDYESLPKEVASAKPKVLLDVKLKAEDFIVDVINMDYGMQEKNPIDHVSFYCKTAPNRAIRITKNQVSQLLPEKFAEQLIRVYCKKVDRKSLYAARQYFVQWCADRNFTKPQSPTRASH

SEQ ID NO: 853366 - protein, 598 aa, Homo sapiens
MQRADSEQPSKRPRCDDSPRTPSNTPSAEADWSPGLELHPDYKTWGPEQVCSFLRRGGFEEPVLLKNIRENEITGALLPCLDESRFENLGVSSLGERKKLLSYIQRLVQIHVDTMKVINDPIHGHIELHPLLVRIIDTPQFQRLRYIKQLGGGYYVFPGASHNRFEHSLGVGYLAGCLVHALGEKQPELQISERDVLCVQIAGLCHDLGHGPFSHMFDGRFIPLARPEVKWTHEQGSVMMFEHLINSNGIKPVMEQYGLIPEEDICFIKEQIVGPLESPVEDSLWPYKGRPENKSFLYEIVSNKRNGIDVDKWDYFARDCHHLGIQNNFDYKRFIKFARVCEVDNELRICARDKEVGNLYDMFHTRNSLHRRAYQHKVGNIIDTMITDAFLKADDYIEITGAGGKKYRISTAIDDMEAYTKLTDNIFLEILYSTDPKLKDAREILKQIEYRNLFKYVGETQPTGQIKIKREDYESLPKEVASAKPKVLLDVKLKAEDFIVDVINMDYGMQEKNPIDHVSFYCKTAPNRAIRITKNQVSQLLPEKFAEQLIRVYCKKVDRKSLYAARQYFVQWCADRNFTKPQVGGLLLTNFAQFFIFK

SEQ ID NO: 853367 - protein, 324 aa, Homo sapiens
MQRADSEQPSKRPRCDDSPRTPSNTPSAEADWSPGLELHPDYKTWGPEQVCSFLRRGGFEEPVLLKNIRENEITGALLPCLDESRFENLGVSSLGERKKLLSYIQRLVQIHVDTMKVINDPIHGHIELHPLLVRIIDTPQFQRLRYIKQLGGGYYVFPGASHNRFEHSLGVGYLAGCLVHALGEKQPELQISERDVLCVQIAGLCHDLGHGPFSHMFDGRFIPLARPEVKWTHEQGSVMMFEHLINSNGIKPVMEQYGLIPEEDICFIKEQIVGPLESPVEDSLWPYKGRPENKSFLYEIVSNKRNGIDVDKWDYFASLPVSVK

SEQ ID NO: 853368 - protein, 1907 aa, Homo sapiens
MEDRRAEKSCEQACESLKRQDYEMALKHCTEALLSLGQYSMADFTGPCPLEIERIKIESLLYRIASFLQLKNYVQADEDCRHVLGEGLAKGEDAFRAVLCCMQLKGKLQPVSTILAKSLTGESLNGMVTKDLTRLKTLLSETGFLEQGICRYGAQCTSAHSQEELAEWQKRYASRLIKLKQQNENKQLSGSYMETLIEKWMNSLSPEKVLSECIEGVKVEHNPDLSVTVSTKKSHQTWTFALTCKPARMLYRVALLYDAHRPHFSIIAISAGDSTTQVSQEVPENCQEWIGGKMAQNGLDHYVYKVGIAFNTEIFGTFRQTIVFDFGLEPVLMQRVMIDAASTEDLEYLMHAKQQLVTTAKRWDSSSKTIIDFEPNETTDLEKSLLIRYQIPLSADQLFTQSVLDKSLTKSNYQSRLHDLLYIEEIAQYKEISKFNLKVQLQILASFMLTGVSGGAKYAQNGQLFGRFKLTETLSEDTLAGRLVMTKVNAVYLLPVPKQKLVQTQGTKEKVYEATIEEKTKEYIFLRLSRECCEELNLRPDCDTQVELQFQLNRLPLCEMHYALDRIKDNGVLFPDISMTPTIPWSPNRQWDEQLDPRLNAKQKEAVLAITTPLAIQLPPVLIIGPYGTGKTFTLAQAVKHILQQQETRILICTHSNSAADLYIKDYLHPYVEAGNPQARPLRVYFRNRWVKTVHPVVHQYCLISSAHSTFQMPQKEDILKHRVVVVTLNTSQYLCQLDLEPGFFTHILLDEAAQAMECETIMPLALATQNTRIVLAGDHMQLSPFVYSEFARERNLHVSLLDRLYEHYPAEFPCRILLCENYRSHEAIINYTSELFYEGKLMASGKQPAHKDFYPLTFFTARGEDVQEKNSTAFYNNAEVFEVVERVEELRRKWPVAWGKLDDGSIGVVTPYADQVFRIRAELRKKRLSDVNVERVLNVQGKQFRVLFLSTVRTRHTCKHKQTPIKKKEQLLEDSTEDLDYGFLSNYKLLNTAITRAQSLVAVVGDPIALCSIGRCRKFWERFIALCHENSSLHGITFEQIKAQLEALELKKTYVLNPLAPEFIPRALRLQHSGSTNKQQQSPPKGKSLHHTQNDHFQNDGIVQPNPSVLIGNPIRAYTPPPPLGPHPNLGKSPSPVQRIDPHTGTSILYVPAVYGGNVVMSVPLPVPWTGYQGRFAVDPRIITHQAAMAYNMNLLQTHGRGSPIPYGLGHHPPVTIGQPQNQHQEKDQHEQNRNGKSDTNNSGPEINKIRTPEKKPTEPKQVDLESNPQNRSPESRPSVVYPSTKFPRKDNLNPRHINLPLPAPHAQYAIPNRHFHPLPQLPRPPFPIPQQHTLLNQQQNNLPEQPNQIPPQPNQVVQQQSQLNQQPQQPPPQLSPAYQAGPNNAFFNSAVAHRPQSPPAEAVIPEQQPPPMLQEGHSPLRAIAQPGPILPSHLNSFIDENPSGLPIGEALDRIHGSVALETLRQQQARFQQWSEHHAFLSQGSVPYPHHHHPHLQHLPQPPLGLHQPPVRADWKLTSSAEDEVETTYSRFQDLIRELSHRDQSETRELAEMPPPQSRLLQYRQVQSRSPPAVPSPPSSTDHSSHFSNFNDNSRDIEVASNPAFPQRLPPQIFNSPFSLPSEHLAPPPLKYLAPDGAWTFANLQQNHLMGPGFPYGLPPLPHRPPQNPFVQIQNHQHAIGQEPFHPLSSRTVSSSSLPSLEEYEPRGPGRPLYQRRISSSSVQPCSEEVSTPQDSLAQCKELQDHSNQSSFNFSSPESWVNTTSSTPYQNIPCNGSSRTAQPRELIAPPKTVKPPEDQLKSENLEVSSSFNYSVLQHLGQFPPLMPNKQIAESANSSSPQSSAGGKPAMSYASALRAPPKPRPPPEQAKKSSDPLSLFQELSFPSRENVLISVCISRIKVVGLHL

SEQ ID NO: 853369 - protein, 1714 aa, Homo sapiens
MEDRRAEKSCEQACESLKRQDYEMALKHCTEALLSLGQYSMADFTGPCPLEIERIKIESLLYRIASFLQLKNYVQADEDCRHVLGEGLAKGEDAFRAVLCCMQLKGKLQPVSTILAKSLTGESLNGMVTKDLTRLKTLLSETGFLEQGICRYGAQCTSAHSQEELAEWQKRYASRLIKLKQQNENKQLSGSYMETLIEKWMNSLSPEKVLSECIEGVKVEHNPDLSVTVSTKKSHQTWTFALTCKPARMLYRVALLYDAHRPHFSIIAISAGDSTTQVSQEVPENCQEWIGGKMAQNGLDHYVYKVGIAFNTEIFGTFRQTIVFDFGLEPVLMQRVMIDAASTEDLEYLMHAKQQLVTTAKRWDSSSKTIIDFEPNETTDLEKSLLIRYQIPLSADQLFTQSVLDKSLTKSNYQSRLHDLLYIEEIAQYKEISKFNLKVQLQILASFMLTGVSGGAKYAQNGQLFGRFKLTETLSEDTLAGRLVMTKVNAVYLLPVPKQKLVQTQGTKEKVYEATIEEKTKEYIFLRLSRECCEELNLRPDCDTQVELQFQLNRLPLCEMHYALDRIKDNGVLFPDISMTPTIPWSPNRQWDEQLDPRLNAKQKEAVLAITTPLAIQLPPVLIIGPYGTGKTFTLAQAVKHILQQQETRILICTHSNSAADLYIKDYLHPYVEAGNPQARPLRVYFRNRWVKTVHPVVHQYCLISSAHSTFQMPQKEDILKHRVVVVTLNTSQYLCQLDLEPGFFTHILLDEAAQAMECETIMPLALATQNTRIVLAGDHMQLSPFVYSEFARERNLHVSLLDRLYEHYPAEFPCRILLCENYRSHEAIINYTSELFYEGKLMASGKQPAHKDFYPLTFFTARGEDVQEKNSTAFYNNAEVFEVVERVEELRRKWPVAWGKLDDGSIGVVTPYADQVFRIRAELRKKRLSDVNVERVLNVQGKQFRVLFLSTVRTRHTCKHKQTPIKKKEQLLEDSTEDLDYGFLSNYKLLNTAITRAQSLVAVVGDPIALCSIGRCRKFWERFIALCHENSSLHGITFEQIKAQLEALELKKTYVLNPLAPEFIPRALRLQHSGSTNKQQQSPPKGKSLHHTQNDHFQNDGIVQPNPSVLIGNPIRAYTPPPPLGPHPNLGKSPSPVQRIDPHTGTSILYVPAVYGGNVVMSVPLPVPWTGYQGRFAVDPRIITHQAAMAYNMNLLQTHGRGSPIPYGLGHHPPVTIGQPQNQHQEKDQHEQNRNGKSDTNNSGPEINKIRTPEKKPTEPKQVDLESNPQNRSPESRPSVVYPSTKFPRKDNLNPRHINLPLPAPHAQYAIPNRHFHPLPQLPRPPFPIPQQHTLLNQQQNNLPEQPNQIPPQPNQVVQQQSQLNQQPQQPPPQLSPAYQAGPNNAFFNSAVAHRPQSPPAEAVIPEQQPPPMLQEGHSPLRAIAQPGPILPSHLNSFIDENPSGLPIGEALDRIHGSVALETLRQQQARFQQWSEHHAFLSQGSVPYPHHHHPHLQHLPQPPLGLHQPPVRADWKLTSSAEDEVETTYSRFQDLIRELSHRDQSETRELAEMPPPQSRLLQYRQVQSRSPPAVPSPPSSTDHSSHFSNFNDNSRDIEVASNPAFPQRLPPQIFNSPFSLPSEHLAPPPLKYLAPDGAWTFANLQQNHLMGPGFPYGLPPLPHRPPQNPFVQIQNHQHAIGQEPFHPLSSRTVSSSSLPSLEEVNVFLFSFCY

SEQ ID NO: 853370 - protein, 466 aa, Homo sapiens
MEDRRAEKSCEQACESLKRQDYEMALKHCTEALLSLGQYSMADFTGPCPLEIERIKIESLLYRIASFLQLKNYVQADEDCRHVLGEGLAKGEDAFRAVLCCMQLKGKLQPVSTILAKSLTGESLNGMVTKDLTRLKTLLSETGFLEQGICRYGAQCTSAHSQEELAEWQKRYASRLIKLKQQNENKQLSGSYMETLIEKWMNSLSPEKVLSECIEGVKVEHNPDLSVTVSTKKSHQTWTFALTCKPARMLYRVALLYDAHRPHFSIIAISAGDSTTQVSQEVPENCQEWIGGKMAQNGLDHYVYKVGIAFNTEIFGTFRQTIVFDFGLEPVLMQRVMIDAASTEDLEYLMHAKQQLVTTAKRWDSSSKTIIDFEPNETTDLEKSLLIRYQIPLSADQLFTQSVLDKSLTKSNYQSRLHDLLYIEEIAQYKEISKDGILPCCPGKIWNSWAQVIHPLWPPKVLGLQA

SEQ ID NO: 853371 - protein, 1942 aa, Homo sapiens
MEDRRAEKSCEQACESLKRQDYEMALKHCTEALLSLGQYSMADFTGPCPLEIERIKIESLLYRIASFLQLKNYVQADEDCRHVLGEGLAKGEDAFRAVLCCMQLKGKLQPVSTILAKSLTGESLNGMVTKDLTRLKTLLSETETATSNALSGYHVEDLDEGSCNGWHFRPPPRGITSSEEYTLCKRFLEQGICRYGAQCTSAHSQEELAEWQKRYASRLIKLKQQNENKQLSGSYMETLIEKWMNSLSPEKVLSECIEGVKVEHNPDLSVTVSTKKSHQTWTFALTCKPARMLYRVALLYDAHRPHFSIIAISAGDSTTQVSQEVPENCQEWIGGKMAQNGLDHYVYKVGIAFNTEIFGTFRQTIVFDFGLEPVLMQRVMIDAASTEDLEYLMHAKQQLVTTAKRWDSSSKTIIDFEPNETTDLEKSLLIRYQIPLSADQLFTQSVLDKSLTKSNYQSRLHDLLYIEEIAQYKEISKFNLKVQLQILASFMLTGVSGGAKYAQNGQLFGRFKLTETLSEDTLAGRLVMTKVNAVYLLPVPKQKLVQTQGTKEKVYEATIEEKTKEYIFLRLSRECCEELNLRPDCDTQVELQFQLNRLPLCEMHYALDRIKDNGVLFPDISMTPTIPWSPNRQWDEQLDPRLNAKQKEAVLAITTPLAIQLPPVLIIGPYGTGKTFTLAQAVKHILQQQETRILICTHSNSAADLYIKDYLHPYVEAGNPQARPLRVYFRNRWVKTVHPVVHQYCLISSAHSTFQMPQKEDILKHRVVVVTLNTSQYLCQLDLEPGFFTHILLDEAAQAMECETIMPLALATQNTRIVLAGDHMQLSPFVYSEFARERNLHVSLLDRLYEHYPAEFPCRILLCENYRSHEAIINYTSELFYEGKLMASGKQPAHKDFYPLTFFTARGEDVQEKNSTAFYNNAEVFEVVERVEELRRKWPVAWGKLDDGSIGVVTPYADQVFRIRAELRKKRLSDVNVERVLNVQGKQFRVLFLSTVRTRHTCKHKQTPIKKKEQLLEDSTEDLDYGFLSNYKLLNTAITRAQSLVAVVGDPIALCSIGRCRKFWERFIALCHENSSLHGITFEQIKAQLEALELKKTYVLNPLAPEFIPRALRLQHSGSTNKQQQSPPKGKSLHHTQNDHFQNDGIVQPNPSVLIGNPIRAYTPPPPLGPHPNLGKSPSPVQRIDPHTGTSILYVPAVYGGNVVMSVPLPVPWTGYQGRFAVDPRIITHQAAMAYNMNLLQTHGRGSPIPYGLGHHPPVTIGQPQNQHQEKDQHEQNRNGKSDTNNSGPEINKIRTPEKKPTEPKQVDLESNPQNRSPESRPSVVYPSTKFPRKDNLNPRHINLPLPAPHAQYAIPNRHFHPLPQLPRPPFPIPQQHTLLNQQQNNLPEQPNQIPPQPNQVVQQQSQLNQQPQQPPPQLSPAYQAGPNNAFFNSAVAHRPQSPPAEAVIPEQQPPPMLQEGHSPLRAIAQPGPILPSHLNSFIDENPSGLPIGEALDRIHGSVALETLRQQQARFQQWSEHHAFLSQGSVPYPHHHHPHLQHLPQPPLGLHQPPVRADWKLTSSAEDEVETTYSRFQDLIRELSHRDQSETRELAEMPPPQSRLLQYRQVQSRSPPAVPSPPSSTDHSSHFSNFNDNSRDIEVASNPAFPQRLPPQIFNSPFSLPSEHLAPPPLKYLAPDGAWTFANLQQNHLMGPGFPYGLPPLPHRPPQNPFVQIQNHQHAIGQEPFHPLSSRTVSSSSLPSLEEYEPRGPGRPLYQRRISSSSVQPCSEEVSTPQDSLAQCKELQDHSNQSSFNFSSPESWVNTTSSTPYQNIPCNGSSRTAQPRELIAPPKTVKPPEDQLKSENLEVSSSFNYSVLQHLGQFPPLMPNKQIAESANSSSPQSSAGGKPAMSYASALRAPPKPRPPPEQAKKSSDPLSLFQELSLGSSSGSNGFYSYFK

SEQ ID NO: 853372 - protein, 1942 aa, Homo sapiens; identical to SEQ ID NO: 853371

SEQ ID NO: 853373 - protein, 1899 aa, Homo sapiens
MEDRRAEKSCEQACESLKRQDYEMALKHCTEALLSLGQYSMADFTGPCPLEIERIKIESLLYRIASFLQLKNYVQADEDCRHVLGEGLAKGEDAFRAVLCCMQLKGKLQPVSTILAKSLTGESLNGMVTKDLTRLKTLLSETGFLEQGICRYGAQCTSAHSQEELAEWQKRYASRLIKLKQQNENKQLSGSYMETLIEKWMNSLSPEKVLSECIEGVKVEHNPDLSVTVSTKKSHQTWTFALTCKPARMLYRVALLYDAHRPHFSIIAISAGDSTTQVSQEVPENCQEWIGGKMAQNGLDHYVYKVGIAFNTEIFGTFRQTIVFDFGLEPVLMQRVMIDAASTEDLEYLMHAKQQLVTTAKRWDSSSKTIIDFEPNETTDLEKSLLIRYQIPLSADQLFTQSVLDKSLTKSNYQSRLHDLLYIEEIAQYKEISKFNLKVQLQILASFMLTGVSGGAKYAQNGQLFGRFKLTETLSEDTLAGRLVMTKVNAVYLLPVPKQKLVQTQGTKEKVYEATIEEKTKEYIFLRLSRECCEELNLRPDCDTQVELQFQLNRLPLCEMHYALDRIKDNGVLFPDISMTPTIPWSPNRQWDEQLDPRLNAKQKEAVLAITTPLAIQLPPVLIIGPYGTGKTFTLAQAVKHILQQQETRILICTHSNSAADLYIKDYLHPYVEAGNPQARPLRVYFRNRWVKTVHPVVHQYCLISSAHSTFQMPQKEDILKHRVVVVTLNTSQYLCQLDLEPGFFTHILLDEAAQAMECETIMPLALATQNTRIVLAGDHMQLSPFVYSEFARERNLHVSLLDRLYEHYPAEFPCRILLCENYRSHEAIINYTSELFYEGKLMASGKQPAHKDFYPLTFFTARGEDVQEKNSTAFYNNAEVFEVVERVEELRRKWPVAWGKLDDGSIGVVTPYADQVFRIRAELRKKRLSDVNVERVLNVQGKQFRVLFLSTVRTRHTCKHKQTPIKKKEQLLEDSTEDLDYGFLSNYKLLNTAITRAQSLVAVVGDPIALCSIGRCRKFWERFIALCHENSSLHGITFEQIKAQLEALELKKTYVLNPLAPEFIPRALRLQHSGSTNKQQQSPPKGKSLHHTQNDHFQNDGIVQPNPSVLIGNPIRAYTPPPPLGPHPNLGKSPSPVQRIDPHTGTSILYVPAVYGGNVVMSVPLPVPWTGYQGRFAVDPRIITHQAAMAYNMNLLQTHGRGSPIPYGLGHHPPVTIGQPQNQHQEKDQHEQNRNGKSDTNNSGPEINKIRTPEKKPTEPKQVDLESNPQNRSPESRPSVVYPSTKFPRKDNLNPRHINLPLPAPHAQYAIPNRHFHPLPQLPRPPFPIPQQHTLLNQQQNNLPEQPNQIPPQPNQVVQQQSQLNQQPQQPPPQLSPAYQAGPNNAFFNSAVAHRPQSPPAEAVIPEQQPPPMLQEGHSPLRAIAQPGPILPSHLNSFIDENPSGLPIGEALDRIHGSVALETLRQQQARFQQWSEHHAFLSQGSVPYPHHHHPHLQHLPQPPLGLHQPPVRADWKLTSSAEDEVETTYSRFQDLIRELSHRDQSETRELAEMPPPQSRLLQYRQVQSRSPPAVPSPPSSTDHSSHFSNFNDNSRDIEVASNPAFPQRLPPQIFNSPFSLPSEHLAPPPLKYLAPDGAWTFANLQQNHLMGPGFPYGLPPLPHRPPQNPFVQIQNHQHAIGQEPFHPLSSRTVSSSSLPSLEEYEPRGPGRPLYQRRISSSSVQPCSEEVSTPQDSLAQCKELQDHSNQSSFNFSSPESWVNTTSSTPYQNIPCNGSSRTAQPRELIAPPKTVKPPEDQLKSENLEVSSSFNYSVLQHLGQFPPLMPNKQIAESANSSSPQSSAGGKPAMSYASALRAPPKPRPPPEQAKKSSDPLSLFQELSLGSSSGSNGFYSYFK

SEQ ID NO: 853374 - protein, 68 aa, Homo sapiens
AAAYYYYCSEFKLLTMYGDMSYASALRAPPKPRPPPEQAKKSSDPLSLFQELSLGSSSGSNGFYSYFK

SEQ ID NO: 853375 - protein, 347 aa, Homo sapiens
MEDRRAEKSCEQACESLKRQDYEMALKHCTEALLSLGQYSMADFTGPCPLEIERIKIESLLYRIASFLQLKNYVQADEDCRHVLGEGLAKGEDAFRAVLCCMQLKGKLQPVSTILAKSLTGESLNGMVTKDLTRLKTLLSETGFLEQGICRYGAQCTSAHSQEELAEWQKRYASRLIKLKQQNENKQLSGSYMETLIEKWMNSLSPEKVLSECIEGVKVEHNPDLSVTVSTKKSHQTWTFALTCKPARMLYRVALLYDAHRPHFSIIAISAGDSTTQVSQEVPENCQEWIGGKMAQNGLDHYVYKVGIAFNTEIFGTFRQTIVFDFGLEPVLMQRVMIDAASTEGNI

SEQ ID NO: 853376 - protein, 255 aa, Homo sapiens
LYPSEGSSIEERQRKNLQAKPVHQALGSSSTLPKDPVLRKEKLQDLMTQIQGTCNFMQESVLDFDKPSSAIPTSQPPSATPGSPVASKEQNLSSQSDFLQEPLQATSSPVTCSSNACLVTTDQASSGSETEFMTSETPEAAIPPGKQPSSLASPNPPMAKGSEQGFQSPPASSSSVTINTAPFQAMQTVFNVNAPLPPRKEQEIKESPYSPGYNQSFTTASTQTPPQCQLPSIHVEQTVHSQETEQIIILMELFK

SEQ ID NO: 853377 - protein, 171 aa, Homo sapiens
LYPSEGSSIEERQRKNLQAKPVHQALGSSSTLPKDPVLRKEKLQDLMTQIQGTCNFMQESVLDFDKPSSAIPTSQPPSATPGSPVASKEQNLSSQSDFLQEPLQVFNVNAPLPPRKEQEIKESPYSPGYNQSFTTASTQTPPQCQLPSIHVEQTVHSQETEQIIILMELFK

SEQ ID NO: 853378 - protein, 264 aa, Homo sapiens
ILIYIYFNTKNENATEKDLRGFDTYRGLPSISNGNYSQLQFQAREYSGAPYSQRDNFQQCYKRGGTSGGPRANSRAGWSDSSQVSSPERDNETFNSGDSGQGDSRSMTPVDVPVTNPAATILPVHVYPLPQQMRVAFSAARTSNLAPGTLDQPIVFDLLLNNLGETFDLQLGRFNCPVNGTYVFIFHMLKLAVNVPLYVNLMKNEEVLVSAYANDGAPDHETASNHAILQLFQGDQIWLRLHRGAIYGSSWKYSTFSGYLLYQD

SEQ ID NO: 853379 - protein, 255 aa, Homo sapiens
LYPSEGSSIEERQRKNLQAKPVHQALGSSSTLPKDPVLRKEKLQDLMTQIQGTCNFMQESVLDFDKPSSAIPTSQPPSATPGSPVASKEQNLSSQSDFLQEPLQATSSPVTCSSNACLVTTDQASSGSETEFMTSETPEAAIPPGKQPSSLASPNPPMAKGSEQGFQSPPASSSSVTINTAPFQAMQTVFNVNAPLPPRKEQEIKESPYSPGYNQSFTTASTQTPPQCQLPSIHVEQTVHSQETGKIFAYDIWKT

SEQ ID NO: 853380 - protein, 220 aa, Homo sapiens
LYPSEGSSIEERQRKNLQAKPVHQALGSSSTLPKDPVLRKEKLQDLMTQIQGTCNFMQESVLDFDKPSSAIPTSQPPSATPGSPVASKEQNLSSQSDFLQEPLQAAIPPGKQPSSLASPNPPMAKGSEQGFQSPPASSSSVTINTAPFQAMQTVFNVNAPLPPRKEQEIKESPYSPGYNQSFTTASTQTPPQCQLPSIHVEQTVHSQETEQIIILMELFK

SEQ ID NO: 853381 - protein, 480 aa, Homo sapiens
LYPSEGSSIEERQRKNLQAKPVHQALGSSSTLPKDPVLRKEKLQDLMTQIQGTCNFMQESVLDFDKPSSAIPTSQPPSATPGSPVASKEQNLSSQSDFLQEPLQATSSPVTCSSNACLVTTDQASSGSETEFMTSETPEVFNVNAPLPPRKEQEIKESPYSPGYNQSFTTASTQTPPQCQLPSIHVEQTVHSQETAQTNVFPRPTQPFVNSRGSVRGCTRGGRLITNSYRSPGGYKGFDTYRGLPSISNGNYSQLQFQAREYSGAPYSQRDNFQQCYKRGGTSGGPRANSRAGWSDSSQVSSPERDNETFNSGDSGQGDSRSMTPVDVPVTNPAATILPVHVYPLPQQMRVAFSAARTSNLAPGTLDQPIVFDLLLNNLGETFDLQLGRFNCPVNGTYVFIFHMLKLAVNVPLYVNLMKNEEVLVSAYANDGAPDHETASNHAILQLFQGDQIWLRLHRGAIYGSSWKYSTFSGYLLYQD

SEQ ID NO: 853382 - protein, 158 aa, Homo sapiens
MTPVDVPVTNPAATILPVHVYPLPQQMRVAFSAARTSNLAPGTLDQPIVFDLLLNNLGETFDLQLGRFNCPVNGTYVFIFHMLKLAVNVPLYVNLMKNEEVLVSAYANDGAPDHETASNHAILQLFQGDQIWLRLHRGAIYGSSWKYSTFSGYLLYQD

SEQ ID NO: 853383 - protein, 89 aa, Homo sapiens
STPSPSSSPQPVPTAHIRADRPRPHPPVLSLLSAGKFVRESNIAALRLRHGGGARIGSCREIRKLSAPGPGSEQKRLPPAPLRDPTLRD

SEQ ID NO: 853384 - protein, 89 aa, Homo sapiens; identical to SEQ ID NO: 853383

SEQ ID NO: 853385 - protein, 107 aa, Homo sapiens [sequence omitted]

SEQ ID NO: 853386 - protein, 954 aa, Homo sapiens
MPSTSCRMKHLTDTSHGVRNKCLQLLGNLGSLEKSVTKDAEGLAARDVQKIIGDYFSDQDPRVRTAAIKAMLQLHERGLKLHQTIYNQACKLLSDDYEQVRSAAVQLIWVVSQLYPESIVPIPSSNEEIRLVDDAFGKICHMVSDGSWVVRVQAAKLLGSMEQVSSHFLEQTLDKKLMSDLRRKRTAHERAKELYSSGEFSSGRKWGDDAPKEEVDTGAVNLIESGACGAFVHGLEDEMYEVRIAAVEALCMLAQSSPSFAEKCLDFLVDMFNDEIEEVRLQSIHTMRKISNNITLREDQLDTVLAVLEDSSRDIREALHELLCCTNVSTKEGIHLALVELLKNLTKYPTDRDSIWKCLKFLGSRHPTLVLPLVPELLSTHPFFDTAEPDMDDPAYIAVLVLIFNAAKTCPTMPALFSDHTFRHYAYLRDSLSHLVPALRLPGRKLVSSAVSPSIIPQEDPSQQFLQQSLERVYSLQHLDPQGAQELLEFTIRVEVSPWWPGWSQTPELKDPPASASQSAGITGVSHCARPRLILSSVFIFCIKQPLLNNSDLTVPPVFHPVGKRKQEEKGISFLMSKSPGGIVNYRNVTCRAGDGRKCHSPVDGFFQATVKPDVFMPALKQTASQVTQTLRDLQRLGELQSELAGVADFSATYLRCQLLLIKALQEKLWNVAAPLYLKQSDLASAAAKQIMEETYKMEFMYSGVENKQVVIIHHMRLQAKALQLIVTARTTRGLDPLFGMCEKFLQEVDFFQRYFIADLPHLQDSFVDKLLDLMPRLMTSKPAEVVKILQTMLRQSAFLHLPLPEQIHKASATIIEPAGESDNPLRFTSGLVVALDVDATLEHVQDPQNTVKVQVLYPDGQAQMIHPKPADFRNPGPGRHRLITQVYLSHTAWTEACQVEVRLLLAYNSSARIPKCPWMEGGEMSPQVETSIEGTIPFSKPVKVYIMPKPARR

SEQ ID NO: 853387 - protein, 109 aa, Homo sapiens
MESLCVAQAGREFLSSSNPPAWPSQRIGITDENDPSVRLKIASLLGLLSKTAGFSPDCIMDDAINILQNEKSHQVLAQLLDTLLAIGTKLPENQAIQMRLVDVACKVRV

SEQ ID NO: 853388 - protein, 963 aa, Homo sapiens
MAAHLKKRVYEEFTKVVQPQEEIATKKLRLTKPSKSAALHIDLCKATSPADALQYLLQFARKPVEAESVEGVVRILLEHYYKENDPSVRLKIASLLGLLSKTAGFSPDCIMDDAINILQNEKSHQVLAQLLDTLLAIGTKLPENQAIQMRLVDVACKHLTDTSHGVRNKCLQLLGNLGSLEKSVTKDAEGLAARDVQKIIGDYFSDQDPRVRTAAIKAMLQLHERGLKLHQTIYNQACKLLSDDYEQVRSAAVQLIWVVSQLYPESIVPIPSSNEEIRLVDDAFGKICHMVSDGSWVVRVQAAKLLGSMEQVSSHFLEQTLDKKLMSDLRRKRTAHERAKELYSSGEFSSGRKWGDDAPKEEVDTGAVNLIESGACGAFVHGLEDEMYEVRIAAVEALCMLAQSSPSFAEKCLDFLVDMFNDEIEEVRLQSIHTMRKISNNITLREDQLDTVLAVLEDSSRDIREALHELLCCTNVSTKEGIHLALVELLKNLTKYPTDRDSIWKCLKFLGSRHPTLVLPLVPELLSTHPFFDTAEPDMDDPAYIAVLVLIFNAAKTCPTMPALFSDHTFRHYAYLRDSLSHLVPALRLPGRKLVSSAVSPSIIPQEDPSQQFLQQSLERVYSLQHLDPQGAQELLEFTIRDLQRLGELQSELAGVADFSATYLRCQLLLIKALQEKLWNVAAPLYLKQSDLASAAAKQIMEETYKMEFMYSGVENKQVVIIHHMRLQAKALQLIVTARTTRGLDPLFGMCEKFLQEVDFFQRYFIADLPHLQDSFVDKLLDLMPRLMTSKPAEVVKILQTMLRQSAFLHLPLPEQIHKASATIIEPAGESDNPLRFTSGLVVALDVDATLEHVQDPQNTVKVQVLYPDGQAQMIHPKPADFRNPGPGRHRLITQVYLSHTAWTEACQVEVRLLLAYNSSARIPKCPWMEGGEMSPQVETSIEGTIPFSKPVKVYIMPKPARR

SEQ ID NO: 853389 - protein, 963 aa, Homo sapiens; identical to SEQ ID NO: 853388

SEQ ID NO: 853390 - protein, 978 aa, Homo sapiens
MAAHLKKRVYEEFTKVVQPQEEIATKKLRLTKPSKSAALHIDLCKATSPADALQYLLQFARKPVEAESVEGVVRILLEHYYKENDPSVRLKIASLLGLLSKTAGFSPDCIMDDAINILQNEKSHQVLAQLLDTLLAIGTKLPENQAIQMRLVDVACKHLTDTSHGVRNKCLQLLGNLGSLEKSVTKDAEGLAARDVQKIIGDYFSDQDPRVRTAAIKAMLQLHERGLKLHQTIYNQACKLLSDDYEQVRSAAVQLIWVVSQLYPESIVPIPSSNEEIRLVDDAFGKICHMVSDGSWVVRVQAAKLLGSMEQVSSHFLEQTLDKKLMSDLRRKRTAHERAKELYSSGEFSSGRKWGDDAPKEEVDTGAVNLIESGACGAFVHGLEDEMYEVRIAAVEALCMLAQSSPSFAEKCLDFLVDMFNDEIEEVRLQSIHTMRKISNNITLREDQLDTVLAVLEDSSRDIREALHELLCCTNVSTKEGIHLALVELLKNLTKYPTDRDSIWKYMTFLPIYSLSPIMWCLKFLGSRHPTLVLPLVPELLSTHPFFDTAEPDMDDPAYIAVLVLIFNAAKTCPTMPALFSDHTFRHYAYLRDSLSHLVPALRLPGRKLVSSAVSPSIIPQEDPSQQFLQQSLERVYSLQHLDPQGAQELLEFTIRDLQRLGELQSELAGVADFSATYLRCQLLLIKALQEKLWNVAAPLYLKQSDLASAAAKQIMEETYKMEFMYSGVENKQVVIIHHMRLQAKALQLIVTARTTRGLDPLFGMCEKFLQEVDFFQRYFIADLPHLQDSFVDKLLDLMPRLMTSKPAEVVKILQTMLRQSAFLHLPLPEQIHKASATIIEPAGESDNPLRFTSGLVVALDVDATLEHVQDPQNTVKVQVLYPDGQAQMIHPKPADFRNPGPGRHRLITQVYLSHTAWTEACQVEVRLLLAYNSSARIPKCPWMEGGEMSPQVETSIEGTIPFSKPVKVYIMPKPARR

SEQ ID NO: 853391 - protein, 912 aa, Homo sapiens
MESLCVAQAGREFLSSSNPPAWPSQRIGITDENDPSVRLKIASLLGLLSKTAGFSPDCIMDDAINILQNEKSHQVLAQLLDTLLAIGTKLPENQAIQMRLVDVACKHLTDTSHGVRNKCLQLLGNLGSLEKSVTKDAEGLAARDVQKIIGDYFSDQDPRVRTAAIKAMLQLHERGLKLHQTIYNQACKLLSDDYEQVRSAAVQLIWVVSQLYPESIVPIPSSNEEIRLVDDAFGKICHMVSDGSWVVRVQAAKLLGSMEQVSSHFLEQTLDKKLMSDLRRKRTAHERAKELYSSGEFSSGRKWGDDAPKEEVDTGAVNLIESGACGAFVHGLEDEMYEVRIAAVEALCMLAQSSPSFAEKCLDFLVDMFNDEIEEVRLQSIHTMRKISNNITLREDQLDTVLAVLEDSSRDIREALHELLCCTNVSTKEGIHLALVELLKNLTKYPTDRDSIWKCLKFLGSRHPTLVLPLVPELLSTHPFFDTAEPDMDDPAYIAVLVLIFNAAKTCPTMPALFSDHTFRHYAYLRDSLSHLVPALRLPGRKLVSSAVSPSIIPQEDPSQQFLQQSLERVYSLQHLDPQGAQELLEFTIRDLQRLGELQSELAGVADFSATYLRCQLLLIKALQEKLWNVAAPLYLKQSDLASAAAKQIMEETYKMEFMYSGVENKQVVIIHHMRLQAKALQLIVTARTTRGLDPLFGMCEKFLQEVDFFQRYFIADLPHLQDSFVDKLLDLMPRLMTSKPAEVVKILQTMLRQSAFLHLPLPEQIHKASATIIEPAGESDNPLRFTSGLVVALDVDATLEHVQDPQNTVKVQVLYPDGQAQMIHPKPADFRNPGPGRHRLITQVYLSHTAWTEACQVEVRLLLAYNSSARIPKCPWMEGGEMSPQVETSIEGTIPFSKPVKVYIMPKPARR

SEQ ID NO: 853392 - protein, 590 aa, Homo sapiens
MIGACEYVMGEDEMYEVRIAAVEALCMLAQSSPSFAEKCLDFLVDMFNDEIEEVRLQSIHTMRKISNNITLREDQLDTVLAVLEDSSRDIREALHELLCCTNVSTKEGIHLALVELLKNLTKYPTDRDSIWKCLKFLGSRHPTLVLPLVPELLSTHPFFDTAEPDMDDPAYIAVLVLIFNAAKTCPTMPALFSDHTFRHYAYLRDSLSHLVPALRLPGRKLVSSAVSPSIIPQEDPSQQFLQQSLERVYSLQHLDPQGAQELLEFTIRDLQRLGELQSELAGVADFSATYLRCQLLLIKALQEKLWNVAAPLYLKQSDLASAAAKQIMEETYKMEFMYSGVENKQVVIIHHMRLQAKALQLIVTARTTRGLDPLFGMCEKFLQEVDFFQRYFIADLPHLQDSFVDKLLDLMPRLMTSKPAEVVKILQTMLRQSAFLHLPLPEQIHKASATIIEPAGESDNPLRFTSGLVVALDVDATLEHVQDPQNTVKVQVLYPDGQAQMIHPKPADFRNPGPGRHRLITQVYLSHTAWTEACQVEVRLLLAYNSSARIPKCPWMEGGEMSPQVETSIEGTIPFSKPVKVYIMPKPARR

SEQ ID NO: 853393 - protein, 963 aa, Homo sapiens; identical to SEQ ID NO: 853388

SEQ ID NO: 853394 - protein, 425 aa, Homo sapiens
MDDPAYIAVLVLIFNAAKTCPTMPALFSDHTFRHYAYLRDSLSHLVPALRLPGRKLVSSAVSPSIIPQEDPSQQFLQQSLERVYSLQHLDPQGAQELLEFTIRDLQRLGELQSELAGVADFSATYLRCQLLLIKALQEKLWNVAAPLYLKQSDLASAAAKQIMEETYKMEFMYSGVENKQVVIIHHMRLQAKALQLIVTARTTRGLDPLFGMCEKFLQEVDFFQRYFIADLPHLQDSFVDKLLDLMPRLMTSKPAEVVKILQTMLRQSAFLHLPLPEQIHKASATIIEPAGESDNPLRFTSGLVVALDVDATLEHVQDPQNTVKVQVLYPDGQAQMIHPKPADFRNPGPGRHRLITQVYLSHTAWTEACQVEVRLLLAYNSSARIPKCPWMEGGEMSPQVETSIEGTIPFSKPVKVYIMPKPARR

SEQ ID NO: 853395 - protein, 162 aa, Homo sapiens
MLRQSAFLHLPLPEQIHKASATIIEPAGESDNPLRFTSGLVVALDVDATLEHVQDPQNTVKVQVLYPDGQAQMIHPKPADFRNPGPGRHRLITQVYLSHTAWTEACQVEVRLLLAYNSSARIPKCPWMEGGEMSPQVETSIEGTIPFSKPVKVYIMPKPARR

SEQ ID NO: 853396 - protein, 505 aa, Homo sapiens
MAAHLKKRVYEEFTKVVQPQEEIATKKLRLTKPSKSAALHIDLCKATSPADALQYLLQFARKPVEAESVEGVVRILLEHYYKENDPSVRLKIASLLGLLSKTAGFSPDCIMDDAINILQNEKSHQVLAQLLDTLLAIGTKLPENQAIQMRLVDVACKHLTDTSHGVRNKCLQLLGNLGSLEKSVTKDAEGLAARDVQKIIGDYFSDQDPRVRTAAIKAMLQLHERGLKLHQTIYNQACKLLSDDYEQVRSAAVQLIWVVSQLYPESIVPIPSSNEEIRLVDDAFGKICHMVSDGSWVVRVQAAKLLGSMEQVSSHFLEQTLDKKLMSDLRRKRTAHERAKELYSSGEFSSGRKWGDDAPKEEVDTGAVNLIESGACGAFVHGLEDEMYEVRIAAVEALCMLAQSSPSFAEKCLDFLVDMFNDEIEEVRLQSIHTMRKISNNITLREDQLDTVLAVLEDSSRDIREALHELLCCTNVSTKEGIHLALVELLKNLTKYPTDRDSIWK

SEQ ID NO: 853397 - protein, 964 aa, Homo sapiens
MAAHLKKRVYEEFTKVVQPQEEIATKKLRLTKPSKSAALHIDLCKATSPADALQYLLQFARKPVEAESVEGVVRILLEHYYKENDPSVRLKIASLLGLLSKTAGFSPDCIMDDAINILQNEKSHQVLAQLLDTLLAIGTKLPENQAIQMRLVDVACKHLTDTSHGVRNKCLQLLGNLGSLEKSVTKDAEGLAARDVQKIIGDYFSDQDPRVRTAAIKAMLQLHERGLKLHQTIYNQACKLLSDDYEQVRSAAVQLIWVVSQLYPESIVPIPSSNEEIRLVDDAFGKICHMVSDGSWVVRVQAAKLLGSMEQVSSHFLEQTLDKKLMSDLRRKRTAHERAKELYSSGEFSSGRKWGDDAPKEEVDTGAVNLIESGACGAFVHGLEDEMYEVRIAAVEALCMLAQSSPSFAEKCLDFLVDMFNDEIEEVRLQSIHTMRKISNNITLREDQLDTVLAVLEDSSRDIREALHELLCCTNVSTKEGIHLALVELLKNLTKYPTDRDSIWKCLKFLGSRHPTLVLPLVPELLSTHPFFDTAEPDMDDPAYIAVLVLIFNAAKTCPTMPALFSDHTFRHYAYLRDSLSHLVPALRLPGRKLVSSAVSPSIIPQEDPSQQFLQQSLERVYSLQHLDPQGAQELLEFTIRDLQRLGELQSELAGVADFSATYLRCQLLLIKALQEKLWNVAAPLYLKQSDLASAAAKQIMEETYKMEFMYSGVENKQVVIIHHMRLQAKALQLIVTARTTRGTWFHCVVQASLELLNSKCPSTSASQSARITDDSFVDKLLDLMPRLMTSKPAEVVKILQTMLRQSAFLHLPLPEQIHKASATIIEPAGESDNPLRFTSGLVVALDVDATLEHVQDPQNTVKVQVLYPDGQAQMIHPKPADFRNPGPGRHRLITQVYLSHTAWTEACQVEVRLLLAYNSSARIPKCPWMEGGEMSPQVETSIEGTIPFSKPVKVYIMPKPARR

SEQ ID NO: 853398 - protein, 963 aa, Homo sapiens; identical to SEQ ID NO: 853388

SEQ ID NO: 853399 - protein, 743 aa, Homo sapiens [sequence omitted]

SEQ ID NO: 853400 - protein, 441 aa, Homo sapiens
MAAHLKKRVYEEFTKVVQPQEEIATKKLRLTKPSKSAALHIDLCKATSPADALQYLLQFARKPVEAESVEGVVRILLEHYYKENDPSVRLKIASLLGLLSKTAGFSPDCIMDDAINILQNEKSHQVLAQLLDTLLAIGTKLPENQAIQMRLVDVACKHLTDTSHGVRNKCLQLLGNLGSLEKSVTKDAEGLAARDVQKIIGDYFSDQDPRVRTAAIKAMLQLHERGLKLHQTIYNQACKLLSDDYEQVRSAAVQLIWVVSQLYPESIVPIPSSNEEIRLVDDAFGKICHMVSDGSWVVRVQAAKLLGSMEQVSSHFLEQTLDKKLMSDLRRKRTAHERAKELYSSGEFSSGRKWGDDAPKEEVDTGAVNLIESGACGAFVHGLEDEMYDVTTGGNQHRGHHSLQQACKSLYNAQTCTALRQKQSSQPWPRGPFLGVRMSQA

SEQ ID NO: 853401 - protein, 432 aa, Homo sapiens [sequence omitted]

SEQ ID NO: 853402 - protein, 824 aa, Homo sapiens
MAAAFEASGALAAVATAMPAEHVAVQVPAPEPTPGPVRILRTAQDLSSPRTRTGDVLLAEPADFESLLLSRPVLEGLRAAGFERPSPVQLKAIPLGRCGLDLIVQAKSGTGKTCVFSTIALDSLVLENLSTQILILAPTREIAVQIHSVITAIGIKMEGLECHVFIGGTPLSQDKTRLKKCHIAVGSPGRIKQLIELDYLNPGSIRLFILDEADKLLEEGSFQEQINWIYSSLPASKQMLAVSATYPEFLANALTKYMRDPTFVRLNSSDPSLIGLKQYYKVVNSYPLAHKVFEEKTQHLQELFSRIPFNQALVFSNLHSRAQHLADILSSKGFPAECISGNMNQNQRLDAMAKLKHFHCRVLISTDLTSRGIDAEKVNLVVNLDVPLDWETYMHRIGRAGRFGTLGLTVTYCCRGEEENMMMRIAQKCNINLLPLPDPIPSGLMEECVDWDVEVKAAVHTYGIASVPNQPLKKQIQKIERTLQIQKAHGDHMASSRNNSVSGLSVKSKNNTKQKLPVKSHSECGIIEKATSPKELGCDRQSEEQMKNSVQTPVENSTNSQHQVKEALPVSLPQIPCLSSFKIHQPYTLTFAELVEDYEHYIKEGLEKPVEIIRHYTGPGDQTVNPQNGFVRNKVIEQRVPVLASSSQSGDSESDSDSYSSRTSSQSKGNKSYLEGSSDNQLKDSESTPVDDRISLEQPPNGSDTPNPEKYQESPGIQMKTRLKEGASQRAKQSRRNLPRRSSFRLQTEAQEDDWYDCHREIRLSFSDTYQDYEEYWRAYYRAWQEYYAAASHSYYWNAQRHPSWMAAYHMNTIYLQEMMHSNQ

SEQ ID NO: 853403 - protein, 824 aa, Homo sapiens; identical to SEQ ID NO: 853402

SEQ ID NO: 853404 - protein, 1079 aa, Homo sapiens
MVKSPMNRELVATYEVTLSVIDNASDLPERSVSVPNAKLTVNVLDVNDNTPQFKPFGITYYMERILEGATPGTTLIAVAAVDPDKGLNGLVTYTLLDLVPPGYVQLEDSSAGKVIANRTVDYEEVHWLNFTVRASDNGSPPRAAEIPVYLEIVDINDNNPIFDQPSYQEAVFEDVPVGTIILTVTATDADSGNFALIEYSLGDGESKFAINPTTGDIYVLSSLDREKKDHYILTALAKDNPGDVASNRRENSVQVVIQVLDVNDCRPQFSKPQFSTSVYENEPAGTSVITMMATDQDEGPNGELTYSLEGPGVEAFHVDMDSGLVTTQRPLQSYEKFSLTVVATDGGEPPLWGTTMLLVEVIDVNDNRPVFVRPPNGTILHIREEIPLRSNVYEVYATDKDEGLNGAVRYSFLKTAGNRDWEFFIIDPISGLIQTAQRLDRESQAVYSLILVASDLGQPVPYETMQPLQVALEDIDDNEPLFVRPPKGSPQYQLLTVPEHSPRGTLVGNVTGAVDADEGPNAIVYYFIAAGNEEKNFHLQPDGCLLVLRDLDREREAIFSFIVKASSNRSWTPPRGPSPTLDLVADLTLQEVRVVLEDINDQPPRFTKAEYTAGVATDAKVGSELIQVLALDADIGNNSLVFYSILAIHYFRALANDSEDVGQVFTMGSMDGILRTFDLFMAYSPGYFVVDIVARDLAGHNDTAIIGIYILRDDQRVKIVINEIPDRVRGFEEEFIHLLSNITGAIVNTDNVQFHVDKKGRVNFAQTELLIHVVNRDTNRILDVDRVIQMIDENKEQLRNLFRNYNVLDVQPAISVRLPDDMSALQMAIIVLAILLFLAAMLFVLMNWYYRTVHKRKLKAIVAGSAGNRGFIDIMDMPNTNKYSFDGANPVWLDPFCRNLELAAQAEHEDDLPENLSEIADLWNSPTRTHGTFGREPAAVKPDDDRYLRAAIQEYDNIAKLGQIIREGPIKLIQTELDEEPGDHSPGQGSLRFRHKPPVELKGPDGIHVVHGSTGTLLATDLNSLPEEDQKGLGRSLETLTAAEATAFERNARTESAKSTPLHKLRDVIMETPLEITEL

SEQ ID NO: 853405 - protein, 655 aa, Homo sapiens
SGGGGSGERDAGCRRDAWLEDASDGGRTLRWSGLVSPAWAWSAGWQSLWTFGARPVRAPGAPEVASGERRAASGPRRPRSCRHAADEPSRRREDAAVARARAGGPRGPIRRRAEPEARRGEARRRCTHAHGAMGRHVATSCHVAWLLVLISGCWGQVNRLPFFTNHFFDTYLLISEDTPVGSSVTQLLAQDMDNDPLVFGVSGEEASRFFAVEPDTGVVWLRQPLDRETKSEFTVEFSVSDHQGVITRKVNIQVGDVNDNAPTFHNQPYSVRIPENTPVGTPIFIVNATDPDLGAGGSVLYSFQPPSQFFAIDSARGIVTVIRELDYETTQAYQLTVNATDQDKTRPLSTLANLAIIITDVQDMDPIFINLPYSTNIYEHSPPGTTVRIITAIDQDKGRPRGIGYTIVSGNTNSIFALDYISGVLTLNGLLDRENPLYSHGFILTVKGTELNDDRTPSDATVTTTFNILVIDINDNAPEFNSSEYSVAITELAQVGFALPLFIQVVDKDENLGLNSMFEVYLVGNNSHHFIISPTSVQGKADIRIRVAIPLDYETVDRYDFDLFANESVPDHVGYAKVKITLINENDNRPIFSQPLYNISLYENVTVGTSVLTVLVSPRFTAGPLSSPGPTVVRHPEGFCPRDLSNQEKEAPPNP

SEQ ID NO: 853406 - protein, 2877 aa, Homo sapiens
VPDVSPEEASLRATFGEVSYFFSDDPDRFSLDKDTGLIMLIARLDYELIQRFTLTIIARDGGGEETTGRVRINVLDVNDNVPTFQKDAYVGALRENEPSVTQLVRLRATDEDSPPNNQITYSIVSASAFGSYFDISLYEGYGVISVSRPLDYEQISNGLIYLTVMAMDAGNPPLNSTVPVTIEVFDENDNPPTFSKPAYFVSVVENIMAGATVLFLNATDLDRSREYGQESIIYSLEGSTQFRINARSGEITTTSLLDRETKSEYILIVRAVDGGVGHNQKTGIATVNITLLDINDNHPTWKDAPYYINLVEMTPPDSDVTTVVAVDPDLGENGTLVYSIQPPNKFYSLNSTTGKIRTTHAMLDRENPDPHEAELMRKIVVSVTDCGRPPLKATSSATVFVNLLDLNDNDPTFQNLPFVAEVLEGIPAGVSIYQVVAIDLDEGLNGLVSYRMPVGMPRMDFLINSSSGVVVTTTELDRERIAEYQLRVVASDAGTPTKSSTSTLTIHVLDVNDETPTFFPAVYNVSVSEDVPREFRVVWLNCTDNDVGLNAELSYFITGGNVDGKFSVGYRDAVVRTVVGLDRETTAAYMLILEAIDNGPVGKRHTGTATVFVTVLDVNDNRPIFLQSSYEASVPEDIPEGHSILQLKATDADEGEFGRVWYRILHGNHGNNFRIHVSNGLLMRGPRPLDRERNSSHVLIVEAYNHDLGPMRSSVRVIVYVEDINDEAPVFTQQQYSRLGLRETAGIGTSVIVVQATDRDSGDGGLVNYRILSGAEGKFEIDESTGLIITVNYLDYETKTSYMMNVSATDQAPPFNQGFCSVYITLLNELDEAVQFSNASYEAAILENLALGTEIVRVQAYSIDNLNQITYRFDAYTSTQAKALFKIDAITGVITVQGLVDREKGDFYTLTVVADDGGPKVDSTVKVYITVLDENDNSPRFDFTSDSAVSIPEDCPVGQRVATVKAWDPDAGSNGQVVFSLASGNIAGAFEIVTTNDSIGEVFVARPLDREELDHYILQVVASDRGTPPRKKDHILQVTILDINDNPPVIESPFGYNVSVNENVGGGTAVVQVRATDRDIGINSVLSYYITEGNKDMTFRMDRISGEIATRPAPPDRERQSFYHLVATVEDEGTPTLSATTHVYVTIVDENDNAPMFQQPHYEVLLDEGPDTLNTSLITIQALDLDEGPNGTVTYAIVAGNIVNTFRIDRHMGVITAAKELDYEISHGRYTLIVTATDQCPILSHRLTSTTTVLVNVNDINDNVPTFPRDYEGPFEVTEGQPGPRVWTFLAHDRDSGPNGQVEYSIMDGDPLGEFVISPVEGVLRVRKDVELDRETIAFYNLTICARDRGMPPLSSTMLVGIRVLDINDNDPVLLNLPMNITISENSPVSSFVAHVLASDADSGCNARLTFNITAGNRERAFFINATTGIVTVNRPLDRERIPEYKLTISVKDNPENPRIARRDYDLLLIFLSDENDNHPLFTKSTYQAEVMENSPAGTPLTVLNGPILALDADQDIYAVVTYQLLGAQSGLFDINSSTGVVTVRSGVIIDREAFSPPILELLLLAEDIGLLNSTAHLLITILDDNDNRPTFSPATLTVHLLENCPPGFSVLQVTATDEDSGLNGELVYRIEAGAQDRFLIHLVTGVIRVGNATIDREEQESYRLTVVATDRGTVPLSGTAIVTILIDDINDSRPEFLNPIQTVSVLESAEPGTVIANITAIDHDLNPKLEYHIVGIVAKDDTDRLVPNQEDAFAVNINTGSVMVKSPMNRELVATYEVTLSVIDNASDLPERSVSVPNAKLTVNVLDVNDNTPQFKPFGITYYMERILEGATPGTTLIAVAAVDPDKGLNGLVTYTLLDLVPPGYVQLEDSSAGKVIANRTVDYEEVHWLNFTVRASDNGSPPRAAEIPVYLEIVDINDNNPIFDQPSYQEAVFEDVPVGTIILTVTATDADSGNFALIEYSLGDGESKFAINPTTGDIYVLSSLDREKKDHYILTALAKDNPGDVASNRRENSVQVVIQVLDVNDCRPQFSKPQFSTSVYENEPAGTSVITMMATDQDEGPNGELTYSLEGPGVEAFHVDMDSGLVTTQRPLQSYEKFSLTVVATDGGEPPLWGTTMLLVEVIDVNDNRPVFVRPPNGTILHIREEIPLRSNVYEVYATDKDEGLNGAVRYSFLKTAGNRDWEFFIIDPISGLIQTAQRLDRESQAVYSLILVASDLGQPVPYETMQPLQVALEDIDDNEPLFVRPPKGSPQYQLLTVPEHSPRGTLVGNVTGAVDADEGPNAIVYYFIAAGNEEKNFHLQPDGCLLVLRDLDREREAIFSFIVKASSNRSWTPPRGPSPTLDLVADLTLQEVRVVLEDINDQPPRFTKAEYTAGVATDAKVGSELIQVLALDADIGNNSLVFYSILAIHYFRALANDSEDVGQVFTMGSMDGILRTFDLFMAYSPGYFVVDIVARDLAGHNDTAIIGIYILRDDQRVKIVINEIPDRVRGFEEEFIHLLSNITGAIVNTDNVQFHVDKKGRVNFAQTELLIHVVNRDTNRILDVDRVIQMIDENKEQLRNLFRNYNVLDVQPAISVRLPDDMSALQMAIIVLAILLFLAAMLFVLMNWYYRTVHKRKLKAIVAGSAGNRGFIDIMDMPNTNKYSFDGANPVWLDPFCRNLELAAQAEHEDDLPENLSEIADLWNSPTRTHGTFGREPAAVKPDDDRYLRAAIQEYDNIAKLGQIIREGPIKGSLLKVVLEDYLRLKKLFAQRMVQKASSCHSSISELIQTELDEEPGDHSPGQGSLRFRHKPPVELKGPDGIHVVHGSTGTLLATDLNSLPEEDQKGLGRSLETLTAAEATAFERNARTESAKSTPLHKLRDVIMETPLEITEL

SEQ ID NO: 853407 - protein, 1344 aa, Homo sapiens
SGGGGSGERDAGCRRDAWLEDASDGGRTLRWSGLVSPAWAWSAGWQSLWTFGARPVRAPGAPEVASGERRAASGPRRPRSCRHAADEPSRRREDAAVARARAGGPRGPIRRRAEPEARRGEARRRCTHAHGAMGRHVATSCHVAWLLVLISGCWGQVNRLPFFTNHFFDTYLLISEDTPVGSSVTQLLAQDMDNDPLVFGVSGEEASRFFAVEPDTGVVWLRQPLDRETKSEFTVEFSVSDHQGVITRKVNIQVGDVNDNAPTFHNQPYSVRIPENTPVGTPIFIVNATDPDLGAGGSVLYSFQPPSQFFAIDSARGIVTVIRELDYETTQAYQLTVNATDQDKTRPLSTLANLAIIITDVQDMDPIFINLPYSTNIYEHSPPGTTVRIITAIDQDKGRPRGIGYTIVSGNTNSIFALDYISGVLTLNGLLDRENPLYSHGFILTVKGTELNDDRTPSDATVTTTFNILVIDINDNAPEFNSSEYSVAITELAQVGFALPLFIQVVDKDENLGLNSMFEVYLVGNNSHHFIISPTSVQGKADIRIRVAIPLDYETVDRYDFDLFANESVPDHVGYAKVKITLINENDNRPIFSQPLYNISLYENVTVGTSVLTVLATDNDAGTFGEVSYFFSDDPDRFSLDKDTGLIMLIARLDYELIQRFTLTIIARDGGGEETTGRVRINVLDVNDNVPTFQKDAYVGALRENEPSVTQLVRLRATDEDSPPNNQITYSIVSASAFGSYFDISLYEGYGVISVSRPLDYEQISNGLIYLTVMAMDAGNPPLNSTVPVTIEVFDENDNPPTFSKPAYFVSVVENIMAGATVLFLNATDLDRSREYGQESIIYSLEGSTQFRINARSGEITTTSLLDRETKSEYILIVRAVDGGVGHNQKTGIATVNITLLDINDNHPTWKDAPYYINLVEMTPPDSDVTTVVAVDPDLGENGTLVYSIQPPNKFYSLNSTTGKIRTTHAMLDRENPDPHEAELMRKIVVSVTDCGRPPLKATSSATVFVNLLDLNDNDPTFQNLPFVAEVLEGIPAGVSIYQVVAIDLDEGLNGLVSYRMPVGMPRMDFLINSSSGVVVTTTELDRERIAEYQLRVVASDAGTPTKSSTSTLTIHVLDVNDETPTFFPAVYNVSVSEDVPREFRVVWLNCTDNDVGLNAELSYFITGGNVDGKFSVGYRDAVVRTVVGLDRETTAAYMLILEAIDNGPVGKRHTGTATVFVTVLDVNDNRPIFLQSSYEASVPEDIPEGHSILQEEDLASPCISPAPPRRAFQSSGEKETSQFPGKELRREPGPSKAQNRAAFTEPLAEAPLLGSKQAQEERAPLPREQAQQLQGSEGEKGGP

SEQ ID NO: 853408 - protein, 662 aa, Homo sapiens
SGGGGSGERDAGCRRDAWLEDASDGGRTLRWSGLVSPAWAWSAGWQSLWTFGARPVRAPGAPEVASGERRAASGPRRPRSCRHAADEPSRRREDAAVARARAGGPRGPIRRRAEPEARRGEARRRCTHAHGAMGRHVATSCHVAWLLVLISGCWGQVNRLPFFTNHFFDTYLLISEDTPVGSSVTQLLAQDMDNDPLVFGVSGEEASRFFAVEPDTGVVWLRQPLDRETKSEFTVEFSVSDHQGVITRKVNIQVGDVNDNAPTFHNQPYSVRIPENTPVGTPIFIVNATDPDLGAGGSVLYSFQPPSQFFAIDSARGIVTVIRELDYETTQAYQLTVNATDQDKTRPLSTLANLAIIITDVQDMDPIFINLPYSTNIYEHSPPGTTVRIITAIDQDKGRPRGIGYTIVSGNTNSIFALDYISGVLTLNGLLDRENPLYSHGFILTVKGTELNDDRTPSDATVTTTFNILVIDINDNAPEFNSSEYSVAITELAQVGFALPLFIQVVDKDENLGLNSMFEVYLVGNNSHHFIISPTSVQGKADIRIRVAIPLDYETVDRYDFDLFANESVPDHVGYAKVKITLINENDNRPIFSQPLYNISLYENVTVGTSVLTVLVSPRFTAGPLSSPGPTVVRHPEGFCPRDLSNQGRRHPQIPELCLLVY

SEQ ID NO: 853409 - protein, 98 aa, Homo sapiens
QSGLFDINSSTGEASVPPSTPSLILGWGWPHCWIEGLPSQCWTQAVRGDPIFHSPESPSCSWVISPSGLAGGRGKRLGDDTQDLCWCTNSQPGPGAPQ

SEQ ID NO: 853410 - protein, 3486 aa, Homo sapiens
SGGGGSGERDAGCRRDAWLEDASDGGRTLRWSGLVSPAWAWSAGWQSLWTFGARPVRAPGAPEVASGERRAASGPRRPRSCRHAADEPSRRREDAAVARARAGGPRGPIRRRAEPEARRGEARRRCTHAHGAMGRHVATSCHVAWLLVLISGCWGQVNRLPFFTNHFFDTYLLISEDTPVGSSVTQLLAQDMDNDPLVFGVSGEEASRFFAVEPDTGVVWLRQPLDRETKSEFTVEFSVSDHQGVITRKVNIQVGDVNDNAPTFHNQPYSVRIPENTPVGTPIFIVNATDPDLGAGGSVLYSFQPPSQFFAIDSARGIVTVIRELDYETTQAYQLTVNATDQDKTRPLSTLANLAIIITDVQDMDPIFINLPYSTNIYEHSPPGTTVRIITAIDQDKGRPRGIGYTIVSGNTNSIFALDYISGVLTLNGLLDRENPLYSHGFILTVKGTELNDDRTPSDATVTTTFNILVIDINDNAPEFNSSEYSVAITELAQVGFALPLFIQVVDKDENLGLNSMFEVYLVGNNSHHFIISPTSVQGKADIRIRVAIPLDYETVDRYDFDLFANESVPDHVGYAKVKITLINENDNRPIFSQPLYNISLYENVTVGTSVLTVLATDNDAGTFGEVSYFFSDDPDRFSLDKDTGLIMLIARLDYELIQRFTLTIIARDGGGEETTGRVRINVLDVNDNVPTFQKDAYVGALRENEPSVTQLVRLRATDEDSPPNNQITYSIVSASAFGSYFDISLYEGYGVISVSRPLDYEQISNGLIYLTVMAMDAGNPPLNSTVPVTIEVFDENDNPPTFSKPAYFVSVVENIMAGATVLFLNATDLDRSREYGQESIIYSLEGSTQFRINARSGEITTTSLLDRETKSEYILIVRAVDGGVGHNQKTGIATVNITLLDINDNHPTWKDAPYYINLVEMTPPDSDVTTVVAVDPDLGENGTLVYSIQPPNKFYSLNSTTGKIRTTHAMLDRENPDPHEAELMRKIVVSVTDCGRPPLKATSSATVFVNLLDLNDNDPTFQNLPFVAEVLEGIPAGVSIYQVVAIDLDEGLNGLVSYRMPVGMPRMDFLINSSSGVVVTTTELDRERIAEYQLRVVASDAGTPTKSSTSTLTIHVLDVNDETPTFFPAVYNVSVSEDVPREFRVVWLNCTDNDVGLNAELSYFITGGNVDGKFSVGYRDAVVRTVVGLDRETTAAYMLILEAIDNGPVGKRHTGTATVFVTVLDVNDNRPIFLQSSYEASVPEDIPEGHSILQLKATDADEGEFGRVWYRILHGNHGNNFRIHVSNGLLMRGPRPLDRERNSSHVLIVEAYNHDLGPMRSSVRVIVYVEDINDEAPVFTQQQYSRLGLRETAGIGTSVIVVQATDRDSGDGGLVNYRILSGAEGKFEIDESTGLIITVNYLDYETKTSYMMNVSATDQAPPFNQGFCSVYITLLNELDEAVQFSNASYEAAILENLALGTEIVRVQAYSIDNLNQITYRFDAYTSTQAKALFKIDAITGVITVQGLVDREKGDFYTLTVVADDGGPKVDSTVKVYITVLDENDNSPRFDFTSDSAVSIPEDCPVGQRVATVKAWDPDAGSNGQVVFSLASGNIAGAFEIVTTNDSIGEVFVARPLDREELDHYILQVVASDRGTPPRKKDHILQVTILDINDNPPVIESPFGYNVSVNENVGGGTAVVQVRATDRDIGINSVLSYYITEGNKDMTFRMDRISGEIATRPAPPDRERQSFYHLVATVEDEGTPTLSATTHVYVTIVDENDNAPMFQQPHYEVLLDEGPDTLNTSLITIQALDLDEGPNGTVTYAIVAGNIVNTFRIDRHMGVITAAKELDYEISHGRYTLIVTATDQCPILSHRLTSTTTVLVNVNDINDNVPTFPRDYEGPFEVTEGQPGPRVWTFLAHDRDSGPNGQVEYSIMDGDPLGEFVISPVEGVLRVRKDVELDRETIAFYNLTICARDRGMPPLSSTMLVGIRVLDINDNDPVLLNLPMNITISENSPVSSFVAHVLASDADSGCNARLTFNITAGNRERAFFINATTGIVTVNRPLDRERIPEYKLTISVKDNPENPRIARRDYDLLLIFLSDENDNHPLFTKSTYQAEVMENSPAGTPLTVLNGPILALDADQDIYAVVTYQLLGAQSGLFDINSSTGVVTVRSGVIIDREAFSPPILELLLLAEDIGLLNSTAHLLITILDDNDNRPTFSPATLTVHLLENCPPGFSVLQVTATDEDSGLNGELVYRIEAGAQDRFLIHLVTGVIRVGNATIDREEQESYRLTVVATDRGTVPLSGTAIVTILIDDINDSRPEFLNPIQTVSVLESAEPGTVIANITAIDHDLNPKLEYHIVGIVAKDDTDRLVPNQEDAFAVNINTGSVMVKSPMNRELVATYEVTLSVIDNASDLPERSVSVPNAKLTVNVLDVNDNTPQFKPFGITYYMERILEGATPGTTLIAVAAVDPDKGLNGLVTYTLLDLVPPGYVQLEDSSAGKVIANRTVDYEEVHWLNFTVRASDNGSPPRAAEIPVYLEIVDINDNNPIFDQPSYQEAVFEDVPVGTIILTVTATDADSGNFALIEYSLGDGESKFAINPTTGDIYVLSSLDREKKDHYILTALAKDNPGDVASNRRENSVQVVIQVLDVNDCRPQFSKPQFSTSVYENEPAGTSVITMMATDQDEGPNGELTYSLEGPGVEAFHVDMDSGLVTTQRPLQSYEKFSLTVVATDGGEPPLWGTTMLLVEVIDVNDNRPVFVRPPNGTILHIREEIPLRSNVYEVYATDKDEGLNGAVRYSFLKTAGNRDWEFFIIDPISGLIQTAQRLDRESQAVYSLILVASDLGQPVPYETMQPLQVALEDIDDNEPLFVRPPKGSPQYQLLTVPEHSPRGTLVGNVTGAVDADEGPNAIVYYFIAAGNEEKNFHLQPDGCLLVLRDLDREREAIFSFIVKASSNRSWTPPRGPSPTLDLVADLTLQEVRVVLEDINDQPPRFTKAEYTAGVATDAKVGSELIQVLALDADIGNNSLVFYSILAIHYFRALANDSEDVGQVFTMGSMDGILRTFDLFMAYSPGYFVVDIVARDLAGHNDTAIIGIYILRDDQRVKIVINEIPDRVRGFEEEFIHLLSNITGAIVNTDNVQFHVDKKGRVNFAQTELLIHVVNRDTNRILDVDRVIQMIDENKEQLRNLFRNYNVLDVQPAISVRLPDDMSALQMAIIVLAILLFLAAMLFVLMNWYYRTVHKRKLKAIVAGSAGNRGFIDIMDMPNTNKYSFDGANPVWLDPFCRNLELAAQAEHEDDLPENLSEIADLWNSPTRTHGTFGREPAAVKPDDDRYLRAAIQEYDNIAKLGQIIREGPIKGSLLKVVLEDYLRLKKLFAQRMVQKASSCHSSISELIQTELDEEPGDHSPGQGSLRFRHKPPVELKGPDGIHVVHGSTGTLLATDLNSLPEEDQKGLGRSLETLTAAEATAFERNARTESAKSTPLHKLRDVIMETPLEITEL

SEQ ID NO: 853411 - protein, 1193 aa, Homo sapiens
SGGGGSGERDAGCRRDAWLEDASDGGRTLRWSGLVSPAWAWSAGWQSLWTFGARPVRAPGAPEVASGERRAASGPRRPRSCRHAADEPSRRREDAAVARARAGGPRGPIRRRAEPEARRGEARRRCTHAHGAMGRHVATSCHVAWLLVLISGCWGQVNRLPFFTNHFFDTYLLISEDTPVGSSVTQLLAQDMDNDPLVFGVSGEEASRFFAVEPDTGVVWLRQPLDRETKSEFTVEFSVSDHQGVITRKVNIQVGDVNDNAPTFHNQPYSVRIPENTPVGTPIFIVNATDPDLGAGGSVLYSFQPPSQFFAIDSARGIVTVIRELDYETTQAYQLTVNATDQDKTRPLSTLANLAIIITDVQDMDPIFINLPYSTNIYEHSPPGTTVRIITAIDQDKGRPRGIGYTIVSGNTNSIFALDYISGVLTLNGLLDRENPLYSHGFILTVKGTELNDDRTPSDATVTTTFNILVIDINDNAPEFNSSEYSVAITELAQVGFALPLFIQVVDKDENLGLNSMFEVYLVGNNSHHFIISPTSVQGKADIRIRVAIPLDYETVDRYDFDLFANESVPDHVGYAKVKITLINENDNRPIFSQPLYNISLYENVTVGTSVLTVLATDNDAGTFGEVSYFFSDDPDRFSLDKDTGLIMLIARLDYELIQRFTLTIIARDGGGEETTGRVRINVLDVNDNVPTFQKDAYVGALRENEPSVTQLVRLRATDEDSPPNNQITYSIVSASAFGSYFDISLYEGYGVISVSRPLDYEQISNGLIYLTVMAMDAGNPPLNSTVPVTIEVFDENDNPPTFSKPAYFVSVVENIMAGATVLFLNATDLDRSREYGQESIIYSLEGSTQFRINARSGEITTTSLLDRETKSEYILIVRAVDGGVGHNQKTGIATVNITLLDINDNHPTWKDAPYYINLVEMTPPDSDVTTVVAVDPDLGENGTLVYSIQPPNKFYSLNSTTGKIRTTHAMLDRENPDPHEAELMRKIVVSVTDCGRPPLKATSSATVFVNLLDLNDNDPTFQNLPFVAEVLEGIPAGVSIYQVVAIDLDEGLNGLVSYRMPVGMPRMDFLINSSSGVVVTTTELDRERIAEYQLRVVASDAGTPTKSSTSTLTIHVLDVNDETPTFFPAVYNVSVSEDVPREFRVVWLNCTDNDVGLNAELSYFITGAAPASAHLCRPPGALPPPLPDGQPD

SEQ ID NO: 853412 - protein, 3471 aa, Homo sapiens
SGGGGSGERDAGCRRDAWLEDASDGGRTLRWSGLVSPAWAWSAGWQSLWTFGARPVRAPGAPEVASGERRAASGPRRPRSCRHAADEPSRRREDAAVARARAGGPRGPIRRRAEPEARRGEARRRCTHAHGAMGRHVATSCHVAWLLVLISGCWGQVNRLPFFTNHFFDTYLLISEDTPVGSSVTQLLAQDMDNDPLVFGVSGEEASRFFAVEPDTGVVWLRQPLDRETKSEFTVEFSVSDHQGVITRKVNIQVGDVNDNAPTFHNQPYSVRIPENTPVGTPIFIVNATDPDLGAGGSVLYSFQPPSQFFAIDSARGIVTVIRELDYETTQAYQLTVNATDQDKTRPLSTLANLAIIITDVQDMDPIFINLPYSTNIYEHSPPGTTVRIITAIDQDKGRPRGIGYTIVSGNTNSIFALDYISGVLTLNGLLDRENPLYSHGFILTVKGTELNDDRTPSDATVTTTFNILVIDINDNAPEFNSSEYSVAITELAQVGFALPLFIQVVDKDENLGLNSMFEVYLVGNNSHHFIISPTSVQGKADIRIRVAIPLDYETVDRYDFDLFANESVPDHVGYAKVKITLINENDNRPIFSQPLYNISLYENVTVGTSVLTVLATDNDAGTFGEVSYFFSDDPDRFSLDKDTGLIMLIARLDYELIQRFTLTIIARDGGGEETTGRVRINVLDVNDNVPTFQKDAYVGALRENEPSVTQLVRLRATDEDSPPNNQITYSIVSASAFGSYFDISLYEGYGVISVSRPLDYEQISNGLIYLTVMAMDAGNPPLNSTVPVTIEVFDENDNPPTFSKPAYFVSVVENIMAGATVLFLNATDLDRSREYGQESIIYSLEGSTQFRINARSGEITTTSLLDRETKSEYILIVRAVDGGVGHNQKTGIATVNITLLDINDNHPTWKDAPYYINLVEMTPPDSDVTTVVAVDPDLGENGTLVYSIQPPNKFYSLNSTTGKIRTTHAMLDRENPDPHEAELMRKIVVSVTDCGRPPLKATSSATVFVNLLDLNDNDPTFQNLPFVAEVLEGIPAGVSIYQVVAIDLDEGLNGLVSYRMPVGMPRMDFLINSSSGVVVTTTELDRERIAEYQLRVVASDAGTPTKSSTSTLTIHVLDVNDETPTFFPAVYNVSVSEDVPREFRVVWLNCTDNDVGLNAELSYFITGGNVDGKFSVGYRDAVVRTVVGLDRETTAAYMLILEAIDNGPVGKRHTGTATVFVTVLDVNDNRPIFLQSSYEASVPEDIPEGHSILQLKATDADEGEFGRVWYRILHGNHGNNFRIHVSNGLLMRGPRPLDRERNSSHVLIVEAYNHDLGPMRSSVRVIVYVEDINDEAPVFTQQQYSRLGLRETAGIGTSVIVVQATDRDSGDGGLVNYRILSGAEGKFEIDESTGLIITVNYLDYETKTSYMMNVSATDQAPPFNQGFCSVYITLLNELDEAVQFSNASYEAAILENLALGTEIVRVQAYSIDNLNQITYRFDAYTSTQAKALFKIDAITGVITVQGLVDREKGDFYTLTVVADDGGPKVDSTVKVYITVLDENDNSPRFDFTSDSAVSIPEDCPVGQRVATVKAWDPDAGSNGQVVFSLASGNIAGAFEIVTTNDSIGEVFVARPLDREELDHYILQVVASDRGTPPRKKDHILQVTILDINDNPPVIESPFGYNVSVNENVGGGTAVVQVRATDRDIGINSVLSYYITEGNKDMTFRMDRISGEIATRPAPPDRERQSFYHLVATVEDEGTPTLSATTHVYVTIVDENDNAPMFQQPHYEVLLDEGPDTLNTSLITIQALDLDEGPNGTVTYAIVAGNIVNTFRIDRHMGVITAAKELDYEISHGRYTLIVTATDQCPILSHRLTSTTTVLVNVNDINDNVPTFPRDYEGPFEVTEGQPGPRVWTFLAHDRDSGPNGQVEYSIMDGDPLGEFVISPVEGVLRVRKDVELDRETIAFYNLTICARDRGMPPLSSTMLVGIRVLDINDNDPVLLNLPMNITISENSPVSSFVAHVLASDADSGCNARLTFNITAGNRERAFFINATTGIVTVNRPLDRERIPEYKLTISVKDNPENPRIARRDYDLLLIFLSDENDNHPLFTKSTYQAEVMENSPAGTPLTVLNGPILALDADQDIYAVVTYQLLGAQSGLFDINSSTGVVTVRSGVIIDREAFSPPILELLLLAEDIGLLNSTAHLLITILDDNDNRPTFSPATLTVHLLENCPPGFSVLQVTATDEDSGLNGELVYRIEAGAQDRFLIHLVTGVIRVGNATIDREEQESYRLTVVATDRGTVPLSGTAIVTILIDDINDSRPEFLNPIQTVSVLESAEPGTVIANITAIDHDLNPKLEYHIVGIVAKDDTDRLVPNQEDAFAVNINTGSVMVKSPMNRELVATYEVTLSVIDNASDLPERSVSVPNAKLTVNVLDVNDNTPQFKPFGITYYMERILEGATPGTTLIAVAAVDPDKGLNGLVTYTLLDLVPPGYVQLEDSSAGKVIANRTVDYEEVHWLNFTVRASDNGSPPRAAEIPVYLEIVDINDNNPIFDQPSYQEAVFEDVPVGTIILTVTATDADSGNFALIEYSLGDGESKFAINPTTGDIYVLSSLDREKKDHYILTALAKDNPGDVASNRRENSVQVVIQVLDVNDCRPQFSKPQFSTSVYENEPAGTSVITMMATDQDEGPNGELTYSLEGPGVEAFHVDMDSGLVTTQRPLQSYEKFSLTVVATDGGEPPLWGTTMLLVEVIDVNDNRPVFVRPPNGTILHIREEIPLRSNVYEVYATDKDEGLNGAVRYSFLKTAGNRDWEFFIIDPISGLIQTAQRLDRESQAVYSLILVASDLGQPVPYETMQPLQVALEDIDDNEPLFVRPPKGSPQYQLLTVPEHSPRGTLVGNVTGAVDADEGPNAIVYYFIAAGNEEKNFHLQPDGCLLVLRDLDREREAIFSFIVKASSNRSWTPPRGPSPTLDLVADLTLQEVRVVLEDINDQPPRFTKAEYTAGVATDAKVGSELIQVLALDADIGNNSLVFYSILAIHYFRALANDSEDVGQVFTMGSMDGILRTFDLFMAYSPGYFVVDIVARDLAGHNDTAIIGIYILRDDQRVKIVINEIPDRVRGFEEEFIHLLSNITGAIVNTDNVQFHVDKKGRVNFAQTELLIHVVNRDTNRILDVDRYPATVPHSPSRPPHCPGFTLVLLPQMAIIVLAILLFLAAMLFVLMNWYYRTVHKRKLKAIVAGSAGNRGFIDIMDMPNTNKYSFDGANPVWLDPFCRNLELAAQAEHEDDLPENLSEIADLWNSPTRTHGTFGREPAAVKPDDDRYLRAAIQEYDNIAKLGQIIREGPIKGSLLKVVLEDYLRLKKLFAQRMVQKASSCHSSISELIQTELDEEPGDHSPGQGSLRFRHKPPVELKGPDGIHVVHGSTGTLLATDLNSLPEEDQKGLGRSLETLTAAEATAFERNARTESAKSTPLHKLRDVIMETPLEITEL

SEQ ID NO: 853413 - protein, 57 aa, Homo sapiens
MDGILRTFDLFMAYSPGYFVVDIVARDLAGHNDTAIIGIYILRDDQRVKIVINEIPD

SEQ ID NO: 853414 - protein, 68 aa, Homo sapiens
EAAILENLALGTEIVRVQAYSIDNLNQITYRFDAYTSTQAKALFKIDAITVEGLGAGSTISSNLTNIG

SEQ ID NO: 853415 - protein, 301 aa, Homo sapiens
MKSNPAIQAAIDLTAGAAGGTACVLTGQPFDTMKVKMQTFPDLYRGLTDCCLKTYSQVGFRGFYKGTSPALIANIAENSVLFMCYGFCQQVVRKVAGLDKQAKLSDLQNAAAGSFASAFAALVLCPTELVKCRLQTMYEMETSGKIAKSQNTVWSVIKSILRKDGPLGFYHGLSSTLLREVPGYFFFFGGYELSRSFFASGRSKDELGPVPLMLSGGVGGICLWLAVYPVDCIKSRIQVLSMSGKQAGFIRTFINVVKNEGITALYSGLKPTMIRAFPANGALFLAYEYSRKLMMNQLEAY

SEQ ID NO: 853416 - protein, 301 aa, Homo sapiens; identical to SEQ ID NO: 853415

SEQ ID NO: 853417 - protein, 288 aa, Homo sapiens [sequence omitted]

SEQ ID NO: 853418 - protein, 301 aa, Homo sapiens; identical to SEQ ID NO: 853415

SEQ ID NO: 853419 - protein, 183 aa, Homo sapiens
MKSNPVCPTELVKCRLQTMYEMETSGKIAKSQNTVWSVIKSILRKDGPLGFYHGLSSTLLREVPGYFFFFGGYELSRSFFASGRSKDELGPVPLMLSGGVGGICLWLAVYPVDCIKSRIQVLSMSGKQAGFIRTFINVVKNEGITALYSGLKPTMIRAFPANGALFLAYEYSRKLMMNQLEAY

SEQ ID NO: 853420 - protein, 117 aa, Homo sapiens
VSSGVGCLCLPSMDNGTVSLVLEQSSVLIAGGTACVLTGQPFDTMKVKMQTFPDLYRGLTDCCLKTYSQVGFRGFYKGTSPALIANIAENSVLFMCYGFCQQVVRKVAGLDKQAKLR

SEQ ID NO: 853421 - protein, 301 aa, Homo sapiens; identical to SEQ ID NO: 853415

SEQ ID NO: 853422 - protein, 165 aa, Homo sapiens
MYEMETSGKIAKSQNTVWSVIKSILRKDGPLGFYHGLSSTLLREVPGYFFFFGGYELSRSFFASGRSKDELGPVPLMLSGGVGGICLWLAVYPVDCIKSRIQVLSMSGKQAGFIRTFINVVKNEGITALYSGLKPTMIRAFPANGALFLAYEYSRKLMMNQLEAY

SEQ ID NO: 853423 - protein, 356 aa, Homo sapiens
MKSNPAIQAAIDLTAGAAGGTACVLTGQPFDTMKVKMQTFPDLYRGLTDCCLKTYSQVGFRGFYKGTSPALIANIAENSVLFMCYGFCQQVVRKVAGLDKQAKLRLTESPRGRPTVDLQAGCKTTETILSFSSNKLLRSEVGERSGLNSIGWFPHPIKAVDLQNAAAGSFASAFAALVLCPTELVKCRLQTMYEMETSGKIAKSQNTVWSVIKSILRKDGPLGFYHGLSSTLLREVPGYFFFFGGYELSRSFFASGRSKDELGPVPLMLSGGVGGICLWLAVYPVDCIKSRIQVLSMSGKQAGFIRTFINVVKNEGITALYSGLKPTMIRAFPANGALFLAYEYSRKLMMNQLEAY

SEQ ID NO: 853424 - protein, 301 aa, Homo sapiens; identical to SEQ ID NO: 853415

SEQ ID NO: 853425 - protein, 184 aa, Homo sapiens
ALPPPSHAEVNGGTQEGLRAPGHLEGIHEVFYQEEVPQLRGRRDHAGGDLVGQTFRLLPSQGEVHIQGSLDNMTCILVCFPGAPRPSEEAIRRELALDAALGCRIAELCASAQKPPSLNTVFRTLASEDIPDLPPGGGLDCKATVIAEVYSQICQVSEECGEKGQDGAGKSNPTHLGSALDMEA

SEQ ID NO: 853426 - protein, 112 aa, Homo sapiens
MTCILVCFPGAPRPSEEAIRRELALDAALGCRIAELCASAQKPPSLNTVFRTLASEDIPDLPPGGGLDCKATVIAEVYSQICQVSEECGEKGQDGAGKSNPTHLGSALDMEA

SEQ ID NO: 853427 - protein, 112 aa, Homo sapiens; identical to SEQ ID NO: 853426

SEQ ID NO: 853428 - protein, 184 aa, Homo sapiens; identical to SEQ ID NO: 853425

SEQ ID NO: 853429 - protein, 202 aa, Homo sapiens
ALPPPSHAEVNGGTQEGLRAPGHLEGIHEVFYQEEVPQLRGRRDHAGGDLVGQTFRLLPSQGEVHIQGSLDNMTCILVCFPGAPRPSEEAIRRELALDAALGCRIAELCASAQKPPSLNTVFRTLASEDIPDLPPGGGLDCKRGRMGLGSPTPRIWAQPWTWRPDSCCPLGILCFSGASTELKKKTDPFPNYMYQRKEGRPM

SEQ ID NO: 853430 - protein, 202 aa, Homo sapiens; identical to SEQ ID NO: 853429

SEQ ID NO: 853431 - protein, 267 aa, Homo sapiens
RPHGGAEASGGLRFGASAAQGWRARMEDAHCTWLSLPGLPPGWALFAVLDGHGGARAARFGARHLPGHVLQELGPEPSEPEGVREALRRAFLSADERLRSLWPRVETGGCTAVVLLVSPRFLYLAHCGDSRAVLSRAGAVAFSTEDHRPLRPRERERIHAAGGTIRRRRVEGSLAVSRALGDFTYKEAPGRPPELQLVSAEPEVAALARQAEDEFMLLASDGVWDTVSGAAWRDWWLHASAWAWPQSFSARTVVLWGSFASLGPQQN

SEQ ID NO: 853432 - protein, 184 aa, Homo sapiens; identical to SEQ ID NO: 853425

SEQ ID NO: 853433 - protein, 212 aa, Homo sapiens
ALPPPSHAEVNGGTQEGLRAPGHLEGIHEVFYQEEVPQLRGRRDHAGGDLVGQTFRLLPSQGEVHIQGSLDNMTCILVCFPGAPRPSEEAIRRELALDAALGCRIAELCASAQKPPSLNTVFRTLASEDIPDLPPGGGLDCKSARSQKSAERRGRMGLGSPTPRIWAQPWTWRPDSCCPLGILCFSGASTELKKKTDPFPNYMYQRKEGRPM

SEQ ID NO: 853434 - protein, 818 aa, Homo sapiens
MSTVEEDSDTVTVETVNSVTLTQDTEGNLILHCPQNEADEIDSEDSIEPPHKRLCLSSEDDQSIDDSTPCISVVALPLSENDQSFEVTMTATTEVADDEVTEGTVTQIQILQNEQLDEISPLGNEEVSAVSQAWFTTKEDKDSLTNKGHKWKQGMWSKEEIDILMNNIERYLKARGIKDATEIIFEMSKDERKDFYRTIAWGLNRPLFAVYRRVLRMYDDRNHVGKYTPEEIEKLKEQLWTPKKGHTFKLWLSKYCCPQLPNQSNGKKKNEELNDEIKREKTIEPNADWQTLVFRLRIKHGNDWATIGAALGRSASSVKDRCRLMKDTCNTGKWTEEEEKRLAEVVHELTSTEPGDIVTQGVSWAAVAERVGTRSEKQCRSKWLNYLNWKQSGGTEWTKEDEINLILRIAELDVADENDINWDLLAEGWSSVRSPQWLRSKWWTIKRQIANHKDVSFPVLIKGLKQLHENQKNNPTLLENKSGSGVPNSNTNSSVQHVQIRVARLEDNTAISSSPMAALQIPVQITHVSSADSPATVDSETITLNSGTLQTFEILPSFHLQPTGTPGTYLLQTSSSQGLPLTLTASPTVTLTAAAPASPEQIIVHALSPEHLLNTSDNVTVQCHTPRVIIQTVATEDITSSISQAELTVDSDIQSSDFPEPPDALEADTFPDEIHHPKMTVEPSFNDAHVSKFSDQNSTELMNSVMVRTEEEISDTDLKQEESPSDLASAYVTEGLESPTIEEQVDQTIDDETILIVPSPHGFIQASDVIDTESVLPLTTLTDPILQHHQEESNIIGSSLGSPVSEDSKDVEDLVNCH

SEQ ID NO: 853435 - protein, 137 aa, Homo sapiens [sequence omitted]

SEQ ID NO: 853436 - protein, 818 aa, Homo sapiens; identical to SEQ ID NO: 853434

SEQ ID NO: 853437 - protein, 818 aa, Homo sapiens; identical to SEQ ID NO: 853434

SEQ ID NO: 853438 - protein, 818 aa, Homo sapiens; identical to SEQ ID NO: 853434

SEQ ID NO: 853439 - protein, 818 aa, Homo sapiens; identical to SEQ ID NO: 853434

SEQ ID NO: 853440 - protein, 398 aa, Homo sapiens [sequence omitted]

SEQ ID NO: 853441 - protein, 786 aa, Homo sapiens
MSTVEEDSDTVTVETVNSVTLTQDTEGNLILHCPQNEADEIDSEDSIEPPHKRLCLSSEDDQSIDDSTPCISVVALPLSENDQSFEVTMTATTEVADDEVTEGTVTQIQILQNEQLDEISPLGNEEVSAVSQAWFTTKEDKDSLTNKGHKWKQGMWSKEEIDILMNNIERYLKARGIKDATEIIFEMSKDERKDFYRTIAWGLNRPLFAVYRRVLRMYDDRNHVGKYTPEEIEKLKEQLWTPKKGHTFKLWLSKYCCPQLPNQSNGKKKNEELNDEIKREKTIEPNADWQTLVFRLRIKHGNDWATIGAALGRSASSVKDRCRLMKDTCNTGKWTEEEEKRLAEVVHELTSTEPGDIVTQGVSWAAVAERVGTRSEKQCRSKWLNYLNWKQSGGTEWTKEDEINLILRIAELDVADENDINWDLLAEGWSSVRSPQWLRSKWWTIKRQIANHKDVSFPVLIKGLKQLHENQKNNPTLLENKSGSGVPNSNTNSSVQHVQIRVARLEDNTAISSSPMAALQIPVQITHVSSADSPATVDSETITLNSGTLQTFEILPSFHLQPTGTPGTYLLQTSSSQGLPLTLTASPTVTLTAAAPASPEQIIVHALSPEHLLNTSDNVTVQCHTPRVIIQTVATEDITSSISQAELTVDSDIQSSDFPEPPDALEADTFPDEIHHPKMTVEPSFNDAHVSKFSDQNSTELMNSVMVRTEEEISDTDLKQEESPSDLASAYVTEGLESPTIEEQVDQTIDDETILIVPSPHGFIQASDVIDTESVLPLTTLTGTVI

SEQ ID NO: 853442 - protein, 800 aa, Homo sapiens
MSTVEEDSDTVTVETVNSVTLTQDTEGNLILHCPQNEADEIDSEDSIEPPHKRLCLSSEDDQSIDDSTPCISVVALPLSENDQSFEVTMTATTEVADDEVTEGTVTQIQILQNEQLDEISPLGNEEVSAVSQAWFTTKEDKDSLTNKGHKWKQGMWSKEEIDILMNNIERYLKARGIKDATEIIFEMSKDERKDFYRTIAWGLNRPLFAVYRRVLRMYDDRNHVGKYTPEEIEKLKEQLWTPKKGHTFKLWLSKYCCPQLPNQSNGKKKNEELNDEIKREKTIEPNADWQTLVFRLRIKHGNDWATIGAALGRSASSVKDRCRLMKDTCNTGKWTEEEEKRLAEVVHELTSTEPGDIVTQGVSWAAVAERVGTRSEKQCRSKWLNYLNWKQSGGTEWTKEDEINLILRIAELDVADENDINWDLLAEGWSSVRSPQWLRSKWWTIKRQIANHKDVSFPVLIKGLKQLHENQKNNPTLLENKSGSGVPNSNTNSSVQHVQIRVARLEDNTAISSSPMAALQIPVQITHVSSADSPATVDSETITLNSGTLQTFEILPSFHLQPTGTPGTYLLQTSSSQGLPLTLTASPTVTLTAAAPASPEQIIVHALSPEHLLNTSDNVTVQCHTPRVIIQTVATEDITSSISQAELTVDSDIQSSDFPEPPDALEADTFPDEIHHPKMTVEPSFNDAHVSKFSDPDTDLKQEESPSDLASAYVTEGLESPTIEEQVDQTIDDETILIVPSPHGFIQASDVIDTESVLPLTTLTDPILQHHQEESNIIGSSLGSPVSEDSKDVEDLVNCH

SEQ ID NO: 853443 - protein, 735 aa, Homo sapiens
MSTVEEDSDTVTVETVNSVTLTQDTEGNLILHCPQNEADEIDSEDSIEPPHKRLCLSSEDDQSIDDSTPCISVVALPLSENDQSFEVTMTATTEVADDEVTEGTVTQIQILQNEQLDEISPLGNEEVSAVSQAWFTTKEDKDSLTNKGHKWKQGMWSKEEIDILMNNIERYLKARGIKDATEIIFEMSKDERKDFYRTIAWGLNRPLFAVYRRVLRMYDDRNHVGKYTPEEIEKLKEQLWTPKKGHTFKLWLSKYCCPQLPNQSNGKKKNEELNDEIKREKTIEPNADWQTLVFRLRIKHGNDWATIGAALGRSASSVKDRCRLMKDTCNTGKWTEEEEKRLAEVVHELTSTEPGDIVTQGVSWAAVAERVGTRSEKQCRSKWLNYLNWKQSGGTEWTKEDEINLILRIAELDVADENDINWDLLAEGWSSVRSPQWLRSKWWTIKRQIANHKDVSFPVLIKGLKQLHENQKNNPTLLENKSGSGVPNSNTNSSVQHVQIRVARLEDNTAISSSPMAALQIPVQITHVSSADSPATVDSETITLNSGTLQTFEILPSFHLQPTGTPGTYLLQTSSSQGLPLTLTASPTVTLTAAAPASPEQIIVHALSPEHLLNTSDNVTVQCHTPRVIIQTVATEDITSSISQAELTVDSDIQSSDFPEPPDALEADTFPDEIHHPKMTVEPSFNDAHVSKFSDQNSTELMNSVMVRTEEEISDTDLKQEESPSDLASAYVTER

SEQ ID NO: 853444 - protein, 272 aa, Homo sapiens
MSTVEEDSDTVTVETVNSVTLTQDTEGNLILHCPQNEADEIDSEDSIEPPHKRLCLSSEDDQSIDDSTPCISVVALPLSENDQSFEVTMTATTEVADDEVTEGTVTQIQILQNEQLDEISPLGNEEVSAVSQAWFTTKEDKDSLTNKGHKWKQGMWSKEEIDILMNNIERYLKARGIKDATEIIFEMSKDERKDFYRTIAWGLNRPLFAVYRRVLRMYDDRNHVGKYTPEEIEKLKEQLWTPKKGHTFKLWLSKYCCPQLPNQSNGKKKNEE

SEQ ID NO: 853445 - protein, 572 aa, Homo sapiens
MSTVEEDSDTVTVETVNSVTLTQDTEGNLILHCPQNEADEIDSEDSIEPPHKRLCLSSEDDQSIDDSTPCISVVALPLSENDQSFEVTMTATTEVADDEVTEGTVTQIQILQNEQLDEISPLGNEEVSAVSQAWFTTKEDKDSLTNKGHKWKQGMWSKEEIDILMNNIERYLKARGIKDATEIIFEMSKDERKDFYRTIAWGLNRPLFAVYRRVLRMYDDRNHVGKYTPEEIEKLKEQLWTPKKGHTFKLWLSKYCCPQLPNQSNGKKKNEELNDEIKREKTIEPNADWQTLVFRLRIKHGNDWATIGAALGRSASSVKDRCRLMKDTCNTGKWTEEEEKRLAEVVHELTSTEPGDIVTQGVSWAAVAERVGTRSEKQCRSKWLNYLNWKQSGGTEWTKEDEINLILRIAELDVADENDINWDLLAEGWSSVRSPQWLRSKWWTIKRQIANHKDVSFPVLIKGLKQLHENQKNNPTLLENKSGSGVPNSNTNSSVQHVQIRVARLEDNTAISSSPMAALQIPVQITHVSSADSPATVDSETITLNSGTLQTFEILPFLMYSSLHSSVLNKGL

SEQ ID NO: 853446 - protein, 272 aa, Homo sapiens; identical to SEQ ID NO: 853444

SEQ ID NO: 853447 - protein, 760 aa, Homo sapiens
MSTVEEDSDTVTVETVNSVTLTQDTEGNLILHCPQNEADEIDSEDSIEPPHKRLCLSSEDDQSIDDSTPCISVVALPLSENDQSFEVTMTATTEVADDEVTEGTVTQIQILQNEQLDEISPLGNEEVSAVSQAWFTTKEDKDSLTNKGHKWKQGMWSKEEIDILMNNIERYLKARGIKDATEIIFEMSKDERKDFYRTIAWGLNRPLFAVYRRVLRMYDDRNHVGKYTPEEIEKLKELRIKHGNDWATIGAALGRSASSVKDRCRLMKDTCNTGKWTEEEEKRLAEVVHELTSTEPGDIVTQGVSWAAVAERVGTRSEKQCRSKWLNYLNWKQSGGTEWTKEDEINLILRIAELDVADENDINWDLLAEGWSSVRSPQWLRSKWWTIKRQIANHKDVSFPVLIKGLKQLHENQKNNPTLLENKSGSGVPNSNTNSSVQHVQIRVARLEDNTAISSSPMAALQIPVQITHVSSADSPATVDSETITLNSGTLQTFEILPSFHLQPTGTPGTYLLQTSSSQGLPLTLTASPTVTLTAAAPASPEQIIVHALSPEHLLNTSDNVTVQCHTPRVIIQTVATEDITSSISQAELTVDSDIQSSDFPEPPDALEADTFPDEIHHPKMTVEPSFNDAHVSKFSDQNSTELMNSVMVRTEEEISDTDLKQEESPSDLASAYVTEGLESPTIEEQVDQTIDDETILIVPSPHGFIQASDVIDTESVLPLTTLTDPILQHHQEESNIIGSSLGSPVSEDSKDVEDLVNCH

SEQ ID NO: 853448 - protein, 831 aa, Homo sapiens
MSTVEEDSDTVTVETVNSVTLTQDTEGNLILHCPQNEADEIDSEDSIEPPHKRLCLSSEDDQSIDDSTPCISVVALPLSENDQSFEVTMTATTEVADDEVTEGTVTQIQILQNEQLDEISPLGNEEVSAVSQAWFTTKEDKDSLTNKGHKWKQGMWSKEEIDILMNNIERYLKARGIKDATEIIFEMSKDERKDFYRTIAWGLNRPLFAVYRRVLRMYDDRNHVGKYTPEEIEKLKEKKAIAACFFFTHRQLWTPKKGHTFKLWLSKYCCPQLPNQSNGKKKNEELNDEIKREKTIEPNADWQTLVFRLRIKHGNDWATIGAALGRSASSVKDRCRLMKDTCNTGKWTEEEEKRLAEVVHELTSTEPGDIVTQGVSWAAVAERVGTRSEKQCRSKWLNYLNWKQSGGTEWTKEDEINLILRIAELDVADENDINWDLLAEGWSSVRSPQWLRSKWWTIKRQIANHKDVSFPVLIKGLKQLHENQKNNPTLLENKSGSGVPNSNTNSSVQHVQIRVARLEDNTAISSSPMAALQIPVQITHVSSADSPATVDSETITLNSGTLQTFEILPSFHLQPTGTPGTYLLQTSSSQGLPLTLTASPTVTLTAAAPASPEQIIVHALSPEHLLNTSDNVTVQCHTPRVIIQTVATEDITSSISQAELTVDSDIQSSDFPEPPDALEADTFPDEIHHPKMTVEPSFNDAHVSKFSDQNSTELMNSVMVRTEEEISDTDLKQEESPSDLASAYVTEGLESPTIEEQVDQTIDDETILIVPSPHGFIQASDVIDTESVLPLTTLTDPILQHHQEESNIIGSSLGSPVSEDSKDVEDLVNCH

SEQ ID NO: 853449 - protein, 57 aa, Homo sapiens
MSTVEEDSDTVTVETVNSVTLTQDTEGNLILHCPQNVCGPAVHLLCAVHLLCAVQLS

SEQ ID NO: 853450 - protein, 818 aa, Homo sapiens; identical to SEQ ID NO: 853434

SEQ ID NO: 853451 - protein, 778 aa, Homo sapiens
MSTVEEDSDTVTVETVNSVTLTQDTEGNLILHCPQNEADEIDSEDSIEPPHKRLCLSSEDDQSIDDSTPCISVVALPLSENDQSFEVTMTATTEVADDEVTEGTVTQIQILQNEQLDEISPLGNEEVSAVSQAWFTTKEDKDSLTNKGHKWKQGMWSKEEIDILMNNIERYLKARGIKDATEIIFEMSKDERKDFYRTIAWGLNRPLFAVYRRVLRMYDDRNHVGKYTPEEIEKLKELRIKHGNDWATIGAALGRSASSVKDRCRLMKDTCNTGKWTEEEEKRLAEVVHELTSTEPGDIVTQGVSWAAVAERVGTRSEKQCRSKWLNYLNWKQSGGTEWTKEDEINLILRIAELDVADENDINWDLLAEGWSSVRSPQWLRSKWWTIKRQIANHKDVSFPDGGLSENQCFFLSTHLPSVLIKGLKQLHENQKNNPTLLENKSGSGVPNSNTNSSVQHVQIRVARLEDNTAISSSPMAALQIPVQITHVSSADSPATVDSETITLNSGTLQTFEILPSFHLQPTGTPGTYLLQTSSSQGLPLTLTASPTVTLTAAAPASPEQIIVHALSPEHLLNTSDNVTVQCHTPRVIIQTVATEDITSSISQAELTVDSDIQSSDFPEPPDALEADTFPDEIHHPKMTVEPSFNDAHVSKFSDQNSTELMNSVMVRTEEEISDTDLKQEESPSDLASAYVTEGLESPTIEEQVDQTIDDETILIVPSPHGFIQASDVIDTESVLPLTTLTDPILQHHQEESNIIGSSLGSPVSEDSKDVEDLVNCH

SEQ ID NO: 853452 - protein, 140 aa, Homo sapiens
MTVEPSFNDAHVSKFSDQNSTELMNSVMVRTEEEISDTDLKQEESPSDLASAYVTEGLESPTIEEQVDQTIDDETILIVPSPHGFIQASDVIDTESVLPLTTLTDPILQHHQEESNIIGSSLGSPVSEDSKDVEDLVNCH

SEQ ID NO: 853453 - protein, 766 aa, Homo sapiens
MSTVEEDSDTVTVETVNSVTLTQDTEGNLILHCPQNEADEIDSEDSIEPPHKRLCLSSEDDQSIDDSTPCISVVALPLSENDQSFEVTMTATTEVADDEVTEGTVTQIQILQNEQLDEISPLGNEEVSAVSQAWFTTKEDKDSLTNKGHKWKQGMWSKEEIDILMNNIERYLKARGIKDATEIIFEMSKDERKDFYRTIAWGLNRPLFAVYRRVLRMYDDRNHVGKYTPEEIEKLKEQLWTPKKGHTFKLWLSKYCCPQLPNQSNGKKKNEELNDEIKREKTIEPNADWQTLVFRLRIKHGNDWATIGAALGRSASSVKDRCRLMKDTCNTGKWTEEEEKRLAEVVHELTSTEPGDIVTQGVSWAAVAERVGTRSEKQCRSKWLNYLNWKQSGGTEWTKEDEINLILRIAELDVADENDINWDLLAEGWSSVRSPQWLRSKWWTIKRQIANHKDVSFPVLIKGLKQLHENQKNNPTLLENKSGSGVPNSNTNSSVQHVQIRVARLEDNTAISSSPMAALQIPVQITHVSSADSPATVDSETITLNSGTLQTFEILPSFHLQPTGTPGTYLLQTSSSQGLPLTLTASPTVTLTAAAPASPEQIIVHALSPEHLLNTSDNVTVQCHTPRVIIQTVATEDITSSISQAELTVDSDIQSSDFPEPPDALEADTFPDEIHHPKMTVEPSFNDAHVSKFSDQNSTELMNSVMVRTEEEISDTDLKQEESPSDLASAYVTEIPYSNIIRKNQISLDHPWAVLFQKIQRMSKIW

SEQ ID NO: 853454 - protein, 108 aa, Homo sapiens
MTVEPSFNDAHVSKFSDQNSTELMNSVMVRTEEEISDTDLKQEESPSDLASAYVTEGLESPTIEEQVDQTIDDETILIVPSPHGFIQASDVIDTESVLPLTTLTGTVI

SEQ ID NO: 853455 - protein, 621 aa, Homo sapiens
MSTVEEDSDTVTVETVNSVTLTQDTEGNLILHCPQNEADEIDSEDSIEPPHKRLCLSSEDDQSIDDSTPCISVVALPLSENDQSFEVTMTATTEVADDEVTEGTVTQIQILQNEQLDEISPLGNEEVSAVSQAWFTTKEDKDSLTNKGHKWKQGMWSKEEIDILMNNIERYLKARGIKDATEIIFEMSKDERKDFYRTIAWGLNRPLFAVYRRVLRMYDDRNHVGKYTPEEIEKLKEQLWTPKKGHTFKLWLSKYCCPQLPNQSNGKKKNEELNDEIKREKTIEPNADWQTLVFRLRIKHGNDWATIGAALGRSASSVKDRCRLMKDTCNTGKWTEEEEKRLAEVVHELTSTEPGDIVTQGVSWAAVAERVGTRSEKQCRSKWLNYLNWKQSGGTEWTKEDEINLILRIAELDVADENDINWDLLAEGWSSVRSPQWLRSKWWTIKRQIANHKDVSFPVLIKGLKQLHENQKNNPTLLENKSGSGVPNSNTNSSVQHVQIRVARLEDNTAISSSPMAALQIPVQITHVSSADSPATVDSETITLNSGTLQTFEILPSFHLQPTGTPGTYLLQTSSSQGLPLTLTASPTVTLTAAAPASPEQIIVHALSVCYINYLIFEYLL

SEQ ID NO: 853456 - protein, 407 aa, Homo sapiens
MSTVEEDSDTVTVETVNSVTLTQDTEGNLILHCPQNEADEIDSEDSIEPPHKRLCLSSEDDQSIDDSTPCISVVALPLSENDQSFEVTMTATTEVADDEVTEGTVTQIQILQNEQLDEISPLGNEEVSAVSQAWFTTKEDKDSLTNKGHKWKQGMWSKEEIDILMNNIERYLKARGIKDATEIIFEMSKDERKDFYRTIAWGLNRPLFAVYRRVLRMYDDRNHVGKYTPEEIEKLKELRIKHGNDWATIGAALGRSASSVKDRCRLMKDTCNTGKWTEEEEKRLAEVVHELTSTEPGDIVTQGVSWAAVAERVGTRSEKQCRSKWLNYLNWKQSGGTEWTKEDEINLILRIAELDVADENDINWDLLAEGWSSVRSPQWLRSKWWTIKRQIANHKDVSFPGNVLLTF

SEQ ID NO: 853457 - protein, 417 aa, Homo sapiens
KERGKLIGPQSVRDDPRIQHCRRMGQLQSELQYRRGATSSQAQFHLPMDMVHLVHAKNAQALASDHDYRTQYHKFTALPEDLKMAWAKKAHALQSELRYKSDLIGMKGIGWLALRSPQMESAKKAGELISETKYRKKPDSIKFTTVVDSPDLVHAKNSYMHCNERMYRSGDAESLHRYTLIPDHPDFTRARLNALHLSDKVYRNSWEQTRAGSYDFRLDAIPFQTARASREIASDFRYKEAFLRDRGLQIGYRSVDDDPRMKHFLNVGRLQSDNEYKKDFAKSRSQFHSSTDQPGLLQAKRSQQLASDVHYRQPLPQPTCDPEQLGLRHAQKAHQLQSDVKYKSDLNLTRGVGWTPPGSYKVEMARRAAELANARGLGLQGAYRGAEAVEAGDHQSGEVNPDATEILHVKKKKALLL

SEQ ID NO: 853458 - protein, 157 aa, Homo sapiens
MKHFLNVGRLQSDNEYKKDFAKSRSQFHSSTDQPGLLQAKRSQQLASDVHYRQPLPQPTCDPEQLGLRHAQKAHQLQSDVKYKSDLNLTRGVGWTPPGSYKVEMARRAAELANARGLGLQGAYRGAEAVEAGDHQSGEVNPDATEILHVKKKKALLL

SEQ ID NO: 853459 - protein, 373 aa, Homo sapiens
  misc_feature (9)..(9): Xaa can be any naturally occurring amino acid
PEFILSKNXMQPTLSDARYKESWRNLRAQGYKLTIEALPFQAARASGDIASDLRYKSDLIGMKGIGWLALRSPQMESAKKAGELISETKYRKKPDSIKFTTVVDSPDLVHAKNSYMHCNERMYRSGDAESLHRYTLIPDHPDFTRARLNALHLSDKVYRNSWEQTRAGSYDFRLDAIPFQTARASREIASDFRYKEAFLRDRGLQIGYRSVDDDPRMKHFLNVGRLQSDNEYKKDFAKSRSQFHSSTDQPGLLQAKRSQQLASDVHYRQPLPQPTCDPEQLGLRHAQKAHQLQSDVKYKSDLNLTRGVGWTPPGSYKVEMARRAAELANARGLGLQGAYRGAEAVEAGDHQSGEVNPDATEILHVKKKKALLL

SEQ ID NO: 853460 - protein, 1116 aa, Homo sapiens
MNVQPCSRCGYGVYPAEKISCIDQIWHKACFHCEVCKMMLSVNNFVSHQKKPYCHAHNPKNNTFTSVYHTPLNLNVRTFPEAISGIHDQEDGEQCKSVFHWDMKSKDKEGAPNRQPLANERAYWTGYGEGNAWCPGALPDPEIVRMVEARKSLGEEYTEDYEQPRGKGSFPAMITPAYQRAKKANQLASQVEYKRGHDERISRFSTVADTPELLRSKAGAQLQSDVRYTEDYEQQRGKGSFPAMITPAYQIAKRANELASDVRYHQQYQKEMRGMAGPAIGTEGILTRECADQYGQGYPEEYEEHRGKGSFPAMITPAYQNAKKAHELASDIKYRQDFNKMKGAAHYHSLPAQDNLVLKQAQSVNKLVSEVEYKKDLESSRGHSINYCETPQFRNVSKISKFTSDNKYKENYQNHMRGRYEGVGMDRRTLHAMKVGSLASNVAYKADYKHDIVDYNYPATLTPSYQTAMKLVPLKDANYRQSIDKLKYSSVTDTPQIVQAKINAQQLSHVNYRADYEKNKLNYTLPQDVPQLVKAKTNAKLFSEVKYKEGWEKTKGKGFEMKLDAMSLLAAKASGELASNIKYKEEYEKTKGKAMGTADSRLLHSLQIAKMSSEVEYKKGFEESKTRFHLPMDMVNIRHAKKAQTLASDLDYRKKLHEYTVLPEDMKTQWAKKAYGLQSELQYKADLAWMKGVGWLTEGSLNLEQAKKAGQLVSEKNYRQRVDELKFTSVTDSSQMEHAKKSQELQSGVAYKAGNEQSVHQYTISKDEPLFLQARANAANLSEKLYKSSWENQKAKGFELRLDSLTFLAAKAKRDLASEVKYKEDYERSRGKLIGAKDVQGDSQMSHSLQMSKLQSELEYKKGFEDTKSQCHVSLDMVHLVHARKAQHLATDVGYKTAEHHFTALPTDMKVEWAKKAYGLQSDKKYRQHPDALKFTSIKDTPEMVQARISYTQAVDRLYREQGENIKHHYTPTADLPEVLLAKLNAMNISETRYKESWSKLRDGGYKLRLDALPFQAAKASGEIISDYKYKEAFEKMKGQMLGSRSLEDDISLAHSVYATSLQSDVNYKKGFEHSKAQFHLPLDMAALVHAKKAQTLASNQDYKHPLPQYTSLAED

SEQ ID NO: 853461 - protein, 192 aa, Homo sapiens
MICLCSSDLQFRYKEAFLRDRGLQIGYRSVDDDPRMKHFLNVGRLQSDNEYKKDFAKSRSQFHSSTDQPGLLQAKRSQQLASDVHYRQPLPQPTCDPEQLGLRHAQKAHQLQSDVKYKSDLNLTRGVGWTPPGSYKVEMARRAAELANARGLGLQGAYRGAEAVEAGDHQSGEVNPDATEILHVKKKKALLL

SEQ ID NO: 853462 - protein, 725 aa, Homo sapiens
MNVQPCSRCGYGVYPAEKISCIDQIWHKACFHCEVCKMMLSVNNFVSHQKKPYCHAHNPKNNTFTSVYHTPLNLNVRTFPEAISGIHDQEDGEQCKSVFHWDMKSKDKEGAPNRQPLANERAYWTGYGEGNAWCPGALPDPEIVRMVEARKSLGEEYTEDYEQPRGKGSFPAMITPAYQRAKKANQLASQVEYKRGHDERISRFSTVADTPELLRSKAGAQLQSDVRYTEDYEQQRGKGSFPAMITPAYQIAKRANELASDVRYHQQYQKEMRGMAGPAIGTEGILTRECADQYGQGYPEEYEEHRGKGSFPAMITPAYQNAKKAHELASDIKYRQDFNKMKGAAHYHSLPAQDNLVLKQAQSVNKLVSEVEYKKDLESSRGHSINYCETPQFRNVSKISKFTSDNKYKENYQNHMRGRYEGVGMDRRTLHAMKVGSLASNVAYKADYKHDIVDYNYPATLTPSYQTAMKLVPLKDANYRQSIDKLKYSSVTDTPQIVQAKINAQQLSHVNYRADYEKNKLNYTLPQDVPQLVKAKTNAKLFSEVKYKEGWEKTKGKGFEMKLDAMSLLAAKASGELASNIKYKEEYEKTKGKAMGTADSRLLHSLQIAKMSSEVEYKKGFEESKTRFHLPMDMVNIRHAKKAQTLASDLDYRKKLHEYTVLPEDMKTQWAKKAYGLQSELQYKADLAWMKGVGWLTEGSLNLEQAKKAGQLVSEVTCTGASGLQ

SEQ ID NO: 853463 - protein, 282 aa, Homo sapiens
KERGKLIGPQSVRDDPRIQHCRRMGQLQSELQYRRGATSSQAQFHLPMDMVHLVHAKNAQALASDHDYRTQYHKFTALPEDLKMAWAKKAHALQSELRYKSDLIGMKGIGWLALRSPQMESAKKAGELISETKYRKKPDSIKFTTVVDSPDLVHAKNSYMHCNERMYRSGDAESLHRYTLIPDHPDFTRARLNALHLSDKVYRNSWEQTRAGSYDFRLDAIPFQTARASREIASDVRPPCSLLRSLMSFSLVFPVLLKGKPPGPVKIISLSAPKLNMYCILN

SEQ ID NO: 853464 - protein, 1150 aa, Homo sapiens
MNVQPCSRCGYGVYPAEKISCIDQIWHKACFHCEVCKMMLSVNNFVSHQKKPYCHAHNPKNNTFTSVYHTPLNLNVRTFPEAISGIHDQEDGEQCKSVFHWDMKSKDKEGAPNRQPLANERAYWTGYGEGNAWCPGALPDPEIVRMVEARKSLGEEYTEDYEQPRGKGSFPAMITPAYQRAKKANQLASQVEYKRGHDERISRFSTVADTPELLRSKAGAQLQSDVRYTEDYEQQRGKGSFPAMITPAYQIAKRANELASDVRYHQQYQKEMRGMAGPAIGTEGILTRECADQYGQGYPEEYEEHRGKGSFPAMITPAYQNAKKAHELASDIKYRQDFNKMKGAAHYHSLPAQDNLVLKQAQSVNKLVSEVEYKKDLESSRGHSINYCETPQFRNVSKISKFTSDNKYKENYQNHMRGRYEGVGMDRRTLHAMKVGSLASNVAYKADYKHDIVDYNYPATLTPSYQTAMKLVPLKDANYRQSIDKLKYSSVTDTPQIVQAKINAQQLSHVNYRADYEKNKLNYTLPQDVPQLVKAKTNAKLFSEVKYKEGWEKTKGKGFEMKLDAMSLLAAKASGELASNIKYKEEYEKTKGKAMGTADSRLLHSLQIAKMSSEVEYKKGFEESKTRFHLPMDMVNIRHAKKAQTLASDLDYRKKLHEYTVLPEDMKTQWAKKAYGLQSELQYKADLAWMKGVGWLTEGSLNLEQAKKAGQLVSEKNYRQRVDELKFTSVTDSSQMEHAKKSQELQSGVAYKAGNEQSVHQYTISKDEPLFLQARANAANLSEKLYKSSWENQKAKGFELRLDSLTFLAAKAKRDLASEVKYKEDYERSRGKLIGAKDVQGDSQMSHSLQMSKLQSELEYKKGFEDTKSQCHVSLDMVHLVHARKAQHLATDVGYKTAEHHFTALPTDMKVEWAKKAYGLQSDKYRADVKWMKGMGWVATGSLNVEQAKKAGELISEKKYRQHPDALKFTSIKDTPEMVQARISYTQAVDRLYREQGENIKHHYTPTADLPEVLLAKLNAMNISETRYKESWSKLRDGGYKLRLDALPFQAAKASGEIISDYKYKEAFEKMKGQMLGSRSLEDDISLAHSVYATSLQSDVNYKKGFEHSKAQFHLPLDMAALVHAKKAQTLASNQDYKHPLPQYTSLAED

SEQ ID NO: 853465 - protein, 382 aa, Homo sapiens
KERGKLIGPQSVRDDPRIQHCRRMGQLQSELQYRRGATSSQAQFHLPMDMVHLVHAKNAQALASDHDYRTQYHKFTALPEDLKMAWAKKAHALQSELRYKSDLIGMKGIGWLALRSPQMESAKKAGELISETKYRKKPDSIKFTTVVDSPDLVHAKNSYMHCNEKVYRNSWEQTRAGSYDFRLDAIPFQTARASREIASDFRYKEAFLRDRGLQIGYRSVDDDPRMKHFLNVGRLQSDNEYKKDFAKSRSQFHSSTDQPGLLQAKRSQQLASDVHYRQPLPQPTCDPEQLGLRHAQKAHQLQSDVKYKSDLNLTRGVGWTPPGSYKVEMARRAAELANARGLGLQGAYRGAEAVEAGDHQSGEVNPDATEILHVKKKKALLL

SEQ ID NO: 853466 - protein, 843 aa, Homo sapiens
MNVQPCSRCGYGVYPAEKISCIDQIWHKACFHCEVCKMMLSVNNFVSHQKKPYCHAHNPKNNTFTSVYHTPLNLNVRTFPEAISGIHDQEDGEQCKSVFHWDMKSKDKEGAPNRQPLANERAYWTGYGEGNAWCPGALPDPEIVRMVEARKSLGEEYTEDYEQPRGKGSFPAMITPAYQRAKKANQLASQVEYKRGHDERISRFSTVADTPELLRSKAGAQLQSDVRYTEDYEQQRGKGSFPAMITPAYQIAKRANELASDVRYHQQYQKEMRGMAGPAIGTEGILTRECADQYGQGYPEEYEEHRGKGSFPAMITPAYQNAKKAHELASDIKYRQDFNKMKGAAHYHSLPAQDNLVLKQAQSVNKLVSEVEYKKDLESSRGHSINYCETPQFRNVSKISKFTSDNKYKENYQNHMRGRYEGVGMDRRTLHAMKVGSLASNVAYKADYKHDIVDYNYPATLTPSYQTAMKLVPLKDANYRQSIDKLKYSSVTDTPQIVQAKINAQQLSHVNYRADYEKNKLNYTLPQDVPQLVKAKTNAKLFSEVKYKEGWEKTKGKGFEMKLDAMSLLAAKASGELASNIKYKEEYEKTKGKAMGTADSRLLHSLQIAKMSSEVEYKKGFEESKTRFHLPMDMVNIRHAKKAQTLASDLDYRKKLHEYTVLPEDMKTQWAKKAYGLQSELQYKADLAWMKGVGWLTEGSLNLEQAKKAGQLVSEKNYRQRVDELKFTSVTDSSQMEHAKKSQELQSGVAYKAGNEQSVHQYTISKDEPLFLQARANAANLSEKLYKSSWENQKAKGFELRLDSLTFLAAKAKRDLASEVKYKEDYERSRGKLIGAKDVHPDS

SEQ ID NO: 853467 - protein, 996 aa, Homo sapiens
SGQSLAAGQKGTWAGCFREGHSVSWPTERVNSEETKRANQRDREGECKGSLGDSGVPVENERQAPRGGPGTWLPEDRAGEEARMWTFVTQLLVTLVLLSFFLVSCQNVMHIVRGSLCFVLKHIHQELDKELGESEGLSDDEETISPRVVRRRVFLKGNEFQNIPGEQVTEEQFTDEQGNIVTKKIIRKVVRQIDLSSADAAQEHEEVELRGSGLQPDLIEGRKGAQIVKRASLKKGETVTPSRSPWSSLSGGSHLDTQPLNPTHFSAMHTGGELDLRATAAVHTFLWADGMTSVRDSCQSPLGMNDCLETHDLQASILPLAMTADLSEPGHKSSKKRGERGIENKRRRACEAKVNEGFLWLGMGFGFGVFFLNCFDFVQGTFSQPHLSEIHVGFLERKKKKEKYDPFHLPMDMVNIRHAKKAQTLASDLDYRKKLHEYIKYKEEYEKTKGKAMGTADSRLLHSLQIAKMSSEVEYKKGFEESKTRFHLPINSRQDLDYRKKLHEYTVLPEDMKTQWAKKAYGLQSELQYKADLAWMKGVGWLTEGSLNLEQAKKAGQLVSEKNYRQRVDELKFTSVTDSSQMEHAKKSQELQSGVAYKAGNEQSVHQYTISKDEPLFLQARANAANLSEKLYKSSWENQKAKGFELRLDSLTFLAAKAKRDLASEVKYKEDYERSRGKLIGAKDVQGDSQMSHSLQMSKLQSELEYKKGFEDTKSQCHVSLDMVHLVHARKAQHLATDVGYKTAEHHFTALPTDMKVEWAKKAYGLQSDKYRADVKWMKGMGWVATGSLNVEQAKKAGELISEKKYRQHPDALKFTSIKDTPEMVQARISYTQAVDRLYREQGENIKHHYTPTADLPEVLLAKLNAMNISETRYKESWSKLRDGGYKLRLDALPFQAAKASGEIISDYKYKEAFEKMKGQMLGSRSLEDDISLAHSVYATSLQSDVNYKKGFEHSKAQFHLPLDMAALVHAKKAQTLASNQDYKHPLPQYTSLAED

SEQ ID NO: 853468 - protein, 630 aa, Homo sapiens
PLFSPPPSQHLVPRRVVRRGAPRELAVTMAMRELVEAECGGANPLMKLAGHFTQDKALRQEGLRPGPWPPGAPASEAASKPLGVASEDELVAEFLQDQNAPLVSRAPQTFKMDDLLAEMQQIEQSNFRQAPQRAPGVADLALSENWAQEFLAAGDAVDVTQDYNETDWSQEFISEVTDPLSVSPARWAEEYLEQSEEKLWLGEPEGTATDRWYDEYHPEEDLQHTASDFVAKVDDPKLANSEGTSDAWVDQFTRPVNTSALDMEFERAKSAIESDVDFWDKLQAELEEMAKRDAEAHPWLSDYDDLTSATYDKGYQFEEENPLRDHPQPFEEGLRRLQEGDLPNAVLLFEAAVQQDPKHMEAWQYLGTTQAENEQELLAISALRRCLELKPDNQTALMALAVSFTNESLQRQACETLRDWLRYTPAYAHLVTPAEEGAGGAGLGPSKRILGSLLSDSLFLEVKELFLAAVRLDPTSIDPDVQCGLGVLFNLSGEYDKAVDCFTAALSVRPNDYLLWNKLGATLANGNQSEEAVAAYRRALELQPGYIRSRYNLGISCINLGAHREAVEHFLEALNMQRKSRGPRGEGGAMSENIWSTLRLALSMLGQSDAYGAADARDLSTLLTMFGLPQ

SEQ ID NO: 853469 - protein, 87 aa, Homo sapiens
CHPWELEPGNVRGRQGTGWNREAVEHFLEALNMQRKSRGPRGEGGAMSENIWSTLRLALSMLGQSDAYGAADARDLSTLLTMFGLPQ

SEQ ID NO: 853470 - protein, 630 aa, Homo sapiens; identical to SEQ ID NO: 853468

SEQ ID NO: 853471 - protein, 640 aa, Homo sapiens
MGWTPSYLMLASIYDMENSPLFLRNLDFDSTERELAVTMAMRELVEAECGGANPLMKLAGHFTQDKALRQEGLRPGPWPPGAPASEAASKPLGVASEDELVAEFLQDQNAPLVSRAPQTFKMDDLLAEMQQIEQSNFRQAPQRAPGVADLALSENWAQEFLAAGDAVDVTQDYNETDWSQEFISEVTDPLSVSPARWAEEYLEQSEEKLWLGEPEGTATDRWYDEYHPEEDLQHTASDFVAKVDDPKLANSEGTSDAWVDQFTRPVNTSALDMEFERAKSAIESDVDFWDKLQAELEEMAKRDAEAHPWLSDYDDLTSATYDKGYQFEEENPLRDHPQPFEEGLRRLQEGDLPNAVLLFEAAVQQDPKHMEAWQYLGTTQAENEQELLAISALRRCLELKPDNQTALMALAVSFTNESLQRQACETLRDWLRYTPAYAHLVTPAEEGAGGAGLGPSKRILGSLLSDSLFLEVKELFLAAVRLDPTSIDPDVQCGLGVLFNLSGEYDKAVDCFTAALSVRPNDYLLWNKLGATLANGNQSEEAVAAYRRALELQPGYIRSRYNLGISCINLGAHREAVEHFLEALNMQRKSRGPRGEGGAMSENIWSTLRLALSMLGQSDAYGAADARDLSTLLTMFGLPQ

SEQ ID NO: 853472 - protein, 602 aa, Homo sapiens
MAMRELVEAECGGANPLMKLAGHFTQDKALRQEGLRPGPWPPGAPASEAASKPLGVASEDELVAEFLQDQNAPLVSRAPQTFKMDDLLAEMQQIEQSNFRQAPQRAPGVADLALSENWAQEFLAAGDAVDVTQDYNETDWSQEFISEVTDPLSVSPARWAEEYLEQSEEKLWLGEPEGTATDRWYDEYHPEEDLQHTASDFVAKVDDPKLANSEGTSDAWVDQFTRPVNTSALDMEFERAKSAIESDVDFWDKLQAELEEMAKRDAEAHPWLSDYDDLTSATYDKGYQFEEENPLRDHPQPFEEGLRRLQEGDLPNAVLLFEAAVQQDPKHMEAWQYLGTTQAENEQELLAISALRRCLELKPDNQTALMALAVSFTNESLQRQACETLRDWLRYTPAYAHLVTPAEEGAGGAGLGPSKRILGSLLSDSLFLEVKELFLAAVRLDPTSIDPDVQCGLGVLFNLSGEYDKAVDCFTAALSVRPNDYLLWNKLGATLANGNQSEEAVAAYRRALELQPGYIRSRYNLGISCINLGAHREAVEHFLEALNMQRKSRGPRGEGGAMSENIWSTLRLALSMLGQSDAYGAADARDLSTLLTMFGLPQ

SEQ ID NO: 853473 - protein, 800 aa, Homo sapiens
PLFSPPPSQHLVPRRVVRRGAPRELAVTMAMRELVEAECGGANPLMKLAGHFTQDKALRQEGLRPGPWPPGAPASEAASKPLGVASEDELVAEFLQDQNAPLVSRAPQTFKMDDLLAEMQQIEQSNFRQAPQRAPGVADLALSENWAQEFLAAGDAVDVTQDYNETDWSQEFISEVTDPLSVSPARWAEEYLEQSEEKLWLGEPEGTATDRWYDEYHPEEDLQHTASDFVAKVDDPKLANSEVSHIPLLLCPAELVWKARILLFLPQFSLKRRRRDLRSLQFLSIEQRLKILPLPSSVHSLISLPTNSFFCCLCKSLEPEIPFFLLSTSFRVFSISCLQLEMVRGGVSTGSSWAWLRVHTWKSFPKWPVCVSVPQFLKFVRQIGEGQVSLESGAGSGRAQAEQWAAEFIQQQGTSDAWVDQFTRPVNTSALDMEFERAKSAIESDVDFWDKLQAELEEMAKRDAEAHPWLSDYDDLTSATYDKGYQFEEENPLRDHPQPFEEGLRRLQEGDLPNAVLLFEAAVQQDPKHMEAWQYLGTTQAENEQELLAISALRRCLELKPDNQTALMALAVSFTNESLQRQACETLRDWLRYTPAYAHLVTPAEEGAGGAGLGPSKRILGSLLSDSLFLEVKELFLAAVRLDPTSIDPDVQCGLGVLFNLSGEYDKAVDCFTAALSVRPNDYLLWNKLGATLANGNQSEEAVAAYRRALELQPGYIRSRYNLGISCINLGAHREAVEHFLEALNMQRKSRGPRGEGGAMSENIWSTLRLALSMLGQSDAYGAADARDLSTLLTMFGLPQ

SEQ ID NO: 853474 - protein, 639 aa, Homo sapiens
MAMRELVEAECGGANPLMKLAGHFTQDKALRQEGLRPGPWPPGAPASEAASKPLGVASEDELVAEFLQDQNAPLVSRAPQTFKMDDLLAEMQQIEQSNFRQAPQRAPGVADLALSENWAQEFLAAGDAVDVTQDYNETDWSQEFISEVTDPLSVSPARWAEEYLEQSEEKLWLGEPEGTATDRWYDEYHPEEDLQHTASDFVAKVDDPKLANSEFLKFVRQIGEGQVSLESGAGSGRAQAEQWAAEFIQQQGTSDAWVDQFTRPVNTSALDMEFERAKSAIESDVDFWDKLQAELEEMAKRDAEAHPWLSDYDDLTSATYDKGYQFEEENPLRDHPQPFEEGLRRLQEGDLPNAVLLFEAAVQQDPKHMEAWQYLGTTQAENEQELLAISALRRCLELKPDNQTALMALAVSFTNESLQRQACETLRDWLRYTPAYAHLVTPAEEGAGGAGLGPSKRILGSLLSDSLFLEVKELFLAAVRLDPTSIDPDVQCGLGVLFNLSGEYDKAVDCFTAALSVRPNDYLLWNKLGATLANGNQSEEAVAAYRRALELQPGYIRSRYNLGISCINLGAHREAVEHFLEALNMQRKSRGPRGEGGAMSENIWSTLRLALSMLGQSDAYGAADARDLSTLLTMFGLPQ

SEQ ID NO: 853475 - protein, 639 aa, Homo sapiens; identical to SEQ ID NO: 853474

SEQ ID NO: 853476 - protein, 630 aa, Homo sapiens; identical to SEQ ID NO: 853468

SEQ ID NO: 853477 - protein, 669 aa, Homo sapiens
MGWTPSYLMLASIYDMENSPLFLRNLDFDSTERELAVTMAMRELVEAECGGANPLMKLAGHFTQDKALRQEGLRPGPWPPGAPASEAASKPLGVASEDELVAEFLQDQNAPLVSRAPQTFKMDDLLAEMQQIEQSNFRQAPQRAPGVADLALSENWAQEFLAAGDAVDVTQDYNETDWSQEFISEVTDPLSVSPARWAEEYLEQSEEKLWLGEPEGTATDRWYDEYHPEEDLQHTASDFVAKVDDPKLANSEFLKFVRQIGEGQVSLESGAGSGRAQAEQWAAEFIQQQGTSDAWVDQFTRPVNTSALDMEFERAKSAIELQAELEEMAKRDAEAHPWLSDYDDLTSATYDKGYQFEEENPLRDHPQPFEEGLRRLQEGDLPNAVLLFEAAVQQDPKHMEAWQYLGTTQAENEQELLAISALRRCLELKPDNQTALMALAVSFTNESLQRQACETLRDWLRYTPAYAHLVTPAEEGAGGAGLGPSKRILGSLLSDSLFLEVKELFLAAVRLDPTSIDPDVQCGLGVLFNLSGEYDKAVDCFTAALSVRPNDYLLWNKLGATLANGNQSEEAVAAYRRALELQPGYIRSRYNLGISCINLGAHREAVEHFLEALNMQRKSRGPRGEGGAMSENIWSTLRLALSMLGQSDAYGAADARDLSTLLTMFGLPQ

SEQ ID NO: 853478 - protein, 73 aa, Homo sapiens
GFCSVQRAQHYINMPVQFKPKSAGKFEALLVIQTDEGTQLQMAETVLSSTENVILVYGCFEKFVFGCKAALRL

SEQ ID NO: 853479 - protein, 602 aa, Homo sapiens; identical to SEQ ID NO: 853472

SEQ ID NO: 853480 - protein, 639 aa, Homo sapiens; identical to SEQ ID NO: 853474

SEQ ID NO: 853481 - protein, 656 aa, Homo sapiens
MGWTPSYLMLASIYDMENSPLFLRNLDFDSTERELAVTMAMRELVEAECGGANPLMKLAGHFTQDKALRQEGLRPGPWPPGAPASEASVLEVESPGAASEAVMASKPLGVASEDELVAEFLQDQNAPLVSRAPQTFKMDDLLAEMQQIEQSNFRQAPQRAPGVADLALSENWAQEFLAAGDAVDVTQDYNETDWSQEFISEVTDPLSVSPARWAEEYLEQSEEKLWLGEPEGTATDRWYDEYHPEEDLQHTASDFVAKVDDPKLANSEGTSDAWVDQFTRPVNTSALDMEFERAKSAIESDVDFWDKLQAELEEMAKRDAEAHPWLSDYDDLTSATYDKGYQFEEENPLRDHPQPFEEGLRRLQEGDLPNAVLLFEAAVQQDPKHMEAWQYLGTTQAENEQELLAISALRRCLELKPDNQTALMALAVSFTNESLQRQACETLRDWLRYTPAYAHLVTPAEEGAGGAGLGPSKRILGSLLSDSLFLEVKELFLAAVRLDPTSIDPDVQCGLGVLFNLSGEYDKAVDCFTAALSVRPNDYLLWNKLGATLANGNQSEEAVAAYRRALELQPGYIRSRYNLGISCINLGAHREAVEHFLEALNMQRKSRGPRGEGGAMSENIWSTLRLALSMLGQSDAYGAADARDLSTLLTMFGLPQ

SEQ ID NO: 853482 - protein, 630 aa, Homo sapiens; identical to SEQ ID NO: 853468

SEQ ID NO: 853483 - protein, 573 aa, Homo sapiens
PLFSPPPSQHLVPRRVVRRGAPRELAVTMAMRELVEAECGGANPLMKLAGHFTQDKALRQEGLRPGPWPPGAPASEAASKPLGVASEDELVAEFLQDQNAPLVSRAPQTFKMDDLLAEMQQIEQSNFRQAPQRAPGVADLALSENWAQEFLAAGDAVDVTQDYNETDWSQEFISEVTDPLSVSPARWAEEYLEQSEEKLWLGEPEGTATDRWYDEYHPEEDLQHTASDFVAKVDDPKLANSEGTSDAWVDQFTRPVNTSALDMEFERAKSAIESDVDFWDKLQAELEEMAKRDAEAHPWLSDYDDLTSATYDKGYQFEEENPLRDHPQPFEEGLRRLQEGDLPNAVLLFEAAVQQDPKHMEAWQYLGTTQAENEQELLAISALRRCLELKPDNQTALMALAVSFTNESLQRQACETLRDWLRYTPAYAHLVTPAEEGAGGAGLGPSKRILGSLLSDSLFLEVKELFLAAVRLDPTSIDPDVQCGLGVLFNLSGEYDKAVDCFTAALSVRPNDYLLWNKLGATLANGNQSEEAVAAYRRALELQPGYIRSRYNLGISCINLGAHRAHLKLLSPV

SEQ ID NO: 853484 - protein, 74 aa, Homo sapiens
GKCAGAGRGGCGGGNDSPGRSPPVRGHTAHCPGSLREFVEREVIDFARRNPGVVIYVNSRPCCVPRVVAEYRCG

SEQ ID NO: 853485 - protein, 183 aa, Homo sapiens
PEASRFSPAPLSSLLRLRGLQAVAMTARGTPSRFLASVLHNGLGRYVQQLQRLSFSVSRDGASSRGAREFVEREVIDFARRNPGVVIYVNSRPCCVPRVVAEYLNGAVREESIHCKSVEEISTLVQKLADQSGLDVIRIRKPFHTDNPSIQGQWHPFTNKPTTFRGLRPREVQDPAPAQVQAQ

SEQ ID NO: 853486 - protein, 183 aa, Homo sapiens; identical to SEQ ID NO: 853485

SEQ ID NO: 853487 - protein, 151 aa, Homo sapiens
GKCAGAGRGGCGGGNDSPGRSPPVRGHTAHCPGSLREFVEREVIDFARRNPGVVIYVNSRPCCVPRVVAEYLNGAVREESIHCKSVEEISTLVQKLADQSGLDVIRIRKPFHTDNPSIQGQWHPFTNKPTTFRGLRPREVQDPAPAQVQAQ

SEQ ID NO: 853488 - protein, 67 aa, Homo sapiens
LTAWVRGWVVSSLLRLRGLQAVAMTARGTPSRFLASVLHNGLGRYVQQLQRLSFSVSRDGASSRGAS

SEQ ID NO: 853489 - protein, 183 aa, Homo sapiens; identical to SEQ ID NO: 853485

SEQ ID NO: 853490 - protein, 183 aa, Homo sapiens; identical to SEQ ID NO: 853485

SEQ ID NO: 853491 - protein, 226 aa, Homo sapiens
PEASRFSPAPLSSLLRLRGLQAVAMTARGTPSRFLASVLHNGLGRYVQQLQRLSFSVSRDGASSRGAREFVEREVIDFARRNPGVVIYVNSRPCCVPRVVAEYLNGAVREESIHCKSVEEISTLVQKLADQSGLDVIRIRKPFHTDNPSIQGQWHPFTNKPTTFRGLRPREVQDPAPAQDTGLRLSAVAPQILLPGWPDPISVQSSDLPWGNTHYRPEPLSSTTWL

SEQ ID NO: 853492 - protein, 235 aa, Homo sapiens
MTARGTPSRFLASVLHNGLGRYVQQLQRLSFSVSRDGASSRGAREFVEREVIDFARRNPGVVIYVNSRPCCVPRVVAEYLNGAVREESIHCKSVEEISTLVQKLADQSGLDVIRIRKPFHTDNPSIQGQWHPFTNKPTTFRGLRPREVQDPAPAQDAAEFLGEGAGPCWYSIVALPQKHIAIAIHPPQPAGQCHQAIGHWPETVCSCTADPPARLARPNISSVIRSSLGKYPLPS

SEQ ID NO: 853493 - protein, 268 aa, Homo sapiens
PEASRFSPAPLSSLLRLRGLQAVAMTARGTPSRFLASVLHNGLGRYVQQLQRLSFSVSRDGASSRGAREFVEREVIDFARRNPGVVIYVNSRPCCVPRVVAEYLNGAVREESIHCKSVEEISTLVQKLADQSGLDVIRIRKPFHTDNPSIQGQWHPFTNKPTTFRGLRPREVQDPAPAQDAAEFLGEGAGPCWYSIVALPQKHIAIAIHPPQPAGQCHQAIGQLSRWRWGRWGWWGWGSLPRDDLETAALQAPSPLIITLIFLSRTLA

SEQ ID NO: 853494 - protein, 184 aa, Homo sapiens
MTARGTPSRFLASVLHNGLGRYVQQLQRLSFSVSRDGASSRGAREFVEREVIDFARRNPGVVIYVNSRPCCVPRVVAEYLNGAVREESIHCKSVEEISTLVQKLADQSGLDVIRIRKPFHTDNPSIQGQWHPFTNKPTTFRGLRPREVQDPAPAQDTGLRLSAVAPQILLPGWPDPTRATRATR

SEQ ID NO: 853495 - protein, 144 aa, Homo sapiens
MTARGTPSRFLASVLHNGLGRYVQQLQRLSFSVSRDGASSRGAREFVEREVIDFARRNPGVVIYVNSRPCCVPRVVAEYLNGAVREESIHCKSVEEISTLVQKLADQSGLDVIRSGTPSPTSRPRSAGYAPERFRILPQPRTLA

SEQ ID NO: 853496 - protein, 109 aa, Homo sapiens
GKCAGAGRGGCGGGNDSPGRSPPVRGHTAHCPGSLREFVEREVIDFARRNPGVVIYVNSRPCCVPRVVAEYRHWPETVCSCTADPPARLARPNISSVIRSSLGKYPLPS

SEQ ID NO: 853497 - protein, 183 aa, Homo sapiens; identical to SEQ ID NO: 853485

SEQ ID NO: 853498 - protein, 197 aa, Homo sapiens
MTARGTPSRFLASVLHNGLGRYVQQLQRLSFSVSRDGASSRGAREFVEREVIDFARRNPGVVIYVNSRPCCVPRVVAEYREWGRARAGGRDQGLDPLSSFSLGRTGQLPPTLTPLLPVNGAVREESIHCKSVEEISTLVQKLADQSGLDVIRIRKPFHTDNPSIQGQWHPFTNKPTTFRGLRPREVQDPAPAQVQAQ

SEQ ID NO: 853499 - protein, 183 aa, Homo sapiens
MTARGTPSRFLASVLHNGLGRYVQQLQRLSFSVSRDGASSRGAREFVEREVIDFARRNPGVVIYVNSRPCCVPRVVAEYLNGAVREESIHCKSVEEISTLVQKLADQSGLDVIRSGTPSPTSRPRSAGYAPERFRILPQPRCKHSEELPHQLQPQALDCYSGKGGSSPLGFQAQANGTHQWAS

SEQ ID NO: 853500 - protein, 188 aa, Homo sapiens
PEASRFSPAPLSSLLRLRGLQAVAMTARGTPSRFLASVLHNGLGRYVQQLQRLSFSVSRDGASSRGAREFVEREVIDFARRNPGVVIYVNSRPCCVPRVVAEYLNGAVREESIHCKSVEEISTLVQKLADQSGLDVIRIRKPFHTDNPSIQGQWHPFTNKPTTFRGLRPREVQDPAPAQCLLLGAVTL

SEQ ID NO: 853501 - protein, 183 aa, Homo sapiens; identical to SEQ ID NO: 853485

SEQ ID NO: 853502 - protein, 268 aa, Homo sapiens; identical to SEQ ID NO: 853493

SEQ ID NO: 853503 - protein, 285 aa, Homo sapiens
PEASRFSPAPLSSLLRLRGLQAVAMTARGTPSRFLASVLHNGLGRYVQQLQRLSFSVSRDGASSRGAREFVEREVIDFARRNPGVVIYVNSRPCCVPRVVAEYLNGAVREESIHCKSVEEISTLVQKLADQSGLDVIRIRKPFHTDNPSIQGQWHPFTNKPTTFRGLRPREVQDPAPAQDAAEFLGEGAGPCWYSIVALPQKHIAIAIHPPQPAGQCHQAIGHWPETVCSCTADPPARLARPTRPPHSGSYLILIDLCSSPYAVRSFLPPDCPCTDHCVLSVKAA

SEQ ID NO: 853504 - protein, 117 aa, Homo sapiens
MTARGTPSRFLASVLHNGLGRYVQQLQRLSFSVSRDGASSRGAREFVEREVIDFARRNPGVVIYVNSRPCCVPRVVAEYRHWPETVCSCTADPPARLARPNISSVIRSSLGKYPLPS

SEQ ID NO: 853505 - protein, 123 aa, Homo sapiens
FCRDRVSPCCLGWSPTWSPGLKRSARLGLPQCWDSRRELPRPAYLLFLLSWGSPSPSAWQEGGGARRKEVQNTQRCPRFRLALALLPPSSNKARETSAGNWPAVMGEAKKTGVQWHDQGSLQP

SEQ ID NO: 853506 - protein, 174 aa, Homo sapiens
FCRDRVSPCCLGWSPTWSPGLKRSARLGLPQCWDSRRELPRPAYLLFLLSWGSPSPSAWQEGGGARRKEVQNTQRCPRFRLALALLPPSSNKARETSAGNWPAVMGEAKKTGEQRVRLPRTALGSRRDPERGSSPHFVAALLRSMPCLSHSSWLPGKRKHLELARSYQRLSTPG

SEQ ID NO: 853507 - protein, 164 aa, Homo sapiens
FCRDRVSPCCLGWSPTWSPGLKRSARLGLPQCWDSRRELPRPAYLLFLLSWGSPSPSAWQEGGGARRKEVQNTQRCPRFRLALALLPPSSNKARETSAGNWPAVMGEAKKTALGSRRDPERGSSPHFVAALLRSMPCLSHSSWLPGKRKHLELARSYQRLSTPG

SEQ ID NO: 853508 - protein, 376 aa, Homo sapiens
MNHSERFVFIAEWYDPNASLLRRYELLFYPGDGSVEMHDVKNHRTFLKRTKYDNLHLEDLFIGNKVNVFSRQLVLIDYGDQYTARQLGSRKEKTLALIKPDAISKAGEIIEIINKAGFTITKLKMMMLSRKEALDFHVDHQSRPFFNELIQFITTGPIIAMEILRDDAICEWKRLLGPANSGVARTDASESIRALFGTDGIRNAAHGPDSFASAAREMELFFPSSGGCGPANTAKFTNCTCCIVKPHAVSEGLLGKILMAIRDAGFEISAMQMFNMDRVNVEEFYEVYKGVVTEYHDMVTEMYSGPCVAMEIQQNNATKTFREFCGPADPEIARHLRPGTLRAIFGKTKIQNAVHCTDLPEDGLLEVQYFFKILDN

SEQ ID NO: 853509 - protein, 263 aa, Homo sapiens
MNHSERFVFIAEWYDPNASLLRRYELLFYPGDGSVEMHDVKNHRTFLKRTKYDNLHLEDLFIGNKVNVFSRQLVLIDYGDQYTARQLGSRKEKTLALIKPDAISKAGEIIEIINKAGFTITKLKMMMLSRKEALDFHVDHQSRPFFNELIQFITTGPIIAMEILRDDAICEWKRLLGPANSGVARTDASESIRALFGTDGIRNAAHGPDSFASAAREMELFFPSSGGCGPANTAKFTNCTCCIVKPHAVSEGMLNTHIFSTFC

SEQ ID NO: 853510 - protein, 252 aa, Homo sapiens [sequence omitted]

SEQ ID NO: 853511 - protein, 340 aa, Homo sapiens
MHDVKNHRTFLKRTKYDNLHLEDLFIGNKVNVFSRQLVLIDYGDQYTARQLGSRKEKTLALIKPDAISKAGEIIEIINKAGFTITKLKMMMLSRKEALDFHVDHQSRPFFNELIQFITTGPIIAMEILRDDAICEWKRLLGPANSGVARTDASESIRALFGTDGIRNAAHGPDSFASAAREMELFFPSSGGCGPANTAKFTNCTCCIVKPHAVSEGLLGKILMAIRDAGFEISAMQMFNMDRVNVEEFYEVYKGVVTEYHDMVTEMYSGPCVAMEIQQNNATKTFREFCGPADPEIARHLRPGTLRAIFGKTKIQNAVHCTDLPEDGLLEVQYFFKILDN

SEQ ID NO: 853512 - protein, 404 aa, Homo sapiens
MNHSERFVFIAEWYDPNASLLRRYELLFYPGDGSVEMHDVKNHRTFLKRTKYDNLHLEDLFIGNKVNVFSRQLVLIDYGDQYTARQLGSRKEKTLALIKPDAISKAGEIIEIINKAGFTITKLKMMMLSRKEALDFHVDHQSRPFFKYRGYTCRFVTWEYCVMLRFGVWIPSSRYELIQFITTGPIIAMEILRDDAICEWKRLLGPANSGVARTDASESIRALFGTDGIRNAAHGPDSFASAAREMELFFPSSGGCGPANTAKFTNCTCCIVKPHAVSEGLLGKILMAIRDAGFEISAMQMFNMDRVNVEEFYEVYKGVVTEYHDMVTEMYSGPCVAMEIQQNNATKTFREFCGPADPEIARHLRPGTLRAIFGKTKIQNAVHCTDLPEDGLLEVQYFFKILDN

SEQ ID NO: 853513 - protein, 167 aa, Homo sapiens
MNHSERFVFIAEWYDPNASLLRRYELLFYPGDGSVEMHDVKNHRTFLKRTKYDNLHLEDLFIGNKVNVFSRQLVLIDYGDQYTARQLGSRKEKTLALIKPDAISKAGEIIEIINKAGFTITKLKMMMLSRKEALDFHVDHQSRPFFNSPLMGAWVDSMSLLFCIVLQ

SEQ ID NO: 853514 - protein, 102 aa, Homo sapiens
MWTEIFIFCLRIYEVYHIRGLKQGVYFVILKLFCIWTNTKYPSGLFFFFLNLCIHLILLRIPSKQKNLLCHLHYSNYRLKKYGQFLKKFRLCFPWKDKSDCS

SEQ ID NO: 853515 - protein, 102 aa, Homo sapiens; identical to SEQ ID NO: 853514

SEQ ID NO: 853516 - protein, 102 aa, Homo sapiens; identical to SEQ ID NO: 853514

SEQ ID NO: 853517 - protein, 193 aa, Homo sapiens
MAAPLGGMFSGQPPGPPQAPPGLPGQASLLQAAPGAPRPSSSTLVDELESSFEACFASLVSQDYVNGTDQEEIRTGVDQCIQKFLDIARQTECFFLQKRLQLSVQKPEQVIKEDVSELRNELQRKDALVQKHLTKLRHWQQVLEDINVQHKKPADIPQGSLAYLGAGICQHPCTSEANVSKGQRQLAYEWADA

SEQ ID NO: 853518 - protein, 193 aa, Homo sapiens; identical to SEQ ID NO: 853517

SEQ ID NO: 853519 - protein, 193 aa, Homo sapiens; identical to SEQ ID NO: 853517

SEQ ID NO: 853520 - protein, 193 aa, Homo sapiens; identical to SEQ ID NO: 853517

SEQ ID NO: 853521 - protein, 193 aa, Homo sapiens; identical to SEQ ID NO: 853517

SEQ ID NO: 853522 - protein, 193 aa, Homo sapiens; identical to SEQ ID NO: 853517

SEQ ID NO: 853523 - protein, 193 aa, Homo sapiens; identical to SEQ ID NO: 853517

SEQ ID NO: 853524 - protein, 72 aa, Homo sapiens
RPLQSTELCPGGGARVVAVAALLGRLVWCEERQARAEGPSGSPAAAFSHCVCVRTLEPSGEWVFVFPSLLRI

SEQ ID NO: 853525 - protein, 286 aa, Homo sapiens
RSIAAELDELADDRMALVSGISLDPEAAIGVTKRPPPKWVDGVDEIQYDVGRIKQKMKELASLHDKHLNRPTLDDSSEEEHAIEITTQEITQLFHRCQRAVQALPSRARACSEQEGRLLGNVVASLAQALQELSTSFRHAQSGYLKRMKNREERSQHFFDTSVPLMDDGDDNTLYHRGFTEDQLVLVEQNTLMVEEREREIRQIVQSISDLNEIFRDLGAMIVEQGTVLDRIDYNVEQSCIKTEDGLKQLHKAEQYQKKNRKMLVILILFVIIIVLIVVLVGVKSR

SEQ ID NO: 853526 - protein, 286 aa, Homo sapiens; identical to SEQ ID NO: 853525

SEQ ID NO: 853527 - protein, 182 aa, Homo sapiens
EKAGEAGPAVFLQAGSLLAVEDQAVQERKGSGGRAGPQQVQTSMKNREERSQHFFDTSVPLMDDGDDNTLYHRGFTEDQLVLVEQNTLMVEEREREIRQIVQSISDLNEIFRDLGAMIVEQGTVLDRIDYNVEQSCIKTEDGLKQLHKAEQYQKKNRKMLVILILFVIIIVLIVVLVGVKSR

SEQ ID NO: 853528 - protein, 297 aa, Homo sapiens
DAFLLLRNNSIQNRQLLAEQLADDRMALVSGISLDPEAAIGVTKRPPPKWVDGVDEIQYDVGRIKQKMKELASLHDKHLNRPTLDDSSEEEHAIEITTQEITQLFHRCQRAVQALPSRARACSEQEGRLLGNVVASLAQALQELSTSFRHAQSGYLKRMKNREERSQHFFDTSVPLMDDGDDNTLYHRGFTEDQLVLVEQNTLMVEEREREIRQIVQSISDLNEIFRDLGAMIVEQGTVLDRIDYNVEQSCIKTEDGLKQLHKAEQYQKKNRKMLVILILFVIIIVLIVVLVGVKSR

SEQ ID NO: 853529 - protein, 297 aa, Homo sapiens; identical to SEQ ID NO: 853528

SEQ ID NO: 853530 - protein, 103 aa, Homo sapiens
EYLCAGVCVCVLCVCVCPVLGERSVAFEEVREKNHGTSGFLSLYSLAAIVCGHLMFFHTLLGRGGNDHPGQSPLPGMRPLRGGLAGQAPSGHPWMQPLDTCLL

SEQ ID NO: 853531 - protein, 286 aa, Homo sapiens; identical to SEQ ID NO: 853525

SEQ ID NO: 853532 - protein, 297 aa, Homo sapiens; identical to SEQ ID NO: 853528

SEQ ID NO: 853533 - protein, 139 aa, Homo sapiens
MKNREERSQHFFDTSVPLMDDGDDNTLYHRGFTEDQLVLVEQNTLMVEEREREIRQIVQSISDLNEIFRDLGAMIVEQGTVLDRIDYNVEQSCIKTEDGLKQLHKAEQYQKKNRKMLVILILFVIIIVLIVVLVGVKSR

SEQ ID NO: 853534 - protein, 297 aa, Homo sapiens; identical to SEQ ID NO: 853528

SEQ ID NO: 853535 - protein, 661 aa, Homo sapiens
GPRGGASARGPLLLRGVAAGGWRSPAGPRGGASAGDRCSSGAWLLPSISQLSRARAQATLCSSRRLLYPTASGAIPRLLALSFRPLPASGPASPLPTAPPILPTLLPQTSDRHPCLVPFSPFLPLHLLSPTPLGSLFSQNPGLSAWPRLQAGDVPRGPAPMVLTLLLSAYKLCRFFAIRAHGRAPSGWRCLGQMGAVARAHGGLRVARARESVAGGRHRGAGRPGARAAGAAAGLVRAEAGGRRAGRGRRPGRGLPTGGGGLAAAAVGREVAQGLCDAIRLDGGLDLLLRLLQAPELETRVQAARLLEQILVAENRLSAPGRGWESAAWCGQLSACVPVCLAPCLCLPHLSDCLHYISVRGQPVCFTDKETEPWESLVTCSVDHSELRFAPRASGVRNGVTGQESVPGSMDGDGILLPILPLPRPPSPQLSFPPAWVPVYDTFSRHHPIPLPMREEGKHNAQKRGRETSPFPPPQAVRRAGLRLLTPFLPPQSNFCSILSFWFLQQARHDLILQLLMGNSFLLGGMGGGRGHRGAEPGGDQAECVFSPFTPLSTKMPQEGQTEAWLPLLHVSWDLSWSMKTSKDSLSLPSDARADQAVTLQSHAEVSSFSSLEEFLEESLSAHAALTSVKGVGWGCFPCHFRKEKNYLVIGGKIQLSKMHE

SEQ ID NO: 853536 - protein, 136 aa, Homo sapiens [sequence omitted]

SEQ ID NO: 853537 - protein, 118 aa, Homo sapiens
WGQGCGTDTGLTCSLLKVHLQLHGFSVFIDVEKLEAGKFEDKLIQSVMGARNFVLVLSPGALDKCMQDHDCKDWVHKEIVTALSCGKNIVPIIDGFEWPEPQVLPEDMQAVLTFNGIK

SEQ ID NO: 853538 - protein, 841 aa, Homo sapiens
GPRGGASARGPLLLRGVAAGGWRSPAGPRGGASAGDRCSSGAWLLPSISQLSRARAQATLCSSRRLLYPTASGAIPRLLALSFRPLPASGPASPLPTAPPILPTLLPQTSDRHPCLVPFSPFLPLHLLSPTPLGSLFSQNPGLSAWPRLQAGDVPRGPAPMVLTLLLSAYKLCRFFAIRAHGRAPSGWRCLGQMGAVARAHGGLRVARARESVAGGRHRGAGRPGARAAGAAAGLVRAEAGGRRAGRGRRPGRGLPTGGGGLAAAAVGREVAQGLCDAIRLDGGLDLLLRLLQAPELETRVQAARLLEQILVAENRDRVARIGLGVILNLAKEREPVELARSVAGILEHMFKHSEETCQRLVAAGGLDAVLYWCRRTDPALLRHCALALGNCALHGGQAVQRRMVEKRAAEWLFPLAFSKEDELLRLHACLAVAVLATNKEVEREVERSGTLALVEPLVASLDPGRFARCLVDASDTSQGRGPDDLQRLVPLLDSNRLEAQCIGAFYLCAEAAIKSLQGKTKVFSDIGAIQSLKRLVSYSTNGTKSALAKRALRLLGEEVPRPILPSVPSWKEAEVQTWLQQIGFSKYCESFREQQVDGDLLLRLTEEELQTDLGMKSGITRKRFFRELTELKTFANYSTCDRSNLADWLGSLDPRFRQYTYGLVSCGLDRSLLHRVSEQQLLEDCGIHLGVHRARILTAAREMLHSPLPCTGGKPSGDTPDVFISYRRNSGSQLASLLKVHLQLHGFSVFIDVEKLEAGKFEDKLIQSVMGARNFVLVLSPGALDKCMQDHDCKDWVHKEIVTALSCGKNIVPIIDGFEWPEPQVLPEDMQAVLTFNGIK

SEQ ID NO: 853539 - protein, 841 aa, Homo sapiens; identical to SEQ ID NO: 853538

SEQ ID NO: 853540 - protein, 883 aa, Homo sapiens
GPRGGASARGPLLLRGVAAGGWRSPAGPRGGASAGDRCSSGAWLLPSISQLSRARAQATLCSSRRLLYPTASGAIPRLLALSFRPLPASGPASPLPTAPPILPTLLPQTSDRHPCLVPFSPFLPLHLLSPTPLGSLFSQNPGLSAWPRLQAGDVPRGPAPMVLTLLLSAYKLCRFFAIRAHGRAPSGWRCLGQMGAVARAHGGLRVARARESVAGGRHRGAGRPGARAAGAAAGLVRAEAGGRRAGRGRRPGRGLPTGGGGLAAAAVGREVAQGLCDAIRLDGGLDLLLRLLQAPELETRVQAARLLEQILVAENRDRVARIGLGVILNLAKEREPVELARSVAGILEHMFKHSEETCQRLVAAGGLDAVLYWCRRTDPALLRHCALALGNCALHGGQAVQRRMVEKRAAEWLFPLAFSKEDELLRLHACLAVAVLATNKEVEREVERSGTLALVEPLVASLDPGRFARCLVDASDTSQGRGPDDLQRLVPLLDSNRLEAQCIGAFYLCAEAAIKSLQGKTKVFSDIGAIQSLKRLVSYSTNGTKSALAKRALRLLGEEVPRPILPSVPSWKEAEVQTWLQQIGFSKYCESFREQQVDGDLLLRLTEEELQTDLGMKSGITRKRFFRELTELKTFANYSTCDRSNLADWLGSLDPRFRQYTYGLVSCGLDRSLLHRVSEQQLLEDCGIHLGVHRARILTAAREMLHSPLPCTGGKPSGDTPDVFISYRRNSGSQLASLLKVHLQLHGFSVFIDVEKLEAGKFEDKLIQSVMGARNFVLVLSPGALDKCMQDHDCKDWVHKEIVTALSCGKNIVPIIDGFEWPEPQVLPEDMQAVLTFNGIKWSHEYQEATIEKIIRFLQGRSSRDSSAGSDTSLEGAAPMGPT

SEQ ID NO: 853541 - protein, 841 aa, Homo sapiens; identical to SEQ ID NO: 853538

SEQ ID NO: 853542 - protein, 841 aa, Homo sapiens; identical to SEQ ID NO: 853538

SEQ ID NO: 853543 - protein, 841 aa, Homo sapiens; identical to SEQ ID NO: 853538

SEQ ID NO: 853544 - protein, 841 aa, Homo sapiens; identical to SEQ ID NO: 853538

SEQ ID NO: 853545 - protein, 141 aa, Homo sapiens
VLIGTGKGLPRIGAADSSAQSSRMALGVWMPLELHIQLLYERKKLEDNKGSERREKAVLNKVLAVSGAGLLPSGLRDIECCFAKSCFLEPLQGSPIWTLLQIPCPGSPPVAKAQATVWARAHIGFETFQNKMPVYLLLSGI

SEQ ID NO: 853546 - protein, 120 aa, Homo sapiens
VLIGTGKGLPRIGAADSSAQSSRMALGVWMPLELHIQLLYERKKLEDNKGSERREKAVLNKVLAVSGAGLLPSGLRDIECCFAKSCFLEPLQGSPIWTLLQIPCPGQQLLNQKDQLNIFP

SEQ ID NO: 853547 - protein, 102 aa, Homo sapiens
SSVLIGTGKGLPRIGAADSSAQSSRMALGVWMPLELHIQLLYERKKLEDNKGRVLFQARVKERNADNEPQPSTSGVTTSQPENDVVPSYYLFSTAFDHSKHV

SEQ ID NO: 853548 - protein, 597 aa, Homo sapiens
QSLANSLPSKAQPGAEMAASGRGLCKAVAASPFPAWRRDNTEARGGLKPEYDAVVIGAGHNGLVAAAYLQRLGVNTAVFERRHVIGGAAVTEEIIPGFKFSRASYLLSLLRPQIYTDLELKKHGLRLHLRNPYSFTPMLEEGAGSKVPRCLLLGTDMAENQKQIAQFSQKDAQVFPKYEEFMHRLALAIDPLLDAAPVDMAAFQHGSLLQRMRSLSTLKPLLKAGRILGAQLPRYYEVLTAPITKVLDQWFESEPLKATLATDAVIGAMTSPHTPGSGYVLLHHVMGGLEGMQGAWGYVQGGMGALSDAIASSATTHGASIFTEKTVAKVQVNSEGCVQGVVLEDGTEVRSKMVLSNTSPQITFLKLTPQEWLPEEFLERISQLDTRSPVTKINVAVDRLPSFLAAPNAPRGQPLPHHQCSIHLNCEDTLLLHQAFEDAMDGLPSHRPVIELCIPSSLDPTLAPPGCHVVSLFTQYTPYTLAGGKAWDEQERDAYADRVFDCIEVYAPGFKDSVVGRDILTPPDLERIFGLPGGNIFHCAMSLDQLYFARPVPLHSGYRCPLQGLYLCGSGAHPGGGVMGAAGRNAAHVAFRDLKSM

SEQ ID NO: 853549 - protein, 509 aa, Homo sapiens
QSLANSLPSKAQPGAEMAASGRGLCKAVAASPFPAWRRDNTEARGGLKPEYDAVVIGAGHNGLVAAAYLQRLGVNTAVFERRHVIGGAAVTEEIIPGFKFSRASYLLSLLRPQIYTDLELKKHGLRLHLRNPYSFTPMLEEGAGSKVPRCLLLGTDMAENQKQIAQFSQKDAQVFPKYEEFMHRLALAIDPLLDAAPVDMAAFQHGSLLQRMRSLSTLKPLLKAGRILGAQLPRYYEVLTAPITKVLDQWFESEPLKATLATDAVIGAMTSPHTPGSGYVLLHHVMGGLEGMQGAWGYVQGGMGALSDAIASSATTHGASIFTEKTVAKVQVNSEGCVQGVVLEDGTEVRSKMVLSNTSPQITFLKLTPQEWLPEEFLERISQLDTRSPVTKINVAVDRLPSFLAAPNAPRGQPLPHHQCSIHLNCEDTLLLHQAFEDAMDGLPSHRPVIELCIPSSLDPTLAPPGCHVVSLFTQYTPYTLAGGKAWDEQERDAYADRAQLTARTKGEA

SEQ ID NO: 853550 - protein, 187 aa, Homo sapiens
QSLANSLPSKAQPGAEMAASGRGLCKAVAASPFPAWRRDNTEARGGLKPEYDAVVIGAGHNGLVAAAYLQRLGVNTAVFERRHVIGGAAVTEEIIPGFKFSRASYLLSLLRPQIYTDLELKVGPPRRPDCTEGGGSSIFPTCVGGPCSVPEVMPAPEGSLFHPSLVYPTWSPCCIPTDGFCLVHVVS

SEQ ID NO: 853551 - protein, 155 aa, Homo sapiens
MHSGVWGQASSSQVLWTTLAAAKPVQVDNHCGCRATIAQNWCHLSASTVSQVISDALPSALLLFRPAVSSLPAQPVIELCIPSSLDPTLAPPGCHVVSLFTQYTPYTLAGGKAWDEQERDAYADRGKDSCTFCLQSHSRACDPTGPAPPHCPIQD

SEQ ID NO: 853552 - protein, 503 aa, Homo sapiens
QSLANSLPSKAQPGAEMAASGRGLCKAVAASPFPAWRRDNTEARGGLKPEYDAVVIGAGHNGLVAAAYLQRLGVNTAVFERRHVIGGAAVTEEIIPGFKFSRASYLLSLLRPQIYTDLELKKHGLRLHLRNPYSFTPMLEEGAGSKVPRCLLLGTDMAENQKQIAQFSQKDAQVFPKYEEFMHRLALAIDPLLDAAPVDMAAFQHGSLLQRMRSLSTLKPLLKAGRILGAQLPRYYEVLTAPITKVLDQWFESEPLKATLATDAVIGAMTSPHTPGSGYVLLHHVMGGLEGMQGAWGYVQGGMGALSDAIASSATTHGASIFTEKTVAKVQVNSEGCVQGVVLEDGTEVRSKMVLSNTSPQITFLKLTPQEWLPEEFLERISQLDTRSPVTKINAGASIFTEKTVAKVQVNMKAVFKDSVVGRDILTPPDLERIFGLPGGNIFHCAMSLDQLYFARPVPLHSGYRCPLQGLYLCGSGAHPGGGVMGAAGRNAAHVAFRDLKSM

SEQ ID NO: 853553 - protein, 128 aa, Homo sapiens
QSLANSLPSKAQPGAEMAASGRGLCKAVAASPFPAWRRDNTEARGGLKPEYDAVVIGAGHNGLVAAAYLQRLGVNTAVFERRHVIGGAAVTEEIIPGFKFSRASYLLSLLRPQIYTDLELKVSPPAGW

SEQ ID NO: 853554 - protein, 615 aa, Homo sapiens [sequence omitted]

SEQ ID NO: 853555 - protein, 615 aa, Homo sapiens [sequence omitted]

SEQ ID NO: 853556 - protein, 213 aa, Homo sapiens [sequence omitted]

SEQ ID NO: 853557 - protein, 615 aa, Homo sapiens [sequence omitted]

SEQ ID NO: 853558 - protein, 615 aa, Homo sapiens [sequence omitted]

SEQ ID NO: 853559 - protein, 615 aa, Homo sapiens [sequence omitted]

SEQ ID NO: 853560 - protein, 615 aa, Homo sapiens [sequence omitted]

SEQ ID NO: 853561 - protein, 535 aa, Homo sapiens
MPSRKFADGEVVRGRWPGSSLYYEVEILSHDSTSQLYTVKYKDGTELELKENDIKPLTSFRQRKGGSTSSSPSRRRGSRSRSRSRSPGRPPKSARRSASASHQADIKEARREVEVKLTPLILKPFGNSISRYNGEPEHIERNDAPHKNTQEKFNLSQESSYIATQYSLRPRREEVKLKEIDSKEEKYVAKELAVRTFEVTPIRAKDLEFGGVPGVFLIMFGLPVFLFLLLLMCKQKDPSLLNFPPPLPALYELWETRVFGVYLLWFLIQVLFYLLPIGKVVEGTPLIDGRRLKYRLNGFYAFILTSAVIGTSLFQGVEFHYVYSHFLQFALAATVFCVVLSVYLYMRSLKAPRNDLSPASSGNAVYDFFIGRELNPRIGTFDLKYFCELRPGLIGWVVINLVMLLAEMKIQDRAVPSLAMILVNSFQLLYVVDALWNEEALLTTMDIIHDGFGFMLAFGDLVWVPFIYSFQAFYLVSHPNEVSWPMASLIIVLKLCGYVIFRGANSQKNAFRKNPSDPKLAHVRPSYFTGKILEV

SEQ ID NO: 853562 - protein, 414 aa, Homo sapiens [sequence omitted]

SEQ ID NO: 853563 - protein, 283 aa, Homo sapiens [sequence omitted]

SEQ ID NO: 853564 - protein, 85 aa, Homo sapiens
QGDLGKLGELGELGEQGDPGELVEVEELARACCLFGGPACGGRQQFFFFAGGRRARNEEMCINYEDRCFDCDGLLEWIHQSLSSF

SEQ ID NO: 853565 - protein, 615 aa, Homo sapiens [sequence omitted]

SEQ ID NO: 853566 - protein, 615 aa, Homo sapiens [sequence omitted]

SEQ ID NO: 853567 - protein, 107 aa, Homo sapiens
VSTSLKMYFYFYIDLKTIHTSTGKNLLVSGWWGFVRHPNYLGDLIMALAWSLPCGFNHILPYFYIIYFTMLLVHREARDEYHCKKKYGVAWEKYCQRVPYRIFPYIY

SEQ ID NO: 853568 - protein, 615 aa, Homo sapiens [sequence omitted]

SEQ ID NO: 853569 - protein, 497 aa, Homo sapiens
MPSRKFADGEVVRGRWPGSSLYYEVEILSHDSTSQLYTVKYKDGTELELKENDIKPLTSFRQRKGGSTSSSPSRRRGSRSRSRSRSPGRPPKSARRSASASHQADIKEARREVEVKLTPLILKPFGNSISRYNGEPEHIERNDAPHKNTQEKFNLSQESSYIATQYSLRPRREEVKLKEIDSKEEKYVAKELAVRTFEVTPIRAKDLEFGGVPGVFLIMFGLPVFLFLLLLMCKQKDPSLLNFPPPLPALYELWETRVFGVYLLWFLIQVLFYLLPIGKVVEGTPLIDGRRLKYRLNGFYAFILTSAVIGTSLFQGVEFHYVYSHFLQFALAATVFCVVLSVYLYMRSLKAPRNDLSPASSGNAVYDFFIGRELNPRIGTFDLKYFCELRPGLIGWVVINLVMLLAEMKIQDRAVPSLAMILVNSFQLLYVVDALWNEEALLTTMDIIHDGFGFMLAFGDLVWVPFIYSFQAFYLVSHPNEVSWPMASLIIVLKREY

SEQ ID NO: 853570 - protein, 321 aa, Homo sapiens
MPSRKFADGEVVRGRWPGSSLYYEVEILSHDSTSQLYTVKYKDGTELELKENDIKPLTSFRQRKGGSTSSSPSRRRGSRSRSRSRSPGRPPKSARRSASASHQADIKEARREVEVKLTPLILKPFGNSISRYNGEPEHIERNDAPHKNTQEKFNLSQESSYIATQYSLRPRREEVKLKEIDSKEEKYVAKELAVRTFEVTPIRAKDLEFGGVPGVFLIMFGLPVFLFLLLLMCKQKDPSLLNFPPPLPALYELWETRVFGVYLLWFLIQVLFYLLPIGKVVEGTPLTDGSKTQSCSHQSHQPRHLCNPRWTAVLITYRGHV

SEQ ID NO: 853571 - protein, 364 aa, Homo sapiens [sequence omitted]

SEQ ID NO: 853572 - protein, 117 aa, Homo sapiens
RRPIAVVLTVAVGLTVASRVTVVSGLTWLEKAWNSIIDVYHKYSLIKGNFHAVYRDDLKKLLETECPQYIRKKGADVWFKELDINTDGAVNFQEFLILVIKMGVAAHKKSHEESHKE

SEQ ID NO: 853573 - protein, 84 aa, Homo sapiens
RPPTTTTKFAAASTGNFHAVYRDDLKKLLETECPQYIRKKGADVWFKELDINTDGAVNFQEFLILVIKMGVAAHKKSHEESHKE

SEQ ID NO: 853574 - protein, 94 aa, Homo sapiens
MLTELEKALNSIIDVYHKYSLIKGNFHAVYRDDLKKLLETECPQYIRKKGADVWFKELDINTDGAVNFQEFLILVIKMGWQPTKKAMKKATKSS

SEQ ID NO: 853575 - protein, 94 aa, Homo sapiens; identical to SEQ ID NO: 853574

SEQ ID NO: 853576 - protein, 110 aa, Homo sapiens
MSLCEWTLPLPTRVSLSSHPSHQSHSHLLVWLFGECRPGQGHRLGHESSAYCPGQMQIPCHGIPQKVLFFRWGKSVGIMLTELEKALELYHRRLPQVLPDKGEFPCRLQG

SEQ ID NO: 853577 - protein, 66 aa, Homo sapiens
RRQHDAHGLAPPEKQNLQVFLKDSLQEWGKSVGIMLTELEKALELYHRRLPQVLPDKGEFPCRLQG

SEQ ID NO: 853578 - protein, 94 aa, Homo sapiens; identical to SEQ ID NO: 853574

SEQ ID NO: 853579 - protein, 94 aa, Homo sapiens; identical to SEQ ID NO: 853574

SEQ ID NO: 853580 - protein, 94 aa, Homo sapiens; identical to SEQ ID NO: 853574

SEQ ID NO: 853581 - protein, 97 aa, Homo sapiens
SHPMYGYELEKALNSIIDVYHKYSLIKGNFHAVYRDDLKKLLETECPQYIRKKGADVWFKELDINTDGAVNFQEFLILVIKMGVAAHKKSHEESHKE

SEQ ID NO: 853582 - protein, 110 aa, Homo sapiens; identical to SEQ ID NO: 853576

SEQ ID NO: 853583 - protein, 134 aa, Homo sapiens
MSLCEWTLPLPTRVSLSSHPSHQSHSHLLVWLFGECRPGQGHRLGHESSAYCPGQMQIPCHGIPQKVLFFRWGKSVGIMLTELEKALELYHRRLPQVLPDKGEFPCSTPELTKGIGITLCTRYTRVHVQMPQIN

SEQ ID NO: 853584 - protein, 100 aa, Homo sapiens
RPPTTTKFAAASTKTWNSIIDVYHKYSLIKGNFHAVYRDDLKKLLETECPQYIRKKGADVWFKELDINTDGAVNFQEFLILVIKMGVAAHKKSHEESHKE

SEQ ID NO: 853585 - protein, 72 aa, Homo sapiens
PEAVEQLAKPNRYKKELPLSPACLLSAVFQKTWWGKSVGIMLTELEKALELYHRRLPQVLPDKGEFPCRLQG

SEQ ID NO: 853586 - protein, 66 aa, Homo sapiens; identical to SEQ ID NO: 853577

SEQ ID NO: 853587 - protein, 76 aa, Homo sapiens
GRLLLLLNSRPRRRDDLKKLLETECPQYIRKKGADVWFKELDINTDGAVNFQEFLILVIKMGVAAHKKSHEESHKE

SEQ ID NO: 853588 - protein, 94 aa, Homo sapiens; identical to SEQ ID NO: 853574

SEQ ID NO: 853589 - protein, 94 aa, Homo sapiens; identical to SEQ ID NO: 853574

SEQ ID NO: 853590 - protein, 94 aa, Homo sapiens; identical to SEQ ID NO: 853574

SEQ ID NO: 853591 - protein, 94 aa, Homo sapiens; identical to SEQ ID NO: 853574

SEQ ID NO: 853592 - protein, 94 aa, Homo sapiens; identical to SEQ ID NO: 853574

SEQ ID NO: 853593 - protein, 1139 aa, Homo sapiens
MPSGGDQSPPPPPPPPAAAASDEEEEDDGEAEDAAPPAESPTPQIQQRFDELCSRLNMDEAARAEAWDSYRSMSESYTLEGNDLHWLACALYVACRKSVPTVSKGTVEGNYVSLTRILKCSEQSLIEFFNKMKKWEDMANLPPHFRERTERLERNFTVSAVIFKKYEPIFQDIFKYPQEEQPRQQRGRKQRRQPCTVSEIFHFCWVLFIYAKGNFPMISDDLVNSYHLLLCALDLVYGNALQCSNRKELVNPNFKGLSEDFHAKDSKPSSDPPCIIEKLCSLHDGLVLEAKGIKEHFWKPYIRKLYEKKLLKGKEENLTGFLEPGNFGESFKAINKAYEEYVLSVGNLDERIFLGEDAEEEIGTLSRCLNAGSGTETAERVQMKNILQQHFDKSKALRISTPLTGVRYIKENSPCVTPVSTATHSLSRLHTMLTGLRNAPSEKLEQILRTCSRDPTQAIANRLKEMFEIYSQHFQPDEDFSNCAKEIASKHFRFAEMLYYKVLESVIEQEQKRLGDMDLSGILEQDAFHRSLLACCLEVVTFSYKPPGNFPFITEIFDVPLYHFYKVIEVFIRAEDGLCREVVKHLNQIEEQILDHLAWKPESPLWEKIRDNENRVPTCEEVMPPQNLERADEICIAGSPLTPRRVTEVRADTGGLGRSITSPTTLYDRYSSPPASTTRRRLFVENDSPSDGGTPGRMPPQPLVNAVPVQNVSGETVSVTPVPGQTLVTMATATVTANNGQTVTIPVQGIANENGGITFFPVQVNVGGQAQAVTGSIQPLSAQALAGSLSSQQVTGTTLQVPGQVAIQQISPGGQQQKQGQSVTSSSNRPRKTSSLSLFFRKVYHLAAVRLRDLCAKLDISDELRKKIWTCFEFSIIQCPELMMDRHLDQLLMCAIYVMAKVTKEDKSFQNIMRCYRTQPQARSQVYRSVLIKGKRKRRNSGSSDSRSHQNSPTELNKDRTSRDSSPVMRSSSTLPVPQPSSAPPTPTRLTGANSDMEEEERGDLIQFYNNIYIKQIKTFAMKYSQANMDAPPLSPYPFVRTGSPRRIQLSQNHPVYISPHKNETMLSPREKIFYYFSNSPSKRLREINSMIRTGETPTKKRGILLEDGSESPAKRICPENHSALLRRLQDVANDRGSH

SEQ ID NO: 853594 - protein, 923 aa, Homo sapiens
MISDDLVNSYHLLLCALDLVYGNALQCSNRKELVNPNFKGLSEDFHAKDSKPSSDPPCIIEKLCSLHDGLVLEAKGIKEHFWKPYIRKLYEKKLLKGKEENLTGFLEPGNFGESFKAINKAYEEYVLSVGNLDERIFLGEDAEEEIGTLSRCLNAGSGTETAERVQMKNILQQHFDKSKALRISTPLTGVRYIKENSPCVTPVSTATHSLSRLHTMLTGLRNAPSEKLEQILRTCSRDPTQAIANRLKEMFEIYSQHFQPDEDFSNCAKEIASKHFRFAEMLYYKVLESVIEQEQKRLGDMDLSGILEQDAFHRSLLACCLEVVTFSYKPPGNFPFITEIFDVPLYHFYKVIEVFIRAEDGLCREVVKHLNQIEEQILDHLAWKPESPLWEKIRDNENRVPTCEEVMPPQNLERADEICIAGSPLTPRRVTEVRADTGGLGRSITSPTTLYDRYSSPPASTTRRRLFVENDSPSDGGTPGRMPPQPLVNAVPVQNVSGETVSVTPVPGQTLVTMATATVTANNGQTVTIPVQGIANENGGITFFPVQVNVGGQAQAVTGSIQPLSAQALAGSLSSQQVTGTTLQVPGQVAIQQISPGGQQQKQGQSVTSSSNRPRKTSSLSLFFRKVYHLAAVRLRDLCAKLDISDELRKKIWTCFEFSIIQCPELMMDRHLDQLLMCAIYVMAKVTKEDKSFQNIMRCYRTQPQARSQVYRSVLIKGKRKRRNSGSSDSRSHQNSPTELNKDRTSRDSSPVMRSSSTLPVPQPSSAPPTPTRLTGANSDMEEEERGDLIQFYNNIYIKQIKTFAMKYSQANMDAPPLSPYPFVRTGSPRRIQLSQNHPVYISPHKNETMLSPREKIFYYFSNSPSKRLREINSMIRTGETPTKKRGILLEDGSESPAKRICPENHSALLRRLQDVANDRGSH

SEQ ID NO: 853595 - protein, 401 aa, Homo sapiens
LRVFFFSLSLGIANENGGITFFPVQVNVGGQAQAVTGSIQPLSAQALAGSLSSQQVTGTTLQVPGQVAIQQISPGGQQQKQGQSVTSSSNRPRKTSSLSLFFRKVYHLAAVRLRDLCAKLDISDELRKKIWTCFEFSIIQCPELMMDRHLDQLLMCAIYVMAKVTKEDKSFQNIMRCYRTQPQARSQVYRSVLIKGKRKRRNSGSSDSRSHQNSPTELNKDRTSRDSSPVMRSSSTLPVPQPSSAPPTPTRLTGANSDMEEEERGDLIQFYNNIYIKQIKTFAMKYSQANMDAPPLSPYPFVRTGSPRRIQLSQNHPVYISPHKNETMLSPREKIFYYFSNSPSKRLREINSMIRTGETPTKKRGILLEDGSESPAKRICPENHSALLRRLQDVANDRGSH

SEQ ID NO: 853596 - protein, 171 aa, Homo sapiens [sequence omitted]

SEQ ID NO: 853597 - protein, 571 aa, Homo sapiens
MPSGGDQSPPPPPPPPAAAASDEEEEDDGEAEDAAPPAESPTPQIQQRFDELCSRLNMDEAARAEAWDSYRSMSESYTLEGNDLHWLACALYVACRKSVPTVSKGTVEGNYVSLTRILKCSEQSLIEFFNKMKKWEDMANLPPHFRERTERLERNFTVSAVIFKKYEPIFQDIFKYPQEEQPRQQRGRKQRRQPCTVSEIFHFCWVLFIYAKGNFPMISDDLVNSYHLLLCALDLVYGNALQCSNRKELVNPNFKGLSEDFHAKDSKPSSDPPCIIEKLCSLHDGLVLEAKGIKEHFWKPYIRKLYEKKLLKGKEENLTGFLEPGNFGESFKAINKAYEEYVLSVGNLDERIFLGEDAEEEIGTLSRCLNAGSGTETAERVQMKNILQQHFDKSKALRISTPLTGVRYIKENSPCVTPVSTATHSLSRLHTMLTGLRNAPSEKLEQILRTCSRDPTQAIANRLKEMFEIYSQHFQPDEDFSNCAKEIASKHFRFAEMLYYKVLESVIEQEQKRLGDMDLSGILEQDAFHRSLLACCLEVVTFSYKPPGNFPFITEIFDVPLYHFYKVFLKI

SEQ ID NO: 853598 - protein, 80 aa, Homo sapiens
HFVCICFSYSKAINKAYEEYVLSVGNLDERIFLGEDAEEEIGTLSRCLNAGSGTETAERVQMKNILQQHFDKVSLAMPEE

SEQ ID NO: 853599 - protein, 1139 aa, Homo sapiens; identical to SEQ ID NO: 853593

SEQ ID NO: 853600 - protein, 1139 aa, Homo sapiens; identical to SEQ ID NO: 853593

SEQ ID NO: 853601 - protein, 1115 aa, Homo sapiens
MPSGGDQSPPPPPPPPAAAASDEEEEDDGEAEDAAPPAESPTPQIQQRFDELCSRLNMDEAARAEAWDSYRSMSESYTLEGNDLHWLACALYVACRKSVPTVSKGTVEGNYVSLTRILKCSEQSLIEFFNKMKKWEDMANLPPHFRERTERLERNFTVSAVIFKKYEPIFQDIFKYPQEEQPRQQRGRKQRRQPCTVSEIFHFCWVLFIYAKGNFPMISDDLVNSYHLLLCALDLVYGNALQCSNRKELVNPNFKGLSEDFHAKDSKPSSDPPCIIEKLCSLHDGLVLEAKGIKEHFWKPYIRKLYEKKLLKGKEENLTGFLEPGNFGESFKAINKAYEEYVLSVGNLDERIFLGEDAEEEIGTLSRCLNAGSGTETAERVQMKNILQQHFDKSKALRISTPLTGVRYIKENSPCVTPVSTATHSLSRLHTMLTGLRNAPSEKLEQILRTCSRDPTQAIANRLKEMFEIYSQHFQPDEDFSNCAKEIASKHFRFAEMLYYKVLESVIEQEQKRLGDMDLSGILEQDAFHRSLLACCLEVVTFSYKPPGNFPFITEIFDVPLYHFYKVIEVFIRAEDGLCREVVKHLNQIEEQILDHLAWKPESPLWEKIRDNENRVPTCEEVMPPQNLERADEICIAGSPLTPRRVTEVRADTGGLGRSITSPTTLYDRYSSPPASTTRRRLFVENDSPSDGGTPGRMPPQPLVNAVPVQNVSGETVSVTPVPGQTLVTMATATVTANNGQTVTIPVQGIANENGGITFFPVQVNVGGQAQAVTGSIQPLSAQALAGSLSSQQVTGTTLQVPGQVAIQQISPGGQQQKQGQSVTSSSNRPRKTSSLSLFFRKVYHLAAVRLRDLCAKLDISDELRKKIWTCFEFSIIQCPELMMDRHLDQLLMCAIYVMAKVYRSVLIKGKRKRRNSGSSDSRSHQNSPTELNKDRTSRDSSPVMRSSSTLPVPQPSSAPPTPTRLTGANSDMEEEERGDLIQFYNNIYIKQIKTFAMKYSQANMDAPPLSPYPFVRTGSPRRIQLSQNHPVYISPHKNETMLSPREKIFYYFSNSPSKRLREINSMIRTGETPTKKRGILLEDGSESPAKRICPENHSALLRRLQDVANDRGSH

SEQ ID NO: 853602 - protein, 1112 aa, Homo sapiens
MPSGGDQSPPPPPPPPAAAASDEEEEDDGEAEDAAPPAESPTPQIQQRFDELCSRLNMDEAARAEAWDSYRSMSESYTLEGNDLHWLACALYVACRKSVPTVSKGTVEGNYVSLTRILKCSEQSLIEFFNKMKKWEDMANLPPHFRERTERLERNFTVSAVIFKKYEPIFQDIFKYPQEEQPRQQRGRKQRRQPCTVSEIFHFCWVLFIYAKGNFPMISDDLVNSYHLLLCALDLVYGNALQCSNRKELVNPNFKGLSEDFHAKDSKPSSDPPCIIEKLCSLHDGLVLEAKGIKEHFWKPYIRKLYEKKLLKGKEENLTGFLEPGNFGESFKAINKAYEEYVLSVGNLDERIFLGEDAEEEIGTLSRCLNAGSGTETAERVQMKNILQQHFDKSKALRISTPLTGVRYIKENSPCVTPVSTATHSLSRLHTMLTGLRNAPSEKLEQILRTCSRDPTQAIANRLKEMFEIYSQHFQPDEDFSNCAKEIASKHFRFAEMLYYKVLESVIEQEQKRLGDMDLSGILEQDAFHRSLLACCLEVVTFSYKPPGNFPFITEIFDVPLYHFYKVIEVFIRAEDGLCREVVKHLNQIEEQILDHLAWKPESPLWEKIRDNENRVPTCEEVMPPQNLERADEICIAGSPLTPRRVTEVRADTGGLGRSITSPTTLYDRYSSPPASTTRRRLFVENDSPSDGGTPGRMPPQPLVNAVPVQNVSGETVSVTPVPGQTLVTMATATVTANNGQTVTIPVQGIANENGGITFFPVQVNVGGQAQAVTGSIQPLSAQALAGSLSSQQVTGTTLQVPGQVAIQQISPGGQQQKQGQSVTSSSNRPRKTSSLSLFFRKVYHLAAVRLRDLCAKLDISDELRKKIWTCFEFSIIQCPELMMDRHLDQLLMCAIYVMAKVTKEDKSFQNIMRCYRTQPQARSQVYRSVLIKGKRKRRNSGSSDSRSHQNSPTELNKDRTSRDSSPVMRSSSTLPVPQPSSAPPTPTRLTGANSDMEEEERGDLIQFYNNIYIKQIKTFAMKYSQANMDAPPLSPYPFVRTGSPRRIQLSQNHPVYISPHKNETMLSPREKIFYYFSNSPSKVSLTSILAFTNLKMLQMLETGFVLSLGTH

SEQ ID NO: 853603 - protein, 626 aa, Homo sapiens
MPSGGDQSPPPPPPPPAAAASDEEEEDDGEAEDAAPPAESPTPQIQQRFDELCSRLNMDEAARAEAWDSYRSMSESYTLEGNDLHWLACALYVACRKSVPTVSKGTVEGNYVSLTRILKCSEQSLIEFFNKMKKWEDMANLPPHFRERTERLERNFTVSAVIFKKYEPIFQDIFKYPQEEQPRQQRGRKQRRQPCTVSEIFHFCWVLFIYAKGNFPMISDDLVNSYHLLLCALDLVYGNALQCSNRKELVNPNFKGLSEDFHAKDSKPSSDPPCIIEKLCSLHDGLVLEAKGIKEHFWKPYIRKLYEKKLLKGKEENLTGFLEPGNFGESFKAINKAYEEYVLSVGNLDERIFLGEDAEEEIGTLSRCLNAGSGTETAERVQMKNILQQHFDKSKALRISTPLTGVRYIKENSPCVTPVSTATHSLSRLHTMLTGLRNAPSEKLEQILRTCSRDPTQAIANRLKEMFEIYSQHFQPDEDFSNCAKEIASKHFRFAEMLYYKVLESVIEQEQKRLGDMDLSGILEQDAFHRSLLACCLEVVTFSYKPPGNFPFITEIFDVPLYHFYKVIEVFIRAEDGLCREVVKHLNQIEEQILDHLAWKPESPLWEKIRDNENRVPTCEEELFTF

SEQ ID NO: 853604 - protein, 366 aa, Homo sapiens
MMYHTITLTREDLEKFKALRVIVRIGSGYDNVDIKAAGELGIAVCNIPSAAVEETADSTICHILNLYRRNTWLYQALREGTRVQSVEQIREVASGAARIRGETLGLIGFGRTGQAVAVRAKAFGFSVIFYDPYLQDGIERSLGVQRVYTLQDLLYQSDCVSLHCNLNEHNHHLINDFTIKQMRQGAFLVNAARGGLVDEKALAQALKEGRIRGAALDVHESEPFSFAQGPLKDAPNLICTPHTAWYSEQASLEMREAAATEIRRAITGRIPESLRNCVNKEFFVTSAPWSVIDQQAIHPELNGATYRYPPGIVGVAPGGLPAAMEGIIPGGIPVTHNLPTVAHPSQAPSPNQPTKHGDNREHPNEQ

SEQ ID NO: 853605 - protein, 71 aa, Homo sapiens
MALVDKHKVKRQRLDRICEEFIVASCTQTPASSPKFLEDCFAFDLRVAKFHKEWPLLDKHKVKRQRLDRIV

SEQ ID NO: 853606 - protein, 985 aa, Homo sapiens
MPVPSRHINIGRSQSWDAAGWYEGPWENAESLRPLGRRSSLTYGTAEGTWFEPNHRPQDAALPVAAEPYLYREAVYNSVAARKGSTPDFTFYDSRQAVMSGRSPLLPREYYSDPSGAARVPKEPPLYRDPGVSRPVPSYGVLGSRTSWDPMQGRSPALQDAGHLYRDPGGKMIPQGRQTQSRAASPGRYGREQPDTRYGAEVPAYPLSQVFSDISERPIDPAPARQVAPTCLVVDPSSAAAPEGSTGVAPGALNRGYGPARESIPSKMAYETYEADLSTFQGPGGKRTVLPEFLAFLRAEGLAEATLGALLQQGFDSPAVLATLEDADIKSVAPNLGQARVLSRLANSCRTEMQLRRQDRGGPLPRARSSSFSHRSELLHGDLASLGAAAPLQTASPRAGDPARRPSSAPSQHLLETAATYSAPGVGTHAPHFPSNSGYSSPTPCALTARLSPTHPLQAGVALTNPGPSNPLHPGPRTAYSTAYTVPMELLKRERNVAASPLPSPHGSPQVLRKPGAPLGPSTLPPASQSLHTPHSPYQKVARRTGAPIIVSTMLAPEPSIRPQIMNGPLHPRPLVALLDGRDCTVEMPILKDLATVAFCDAQSTQEIHEKVLNEAVGAMMYHTITLTREDLEKFKALRVIVRIGSGYDNVDIKAAGELGIAVCNIPSAAVEETADSTICHILNLYRRNTWLYQALREGTRVQSVEQIREVASGAARIRGETLGLIGFGRTGQAVAVRAKAFGFSVIFYDPYLQDGIERSLGVQRVYTLQDLLYQSDCVSLHCNLNEHNHHLINDFTIKQMRQGAFLVNAARGGLVDEKALAQALKEGRIRGAALDVHESEPFSFAQGPLKDAPNLICTPHTAWYSEQASLEMREAAATEIRRAITGRIPESLRNCVNKEFFVTSAPWSVIDQQAIHPELNGATYRYPPGIVGVAPGGLPAAMEGIIPGGIPVTHNLPTVAHPSQAPSPNQPTKHGDNREHPNEQ

SEQ ID NO: 853607 - protein, 445 aa, Homo sapiens
MALVDKHKVKRQRLDRICEGIRPQIMNGPLHPRPLVALLDGRDCTVEMPILKDLATVAFCDAQSTQEIHEKVLNEAVGAMMYHTITLTREDLEKFKALRVIVRIGSGYDNVDIKAAGELGIAVCNIPSAAVEETADSTICHILNLYRRNTWLYQALREGTRVQSVEQIREVASGAARIRGETLGLIGFGRTGQAVAVRAKAFGFSVIFYDPYLQDGIERSLGVQRVYTLQDLLYQSDCVSLHCNLNEHNHHLINDFTIKQMRQGAFLVNAARGGLVDEKALAQALKEGRIRGAALDVHESEPFSFAQGPLKDAPNLICTPHTAWYSEQASLEMREAAATEIRRAITGRIPESLRNCVNKEFFVTSAPWSVIDQQAIHPELNGATYRYPPGIVGVAPGGLPAAMEGIIPGGIPVTHNLPTVAHPSQAPSPNQPTKHGDNREHPNEQ

SEQ ID NO: 853608 - protein, 445 aa, Homo sapiens; identical to SEQ ID NO: 853607

SEQ ID NO: 853609 - protein, 445 aa, Homo sapiens; identical to SEQ ID NO: 853607

SEQ ID NO: 853610 - protein, 445 aa, Homo sapiens; identical to SEQ ID NO: 853607

SEQ ID NO: 853611 - protein, 513 aa, Homo sapiens
MRPGLPGPTGLCAQTSSRGQKSVLKQKESCGIWQLYHFLSRKQEPRWEPCVSGSSSGDGAVADLADELRGYPALCCTLPVHSYRSWAGIRPQIMNGPLHPRPLVALLDGRDCTVEMPILKDLATVAFCDAQSTQEIHEKVLNEAVGAMMYHTITLTREDLEKFKALRVIVRIGSGYDNVDIKAAGELGIAVCNIPSAAVEETADSTICHILNLYRRNTWLYQALREGTRVQSVEQIREVASGAARIRGETLGLIGFGRTGQAVAVRAKAFGFSVIFYDPYLQDGIERSLGVQRVYTLQDLLYQSDCVSLHCNLNEHNHHLINDFTIKQMRQGAFLVNAARGGLVDEKALAQALKEGRIRGAALDVHESEPFSFAQGPLKDAPNLICTPHTAWYSEQASLEMREAAATEIRRAITGRIPESLRNCVNKEFFVTSAPWSVIDQQAIHPELNGATYRYPPGIVGVAPGGLPAAMEGIIPGGIPVTHNLPTVAHPSQAPSPNQPTKHGDNREHPNEQ

SEQ ID NO: 853612 - protein, 366 aa, Homo sapiens; identical to SEQ ID NO: 853604

SEQ ID NO: 853613 - protein, 985 aa, Homo sapiens; identical to SEQ ID NO: 853606

SEQ ID NO: 853614 - protein, 380 aa, Homo sapiens
MALVDKHKVKRQRLDRICEGIRPQIMNGPLHPRPLVALLDGRDCTVEMPILKDLATVAFCDAQSTQEIHEKVLNEAVGAMMYHTITLTREDLEKFKALRVIVRIGSGYDNVDIKAAGELGIAVCNIPSAAVEETADSTICHILNLYRRNTWLYQALREGTRVQSVEQIREVASGAARIRGETLGLIGFGRTGQAVAVRAKAFGFSVIFYDPYLQDGIERSLGVQRVYTLQDLLYQSDCVSLHCNLNEHNHHLINDFTIKQMRQGAFLVNAARGGLVDEKALAQALKEGRIRGAALDVHESEPFSFAQGPLKDAPNLICTPHTAWYSEQASLEMREAAATEIRRAITGRIPESLRNCVNKEFFVTSAPWSVIDQQAIHPVT

SEQ ID NO: 853615 - protein, 445 aa, Homo sapiens; identical to SEQ ID NO: 853607

SEQ ID NO: 853616 - protein, 386 aa, Homo sapiens
MALVDKHKVKRQRLDRICEGIRPQIMNGPLHPRPLVALLDGRDCTVEMPILKDLATVAFCDAQSTQEIHEKVLNEAVGAMMYHTITLTREDLEKFKALRVIVRIGSGYDNVDIKAAGELGIAVCNIPSAAVEETADSTICHILNLYRRNTWLYQALREGTRVQSVEQIREVASGAARIRGETLGLIGFGRTGQAVAVRAKAFGFSVIFYDPYLQDGIERSLGVQRVYTLQDLLYQSDCVSLHCNLNEHNHHLINDFTIKQMRQGAFLVNAARGGLVDEKALAQALKEGRIRGAALDVHESEPFSFAQGPLKDAPNLICTPHTAWYSEQASLEMREAAATEIRRAITGRIPESLRNCVNKEFFVTSAPWSVIDQQAIHPELNGATYR

SEQ ID NO: 853617 - protein, 246 aa, Homo sapiens
MWVMTGLGSDRRSRLRMDYVTDCYKSAYLSYLRSYMKIIVSAIWGVCECEPESYKSTLISTWNTPSGRNTVVSCEGYISITFRFLLTSGSYFRLECANTASDQITLLASTTYFSVNTCLIQYCFRDTTLHCHKLAVSDSCKPMPKHIGTFCVTVYGRVLATKVKRHRTRMVTDVYHPQRHAAPRARAPMTASHKFTTTSTNSLNTTEDPGTADTERRPSQTPEKRGTQGGHYQQKAITTANKKTAD

SEQ ID NO: 853618 - protein, 985 aa, Homo sapiens; identical to SEQ ID NO: 853606

SEQ ID NO: 853619 - protein, 723 aa, Homo sapiens
MPVPSRHINIGRSQSWDAAGWYEGPWENAESLRPLGRRSSLTYGTAEGTWFEPNHRPQDAALPVAAEPYLYREAVYNSVAARKGSTPDFTFYDSRQAVMSGRSPLLPREYYSDPSGAARVPKEPPLYRDPGVSRPVPSYGVLGSRTSWDPMQGRSPALQDAGHLYRDPGGKMIPQGRQTQSRAASPGRYGREQPDTRYGAEVPAYPLSQVFSDISERPIDPAPARQVAPTCLVVDPSSAAAPEGSTGVAPGALNRGYGPARESIPSKMAYETYEADLSTFQGPGGKRTVLPEFLAFLRAEGLAEATLGALLQQGFDSPAVLATLEDADIKSVAPNLGQARVLSRLANSCRTEMQLRRQDRGGPLPRARSSSFSHRSELLHGDLASLGAAAPLQTASPRAGDPARRPSSAPSQHLLETAATYSAPGVGTHAPHFPSNSGYSSPTPCALTARLSPTHPLQAGVALTNPGPSNPLHPGPRTAYSTAYTVPMELLKRERNVAASPLPSPHGSPQVLRKPGAPLGPSTLPPASQSLHTPHSPYQKVARRTGAPIIVSTMLAPEPSAAPRMTEAGHLVVPLTPLCEADSTVTSDRAKRSHTDERKFLTYHEIAIIDGISPVTLFLSNSGNALSRRIYDHTAKQRLHNPCTSLTRDALAEIVTINCTSLPSDLEVPEPWVPRVPTRSRRKPDRVSRNWALGRIPPCDADPSTRTCALNPTLLISRPSQAH

SEQ ID NO: 853620 - protein, 445 aa, Homo sapiens; identical to SEQ ID NO: 853607

SEQ ID NO: 853621 - protein, 445 aa, Homo sapiens; identical to SEQ ID NO: 853607

SEQ ID NO: 853622 - protein, 445 aa, Homo sapiens; identical to SEQ ID NO: 853607

SEQ ID NO: 853623 - protein, 445 aa, Homo sapiens; identical to SEQ ID NO: 853607

SEQ ID NO: 853624 - protein, 420 aa, Homo sapiens
MNGPLHPRPLVALLDGRDCTVEMPILKDLATVAFCDAQSTQEIHEKVLNEAVGAMMYHTITLTREDLEKFKALRVIVRIGSGYDNVDIKAAGELGIAVCNIPSAAVEETADSTICHILNLYRRNTWLYQALREGTRVQSVEQIREVASGAARIRGETLGLIGFGRTGQAVAVRAKAFGFSVIFYDPYLQDGIERSLGVQRVYTLQDLLYQSDCVSLHCNLNEHNHHLINDFTIKQMRQGAFLVNAARGGLVDEKALAQALKEGRIRGAALDVHESEPFSFAQGPLKDAPNLICTPHTAWYSEQASLEMREAAATEIRRAITGRIPESLRNCVNKEFFVTSAPWSVIDQQAIHPELNGATYRYPPGIVGVAPGGLPAAMEGIIPGGIPVTHNLPTVAHPSQAPSPNQPTKHGDNREHPNEQ

SEQ ID NO: 853625 - protein, 985 aa, Homo sapiens; identical to SEQ ID NO: 853606

SEQ ID NO: 853626 - protein, 373 aa, Homo sapiens
MALVDKHKVKRQRLDRICEGIRPQIMNGPLHPRPLVALLDGRDCTVEMPILKDLATVAFCDAQSTQEIHEKVLNEAVGAMMYHTITLTREDLEKFKALRVIVRIGSGYDNVDIKAAGELGIAVCNIPSAAVEETADSTICHILNLYRRNTWLYQALREGTRVQSVEQIREVASGAARIRGETLGLIGFGRTGQAVAVRAKAFGFSVIFYDPYLQDGIERSLGVQRVYTLQDLLYQSDCVSLHCNLNEHNHHLINDFTIKQMRQGAFLVNAARGGLVDEKALAQALKEGRIRGAALDVHESEPFSFAQGPLKDAPNLICTPHTAWYSEQASLEMREAAATEIRRAITDIRQASWVWLQEDFLQPWKGSSLEASQ

SEQ ID NO: 853627 - protein, 445 aa, Homo sapiens; identical to SEQ ID NO: 853607

SEQ ID NO: 853628 - protein, 300 aa, Homo sapiens
MALVDKHKVKRQRLDRICEGIRPQIMNGPLHPRPLVALLDGRDCTVEMPILKDLATVAFCDAQSTQEIHEKVLNEAVGAMMYHTITLTREDLEKFKALRVIVRIGSGYDNVDIKAAGELGIAVCNIPSAAVEETADSTICHILNLYRRNTWLYQALREGTRVQSVEQIREVASGAARIRGETLGLIGFGRTGQAVAVRAKAFGFSVIFYDPYLQDGIERSLGVQRVYTLQDLLYQSDCVSLHCNLNEHNHHLINDFTIKQMRQGAFLVNAARGGLVDEKALAQALKEGSEIRASFNDMTK

SEQ ID NO: 853629 - protein, 168 aa, Homo sapiens
MTATLRPYLSAVRATLQAALCLENFSSQVVERHNKPEVEVRSSKELLLQPVTISRNEKEKVLIEGSINSVRVSIAVKQADEIEKILCHKFMRFMMMRAENFFILRRKPVEGYDISFLITNFHTEQMYKHKLVDFVIHFMEEIDKEISEMKLSVNARARIVAEEFLKNF

SEQ ID NO: 853630 - protein, 168 aa, Homo sapiens; identical to SEQ ID NO: 853629

SEQ ID NO: 853631 - protein, 187 aa, Homo sapiens
ASRGWPLPYFRFPAQPAPAMTATLRPYLSAVRATLQAALCLENFSSQVVERHNKPEVEVRSSKELLLQPVTISRNEKEKVLIEGSINSVRVSIAVKQADEIEKILCHKFMRFMMMRAENFFILRRKPVEGYDISFLITNFHTEQMYKHKLVDFVIHFMEEIDKEISEMKLSVNARARIVAEEFLKNF

SEQ ID NO: 853632 - protein, 232 aa, Homo sapiens
GSQRGRAYWSLPGVGRRWASSKAARGGVRVVGLRRAPGHSPGREAELGGRDLRAAVSPAERQELRTATLRPYLSAVRATLQAALCLENFSSQVVERHNKPEVEVRSSKELLLQPVTISRNEKEKVLIEGSINSVRVSIAVKQADEIEKILCHKFMRFMMMRAENFFILRRKPVEGYDISFLITNFHTEQMYKHKLVDFVIHFMEEIDKEISEMKLSVNARARIVAEEFLKNF

SEQ ID NO: 853633 - protein, 183 aa, Homo sapiens
ESARASLLEFAGGGKKTATLRPYLSAVRATLQAALCLENFSSQVVERHNKPEVEVRSSKELLLQPVTISRNEKEKVLIEGSINSVRVSIAVKQADEIEKILCHKFMRFMMMRAENFFILRRKPVEGYDISFLITNFHTEQMYKHKLVDFVIHFMEEIDKEISEMKLSVNARARIVAEEFLKNF

SEQ ID NO: 853634 - protein, 148 aa, Homo sapiens
RHRGAGHFRTSAFRPSQRPRWSSKELLLQPVTISRNEKEKVLIEGSINSVRVSIAVKQADEIEKILCHKFMRFMMMRAENFFILRRKPVEGYDISFLITNFHTEQMYKHKLVDFVIHFMEEIDKEISEMKLSVNARARIVAEEFLKNF

SEQ ID NO: 853635 - protein, 168 aa, Homo sapiens; identical to SEQ ID NO: 853629

SEQ ID NO: 853636 - protein, 181 aa, Homo sapiens
MTATLRPYLSAVRATLQAALCLENFSSQVVERHNKPEVEVRSSKELLLQPVTISRNEKEKVLIEGSINSVRVSIAVKQADEIEKILCHKFMRFMMMRAENFFILRRKPVEGYDISFLITNFHTEQMYKHKLVDFVIHFMEEIDKEISEMKLSVNARARIVAEEFLKNVSRSSGEDPPRRLT

SEQ ID NO: 853637 - protein, 182 aa, Homo sapiens
WYRSESLDGQPAPAMTATLRPYLSAVRATLQAALCLENFSSQVVERHNKPEVEVRSSKELLLQPVTISRNEKEKVLIEGSINSVRVSIAVKQADEIEKILCHKFMRFMMMRAENFFILRRKPVEGYDISFLITNFHTEQMYKHKLVDFVIHFMEEIDKEISEMKLSVNARARIVAEEFLKNF

SEQ ID NO: 853638 - protein, 168 aa, Homo sapiens; identical to SEQ ID NO: 853629

SEQ ID NO: 853639 - protein, 168 aa, Homo sapiens; identical to SEQ ID NO: 853629

SEQ ID NO: 853640 - protein, 185 aa, Homo sapiens
PRVADAWVDPRVRAAPAMTATLRPYLSAVRATLQAALCLENFSSQVVERHNKPEVEVRSSKELLLQPVTISRNEKEKVLIEGSINSVRVSIAVKQADEIEKILCHKFMRFMMMRAENFFILRRKPVEGYDISFLITNFHTEQMYKHKLVDFVIHFMEEIDKEISEMKLSVNARARIVAEEFLKNF

SEQ ID NO: 853641 - protein, 168 aa, Homo sapiens; identical to SEQ ID NO: 853629

SEQ ID NO: 853642 - protein, 66 aa, Homo sapiens
PSLLSSSQGYDISFLITNFHTEQMYKHKLVDFVIHFMEEIDKEISEMKLSVNARARIVAEEFLKNF

SEQ ID NO: 853643 - protein, 116 aa, Homo sapiens
MTATLRPYLSAVRATLQAALCLENFSSQVVERHNKPEVEVRSSKELLLQPVTISRNEKEKVLIEGSINSVRVSIAVKQADEIEKILCHKFMRFMMMRAENFFILRRKPVEVRPCDP

SEQ ID NO: 853644 - protein, 982 aa, Homo sapiens [sequence omitted]

SEQ ID NO: 853645 - protein, 982 aa, Homo sapiens [sequence omitted]

SEQ ID NO: 853646 - protein, 982 aa, Homo sapiens [sequence omitted]

SEQ ID NO: 853647 - protein, 1086 aa, Homo sapiens [sequence omitted]

SEQ ID NO: 853648 - protein, 1007 aa, Homo sapiens
MTSVGTNRARGNWEQPQNQNQTQHKQRPQATAEQIRLAQMISDHNDADFEEKVKQLIDITGKNQDECVIALHDCNGDVNRAINVLLEGNPDTHSWEMVGKKKGVSGQKDGGQTESNEEGKENRDRDRDYSRRRGGPPRRGRGASRGREFRGQENGLDGTKSGGPSGRGTERGRRGRGRGRGGSGRRGGRFSAQGMGTFNPADYAEPANTDDNYGNSSGNTWNNTGHFEPDDGTSAWRTATEEWGTEDWNEDLSETKIFTASNVSSVPLPAENVTITAGQRIDLAVLLGKTPSTMENDSSNLDPSQAPSLAQPLVFSNSKQTAISQPASGNTFSHHSMVSMLGKGFGDVGEAKGGSTTGSQFLEQFIGTWRKSLCINVGQPLAFFYVMDSILHNRILVVVHGALYENESPNHVVASYDLWIGIARVDSRRGKSTSTTLQKAAQEHLYPLIFERIAVTVFLQEKSPAVATSTAAPPPPSSPLPSKSTSAPQMSPGSSDNQSSSPQPAQQKLKQQKKKASLTSKIPALAVEMPGSADISGLNLQFGALQFGSEPVLSDYESTPTTSASSSQAPSSLYTSTASESSSTISSNQSQESGYQSGPIQSTTYTSQNNAQGPLYEQRSTQTRRYPSSISSSPQKDLTQAKNGFSSVQATQLQTTQSVEGATGSAVKSDSPSTSSIPPLNETVSAASLLTTTNQHSSSLGGLSHSEEIPNTTTTQHSSTLSTQQNTLSSSTSSGRTSTSTLLHTSVESEANLHSSSSTFSTTSSTVSAPPPVVSVSSSLNSGSSLGLSLGSNSTVTASTRSSVATTSGKAPPNLPPGVPPLLPNPYIMAPGLLHAYPPQVYGYDDLQMLQTRFPLDYYSIPFPTPTTPLTGRDGSLASNPYSGDLTKFGRGDASSPAPATTLAQPQQNQTQTHHTTQQTFLNPALPPGYSYTSLPYYTGVPGLPSTFQYGPAVFPVAPTSSKQHGVNVSVNASATPFQQPSGYGSHGYNTGRKYPPPYKHFWTAES

SEQ ID NO: 853649 - protein, 1067 aa, Homo sapiens [sequence omitted]

SEQ ID NO: 853650 - protein, 1086 aa, Homo sapiens [sequence omitted]

SEQ ID NO: 853651 - protein, 518 aa, Homo sapiens
MSPGSSDNQSSSPQPAQQKLKQQKKKASLTSKIPALAVEMPGSADISGLNLQFGALQFGSEPVLSDYESTPTTSASSSQAPSSLYTSTASESSSTISSNQSQESGYQSGPIQSTTYTSQNNAQGPLYEQRSTQTRRYPSSISSSPQKDLTQAKNGFSSVQATQLQTTQSVEGATGSAVKSDSPSTSSIPPLNETVSAASLLTTTNQHSSSLGGLSHSEEIPNTTTTQHSSTLSTQQNTLSSSTSSGRTSTSTLLHTSVESEANLHSSSSTFSTTSSTVSAPPPVVSVSSSLNSGSSLGLSLGSNSTVTASTRSSVATTSGKAPPNLPPGVPPLLPNPYIMAPGLLHAYPPQVYGYDDLQMLQTRFPLDYYSIPFPTPTTPLTGRDGSLASNPYSGDLTKFGRGDASSPAPATTLAQPQQNQTQTHHTTQQTFLNPALPPGYSYTSLPYYTGVPGLPSTFQYGPAVFPVAPTSSKQHGVNVSVNASATPFQQPSGYGSHGYNTGRKYPPPYKHFWTAES

SEQ ID NO: 853652 - protein, 1084 aa, Homo sapiens [sequence omitted]

SEQ ID NO: 853653 - protein, 1067 aa, Homo sapiens [sequence omitted]

SEQ ID NO: 853654 - protein, 1001 aa, Homo sapiens
MTSVGTNRARGNWEQPQNQNQTQHKQRPQATAEQIRLAQMISDHNDADFEEKVKQLIDITGKNQDECVIALHDCNGDVNRAINVLLEGNPDTHSWEMVGKKKGVSGQKDGGQTESNEEGKENRDRDRDYSRRRGGPPRRGRGASRGREFRGQENGLDGTKSGGPSGRGTERGRRGRGRGRGGSGRRGGRFSAQGMGTFNPADYAEPANTDDNYGNSSGNTWNNTGHFEPDDGTSAWRTATEEWGTEDWNEDLSETKIFTASNVSSVPLPAENVTITAGQRIDLAVLLGKTPSTMENDSSNLDPSQAPSLAQPLVFSNSKQTAISQPASGNTFSHHSMVSMLGKGFGDVGEAKGGSTTGSQFLEQFKTAQALAQLAAQHSQSGSTTTSSWDMGSTTQSPSLVQYDLKNPSDSAVHSPFTKRQAFTPSSTMMEVFLQEKSPAVATSTAAPPPPSSPLPSKSTSAPQMSPGSSDNQSSSPQPAQQKLKQQKKKASLTSKIPALAVEMPGSADISGLNLQFGALQFGSEPVLSDYESTPTTSASSSQAPSSLYTSTASESSSTISSNQSQESGYQSGPIQSTTYTSQNNAQGPLYEQRSTQTRRYPSSISSSPQKDLTQAKNGFSSVQATQLQTTQSVEGATGSAVKSDSPSTSSIPPLNETVSAASLLTTTNQHSSSLGGLSHSEEIPNTTTTQHSSTLSTQQNTLSSSTSSGRTSTSTLLHTSVESEANLHSSSSTFSTTSSTVSAPPPVVSVSSSLNSGSSLGLSLGSNSTVTASTRSSVATTSGKAPPNLPPGVPPLLPNPYIMAPGLLHAYPPQVYGYDDLQMLQTRFPLDYYSIPFPTPTTPLTGRDGSLASNPYSGDLTKFGRGDASSPAPATTLAQPQQNQTQTHHTTQQTFLNPALPPGYSYTSLPYYTGVPGLPSTFQYGPAVFPVAPTSSKQHGVNVSVNASATPFQQPSGYGSHGYNTGVSVTSSNTGVPDISGSVYSKTQVGAWLWIKVEKR

SEQ ID NO: 853655 - protein, 198 aa, Homo sapiens
MEMSTELSMFFWKETQTRIPGRWSGRRRESQARRMVARRNPMRKAKKIETGTETIVGDVVGHQDGGEVPAVDESFEVRKMDWMAPRVEGLLEEEQKEAEGAVAEAEVALVGEEEGFLLKEWEPLTQLIMQSQPILMITMAIAAAIRGTTLATLNQMMGRVHGGLQQRSGGLKIGMKIFLRPRSSLPLMCLQCLCLRRM

SEQ ID NO: 853656 - protein, 298 aa, Homo sapiens
GHMLHTQHSSTLSTQQNTLSSSTSSGRTSTSTLLHTSVESEANLHSSSSTFSTTSSTVSAPPPVVSVSSSLNSGSSLGLSLGSNSTVTASTRSSVATTSGKAPPNLPPGVPPLLPNPYIMAPGLLHAYPPQVYGYDDLQMLQTRFPLDYYSIPFPTPTTPLTGRDGSLASNPYSGDLTKFGRGDASSPAPATTLAQPQQNQTQTHHTTQQTFLNPALPPGYSYTSLPYYTGVPGLPSTFQYGPAVFPVAPTSSKQHGVNVSVNASATPFQQPSGYGSHGYNTGRKYPPPYKHFWTAES

SEQ ID NO: 853657 - protein, 960 aa, Homo sapiens
MTSVGTNRARGNWEQPQNQNQTQHKQRPQATAEQIRLAQMISDHNDADFEEKVKQLIDITGKNQDECVIALHDCNGDVNRAINVLLEGNPDTHSWEMVGKKKGVSGQKDGGQTESNEEGKENRDRDRDYSRRRGGPPRRGRGASRGREFRGQENGLDGTKSGGPSGRGTERGRRGRGRGRGGSGRRGGRFSAQGMGTFNPADYAEPANTDDNYGNSSGNTWNNTGHFEPDDGTSAWRTATEEWGTEDWNEDLSETKIFTASNVSSVPLPAENVTITAGQRIDLAVLLGKTPSTMENDSSNLDPSQAPSLAQPLVFSNSKQTAISQPASGNTFSHHSMVSMLGKGFGDVGEAKGGSTTGSQFLEQFKTAQALAQLAAQHSQSGSTTTSSWDMGSTTQSPSLVQYDLKNPSDSAVHSPFTKRQAFTPSSTMMEVFLQEKSPAVATSTAAPPPPSSPLPSKSTSAPQMSPGSSDNQSSSPQPAQQKLKQQKKKASLTSKIPALAVEMPGSADISGLNLQFGALQFGSEPVLSDYESTPTTSASSSQAPSSLYTSTASESSSTISSNQSQESGYQSGPIQSTTYTSQNNAQGPLYEQRSTQTRRYPSSISSSPQKDLTQAKNGFSSVQATQLQTTQSVEGATGSAVKSDSPSTSSIPPLNETVSAASLLTTTNQHSSSLGGLSHSEEIPNTTTTQHSSTLSTQQNTLSSSTSSGRTSTSTLLHTSVESEANLHSSSSTFSTTSSTVSAPPPVVSVSSSLNSGSSLGLSLGSNSTVTASTRSSVATTSGKAPPNLPPGVPPLLPNPYIMAPGLLHAYPPQVYGYDDLQMLQTRFPLQHGVNVSVNASATPFQQPSGYGSHGYNTGVSVTSSNTGVPDISGSVYSKTQQSFEKQGFHSGTPAASFNLPSALGSGGPINPATAAAYPPAPFMHILTPHQQPHSQILHHHLQQDGQDILNFVDDQLGE

SEQ ID NO: 853658 - protein, 875 aa, Homo sapiens
MTSVGTNRARGNWEQPQNQNQTQHKQRPQATAEQIRLAQMISDHNDADFEEKVKQLIDITGKNQDECVIALHDCNGDVNRAINVLLEGNPDTHSWEMVGKKKGVSGQKDGGQTESNEEGKENRDRDRDYSRRRGGPPRRGRGASRGREFRGQENGLDGTKSGGPSGRGTERGRRGRGRGRGGSGRRGGRFSAQGMGTFNPADYAEPANTDDNYGNSSGNTWNNTGHFEPDDGTSAWRTATEEWGTEDWNEDLSETKIFTASNVSSVPLPAENVTITAGQRIDLAVLLGKTPSTMENDSSNLDPSQAPSLAQPLVFSNSKQTAISQPASGNTFSHHSMVSMLGKGFGDVGEAKGGSTTGSQFLEQFKTAQALAQLAAQHSQSGSTTTSSWDMGSTTQSPSLVQYDLKNPSDSAVHSPFTKRQAFTPSSTMMEVFLQEKSPAVATSTAAPPPPSSPLPSKSTSAPQMSPGSSDNQSSSPQPAQQKLKQQKKKASLTSKIPALAVEMPGSADISGLNLQFGALQFGSEPVLSDYESTPTTSASSSQAPSSLYTSTASESSSTISSNQSQESGYQSGPIQSTTYTSQNNAQGPLYEQRSTQTRRYPSSISSSPQKDLTQAKNGFSSVQATQLQTTQSVEGATGSAVKSDSPSTSSIPPLNETVSAASLLTTTNQHSSSLGGLSHSEEIPNTTTTQHSSTLSTQQNTLSSSTSSGRTSTSTLLHTSVESEANLHSSSSTFSTTSSTVSAPPPVVSVSSSLNSGSSLGLSLGSNSTVTASTRSSVATTSGKAPPNLPPGVPPLLPNPYIMAPGLLHAYPPQVYGYDDLQMLQTRFPLDYYSIPFPTPTTPLTGRDGSLASNPYSGDLTKFGAGEEASPRPV

SEQ ID NO: 853659 - protein, 851 aa, Homo sapiens
MTSVGTNRARGNWEQPQNQNQTQHKQRPQATAEQIRLAQMISDHNDADFEEKVKQLIDITGKNQDECVIALHDCNGDVNRAINVLLEGNPDTHSWEMVGKKKGVSGQKDGGQTESNEEGKENRDRDRDYSRRRGGPPRRGRGASRGREFRGQENGLDGTKSGGPSGRGTERGRRGRGRGRGGSGRRGGRFSAQGMGTFNPADYAEPANTDDNYGNSSGNTWNNTGHFEPDDGTSAWRTATEEWGTEDWNEDLSETKIFTASNVSSVPLPAENVTITAGQRIDLAVLLGKTPSTMENDSSNLDPSQAPSLAQPLVFSNSKQTAISQPASGNTFSHHSMVSMLGKGFGDVGEAKGGSTTGSQFLEQFKTAQALAQLAAQHSQSGSTTTSSWDMGSTTQSPSLVQYDLKNPSDSAVHSPFTKRQAFTPSSTMMEVFLQEKSPAVATSTAAPPPPSSPLPSKSTSAPQMSPGSSDNQSSSPQPAQQKLKQQKKKASLTSKIPALAVEMPGSADISGLNLQFGALQFGSEPVLSDYESTPTTSASSSQAPSSLYTSTASESSSTISSNQSQESGYQSGPIQSTTYTSQNNAQGPLYEQRSTQTRRYPSSISSSPQKDLTQAKNGFSSVQATQLQTTQSVEGATGSAVKSDSPSTSSIPPLNETVSAASLLTTTNQHSSSLGGLSHSEEIPNTTTTQHSSTLSTQQNTLSSSTSSGRTSTSTLLHTSVESEANLHSSSSTFSTTSSTVSAPPPVVSVSSSLNSGSSLGLSLGSNSTVTASTRSSVATTSGKAPPNLPPGVPPLLPNPYIMAPGLLHAYPPQVYGYDDLQMLQTRFPLIATASHFPHPLTTGHPLGSS

SEQ ID NO: 853660 - protein, 785 aa, Homo sapiens
MTSVGTNRARGNWEQPQNQNQTQHKQRPQATAEQIRLAQMISDHNDADFEEKVKQLIDITGKNQDECVIALHDCNGDVNRAINVLLEGNPDTHSWEMVGKKKGVSGQKDGGQTESNEEGKENRDRDRDYSRRRGGPPRRGRGASRGREFRGQENGLDGTKSGGPSGRGTERGRRGRGRGRGGSGRRGGRFSAQGMGTFNPADYAEPANTDDNYGNSSGNTWNNTGHFEPDDGTSAWRTATEEWGTEDWNEDLSETKIFTASNVSSVPLPAENVTITAGQRIDLAVLLGKTPSTMENDSSNLDPSQAPSLAQPLVFSNSKQTAISQPASGNTFSHHSMVSMLGKGFGDVGEAKGGSTTGSQFLEQFKTAQALAQLAAQHSQSGSTTTSSWDMGSTTQSPSLVQYDLKNPSDSAVHSPFTKRQAFTPSSTMMEVFLQEKSPAVATSTAAPPPPSSPLPSKSTSAPQMSPGSSDNQSSSPQPAQQKLKQQKKKASLTSKIPALAVEMPGSADISGLNLQFGALQFGSEPVLSDYESTPTTSASSSQAPSSLYTSTASESSSTISSNQSQESGYQSGPIQSTTYTSQNNAQGPLYEQRSTQTRRYPSSISSSPQKDLTQAKNGFSSVQATQLQTTQSVEGATGSAVKSDSPSTSSIPPLNETVSAASLLTTTNQHSSSLGGLSHSEEIPNTTTTQHSSTLSTQQNTLSSSTSSGRTSTSTLLHTSVESEANLHSSSSTFSTTSSTVSAPPPVVSVSSSLNSGSSLGLSLGSNSTVTASTRSSVATTSAS

SEQ ID NO: 853661 - protein, 159 aa, Homo sapiens
MLQTRFPLDYYSIPFPTPTTPLTGRDGSLASNPYSGDLTKFGRGDASSPAPATTLAQPQQNQTQTHHTTQQTFLNPALPPGYSYTSLPYYTGVPGLPSTFQYGPAVFPVAPTSSKQHGVNVSVNASATPFQQPSGYGSHGYNTGRKYPPPYKHFWTAES

SEQ ID NO: 853662 - protein, 392 aa, Homo sapiens
PLLPLLKHTSVESEANLHSSSSTFSTTSSTVSAPPPVVSVSSSLNSGSSLGLSLGSNSTVTASTRSSVATTSGKAPPNLPPGVPPLLPNPYIMAPGLLHAYPPQVYGYDDLQMLQTRFPLDYYSIPFPTPTTPLTGRDGSLASNPYSGDLTKFGRGDASSPAPATTLAQPQQNQTQTHHTTQQTFLNPALPPGYSYTSLPYYTGVPGLPSTFQYGPAVFPVAPTSSKQHGVNVSVNASATPFQQPSGYGSHGYNTGVSVTSSNTGVPDISGSVYSKTQQSFEKQGFHSGTPAASFNLPSALGSGGPINPATAAAYPPAPFMHILTPHQQPHSQILHHHLQQDGQLPYLQMILCCQRQQEEQTGSGQRSQTSSIPQKPQTNKSAYNSYSWGAN

SEQ ID NO: 853663 - protein, 575 aa, Homo sapiens
MTSVGTNRARGNWEQPQNQNQTQHKQRPQATAEQIRLAQMISDHNDADFEEKVKQLIDITGKNQDECVIALHDCNGDVNRAINVLLEGNPDTHSWEMVGKKKGVSGQKDGGQTESNEEGKENRDRDRDYSRRRGGPPRRGRGASRGREFRGQENGLDGTKSGGPSGRGTERGRRGRGRGRGGSGRRGGRFSAQGMGTFNPADYAEPANTDDNYGNSSGNTWNNTGHFEPDDGTSAWRTATEEWGTEDWNEDLSETKIFTASNVSSVPLPAENVTITAGQRIDLAVLLGKTPSTMENDSSNLDPSQAPSLAQPLVFSNSKQTAISQPASGNTFSHHSMVSMLGKGFGDVGEAKGGSTTGSQFLEQFKTAQALAQLAAQHSQSGSTTTSSWDMGSTTQSPSLVQYDLKNPSDSAVHSPFTKRQAFTPSSTMMEVFLQEKSPAVATSTAAPPPPSSPLPSKSTSAPQMSPGSSDNQSSSPQPAQQKLKQQKKKASLTSKIPALAVEMPGSADISGLNLQFGALQFGSEPVLSDYESTPTTSASSSQAPSSLYTSTASASSFIQLSTPHQQSGQLVHRY

SEQ ID NO: 853664 - protein, 146 aa, Homo sapiens
IVTVRTRIAVLSLLEITLCSKDGYNPGVSVTSSNTGVPDISGSVYSKTQQSFEKQGFHSGTPAASFNLPSALGSGGPINPATAAAYPPAPFMHILTPHQQPHSQILHHHLQQDGQTGSGQRSQTSSIPQKPQTNKSAYNSYSWGAN

SEQ ID NO: 853665 - protein, 265 aa, Homo sapiens
MTSVGTNRARGNWEQPQNQNQTQHKQRPQATAEQIRLAQMISDHNDADFEEKVKQLIDITGKNQDECVIALHDCNGDVNRAINVLLEGNPDTHSWEMVGKKKGVSGQKDGGQTESNEEGKENRDRDRDYSRRRGGPPRRGRGASRGREFRGQENGLDGTKSGGPSGRGTERGRRGRGRGRGGSGRRGGRFSAQGMGTFNPADYAEPANTDDNYGNSSGNTWNNTGHFEPDDGTSAWRTATEEWGTEDWNEDVGIPRSFLTNAFYP

SEQ ID NO: 853666 - protein, 134 aa, Homo sapiens
FTLPLKQNRHSTSRAQATAEQIRLAQMISDHNDADFEEKVKQLIDITGKNQDECVIALHDCNGDVNRAINVLLEGNPDTHSWEMVGKKKGVSGQKDGGQTESIFLTSKLSSTTGTSPPSWWPTTSPTIVSVPVS

SEQ ID NO: 853667 - protein, 982 aa, Homo sapiens [sequence omitted]

SEQ ID NO: 853668 - protein, 982 aa, Homo sapiens [sequence omitted]

SEQ ID NO: 853669 - protein, 1103 aa, Homo sapiens [sequence omitted]

SEQ ID NO: 853670 - protein, 824 aa, Homo sapiens
MTSVGTNRARGNWEQPQNQNQTQHKQRPQATAEQIRLAQMISDHNDADFEEKVKQLIDITGKNQDECVIALHDCNGDVNRAINVLLEGNPDTHSWEMVGKKKGVSGQKDGGQTESNEEGKENRDRDRDYSRRRGGPPRRGRGASRGREFRGQENGLDGTKSGGPSGRGTERGRRGRGRGRGGSGRRGGRFSAQGMGTFNPADYAEPANTDDNYGNSSGNTWNNTGHFEPDDGTSAWRTATEEWGTEDWNEDLSETKIFTASNVSSVPLPAENVTITAGQRIDLAVLLGKTPSTMENDSSNLDPSQAPSLAQPLVFSNSKQTAISQPASGNTFSHHSMVSMLGKGFGDVGEAKGGSTTGSQFLEQFKTAQALAQLAAQHSQSGSTTTSSWDMGSTTQSPSLVQYDLKNPSDSAVHSPFTKRQAFTPSSTMMEVFLQEKSPAVATSTAAPPPPSSPLPSKSTSAPQMSPGSSDNQSSSPQPAQQKLKQQKKKASLTSKIPALAVEMPGSADISGLNLQFGALQFGSEPVLSDYESTPTTSASSSQAPSSLYTSTASESSSTISSNQSQESGYQSGPIQSTTYTSQNNAQGPLYEQRSTQTRRYPSSISSSPQKDLTQAKNGFSSVQATQLQTTQSVEGATGSAVKSDSPSTSSIPPLNETVSAASLLTTTNQHSSSLGGLSHSEEIPNTTTTQHSSTLSTQQNTLSSSTSSGRTSTSTLLHTSVESEANLHSSSSTFSTTSSTVSAPPPVVSVSSSLNSGSSLGLSLGSNSTVTASTRSSVATTSGKAPPNLPPGVPPLLPNPYIMAPGLLHAYPVSGTKGSSSKE

SEQ ID NO: 853671 - protein, 1072 aa, Homo sapiens [sequence omitted]

SEQ ID NO: 853672 - protein, 1086 aa, Homo sapiens [sequence omitted]

SEQ ID NO: 853673 - protein, 983 aa, Homo sapiens [sequence omitted]

SEQ ID NO: 853674 - protein, 367 aa, Homo sapiens
RIPPSDHEVRENLTTSRGRCYEDILRVKSDSPSTSSIPPLNETVSAASLLTTTNQHSSSLGGLSHSEEIPNTTTTQHSSTLSTQQNTLSSSTSSGRTSTSTLLHTSVESEANLHSSSSTFSTTSSTVSAPPPVVSVSSSLNSGSSLGLSLGSNSTVTASTRSSVATTSGKAPPNLPPGVPPLLPNPYIMAPGLLHAYPPQVYGYDDLQMLQTRFPLDYYSIPFPTPTTPLTGRDGSLASNPYSGDLTKFGRGDASSPAPATTLAQPQQNQTQTHHTTQQTFLNPALPPGYSYTSLPYYTGVPGLPSTFQYGPAVFPVAPTSSKQHGVNVSVNASATPFQQPSGYGSHGYNTGRKYPPPYKHFWTAES

SEQ ID NO: 853675 - protein, 944 aa, Homo sapiens
MTSVGTNRARGNWEQPQNQNQTQHKQRPQATAEQIRLAQMISDHNDADFEEKVKQLIDITGKNQDECVIALHDCNGDVNRAINVLLEGNPDTHSWEMVGKKKGVSGQKDGGQTESNEEGKENRDRDRDYSRRRGGPPRRGRGASRGREFRGQENGLDGTKSGGPSGRGTERGRRGRGRGRGGSGRRGGRFSAQGMGTFNPADYAEPANTDDNYGNSSGNTWNNTGHFEPDDGTSAWRTATEEWGTEDWNEDLSETKIFTASNVSSVPLPAENVTITAGQRIDLAVLLGKTPSTMENDSSNLDPSQAPSLAQPLVFSNSKQTAISQPASGNTFSHHSMVSMLGKGFGDVGEAKGGSTTGSQFLEQFKTAQALAQLAAQHSQSGSTTTSSWDMGSTTQSPSLVQYDLKNPSDSAVHSPFTKRQAFTPSSTMMEVFLQEKSPAVATSTAAPPPPSSPLPSKSTSAPQMSPGSSDNQSSSPQPAQQKLKQQKKKASLTSKIPALAVEMPGSADISGLNLQFGALQFGSEPVLSDYESTPTTSASSSQAPSSLYTSTASESSSTISSNQSQESGYQSGPIQSTTYTSQNNAQGPLYEQRSTQTRRYPSSISSSPQKDLTQAKNGFSSVQATQLQTTQSVEGATGSAVKSDSPSTSSIPPLNETVSAASLLTTTNQHSSSLGGLSHSEEIPNTTTTQHSSTLSTQQNTLSSSTSSGRTSTSTLLHTSVESEANLHSSSSTFSTTSSTVSAPPPVVSVSSSLNSGSSLGLSLGSNSTVTASTRSSVATTSGKAPPNLPPGVPPLLPNPYIMAPGLLHAYPPQVYGYDDLQMLQTRFPLDYYSIPFPTPTTPLTGRDGSLASNPYSGDLTKFGRGDASSPAPATTLAQPQQNQTQTHHTTQQTFLNPALPPGYSYTSLPYYTGVPGLPSTFEASMHTPAVAFDFWKACSFNL

SEQ ID NO: 853676 - protein, 284 aa, Homo sapiens
VVRRCTGHHIFWAHFDIHSLHTSVESEANLHSSSSTFSTTSSTVSAPPPVVSVSSSLNSGSSLGLSLGSNSTVTASTRSSVATTSGKAPPNLPPGVPPLLPNPYIMAPGLLHAYPPQVYGYDDLQMLQTRFPLDYYSIPFPTPTTPLTGRDGSLASNPYSGDLTKFGRGDASSPAPATTLAQPQQNQTQTHHTTQQTFLNPALPPGYSYTSLPYYTGVPGLPSTFQYGPAVFPVAPTSSKQHGVNVSVNASATPFQQPSGYGSHGYNTGRKYPPPYKHFWTAES

SEQ ID NO: 853677 - protein, 841 aa, Homo sapiens
MTSVGTNRARGNWEQPQNQNQTQHKQRPQATAEQIRLAQMISDHNDADFEEKVKQLIDITGKNQDECVIALHDCNGDVNRAINVLLEGNPDTHSWEMVGKKKGVSGQKDGGQTESNEEGKENRDRDRDYSRRRGGPPRRGRGASRGREFRGQENGLDGTKSGGPSGRGTERGRRGRGRGRGGSGRRGGRFSAQGMGTFNPADYAEPANTDDNYGNSSGNTWNNTGHFEPDDGTSAWRTATEEWGTEDWNEDLSETKIFTASNVSSVPLPAENVTITAGQRIDLAVLLGKTPSTMENDSSNLDPSQAPSLAQPLVFSNSKQTAISQPASGNTFSHHSMVSMLGKGFGDVGEAKGGSTTGSQFLEQFKTAQALAQLAAQHSQSGSTTTSSWDMGSTTQSPSLVQYDLKNPSDSAVHSPFTKRQAFTPSSTMMEVFLQEKSPAVATSTAAPPPPSSPLPSKSTSAPQMSPGSSDNQSSSPQPAQQKLKQQKKKASLTSKIPALAVEMPGSADISGLNLQFGALQFGSEPVLSDYESTPTTSASSSQAPSSLYTSTASESSSTISSNQSQESGYQSGPIQSTTYTSQNNAQGPLYEQRSTQTRRYPSSISSSPQKDLTQAKNGFSSVQATQLQTTQSVEGATGSAVKSDSPSTSSIPPLNETVSAASLLTTTNQHSSSLGGLSHSEEIPNTTTTQHSSTLSTQQNTLSSSTSSGRTSTSTLLHTSVESEANLHSSSSTFSTTSSTVSAPPPVVSVSSSLNSGSSLGLSLGSNSTVTASTRSSVATTSGKAPPNLPPGVPPLLPNPYIMAPGLLHAYPVSGTKGSSSKGEDVVATLFIALASDGPL

SEQ ID NO: 853678 - protein, 748 aa, Homo sapiens
MTSVGTNRARGNWEQPQNQNQTQHKQRPQATAEQIRLAQMISDHNDADFEEKVKQLIDITGKNQDECVIALHDCNGDVNRAINVLLEGNPDTHSWEMVGKKKGVSGQKDGGQTESNEEGKENRDRDRDYSRRRGGPPRRGRGASRGREFRGQENGLDGTKSGGPSGRGTERGRRGRGRGRGGSGRRGGRFSAQGMGTFNPADYAEPANTDDNYGNSSGNTWNNTGHFEPDDGTSAWRTATEEWGTEDWNEDLSETKIFTASNVSSVPLPAENVTITAGQRIDLAVLLGKTPSTMENDSSNLDPSQAPSLAQPLVFSNSKQTAISQPASGNTFSHHSMVSMLGKGFGDVGEAKGGSTTGSQFLEQFKTAQALAQLAAQHSQSGSTTTSSWDMGSTTQSPSLVQYDLKNPSDSAVHSPFTKRQAFTPSSTMMEVFLQEKSPAVATSTAAPPPPSSPLPSKSTSAPQMSPGSSDNQSSSPQPAQQKLKQQKKKASLTSKIPALAVEMPGSADISGLNLQFGALQFGSEPVLSDYESTPTTSASSSQAPSSLYTSTASESSSTISSNQSQESGYQSGPIQSTTYTSQNNAQGPLYEQRSTQTRRYPSSISSSPQKDLTQAKNGFSSVQATQLQTTQSVEGATGSAVKSDSPSTSSIPPLNETVSAASLLTTTNQHSSSLGGLSHSEEIPNTTTTQHSSTLSTQQNTLSSSTSSGRTSTSTLLHNTVGDVRAYLHSPSCTFPPTSVSDPGILC

SEQ ID NO: 853679 - protein, 621 aa, Homo sapiens
MTSVGTNRARGNWEQPQNQNQTQHKQRPQATAEQIRLAQMISDHNDADFEEKVKQLIDITGKNQDECVIALHDCNGDVNRAINVLLEGNPDTHSWEMVGKKKGVSGQKDGGQTESNEEGKENRDRDRDYSRRRGGPPRRGRGASRGREFRGQENGLDGTKSGGPSGRGTERGRRGRGRGRGGSGRRGGRFSAQGMGTFNPADYAEPANTDDNYGNSSGNTWNNTGHFEPDDGTSAWRTATEEWGTEDWNEDLSETKIFTASNVSSVPLPAENVTITAGQRIDLAVLLGKTPSTMENDSSNLDPSQAPSLAQPLVFSNSKQTAISQPASGNTFSHHSMVSMLGKGFGDVGEAKGGSTTGSQFLEQFKTAQALAQLAAQHSQSGSTTTSSWDMGSTTQSPSLVQYDLKNPSDSAVHSPFTKRQAFTPSSTMMEVFLQEKSPAVATSTAAPPPPSSPLPSKSTSAPQMSPGSSDNQSSSPQPAQQKLKQQKKKASLTSKIPALAVEMPGSADISGLNLQFGALQFGSEPVLSDYESTPTTSASSSQAPSSLYTSTASESSSTISSNQSQESGYQSGPIQSTTYTSQNNAQGPLYEQRSTQTRRYPSSISSSPQKDLTQAKVVAS

SEQ ID NO: 853680 - protein, 413 aa, Homo sapiens
MTSVGTNRARGNWEQPQNQNQTQHKQRPQATAEQIRLAQMISDHNDADFEEKVKQLIDITGKNQDECVIALHDCNGDVNRAINVLLEGNPDTHSWEMVGKKKGVSGQKDGGQTESNEEGKENRDRDRDYSRRRGGPPRRGRGASRGREFRGQENGLDGTKSGGPSGRGTERGRRGRGRGRGGSGRRGGRFSAQGMGTFNPADYAEPANTDDNYGNSSGNTWNNTGHFEPDDGTSAWRTATEEWGTEDWNEDLSETKIFTASNVSSVPLPAENVTITAGQRIDLAVLLGKTPSTMENDSSNLDPSQAPSLAQPLVFSNSKQTAISQPASGNTFSHHSMVSMLGKGFGDVGEAKGGSTTGSQFLEQFKTAQALAQLAAQHSQSGSTTTSSWDMGSTTQSPSLVQYGEKMESDLNL

SEQ ID NO: 853681 - protein, 121 aa, Homo sapiens
  misc_feature (7)..(7): Xaa can be any naturally occurring amino acid
MCTPKPXQSFEKQGFHSGTPAASFNLPSALGSGGPINPATAAAYPPAPFMHILTPHQQPHSQILHHHLQQDGQLPYLQMILCCQRQQEEQTGSGQRSQTSSIPQKPQTNKSAYNSYSWGAN

SEQ ID NO: 853682 - protein, 702 aa, Homo sapiens
MESPSAPPHRWCIPWQRLLLTASLLTFWNPPTTAKLTIESTPFNVAEGKEVLLLVHNLPQHLFGYSWYKGERVDGNRQIIGYVIGTQQATPGPAYSGREIIYPNASLLIQNIIQNDTGFYTLHVIKSDLVNEEATGQFRVYPELPKPSISSNNSKPVEDKDAVAFTCEPETQDATYLWWVNNQSLPVSPRLQLSNGNRTLTLFNVTRNDTASYKCETQNPVSARRSDSVILNVLYGPDAPTISPLNTSYRSGENLNLSCHAASNPPAQYSWFVNGTFQQSTQELFIPNITVNNSGSYTCQAHNSDTGLNRTTVTTITVYAEPPKPFITSNNSNPVEDEDAVALTCEPEIQNTTYLWWVNNQSLPVSPRLQLSNDNRTLTLLSVTRNDVGPYECGIQNELSVDHSDPVILNVLYGPDDPTISPSYTYYRPGVNLSLSCHAASNPPAQYSWLIDGNIQQHTQELFISNITEKNSGLYTCQANNSASGHSRTTVKTITVSAELPKPSISSNNSKPVEDKDAVAFTCEPEAQNTTYLWWVNGQSLPVSPRLQLSNGNRTLTLFNVTRNDARAYVCGIQNSVSANRSDPVTLDVLYGPDTPIISPPDSSYLSGANLNLSCHSASNPSPQYSWRINGIPQQHTQVLFIAKITPNNNGTYACFVSNLATGRNNSIVKSITVSASGTSPGLSAGATVGIMIGVLVGVALI

SEQ ID NO: 853683 - protein, 98 aa, Homo sapiens
LFYEESLVCETPCEGPRLQLSNDNRTLTLLSVTRNDVGPYECGIQNELSVDHSDPVILNVLFQGLRPKSLSLSLCQGGCSGSSLGGPASGPQARRGFW

SEQ ID NO: 853684 - protein, 835 aa, Homo sapiens
MESPSAPPHRWCIPWQRLLLTASLLTFWNPPTTAKLTIESTPFNVAEGKEVLLLVHNLPQHLFGYSWYKGERVDGNRQIIGYVIGTQQATPGPAYSGREIIYPNASLLIQNIIQNDTGFYTLHVIKSDLVNEEATGQFRVYPELPKPSISSNNSKPVEDKDAVAFTCEPETQDATYLWWVNNQSLPVSPRLQLSNGNRTLTLFNVTRNDTASYKCETQNPVSARRSDSVILNVLCEYICSSLAQAASPNPQGQRQDFSVPLRFKYTDPQPWTSRLSVTFCPRKTWADQVLTKNRRGGAASVLGGSGSTPYDGKTGEYLRLRLSRYKRGLAETLGLCFSLEGHCGPSIDQELPLPSDNITCGFILFAPDGPDAPTISPLNTSYRSGENLNLSCHAASNPPAQYSWFVNGTFQQSTQELFIPNITVNNSGSYTCQAHNSDTGLNRTTVTTITVYAEPPKPFITSNNSNPVEDEDAVALTCEPEIQNTTYLWWVNNQSLPVSPRLQLSNDNRTLTLLSVTRNDVGPYECGIQNELSVDHSDPVILNVLYGPDDPTISPSYTYYRPGVNLSLSCHAASNPPAQYSWLIDGNIQQHTQELFISNITEKNSGLYTCQANNSASGHSRTTVKTITVSAELPKPSISSNNSKPVEDKDAVAFTCEPEAQNTTYLWWVNGQSLPVSPRLQLSNGNRTLTLFNVTRNDARAYVCGIQNSVSANRSDPVTLDVLYGPDTPIISPPDSSYLSGANLNLSCHSASNPSPQYSWRINGIPQQHTQVLFIAKITPNNNGTYACFVSNLATGRNNSIVKSITVSASGTSPGLSAGATVGIMIGVLVGVALI

SEQ ID NO: 853685 - protein, 679 aa, Homo sapiens
SRGSRMSGMIAIVHVEIAPFNVAEGKEVLLLVHNLPQHLFGYSWYKGERVDGNRQIIGYVIGTQQATPGPAYSGREIIYPNASLLIQNIIQNDTGFYTLHVIKSDLVNEEATGQFRVYPELPKPSISSNNSKPVEDKDAVAFTCEPETQDATYLWWVNNQSLPVSPRLQLSNGNRTLTLFNVTRNDTASYKCETQNPVSARRSDSVILNVLYGPDAPTISPLNTSYRSGENLNLSCHAASNPPAQYSWFVNGTFQQSTQELFIPNITVNNSGSYTCQAHNSDTGLNRTTVTTITVYAEPPKPFITSNNSNPVEDEDAVALTCEPEIQNTTYLWWVNNQSLPVSPRLQLSNDNRTLTLLSVTRNDVGPYECGIQNELSVDHSDPVILNVLYGPDDPTISPSYTYYRPGVNLSLSCHAASNPPAQYSWLIDGNIQQHTQELFISNITEKNSGLYTCQANNSASGHSRTTVKTITVSAELPKPSISSNNSKPVEDKDAVAFTCEPEAQNTTYLWWVNGQSLPVSPRLQLSNGNRTLTLFNVTRNDARAYVCGIQNSVSANRSDPVTLDVLYGPDTPIISPPDSSYLSGANLNLSCHSASNPSPQYSWRINGIPQQHTQVLFIAKITPNNNGTYACFVSNLATGRNNSIVKSITVSASGTSPGLSAGATVGIMIGVLVGVALI

SEQ ID NO: 853686 - protein, 493 aa, Homo sapiens
MYCGIHNLNDLLTTDDPVILNVRYGPDEPIHYHLSYRLISVQGMNLTLSCHAASNPPAQYSWFVNGTFQQSTQELFIPNITVNNSGSYTCQAHNSDTGLNRTTVTTITVYAEPPKPFITSNNSNPVEDEDAVALTCEPEIQNTTYLWWVNNQSLPVSPRLQLSNDNRTLTLLSVTRNDVGPYECGIQNELSVDHSDPVILNVLYGPDDPTISPSYTYYRPGVNLSLSCHAASNPPAQYSWLIDGNIQQHTQELFISNITEKNSGLYTCQANNSASGHSRTTVKTITVSAELPKPSISSNNSKPVEDKDAVAFTCEPEAQNTTYLWWVNGQSLPVSPRLQLSNGNRTLTLFNVTRNDARAYVCGIQNSVSANRSDPVTLDVLYGPDTPIISPPDSSYLSGANLNLSCHSASNPSPQYSWRINGIPQQHTQVLFIAKITPNNNGTYACFVSNLATGRNNSIVKSITVSASGTSPGLSAGATVGIMIGVLVGVALI

SEQ ID NO: 853687 - protein, 702 aa, Homo sapiens; identical to SEQ ID NO: 853682

SEQ ID NO: 853688 - protein, 422 aa, Homo sapiens
MESPSAPPHRWCIPWQRLLLTASLLTFWNPPTTAKLTIESTPFNVAEGKEVLLLVHNLPQHLFGYSWYKGERVDGNRQIIGYVIGTQQATPGPAYSGREIIYPNASLLIQNIIQNDTGFYTLHVIKSDLVNEEATGQFRVYPELPKPSISSNNSKPVEDKDAVAFTCEPETQDATYLWWVNNQSLPVSPRLQLSNGNRTLTLFNVTRNDTASYKCETQNPVSARRSDSVILNVLYGPDAPTISPLNTSYRSGENLNLSCHAASNPPAQYSWFVNGTFQQSTQELFIPNITVNNSGSYTCQAHNSDTGLNRTTVTTITVYAEPPKPFITSNNSNPVEDEDAVALTCEPEIQNTTYLWWVNNQSLPVSPRLQLSNDNRTLTLLSVTRNDVGPYECGIQNELSVDHSMAQTTPPFPPHTPITVQG

SEQ ID NO: 853689 - protein, 524 aa, Homo sapiens
MESPSAPPHRWCIPWQRLLLTASLLTFWNPPTTAKLTIESTPFNVAEGKEVLLLVHNLPQHLFGYSWYKGERVDGNRQIIGYVIGTQQATPGPAYSGREIIYPNASLLIQNIIQNDTGFYTLHVIKSDLVNEEATGQFRVYPEPPKPFITSNNSNPVEDEDAVALTCEPEIQNTTYLWWVNNQSLPVSPRLQLSNDNRTLTLLSVTRNDVGPYECGIQNELSVDHSDPVILNVLYGPDDPTISPSYTYYRPGVNLSLSCHAASNPPAQYSWLIDGNIQQHTQELFISNITEKNSGLYTCQANNSASGHSRTTVKTITVSAELPKPSISSNNSKPVEDKDAVAFTCEPEAQNTTYLWWVNGQSLPVSPRLQLSNGNRTLTLFNVTRNDARAYVCGIQNSVSANRSDPVTLDVLYGPDTPIISPPDSSYLSGANLNLSCHSASNPSPQYSWRINGIPQQHTQVLFIAKITPNNNGTYACFVSNLATGRNNSIVKSITVSASGTSPGLSAGATVGIMIGVLVGVALI

SEQ ID NO: 853690 - protein, 451 aa, Homo sapiens
NDRCSEIHSIELIDFINVVDLESELWRLIRDRPPNHSRCLEGSGISVELMITKCKWEKATQSHFHVYPAEPPKPFITSNNSNPVEDEDAVALTCEPEIQNTTYLWWVNNQSLPVSPRLQLSNDNRTLTLLSVTRNDVGPYECGIQNELSVDHSDPVILNVLYGPDDPTISPSYTYYRPGVNLSLSCHAASNPPAQYSWLIDGNIQQHTQELFISNITEKNSGLYTCQANNSASGHSRTTVKTITVSAELPKPSISSNNSKPVEDKDAVAFTCEPEAQNTTYLWWVNGQSLPVSPRLQLSNGNRTLTLFNVTRNDARAYVCGIQNSVSANRSDPVTLDVLYGPDTPIISPPDSSYLSGANLNLSCHSASNPSPQYSWRINGIPQQHTQVLFIAKITPNNNGTYACFVSNLATGRNNSIVKSITVSASGTSPGLSAGATVGIMIGVLVGVALI

SEQ ID NO: 853691 - protein, 719 aa, Homo sapiens
MESPSAPPHRWCIPWQRLLLTASLLTFWNPPTTAKLTIESTPFNVAEGKEVLLLVHNLPQHLFGYSWYKGERVDGNRQIIGYVIGTQQATPGPAYSGREIIYPNASLLIQNIIQNDTGFYTLHVIKSDLVNEEATGQFRVYPELPKPSISSNNSKPVEDKDAVAFTCEPETQDATYLWWVNNQSLPVSPRLQLSNGNRTLTLFNVTRNDTASYKCETQNPVSARRSDSVILNVLYGPDAPTISPLNTSYRSGENLNLSCHAASNPPAQYSWFVNGTFQQSTQELFIPNITVNNSGSYTCQAHNSDTGLNRTTVTTITVYAEPPKPFITSNNSNPVEDEDAVALTCEPEIQNTTYLWWVNNQSLPVSPRLQLSNDNRTLTLLSVTRNDVGPYECGIQNELSVDHSDPVILNVLYGPDDPTISPSYTYYRPGVNLSLSCHAASNPPAQYSWLIDGNIQQHTQELFISNITEKNSGLYTCQANNSASGHSRTTVKTITVSAELPKPSISSNNSKPVEDKDAVAFTCEPEAQNTTYLWWVNGQSLPVSPRLQLSNGNRTLTLFNVTRNDARAYVCGIQNSVSANRSDPVTLDVLYGPDTPIISPPDSSYLSGANLNLSCHSASNPSPQYSWRINGIPQQHTQVLFIAKITPNNNGTYACFVSNLATGRNNSIVKSITVSGKWLPGASASYSGVESIWFSPKSQEDIFFPSLCSMGTRKSQILS

SEQ ID NO: 853692 - protein, 376 aa, Homo sapiens
QSDLLLSPVEDEDAVALTCEPEIQNTTYLWWVNNQSLPVSPRLQLSNDNRTLTLLSVTRNDVGPYECGIQNELSVDHSDPVILNVLYGPDDPTISPSYTYYRPGVNLSLSCHAASNPPAQYSWLIDGNIQQHTQELFISNITEKNSGLYTCQANNSASGHSRTTVKTITVSAELPKPSISSNNSKPVEDKDAVAFTCEPEAQNTTYLWWVNGQSLPVSPRLQLSNGNRTLTLFNVTRNDARAYVCGIQNSVSANRSDPVTLDVLYGPDTPIISPPDSSYLSGANLNLSCHSASNPSPQYSWRINGIPQQHTQVLFIAKITPNNNGTYACFVSNLATGRNNSIVKSITVSASGTSPGLSAGATVGIMIGVLVGVALI

SEQ ID NO: 853693 - protein, 639 aa, Homo sapiens
MESPSAPPHRWCIPWQRLLLTASLLTFWNPPTTAKLTIESTPFNVAEGKEVLLLVHNLPQHLFGYSWYKGERVDGNRQIIGYVIGTQQATPGPAYSGREIIYPNASLLIQNIIQNDTGFYTLHVIKSDLVNEEATGQFRVYPELPKPSISSNNSKPVEDKDAVAFTCEPETQDATYLWWVNNQSLPVSPRLQLSNGNRTLTLFNVTRNDTASYKCETQNPVSARRSDSVILNVLYGPDAPTISPLNTSYRSGENLNLSCHAASNPPAQYSWFVNGTFQQSTQELFIPNITVNNSGSYTCQAHNSDTGLNRTTVTTITVYAEPPKPFITSNNSNPVEDEDAVALTCEPEIQNTTYLWWVNNQSLPVSPRLQLSNDNRTLTLLSVTRNDVGPYECGIQNELSVDHSDPVILNVLYGPDDPTISPSYTYYRPGVNLSLSCHAASNPPAQYSWLIDGNIQQHTQELFISNITEKNSGLYTCQANNSASGHSRTTVKTITVSAELPKPSISSNNSKPVEDKDAVAFTCEPEAQNTTYLWWVNGQSLPVSPRLQLSNGNRTLTLFNVTRNDARAYVCGIQNSVSANRSDPVTLDVLYGPDTPIISPPDSSYLMGARLIFSHQHFVNQCEICKQAKIHFLENCPNF

SEQ ID NO: 853694 - protein, 611 aa, Homo sapiens
MESPSAPPHRWCIPWQRLLLTASLLTFWNPPTTAKLTIESTPFNVAEGKEVLLLVHNLPQHLFGYSWYKGERVDGNRQIIGYVIGTQQATPGPAYSGREIIYPNASLLIQNIIQNDTGFYTLHVIKSDLVNEEATGQFRVYPELPKPSISSNNSKPVEDKDAVAFTCEPETQDATYLWWVNNQSLPVSPRLQLSNGNRTLTLFNVTRNDTASYKCETQNPVSARRSDSVILNVLYGPDAPTISPLNTSYRSGENLNLSCHAASNPPAQYSWFVNGTFQQSTQELFIPNITVNNSGSYTCQAHNSDTGLNRTTVTTITVYAEPPKPFITSNNSNPVEDEDAVALTCEPEIQNTTYLWWVNNQSLPVSPRLQLSNDNRTLTLLSVTRNDVGPYECGIQNELSVDHSDPVILNVLYGPDDPTISPSYTYYRPGVNLSLSCHAASNPPAQYSWLIDGNIQQHTQELFISNITEKNSGLYTCQANNSASGHSRTTVKTITVSAELPKPSISSNNSKPVEDKDAVAFTCEPEAQNTTYLWWVNGQSLPVSPRLQLSNGNRTLTLFNVTRNDARAYVCGIQNSVSANRSDPVTLDVLYGPDTPISVPPRNIREDPLNT

SEQ ID NO: 853695 - protein, 583 aa, Homo sapiens
MESPSAPPHRWCIPWQRLLLTASLLTFWNPPTTAKLTIESTPFNVAEGKEVLLLVHNLPQHLFGYSWYKGERVDGNRQIIGYVIGTQQATPGPAYSGREIIYPNASLLIQNIIQNDTGFYTLHVIKSDLVNEEATGQFRVYPELPKPSISSNNSKPVEDKDAVAFTCEPETQDATYLWWVNNQSLPVSPRLQLSNGNRTLTLFNVTRNDTASYKCETQNPVSARRSDSVILNVLYGPDAPTISPLNTSYRSGENLNLSCHAASNPPAQYSWFVNGTFQQSTQELFIPNITVNNSGSYTCQAHNSDTGLNRTTVTTITVYAEPPKPFITSNNSNPVEDEDAVALTCEPEIQNTTYLWWVNNQSLPVSPRLQLSNDNRTLTLLSVTRNDVGPYECGIQNELSVDHSDPVILNVLYGPDDPTISPSYTYYRPGVNLSLSCHAASNPPAQYSWLIDGNIQQHTQELFISNITEKNSGLYTCQANNSASGHSRTTVKTITVSAELPKPSISSNNSNPVEDKDAVAFTCEPEVQNTTYLWWVNGQSLPVSPRLQLSNGNMTLTLLSVKRNDAGSYECEIQNPASANRSD

SEQ ID NO: 853696 - protein, 510 aa, Homo sapiens
MESPSAPPHRWCIPWQRLLLTASLLTFWNPPTTAKLTIESTPFNVAEGKEVLLLVHNLPQHLFGYSWYKGERVDGNRQIIGYVIGTQQATPGPAYSGREIIYPNASLLIQNIIQNDTGFYTLHVIKSDLVNEEATGQFRVYPELPKPSISSNNSKPVEDKDAVAFTCEPETQDATYLWWVNNQSLPVSPRLQLSNGNRTLTLFNVTRNDTASYKCETQNPVSARRSDSVILNVLYGPDAPTISPLNTSYRSGENLNLSCHAASNPPAQYSWFVNGTFQQSTQELFIPNITVNNSGSYTCQAHNSDTGLNRTTVTTITVYAEPPKPFITSNNSNPVEDEDAVALTCEPEIQNTTYLWWVNNQSLPVSPRLQLSNDNRTLTLLSVTRNDVGPYECGIQNELSVDHSDPVILNVLYGPDDPTISPSYTYYRPGVNLSLSCHAASNPPAQYSWLIDGNIQQHTQELFISNITEKNSGLYTCQANTAQGVFQSKREEQVDPDAATNRYIQLNTAS

SEQ ID NO: 853697 - protein, 161 aa, Homo sapiens
GDLEDPPLSNGNRTLTLFNVTRNDARAYVCGIQNSVSANRSDPVTLDVLYGPDTPIISPPDSSYLSGANLNLSCHSASNPSPQYSWRINGIPQQHTQVLFIAKITPNNNGTYACFVSNLATGRNNSIVKSITVSASGTSPGLSAGATVGIMIGVLVGVALI

SEQ ID NO: 853698 - protein, 444 aa, Homo sapiens
MESPSAPPHRWCIPWQRLLLTASLLTFWNPPTTAKLTIESTPFNVAEGKEVLLLVHNLPQHLFGYSWYKGERVDGNRQIIGYVIGTQQATPGPAYSGREIIYPNASLLIQNIIQNDTGFYTLHVIKSDLVNEEATGQFRVYPELPKPSISSNNSKPVEDKDAVAFTCEPETQDATYLWWVNNQSLPVSPRLQLSNGNRTLTLFNVTRNDTASYKCETQNPVSARRSDSVILNVLYGPDAPTISPLNTSYRSGENLNLSCHAASNPPAQYSWFVNGTFQQSTQELFIPNITVNNSGSYTCQAHNSDTGLNRTTVTTITVYAEPPKPFITSNNSNPVEDEDAVALTCEPEIQNTTYLWWVNNQSLPVSPRLQLSNDNRTLTLLSVTRNDVGPYECGIQNELSVDHSDPVILNVLYGPDDPTISPSYTYYRPGVNLSLPSNWDYTHV

SEQ ID NO: 853699 - protein, 324 aa, Homo sapiens
MESPSAPPHRWCIPWQRLLLTASLLTFWNPPTTAKLTIESTPFNVAEGKEVLLLVHNLPQHLFGYSWYKGERVDGNRQIIGYVIGTQQATPGPAYSGREIIYPNASLLIQNIIQNDTGFYTLHVIKSDLVNEEATGQFRVYPELPKPSISSNNSKPVEDKDAVAFTCEPETQDATYLWWVNNQSLPVSPRLQLSNGNRTLTLFNVTRNDTASYKCETQNPVSARRSDSVILNVLYGPDGPTISPSKANYRPGENLNLSCHAASNPPAQYSWFINGTFQQSTQELFIPNITVNNSGSYMCQAHNSATGLNRTTVTMITVSDWTRP

SEQ ID NO: 853700 - protein, 250 aa, Homo sapiens
SSVPPLVSAIGTQQATPGPAYSGREIIYPNASLLIQNIIQNDTGFYTLHVIKSDLVNEEATGQFRVYPELPKPSISSNNSKPVEDKDAVAFTCEPETQDATYLWWVNNQSLPVSPRLQLSNGNRTLTLFNVTRNDTASYKCETQNPVSARRSDSVILNVLYGPDGPTISPSKANYRPGENLNLSCHAASNPPAQYSWFINGTFQQSTQELFIPNITVNNSGSYMCQAHNSATGLNRTTVTMITVSDWTRP

SEQ ID NO: 853701 - protein, 225 aa, Homo sapiens
MESPSAPPHRWCIPWQRLLLTASLLTFWNPPTTAKLTIESTPFNVAEGKEVLLLVHNLPQHLFGYSWYKGERVDGNRQIIGYVIGTQQATPGPAYSGREIIYPNASLLIQNIIQNDTGFYTLHVIKSDLVNEEATGQFRVYPELPKPSISSNNSNPVEDKDAVAFTCEPEVQNTTYLWWVNGQSLPVSPRLQLSNGNMTLTLLTFIGSCIVPFDAERTRGSGRVG

SEQ ID NO: 853702 - protein, 702 aa, Homo sapiens; identical to SEQ ID NO: 853682

SEQ ID NO: 853703 - protein, 702 aa, Homo sapiens; identical to SEQ ID NO: 853682

SEQ ID NO: 853704 - protein, 448 aa, Homo sapiens
RYVRSHLCSDPPAQYSWFVNGTFQQSTQELFIPNITVNNSGSYTCQAHNSDTGLNRTTVTTITVYAEPPKPFITSNNSNPVEDEDAVALTCEPEIQNTTYLWWVNNQSLPVSPRLQLSNDNRTLTLLSVTRNDVGPYECGIQNELSVDHSDPVILNVLYGPDDPTISPSYTYYRPGVNLSLSCHAASNPPAQYSWLIDGNIQQHTQELFISNITEKNSGLYTCQANNSASGHSRTTVKTITVSAELPKPSISSNNSKPVEDKDAVAFTCEPEAQNTTYLWWVNGQSLPVSPRLQLSNGNRTLTLFNVTRNDARAYVCGIQNSVSANRSDPVTLDVLYGPDTPIISPPDSSYLSGANLNLSCHSASNPSPQYSWRINGIPQQHTQVLFIAKITPNNNGTYACFVSNLATGRNNSIVKSITVSASGTSPGLSAGATVGIMIGVLVGVALI

SEQ ID NO: 853705 - protein, 386 aa, Homo sapiens
MQDAEPPKPFITSNNSNPVEDEDAVALTCEPEIQNTTYLWWVNNQSLPVSPRLQLSNDNRTLTLLSVTRNDVGPYECGIQNELSVDHSDPVILNVLYGPDDPTISPSYTYYRPGVNLSLSCHAASNPPAQYSWLIDGNIQQHTQELFISNITEKNSGLYTCQANNSASGHSRTTVKTITVSAELPKPSISSNNSKPVEDKDAVAFTCEPEAQNTTYLWWVNGQSLPVSPRLQLSNGNRTLTLFNVTRNDARAYVCGIQNSVSANRSDPVTLDVLYGPDTPIISPPDSSYLSGANLNLSCHSASNPSPQYSWRINGIPQQHTQVLFIAKITPNNNGTYACFVSNLATGRNNSIVKSITVSASGTSPGLSAGATVGIMIGVLVGVALI

SEQ ID NO: 853706 - protein, 393 aa, Homo sapiens
KLPVGPVTVYAEPPKPFITSNNSNPVEDEDAVALTCEPEIQNTTYLWWVNNQSLPVSPRLQLSNDNRTLTLLSVTRNDVGPYECGIQNELSVDHSDPVILNVLYGPDDPTISPSYTYYRPGVNLSLSCHAASNPPAQYSWLIDGNIQQHTQELFISNITEKNSGLYTCQANNSASGHSRTTVKTITVSAELPKPSISSNNSKPVEDKDAVAFTCEPEAQNTTYLWWVNGQSLPVSPRLQLSNGNRTLTLFNVTRNDARAYVCGIQNSVSANRSDPVTLDVLYGPDTPIISPPDSSYLSGANLNLSCHSASNPSPQYSWRINGIPQQHTQVLFIAKITPNNNGTYACFVSNLATGRNNSIVKSITVSASGTSPGLSAGATVGIMIGVLVGVALI

SEQ ID NO: 853707 - protein, 414 aa, Homo sapiens
HRGVERKTNLVDPGNLNWPQQDYIKTITVSAAEPPKPFITSNNSNPVEDEDAVALTCEPEIQNTTYLWWVNNQSLPVSPRLQLSNDNRTLTLLSVTRNDVGPYECGIQNELSVDHSDPVILNVLYGPDDPTISPSYTYYRPGVNLSLSCHAASNPPAQYSWLIDGNIQQHTQELFISNITEKNSGLYTCQANNSASGHSRTTVKTITVSAELPKPSISSNNSKPVEDKDAVAFTCEPEAQNTTYLWWVNGQSLPVSPRLQLSNGNRTLTLFNVTRNDARAYVCGIQNSVSANRSDPVTLDVLYGPDTPIISPPDSSYLSGANLNLSCHSASNPSPQYSWRINGIPQQHTQVLFIAKITPNNNGTYACFVSNLATGRNNSIVKSITVSASGTSPGLSAGATVGIMIGVLVGVALI

SEQ ID NO: 853708 - protein, 524 aa, Homo sapiens
MESPSAPPHRWCIPWQRLLLTASLLTFWNPPTTAKLTIESTPFNVAEGKEVLLLVHNLPQHLFGYSWYKGERVDGNRQIIGYVIGTQQATPGPAYSGREIIYPNASLLIQNIIQNDTGFYTLHVIKSDLVNEEATGQFRVYPELPKPSISSNNSKPVEDKDAVAFTCEPEIQNTTYLWWVNNQSLPVSPRLQLSNDNRTLTLLSVTRNDVGPYECGIQNELSVDHSDPVILNVLYGPDDPTISPSYTYYRPGVNLSLSCHAASNPPAQYSWLIDGNIQQHTQELFISNITEKNSGLYTCQANNSASGHSRTTVKTITVSAELPKPSISSNNSKPVEDKDAVAFTCEPEAQNTTYLWWVNGQSLPVSPRLQLSNGNRTLTLFNVTRNDARAYVCGIQNSVSANRSDPVTLDVLYGPDTPIISPPDSSYLSGANLNLSCHSASNPSPQYSWRINGIPQQHTQVLFIAKITPNNNGTYACFVSNLATGRNNSIVKSITVSASGTSPGLSAGATVGIMIGVLVGVALI

SEQ ID NO: 853709 - protein, 623 aa, Homo sapiens
MESPSAPPHRWCIPWQRLLLTASLLTFWNPPTTAKLTIESTPFNVAEGKEVLLLVHNLPQHLFGYSWYKGERVDGNRQIIGYVIGTQQATPGPAYSGREIIYPNASLLIQNIIQNDTGFYTLHVIKSDLVNEEATGQFRVYPELPKPSISSNNSKPVEDKDAVAFTCEPETQDATYLWWVNNQSLPVSPRLQLSNGNRTLTLFNVTRNDTASYKCETQNPVSARRSDSVILNVLYGPDAPTISPLNTSYRSGENLNLSCHAASNPPAQYSWFVNGTFQQSTQELFIPNITVNNSGSYTCQAHNSDTGLNRTTVTTITVYAEPPKPFITSNNSNPVEDEDAVALTCEPEIQNTTYLWWVNNQSLPVSPRLQLSNDNRTLTLLSVTRNDVGPYECGIQNELSVDHSDPVILNVLYGPDDPTISPSYTYYRPGVNLSLSCHAASNPPAQYSWLIDGNIQQHTQELFISNITEKNSGLYTCQANNSASGHSRTTVKTITVSAELPKPSISSNNSKPVEDKDAVAFTCEPEAQNTTYLWWVNGQSLPVSPRLQLSNGNRTLTLFNVTRNDARAYVCGIQNSVSANRSDPVTLDVLYGPDDPTISPVLHLLPSRGEPQPLLPLGHAGDP

SEQ ID NO: 853710 - protein, 420 aa, Homo sapiens
MESPSAPPHRWCIPWQRLLLTASLLTFWNPPTTAKLTIESTPFNVAEGKEVLLLVHNLPQHLFGYSWYKGERVDGNRQIIGYVIGTQQATPGPAYSGREIIYPNASLLIQNIIQNELSVDHSDPVILNVLYGPDDPTISPSYTYYRPGVNLSLSCHAASNPPAQYSWLIDGNIQQHTQELFISNITEKNSGLYTCQANNSASGHSRTTVKTITVSAELPKPSISSNNSKPVEDKDAVAFTCEPEAQNTTYLWWVNGQSLPVSPRLQLSNGNRTLTLFNVTRNDARAYVCGIQNSVSANRSDPVTLDVLYGPDTPIISPPDSSYLSGANLNLSCHSASNPSPQYSWRINGIPQQHTQVLFIAKITPNNNGTYACFVSNLATGRNNSIVKSITVSASGTSPGLSAGATVGIMIGVLVGVALI

SEQ ID NO: 853711 - protein, 488 aa, Homo sapiens
MESPSAPPHRWCIPWQRLLLTASLLTFWNPPTTAKLTIESTPFNVAEGKEVLLLVHNLPQHLFGYSWYKGERVDGNRQIIGYVIGTQQATPGPAYSGREIIYPNASLLIQNIIQNDTGFYTLHVIKSDLVNEEATGQFRVYPELPKPSISSNNSKPVEDKDAVAFTCEPETQDATYLWWVNNQSLPVSPRLQLSNGNRTLTLFNVTRNDTASYKCETQNPVSARRSDSVILNVLYGPDAPTISPLNTSYRSGENLNLSCHAASNPPAQYSWFVNGTFQQSTQELFIPNITVNNSGSYTCQAHNSDTGLNRTTVTTITVYAEPPKPFITSNNSNPVEDEDAVALTCEPEIQNTTYLWWVNNQSLPVSPRLQLSNDNRTLTLLSVTRNDVGPYECGIQNELSVDHSDPVILNVLYGPDDPTISPSYTYYRPGVNLSLSCHAASNPPAQYSWLIDGNIQQHTQELFISNITEKNSGLYTCQANLSTGRSSN

SEQ ID NO: 853712 - protein, 137 aa, Homo sapiens
YLEDPGWRGVSVSANRSDPVTLDVLYGPDTPIISPPDSSYLSGANLNLSCHSASNPSPQYSWRINGIPQQHTQVLFIAKITPNNNGTYACFVSNLATGRNNSIVKSITVSASGTSPGLSAGATVGIMIGVLVGVALI

SEQ ID NO: 853713 - protein, 445 aa, Homo sapiens
MESPSAPPHRWCIPWQRLLLTASLLTFWNPPTTAKLTIESTPFNVAEGKEVLLLVHNLPQHLFGYSWYKGERVDGNRQIIGYVIGTQQATPGPAYSGREIIYPNASLLIQNIIQNDTGFYTLHVIKSDLVNEEATGQFRVYPELPKPSISSNNSKPVEDKDAVAFTCEPETQDATYLWWVNNQSLPVSPRLQLSNGNRTLTLFNVTRNDTASYKCETQNPVSARRSDSVILNVLYGPDAPTISPLNTSYRSGENLNLSCHAASNPPAQYSWFVNGTFQQSTQELFIPNITVNNSGSYTCQAHNSDTGLNRTTVTTITVYAEPPKPFITSNNSNPVEDEDAVALTCEPEIQNTTYLWWVNNQSLPVSPRLQLSNDNRTLTLLSVTRNDVGPYECGIQNELSVDHSDPVILNVLYGPDDPTISPVLHLLPSRGEPQPLLPLGHAGDP

SEQ ID NO: 853714 - protein, 143 aa, Homo sapiens
MESPSAPPHRWCIPWQRLLLTASLLTFWNPPTTAKLTIESTPFNVAEGKEVLLLVHNLPQHLFGYSWYKGERVDGNRQIIGYVIGTQQATPGPAYSGREIIYPNASLLIQNIIQNDTGFYTLHVIKSDLVNEEATGQFRVYRE

SEQ ID NO: 853715 - protein, 227 aa, Homo sapiens
GLMLRRLYGSLPGCASLAEALLTASLLTFWNPPTTAKLTIESTPFNVAEGKEVLLLVHNLPQHLFGYSWYKGERVDGNRQIIGYVIGTQQATPGPAYSGREIIYPNASLLIQNIIQNDTGFYTLHVIKSDLVNEEATGQFRVYPELPKPSISSNNSNPVEDKDAVAFTCEPEVQNTTYLWWVNGQSLPVSPRLQLSNGNMTLTLLTFIGSCIVPFDAERTRGSGRVG

SEQ ID NO: 853716 - protein, 428 aa, Homo sapiens
PPLPLPPPARTRPERRVSAQLRAARGGSGVRRCALRPLLLAPARVGPGGREPTMQLQFRSWMLAALTLLVVFLIFADISEIEEEIGNSGGRGTIRSAVNSLHSKSNRAEVVINGSSSPAVVDRSNESIKHNIQPASSKWRHNQTLSLRIRKQILKFLDAEKDISVLKGTLKPGDIIHYIFDRDSTMNVSQNLYELLPRTSPLKNKHFGTCAIVGNSGVLLNSGCGQEIDAHSFVIRCNLAPVQEYARDVGLKTDLVTMNPSVIQRAFEDLVNATWREKLLQRLHSLNGSILWIPAFMARGGKERVEWVNELILKHHVNVRTAYPSLRLLHAVRGYWLTNKVHIKRPTTGLLMYTLATRFCKQIYLYGFWPFPLDQNQNPVKYHYYDSLKYGYTSQASPHTMPLEFKALKSLHEQGALKLTVGQCDGAT

SEQ ID NO: 853717 - protein, 371 aa, Homo sapiens
PPLPLPPPARTRPERRVSAQLRAARGGSGVRRCALRPLLLAPARVGPGGREPTMQLQFRSWMLAALTLLVVFLIFADISEIEEEIGNSGGRGTIRSAVNSLHSKSNRAEVVINGSSSPAVVDRSNESIKHNIQPASSKWRHNQTLSLRIRKQILKFLDAEKDISVLKGTLKPGDIIHYIFDRDSTMNVSQNLYELLPRTSPLKNKHFGTCAIVGNSGVLLNSGCGQEIDAHSFVIRCNLAPVQEYARDVGLKTDLVTMNPSVIQRAFEDLVNATWREKLLQRLHSLNGSILWIPAFMARGGKERVEWVNELILKHHVNVRTAYPSLRLLHAVRGYWLTNKVHIKRPTTGLLMYTLATRFCKQIYLYGIPDH

SEQ ID NO: 853718 - protein, 407 aa, Homo sapiens
PPLPLPPPARTRPERRVSAQLRAARGGSGVRRCALRPLLLAPARVGPGGREPTMQLQFRSWMLAALTLLVVFLIFADISEIEEEIGAEVVINGSSSPAVVDRSNESIKHNIQPASSKWRHNQTLSLRIRKQILKFLDAEKDISVLKGTLKPGDIIHYIFDRDSTMNVSQNLYELLPRTSPLKNKHFGTCAIVGNSGVLLNSGCGQEIDAHSFVIRCNLAPVQEYARDVGLKTDLVTMNPSVIQRAFEDLVNATWREKLLQRLHSLNGSILWIPAFMARGGKERVEWVNELILKHHVNVRTAYPSLRLLHAVRGYWLTNKVHIKRPTTGLLMYTLATRFCKQIYLYGFWPFPLDQNQNPVKYHYYDSLKYGYTSQASPHTMPLEFKALKSLHEQGALKLTVGQCDGAT

SEQ ID NO: 853719 - protein, 202 aa, Homo sapiens
MNPEYDYLFKLLLIGDSGVGKSCLLLRFADDTYTESYISTIGVDFKIRTIELDGKTIKLQIWDTAGQERFRTITSSYYRGAHGIIVVYDVTDQESFNNVKQWLQEIDRYASENVNKLLVGNKCDLTTKKVVDYTTAKEFADSLGIPFLETSAKNATNVEQSFMTMAAEIKKRMGPGATAGGAEKSNVKIQSTPVKQSGGGCC

SEQ ID NO: 853720 - protein, 202 aa, Homo sapiens; identical to SEQ ID NO: 853719

SEQ ID NO: 853721 - protein, 202 aa, Homo sapiens; identical to SEQ ID NO: 853719

SEQ ID NO: 853722 - protein, 184 aa, Homo sapiens
MNPEYDYLFKLLLIGDSGVGKSCLLLRFADDTYTESYISTIGVDFKIRTIELDGITSSYYRGAHGIIVVYDVTDQESFNNVKQWLQEIDRYASENVNKLLVGNKCDLTTKKVVDYTTAKEFADSLGIPFLETSAKNATNVEQSFMTMAAEIKKRMGPGATAGGAEKSNVKIQSTPVKQSGGGCC

SEQ ID NO: 853723 - protein, 150 aa, Homo sapiens
MNPEYDYLFKLLLIGDSGVGKSCLLLRFADDTYTESYISTIGVDFKIRTIELDGKTIKLQIVNKLLVGNKCDLTTKKVVDYTTAKEFADSLGIPFLETSAKNATNVEQSFMTMAAEIKKRMGPGATAGGAEKSNVKIQSTPVKQSGGGCC

SEQ ID NO: 853724 - protein, 153 aa, Homo sapiens
MNPEYDYLFKLLLIGDSGVGKSCLLLRFADDTYTESYISTIGVDFKIRTIELDGKTIKLQIWDTAGQERFRTITSSYYRGAHGIIVVYDVTDQVSSKRRLCYSDQVGSHYLINVRFIYYFIYKPSVLILWQKTLSTLKYKCESLKRHLFSCNK

SEQ ID NO: 853725 - protein, 51 aa, Homo sapiens
MYDFEPHFPPLIAPAPQKVRIKYTHVCKAHGKSLTNNRNSNNKHRTHPRER

SEQ ID NO: 853726 - protein, 81 aa, Homo sapiens
KLLQHKLLQHKLLQHKLLQHKLLQHKLLQHKLFPLPPTLFPNFILMELFGFLDCFVIVGTQQARKDFEQSPPVITEEPMAS

SEQ ID NO: 853727 - protein, 202 aa, Homo sapiens; identical to SEQ ID NO: 853719

SEQ ID NO: 853728 - protein, 202 aa, Homo sapiens; identical to SEQ ID NO: 853719

SEQ ID NO: 853729 - protein, 202 aa, Homo sapiens; identical to SEQ ID NO: 853719

SEQ ID NO: 853730 - protein, 174 aa, Homo sapiens
MNPEYDYLFKLLLIGDSGVGKSCLLLRFADDTYTESYISTIGVDFKIRTIELDGKTIKLQIWDTAGQERFRTITSSYYRGAHGIIVVYDVTDQESFNNVKQWLQEIDRYASENVNKLLVGNKCDLTTKKVVDYTTAKVCLKFNFHTEFEGVELCMGSAVTVRPQPFKNMCTRIL

SEQ ID NO: 853731 - protein, 138 aa, Homo sapiens
MNPEYDYLFKLLLIGDSGVGKSCLLLRFAESFNNVKQWLQEIDRYASENVNKLLVGNKCDLTTKKVVDYTTAKEFADSLGIPFLETSAKNATNVEQSFMTMAAEIKKRMGPGATAGGAEKSNVKIQSTPVKQSGGGCC

SEQ ID NO: 853732 - protein, 126 aa, Homo sapiens
MNPEYDYLFKLLLIGDSGVGKSCLLLRFADDTYTESYISTIGVDFKIRTIELDGKTIKLQIEFADSLGIPFLETSAKNATNVEQSFMTMAAEIKKRMGPGATAGGAEKSNVKIQSTPVKQSGGGCC

SEQ ID NO: 853733 - protein, 174 aa, Homo sapiens; identical to SEQ ID NO: 853730

SEQ ID NO: 853734 - protein, 870 aa, Homo sapiens
MKGWYHGKLDRTIAEERLRQAGKSGSYLIRESDRRPGSFVLSFLSQMNVVNHFRIIAMCGDYYIGGRRFSSLSDLIGYYSHVSCLLKGEKLLYPVAPPEPVEDRRRVRAILPYTKVPDTDEISFLKGDMFIVHNELEDGWMWVTNLRTDEQGLIVEDLVEEVGREEDPHEGKIWFHGKISKQEAYNLLMTVGQVCSFLVRPSDNTPGDYSLYFRTNENIQRFKICPTPNNQFMMGGRYYNSIGDIIDHYRKEQIVEGYYLKEPVPMQDQEQVLNDTVDGKEIYNTIRRKTKDAFYKNIVKKGYLLKKGKGKRWKNLYFILEGSDAQLIYFESEKRATKPKGLIDLSVCSVYVVHDSLFGRPNCFQIVVQHFSEEHYIFYFAGETPEQAEDWMKGLQAFCNLRKSSPGTSNKRLRQVSSLVLHIEEAHKLPVKHFTNPYCNIYLNSVQVAKTHAREGQNPVWSEEFVFDDLPPDINRFEITLSNKTKKSKDPDILFMRCQLSRLQKGHATDEWFLLSSHIPLKGIEPGSLRVRARYSMEKIMPEEEYSEFKELILQKELHVVYALSHVCGQDRTLLASILLRIFLHEKLESLLLCTLNDREISMEDEATTLFRATTLASTLMEQYMKATATQFVHHALKDSILKIMESKQSCELSPSKLEKNEDVNTNLTHLLNILSELVEKIFMASEILPPTLRYIYGCLQKSVQHKWPTNTTMRTRVVSGFVFLRLICPAILNPRMFNIISDSPSPIAARTLILVAKSVQNLANLVEFGAKEPYMEGVNPFIKSNKHRMIMFLDELGNVPELPDTTEHSRTDLSRDLAALHEICVAHSDELRTLSNERGAQQHVLKKLLAITELLQQKQNQYTKTNDVR

SEQ ID NO: 853735 - protein, 870 aa, Homo sapiens; identical to SEQ ID NO: 853734

SEQ ID NO: 853736 - protein, 682 aa, Homo sapiens
MTVGQVCSFLVRPSDNTPGDYSLYFRTNENIQRFKICPTPNNQFMMGGRYYNSIGDIIDHYRKEQIVEGYYLKEPVPMQDQEQVLNDTVDGKEIYNTIRRKTKDAFYKNIVKKGYLLKKGKGKRWKNLYFILEGSDAQLIYFESEKRATKPKGLIDLSVCSVYVVHDSLFGRPNCFQIVVQHFSEEHYIFYFAGETPEQAEDWMKGLQAFCNLRKSSPGTSNKRLRQVSSLVLHIEEAHKLPVKHFTNPYCNIYLNSVQVAKTHAREGQNPVWSEEFVFDDLPPDINRFEITLSNKTKKSKDPDILFMRCQLSRLQKGHATDEWFLLSSHIPLKGIEPGSLRVRARYSMEKIMPEEEYSEFKELILQKELHVVYALSHVCGQDRTLLASILLRIFLHEKLESLLLCTLNDREISMEDEATTLFRATTLASTLMEQYMKATATQFVHHALKDSILKIMESKQSCELSPSKLEKNEDVNTNLTHLLNILSELVEKIFMASEILPPTLRYIYGCLQKSVQHKWPTNTTMRTRVVSGFVFLRLICPAILNPRMFNIISDSPSPIAARTLILVAKSVQNLANLVEFGAKEPYMEGVNPFIKSNKHRMIMFLDELGNVPELPDTTEHSRTDLSRDLAALHEICVAHSDELRTLSNERGAQQHVLKKLLAITELLQQKQNQYTKTNDVR

SEQ ID NO: 853737 - protein, 682 aa, Homo sapiens; identical to SEQ ID NO: 853736

SEQ ID NO: 853738 - protein, 479 aa, Homo sapiens [sequence omitted]

SEQ ID NO: 853739 - protein, 747 aa, Homo sapiens
MMAAEAGSEEGGPVTAGAGGGGAAAGSSAYPAVCRVKIPAALPVAAAPYPGLVETGVAGTLGGGAALGSEFLGAGSVAGALGGAGLTGGGTAAGVAGAAAGVAGAAVAGPSGDMALTKLPTSLLAETLGPGGGFPPLPPPPYLPPLGAGLGTVDEGDSLDGPEYEEEEVAIPLTAPPTNQWYHGKLDRTIAEERLRQAGKSGSYLIRESDRRPGSFVLSFLSQMNVVNHFRIIAMCGDYYIGGRRFSSLSDLIGYYSHVSCLLKGEKLLYPVAPPEPVEDRRRVRAILPYTKVPDTDEISFLKGDMFIVHNELEDGWMWVTNLRTDEQGLIVEDLVEEVGREEDPHEGKIWFHGKISKQEAYNLLMTVGQVCSFLVRPSDNTPGDYSLYFRTNENIQRFKICPTPNNQFMMGGRYYNSIGDIIDHYRKEQIVEGYYLKEPVPMQDQEQVLNDTVDGKEIYNTIRRKTKDAFYKNIVKKGYLLKKGKGKRWKNLYFILEGSDAQLIYFESEKRATKPKGLIDLSVCSVYVVHDSLFGRPNCFQIVVQHFSEEHYIFYFAGETPEQAEDWMKGLQAFCNLRKSSPGTSNKRLRQVSSLVLHIEEAHKLPVKHFTNPYCNIYLNSVQVAKTHAREGQNPVWSEEFVFDDLPPDINRFEITLSNKTKKSKDPDILFMRCQLSRLQKGHATDEWFLLSSHIPLKGIEPGSLRVRARYSMEKIMPEEEYSEFKEVLNYLSVLFLLELTETFNI

SEQ ID NO: 853740 - protein, 375 aa, Homo sapiens [sequence omitted]

SEQ ID NO: 853741 - protein, 1047 aa, Homo sapiens
MMAAEAGSEEGGPVTAGAGGGGAAAGSSAYPAVCRVKIPAALPVAAAPYPGLVETGVAGTLGGGAALGSEFLGAGSVAGALGGAGLTGGGTAAGVAGAAAGVAGAAVAGPSGDMALTKLPTSLLAETLGPGGGFPPLPPPPYLPPLGAGLGTVDEGDSLDGPEYEEEEVAIPLTAPPTNQWYHGKLDRTIAEERLRQAGKSGSYLIRESDRRPGSFVLSFLSQMNVVNHFRIIAMCGDYYIGGRRFSSLSDLIGYYSHVSCLLKGEKLLYPVAPPEPVEDRRRVRAILPYTKVPDTDEISFLKGDMFIVHNELEDGWMWVTNLRTDEQGLIVEDLVEEVGREEDPHEGKIWFHGKISKQEAYNLLMTVGQVCSFLVRPSDNTPGDYSLYFRTNENIQRFKICPTPNNQFMMGGRYYNSIGDIIDHYRKEQIVEGYYLKEPVPMQDQEQVLNDTVDGKEIYNTIRRKTKDAFYKNIVKKGYLLKKGKGKRWKNLYFILEGSDAQLIYFESEKRATKPKGLIDLSVCSVYVVHDSLFGRPNCFQIVVQHFSEEHYIFYFAGETPEQAEDWMKGLQAFCNLRKSSPGTSNKRLRQVSSLVLHIEEAHKLPVKHFTNPYCNIYLNSVQVAKTHAREGQNPVWSEEFVFDDLPPDINRFEITLSNKTKKSKDPDILFMRCQLSRLQKGHATDEWFLLSSHIPLKGIEPGSLRVRARYSMEKIMPEEEYSEFKELILQKELHVVYALSHVCGQDRTLLASILLRIFLHEKLESLLLCTLNDREISMEDEATTLFRATTLASTLMEQYMKATATQFVHHALKDSILKIMESKQSCELSPSKLEKNEDVNTNLTHLLNILSELVEKIFMASEILPPTLRYIYGCLQKSVQHKWPTNTTMRTRVVSGFVFLRLICPAILNPRMFNIISDSPSPIAARTLILVAKSVQNLANLVEFGAKEPYMEGVNPFIKSNKHRMIMFLDELGNVPELPDTTEHSRTDLSRDLAALHEICVAHSDELRTLSNERGAQQHVLKKLLAITELLQQKQNQYTKTNDVR

SEQ ID NO: 853742 - protein, 1047 aa, Homo sapiens; identical to SEQ ID NO: 853741

SEQ ID NO: 853743 - protein, 978 aa, Homo sapiens
MMAAEAGSEEGGPVTAGAGGGGAAAGSSAYPAVCRVKIPAALPVAAAPYPGLVETGVAGTLGGGAALGSEFLGAGSVAGALGGAGLTGGGTAAGVAGAAAGVAGAAVAGPSGDMALTKLPTSLLAETLGPGGGFPPLPPPPYLPPLGAGLGTVDEGDSLDGPEYEEEEVAIPLTAPPTNQWYHGKLDRTIAEERLRQAGKSGSYLIRESDRRPGSFVLSFLSQMNVVNHFRIIAMCGDYYIGGRRFSSLSDLIGYYSHVSCLLKGEKLLYPVAPPEPVEDRRRVRAILPYTKVPDTDEISFLKGDMFIVHNELEDGWMWVTNLRTDEQGLIVEDLVEEVGREEDPHEGKIWFHGKISKQEAYNLLMTVGQVCSFLVRPSDNTPGDYSLYFRTNENIQRFKICPTPNNQFMMGGRYYNSIGDIIDHYRKEQIVEGYYLKEPVPMQDQEQVLNDTVDGKEIYNTIRRKTKDAFYKNIVKKGYLLKKGKGKRWKNLYFILEGSDAQLIYFESEKRATKPKGLIDLSVCSVYVVHDSLFGRPNCFQIVVQHFSEEHYIFYFAGETPEQAEDWMKGLQAFCNLRKSSPGTSNKRLRQVSSLVLHIEEAHKLPVKHFTNPYCNIYLNSVQVAKTHAREGQNPVWSEEFVFDDLPPDINRFEITLSNKTKKSKDPDILFMRCQLSRLQKGHATDEWFLLSSHIPLKGIEPGSLRVRARYSMEKIMPEEEYSEFKELILQKELHVVYALSHVCGQDRTLLASILLRIFLHEKLESLLLCTLNDREISMEDEATTLFRATTLASTLMEQYMKATATQFVHHALKDSILKIMESKQSCELSPSKLEKNEDVNTNLTHLLNILSELVEKIFMASEILPPTLRYIYGCLQKSVQHKWPTNTTMRTRVVSGFVFLRLICPAILNPRMFNIISDSPSPIAARTLILVAKSVQNLANLVEFGAKEPYMEGVNPFIKSNKHRMIMFLDELGVCI

SEQ ID NO: 853744 - protein, 999 aa, Homo sapiens
MMAAEAGSEEGGPVTAGAGGGGAAAGSSAYPAVCRVKIPAALPVAAAPYPGLVETGVAGTLGGGAALGSEFLGAGSVAGALGGAGLTGGGTAAGVAGAAAGVAGAAVAGPSGDMALTKLPTSLLAETLGPGGGFPPLPPPPYLPPLGAGLGTVDEGDSLDGPEYEEEEVAIPLTAPPTNQWYHGKLDRTIAEERLRQAGKSGSYLIRESDRRPGSFVLSFLSQMNVVNHFRIIAMCGDYYIGGRRFSSLSDLIGYYSHVSCLLKGEKLLYPVAPPEPVEDRRRVRAILPYTKVPDTDEISFLKGDMFIVHNELEDGWMWVTNLRTDEQGLIVEDLVEEVGREEDPHEGKIWFHGKISKQEAYNLLMTVGQVCSFLVRPSDNTPGDYSLYFRTNENIQRFKICPTPNNQFMMGGRYYNSIGDIIDHYRKEQIVEGYYLKEPVPMQDQEQVLNDTVDGKEIYNTIRRKTKDAFYKNIVKKGYLLKKGKGKRWKNLYFILEGSDAQLIYFESEKRATKPKGLIDLSVCSVYVVHDSLFGRPNCFQIVVQHFSEEHYIFYFAGETPEQAEDWMKGLQAFCNLRKSSPGTSNKRLRQVSSLVLHIEEAHKLPVKHFTNPYCNIYLNSVQVAKTHAREGQNPVWSEEFVFDDLPPDINRFEITLSNKTKKSKDPDILFMRCQLSRLQKGHATDEWFLLSSHIPLKGIEPGSLRVRARYSMEKIMPEEEYSEFKELILQKELHVVYALSHVCGQDRTLLASILLRIFLHEKLESLLLCTLNDREISMEDEATTLFRATTLASTLMEQYMKATATQFVHHALKDSILKIMESKQSCELSPSKLEKNEDVNTNLTHLLNILSELVEKIFMASEILPPTLRYIYGCLQKSVQHKWPTNTTMRTRVVSGFVFLRLICPAILNPRMFNIISDSPSPIAARTLILVAKSVQNLANLVEFGAKEPYMEGVNPFIKSNKHRMIMFLDELGLFYFAATMWGVKQDDDTVLTRLNK

SEQ ID NO: 853745 - protein, 1010 aa, Homo sapiens
  misc_feature (988)..(988): Xaa can be any naturally occurring amino acid
  misc_feature (997)..(997): Xaa can be any naturally occurring amino acid
  misc_feature (999)..(999): Xaa can be any naturally occurring amino acid
  misc_feature (1008)..(1008): Xaa can be any naturally occurring amino acid
  misc_feature (1010)..(1010): Xaa can be any naturally occurring amino acid
MMAAEAGSEEGGPVTAGAGGGGAAAGSSAYPAVCRVKIPAALPVAAAPYPGLVETGVAGTLGGGAALGSEFLGAGSVAGALGGAGLTGGGTAAGVAGAAAGVAGAAVAGPSGDMALTKLPTSLLAETLGPGGGFPPLPPPPYLPPLGAGLGTVDEGDSLDGPEYEEEEVAIPLTAPPTNQWYHGKLDRTIAEERLRQAGKSGSYLIRESDRRPGSFVLSFLSQMNVVNHFRIIAMCGDYYIGGRRFSSLSDLIGYYSHVSCLLKGEKLLYPVAPPEPVEDRRRVRAILPYTKVPDTDEISFLKGDMFIVHNELEDGWMWVTNLRTDEQGLIVEDLVEEVGREEDPHEGKIWFHGKISKQEAYNLLMTVGQVCSFLVRPSDNTPGDYSLYFRTNENIQRFKICPTPNNQFMMGGRYYNSIGDIIDHYRKEQIVEGYYLKEPVPMQDQEQVLNDTVDGKEIYNTIRRKTKDAFYKNIVKKGYLLKKGKGKRWKNLYFILEGSDAQLIYFESEKRATKPKGLIDLSVCSVYVVHDSLFGRPNCFQIVVQHFSEEHYIFYFAGETPEQAEDWMKGLQAFCNLRKSSPGTSNKRLRQVSSLVLHIEEAHKLPVKHFTNPYCNIYLNSVQVAKTHAREGQNPVWSEEFVFDDLPPDINRFEITLSNKTKKSKDPDILFMRCQLSRLQKGHATDEWFLLSSHIPLKGIEPGSLRVRARYSMEKIMPEEEYSEFKELILQKELHVVYALSHVCGQDRTLLASILLRIFLHEKLESLLLCTLNDREISMEDEATTLFRATTLASTLMEQYMKATATQFVHHALKDSILKIMESKQSCELSPSKLEKNEDVNTNLTHLLNILSELVEKIFMASEILPPTLRYIYGCLQKSVQHKWPTNTTMRTRVVSGFVFLRLICPAILNPRMFNIISDSPSPIAARTLILVAKSVQNLANLVEFGAKEPYMEGVNPFIKSNKHRMIMFLDELGNVPELPGTTGAIXERGPWSPVXFXQGNWPMEEXCX

SEQ ID NO: 853746 - protein, 787 aa, Homo sapiens
MMAAEAGSEEGGPVTAGAGGGGAAAGSSAYPAVCRVKIPAALPVAAAPYPGLVETGVAGTLGGGAALGSEFLGAGSVAGALGGAGLTGGGTAAGVAGAAAGVAGAAVAGPSGDMALTKLPTSLLAETLGPGGGFPPLPPPPYLPPLGAGLGTVDEGDSLDGPEYEEEEVAIPLTAPPTNQWYHGKLDRTIAEERLRQAGKSGSYLIRESDRRPGSFVLSFLSQMNVVNHFRIIAMCGDYYIGGRRFSSLSDLIGYYSHVSCLLKGEKLLYPVAPPEPVEDRRRVRAILPYTKVPDTDEISFLKGDMFIVHNELEDGWMWVTNLRTDEQGLIVEDLVEEVGREEDPHEGKIWFHGKISKQEAYNLLMTVGQVCSFLVRPSDNTPGDYSLYFRTNENIQRFKICPTPNNQFMMGGRYYNSIGDIIDHYRKEQIVEGYYLKEPVPMQDQEQVLNDTVDGKEIYNTIRRKTKDAFYKNIVKKGYLLKKGKGKRWKNLYFILEGSDAQLIYFESEKRATKPKGLIDLSVCSVYVVHDSLFGRPNCFQIVVQHFSEEHYIFYFAGETPEQAEDWMKGLQAFCNLRKSSPGTSNKRLRQVSSLVLHIEEAHKLPVKHFTNPYCNIYLNSVQVAKTHAREGQNPVWSEEFVFDDLPPDINRFEITLSNKTKKSKDPDILFMRCQLSRLQKGHATDEWFLLSSHIPLKGIEPGSLRVRARYSMEKIMPEEEYSEFKELILQKELHVVYALSHVCGQDRTLLASILLRIFLHEKLESLLLCTLNDREISMEGMVWPC

SEQ ID NO: 853747 - protein, 747 aa, Homo sapiens; identical to SEQ ID NO: 853739

SEQ ID NO: 853748 - protein, 350 aa, Homo sapiens
MMAAEAGSEEGGPVTAGAGGGGAAAGSSAYPAVCRVKIPAALPVAAAPYPGLVETGVAGTLGGGAALGSEFLGAGSVAGALGGAGLTGGGTAAGVAGAAAGVAGAAVAGPSGDMALTKLPTSLLAETLGPGGGFPPLPPPPYLPPLGAGLGTVDEGDSLDGPEYEEEEVAIPLTAPPTNQWYHGKLDRTIAEERLRQAGKSGSYLIRESDRRPGSFVLSFLSQMNVVNHFRIIAMCGDYYIGGRRFSSLSDLIGYYSHVSCLLKGEKLLYPVAPPEPVEDRRRVRAILPYTKVPDTDEISFLKGDMFIVHNELEDGWMWVTNLRTDEQGLIVEDLVEEVGREEDPHEGKM

SEQ ID NO: 853749 - protein, 270 aa, Homo sapiens
MKGLQAFCNLRKSSPGTSNKRLRQVSSLVLHIEEAHKLPVKHFTNPYCNIYLNSVQVAKTHAREGQNPVWSEEFVFDDLPPDINRFEITLSNKTKKSKDPDILFMRCQLSRLQKGHATDEWFLLSSHIPLKGIEPGSLRVRARYSMEKIMPEEEYSEFKELILQKELHVVYALSHVCGQDRTLLASILLRIFLHEKLESLLLCTLNDREISMEDEATNLIHETNNTRQAPWMEAEILKGHGNTRAVRHAVKDSIEKIMAKPGQGEKSHQR

SEQ ID NO: 853750 - protein, 1047 aa, Homo sapiens; identical to SEQ ID NO: 853741

SEQ ID NO: 853751 - protein, 870 aa, Homo sapiens; identical to SEQ ID NO: 853734

SEQ ID NO: 853752 - protein, 166 aa, Homo sapiens
MKGLQAFCNLRKSSPGTSNKRLRQVSSLVLHIEEAHKLPVKHFTNPYCNIYLNSVQVAKTHAREGQNPVWSEEFVFDDLPPDINRFEITLSNKTKKSKDPDILFMRCQLSRLQKGHATDEWFLLSSHIPLKGIEPGSLRVRARYSMEKIMPEEEYSEFKELSQRTQ

SEQ ID NO: 853753 - protein, 870 aa, Homo sapiens; identical to SEQ ID NO: 853734

SEQ ID NO: 853754 - protein, 637 aa, Homo sapiens
MGGRYYNSIGDIIDHYRKEQIVEGYYLKEPVPMQDQEQVLNDTVDGKEIYNTIRRKTKDAFYKNIVKKGYLLKKGKGKRWKNLYFILEGSDAQLIYFESEKRATKPKGLIDLSVCSVYVVHDSLFGRPNCFQIVVQHFSEEHYIFYFAGETPEQAEDWMKGLQAFCNLRKSSPGTSNKRLRQVSSLVLHIEEAHKLPVKHFTNPYCNIYLNSVQVAKTHAREGQNPVWSEEFVFDDLPPDINRFEITLSNKTKKSKDPDILFMRCQLSRLQKGHATDEWFLLSSHIPLKGIEPGSLRVRARYSMEKIMPEEEYSEFKELILQKELHVVYALSHVCGQDRTLLASILLRIFLHEKLESLLLCTLNDREISMEDEATTLFRATTLASTLMEQYMKATATQFVHHALKDSILKIMESKQSCELSPSKLEKNEDVNTNLTHLLNILSELVEKIFMASEILPPTLRYIYGCLQKSVQHKWPTNTTMRTRVVSGFVFLRLICPAILNPRMFNIISDSPSPIAARTLILVAKSVQNLANLVEFGAKEPYMEGVNPFIKSNKHRMIMFLDELGNVPELPDTTEHSRTDLSRDLAALHEICVAHSDELRTLSNERGAQQHVLKKLLAITELLQQKQNQYTKTNDVR

SEQ ID NO: 853755 - protein, 479 aa, Homo sapiens [sequence omitted]

SEQ ID NO: 853756 - protein, 479 aa, Homo sapiens [sequence omitted]

SEQ ID NO: 853757 - protein, 479 aa, Homo sapiens [sequence omitted]

SEQ ID NO: 853758 - protein, 911 aa, Homo sapiens
MMAAEAGSEEGGPVTAGAGGGGAAAGSSAYPAVCRVKIPAALPVAAAPYPGLVETGVAGTLGGGAALGSEFLGAGSVAGALGGAGLTGGGTAAGVAGAAAGVAGAAVAGPSGDMALTKLPTSLLAETLGPGGGFPPLPPPPYLPPLGAGLGTVDEGDSLDGPEYEEEEVAIPLTAPPTNQWYHGKLDRTIAEERLRQAGKSGSYLIRESDRRPGSFVLSFLSQMNVVNHFRIIAMCGDYYIGGRRFSSLSDLIGYYSHVSCLLKGEKLLYPVAPPEPVEDRRRVRAILPYTKVPDTDEISFLKGDMFIVHNELEDGWMWVTNLRTDEQGLIVEDLVEEVGREEDPHEGKIWFHGKISKQEAYNLLMTVGQVCSFLVRPSDNTPGDYSLYFRTNENIQRFKICPTPNNQFMMGGRYYNSIGDIIDHYRKEQIVEGYYLKEPVPMQDQEQVLNDTVDGKEIYNTIRRKTKDAFYKNIVKKGYLLKKGKGKRWKNLYFILEGSDAQLIYFESEKRATKPKGLIDLSVCSVYVVHDSLFGRPNCFQIVVQHFSEEHYIFYFAGETPEQAEDWMKGLQAFCNLRKSSPGTSNKRLRQVSSLVLHIEEAHKLPVKHFTNPYCNIYLNSVQVAKTHAREGQNPVWSEEFVFDDLPPDINRFEITLSNKTKKSKDPDILFMRCQLSRLQKGHATDEWFLLSSHIPLKGIEPGSLRVRARYSMEKIMPEEEYSEFKELILQKELHVVYALSHVCGQDRTLLASILLRIFLHEKLESLLLCTLNDREISMEDEATTLFRATTLASTLMEQYMKATATQFVHHALKDSILKIMESKQSCELSPSKLEKNEDVNTNLTHLLNILSELVEKIFMASEILPPTLRYIYGCLQKSVQHKWPTNTTMRTRVVRFSISYCCKNTDISG

SEQ ID NO: 853759 - protein, 375 aa, Homo sapiens [sequence omitted]

SEQ ID NO: 853760 - protein, 552 aa, Homo sapiens
MMAAEAGSEEGGPVTAGAGGGGAAAGSSAYPAVCRVKIPAALPVAAAPYPGLVETGVAGTLGGGAALGSEFLGAGSVAGALGGAGLTGGGTAAGVAGAAAGVAGAAVAGPSGDMALTKLPTSLLAETLGPGGGFPPLPPPPYLPPLGAGLGTVDEGDSLDGPEYEEEEVAIPLTAPPTNQWYHGKLDRTIAEERLRQAGKSGSYLIRESDRRPGSFVLSFLSQMNVVNHFRIIAMCGDYYIGGRRFSSLSDLIGYYSHVSCLLKGEKLLYPVAPPEPVEDRRRVRAILPYTKVPDTDEISFLKGDMFIVHNELEDGWMWVTNLRTDEQGLIVEDLVEEVGREEDPHEGKIWFHGKISKQEAYNLLMTVGQVCSFLVRPSDNTPGDYSLYFRTNENIQRFKICPTPNNQFMMGGRYYNSIGDIIDHYRKEQIVEGYYLKEPVPMQDQEQVLNDTVDGKEIYNTIRRKTKDAFYKNIVKKGYLLKKGKGKRWKNLYFILEGSDAQLIYFESEKRATKPKGLIDLSVCSVYVVHDSLFGRPNCFQIVVQHFSEEH

SEQ ID NO: 853761 - protein, 94 aa, Homo sapiens
VETVCAVIPKLIEHRYDGIGVNSNASQNASQQSVMIMLGDDLGNVTLTCSAPYIGYDKGPGPARVVSAVAMSIPCALMSDAHYRTSATVNCSVC

SEQ ID NO: 853762 - protein, 868 aa, Homo sapiens
MMAAEAGSEEGGPVTAGAGGGGAAAGSSAYPAVCRVKIPAALPVAAAPYPGLVETGVAGTLGGGAALGSEFLGAGSVAGALGGAGLTGGGTAAGVAGAAAGVAGAAVAGPSGDMALTKLPTSLLAETLGPGGGFPPLPPPPYLPPLGAGLGTVDEGDSLDGPEYEEEEVAIPLTAPPTNQWYHGKLDRTIAEERLRQAGKSGSYLIRESDRRPGSFVLSFLSQMNVVNHFRIIAMCGDYYIGGRRFSSLSDLIGYYSHVSCLLKGEKLLYPVAPPEPVEDRRRVRAILPYTKVPDTDEISFLKGDMFIVHNELEDGWMWVTNLRTDEQGLIVEDLVEEVGREEDPHEGKIWFHGKISKQEAYNLLMTVGQVCSFLVRPSDNTPGDYSLYFRTNENIQRFKICPTPNNQFMMGGRYYNSIGDIIDHYRKEQIVEGYYLKEPVPMQDQEQVLNDTVDGKEIYNTIRRKTKDAFYKNIVKKGYLLKKGKGKRWKNLYFILEGSDAQLIYFESEKRATKPKGLIDLSVCSVYVVHDSLFGRPNCFQIVVQHFSEEHYIFYFAGETPEQAEDWMKGLQAFCNLRKSSPGTSNKRLRQVSSLVLHIEEAHKLPVKHFTNPYCNIYLNSVQVAKTHAREGQNPVWSEEFVFDDLPPDINRFEITLSNKTKKSKDPDILFMRCQLSRLQKGHATDEWFLLSSHIPLKGIEPGSLRVRARYSMEKIMPEEEYSEFKELILQKELHVVYALSHVCGQDRTLLASILLRIFLHEKLESLLLCTLNDREISMEDEATTLFRATTLASTLMEQYMKATATQFVHHALKDSILKIMESKQSCELSPSKLEKNEDVNTNLTHLLNILSELVEKIFMASEILPP

SEQ ID NO: 853763 - protein, 308 aa, Homo sapiens [sequence omitted]

SEQ ID NO: 853764 - protein, 263 aa, Homo sapiens
MARGPKKHLKRVAAPKHWMLDKLTGVFAPRPSTGPHKLRECLPLIVFLRNRLKYALTGDEVKKICMQRFIKIDGKVRVDVTYPAGFMDVISIEKTGEHFRLVYDTKGRFAVHRITVEEAKYKLCKVRKITVGVKGIPHLVTHDARTIRYPDPVIKVNDTVQIDLGTGKIINFIKFDTGNLCMVIGGANLGRVGVITNRERHPGSFDVVHVKDANGNSFATRLSNIFVIGNGNKPWISLPRGKGIRLTVAEERDKRLATKQSSG

SEQ ID NO: 853765 - protein, 263 aa, Homo sapiens; identical to SEQ ID NO: 853764

SEQ ID NO: 853766 - protein, 123 aa, Homo sapiens
LCPACKRTPSRITIKVNDTVQIDLGTGKIINFIKFDTGNLCMVIGGANLGRVGVITNRERHPGSFDVVHVKDANGNSFATRLSNIFVIGNGNKPWISLPRGKGIRLTVAEERDKRLATKQSSG

SEQ ID NO: 853767 - protein, 67 aa, Homo sapiens
RGRATGCEKTYEGVKDANGNSARGSNMSLAMAINLGFPCPGERAFDLLLLKREIRGWPPNRAVAKLQ

SEQ ID NO: 853768 - protein, 263 aa, Homo sapiens; identical to SEQ ID NO: 853764

SEQ ID NO: 853769 - protein, 263 aa, Homo sapiens; identical to SEQ ID NO: 853764

SEQ ID NO: 853770 - protein, 263 aa, Homo sapiens; identical to SEQ ID NO: 853764

SEQ ID NO: 853771 - protein, 263 aa, Homo sapiens; identical to SEQ ID NO: 853764

SEQ ID NO: 853772 - protein, 263 aa, Homo sapiens; identical to SEQ ID NO: 853764

SEQ ID NO: 853773 - protein, 272 aa, Homo sapiens
MLGRPAKFSKARGPKKHLKRVAAPKHWMLDKLTGVFAPRPSTGPHKLRECLPLIVFLRNRLKYALTGDEVKKICMQRFIKIDGKVRVDVTYPAGFMDVISIEKTGEHFRLVYDTKGRFAVHRITVEEAKYKLCKVRKITVGVKGIPHLVTHDARTIRYPDPVIKVNDTVQIDLGTGKIINFIKFDTGNLCMVIGGANLGRVGVITNRERHPGSFDVVHVKDANGNSFATRLSNIFVIGNGNKPWISLPRGKGIRLTVAEERDKRLATKQSSG

SEQ ID NO: 853774 - protein, 290 aa, Homo sapiens
MARGPKKHLKRVAAPKHWMLDKLTGVFAPRPSTGPHKLRECLPLIVFLRNRLKYALTGDEVKKICMQRFIKIDGKVRVDVTYPAGFMDVISIEKTGEHFRLVYDTKGRFAVHRITVEEAKYKLCKVRKITVGVKGIPHLVTHDARTIRYPDPVIKVNDTVQIDLGTGKIINFIKFDTGNLCMVIGGANLGRVGVITNRERHPGSFDVVHVKDANGNSFATRLSNIFVIGNGNKPWISLPRGKGIRLTVAEERDKRLATKQSSGSGDVLHYPPHYAQITMTSAVWFNPGPI

SEQ ID NO: 853775 - protein, 181 aa, Homo sapiens
MYATFHVISIEKTGEHFRLVYDTKGRFAVHRITVEEAKYKLCKVRKITVGVKGIPHLVTHDARTIRYPDPVIKVNDTVQIDLGTGKIINFIKFDTGNLCMVIGGANLGRVGVITNRERHPGSFDVVHVKDANGNSFATRLSNIFVIGNGNKPWISLPRGKGIRLTVAEERDKRLATKQSSG

SEQ ID NO: 853776 - protein, 211 aa, Homo sapiens
PCLAFLCFLMHARGQRDFDLADALDDPEPTKKPNSDVISIEKTGEHFRLVYDTKGRFAVHRITVEEAKYKLCKVRKITVGVKGIPHLVTHDARTIRYPDPVIKVNDTVQIDLGTGKIINFIKFDTGNLCMVIGGANLGRVGVITNRERHPGSFDVVHVKDANGNSFATRLSNIFVIGNGNKPWISLPRGKGIRLTVAEERDKRLATKQSSG

SEQ ID NO: 853777 - protein, 150 aa, Homo sapiens
MHEDSNSYKLCKVRKITVGVKGIPHLVTHDARTIRYPDPVIKVNDTVQIDLGTGKIINFIKFDTGNLCMVIGGANLGRVGVITNRERHPGSFDVVHVKDANGNSFATRLSNIFVIGNGNKPWISLPRGKGIRLTVAEERDKRLATKQSSG

SEQ ID NO: 853778 - protein, 216 aa, Homo sapiens
MARGPKKHLKRVAAPKHWMLDKLTGVFAPRPSTGPHKLRECLPLIVFLRNRLKYALTGDEVKKICMQRFIKIDGKVRVDVTYPAGFMDVISIEKTGEHFRLVYDTKGRFAVHRITVEEAKYKLCKVRKITVGVKGIPHLVTHDARTIRYPDPVIKVNDTVQIDLGTGKIINFIKFDTGCKNKNKPNKPASKQEEENNNNTNLEIDLSDVNISFLGK

SEQ ID NO: 853779 - protein, 39 aa, Homo sapiens
YTLLWSDVISIEKTGEHFRLVYDTKGRFAVHRITVEEAK

SEQ ID NO: 853780 - protein, 111 aa, Homo sapiens
MVTEQEEVSMGKPDPWRGSGSDNQEEEPLERDFDRFLGTTTSFSRFTLWAWGFTLWGTLWGFLGPEAKLRGALTWPSLAATIHAQVPKDTEPELEIQSREPFTAVNQLLTL

SEQ ID NO: 853781 - protein, 36 aa, Homo sapiens
MHARGQRDFDLADALDDPEPTKKPNSDIYPKPKPPY

SEQ ID NO: 853782 - protein, 263 aa, Homo sapiens; identical to SEQ ID NO: 853764

SEQ ID NO: 853783 - protein, 263 aa, Homo sapiens; identical to SEQ ID NO: 853764

SEQ ID NO: 853784 - protein, 263 aa, Homo sapiens; identical to SEQ ID NO: 853764

SEQ ID NO: 853785 - protein, 263 aa, Homo sapiens; identical to SEQ ID NO: 853764

SEQ ID NO: 853786 - protein, 263 aa, Homo sapiens; identical to SEQ ID NO: 853764

SEQ ID NO: 853787 - protein, 263 aa, Homo sapiens; identical to SEQ ID NO: 853764

SEQ ID NO: 853788 - protein, 198 aa, Homo sapiens [sequence omitted]

SEQ ID NO: 853789 - protein, 231 aa, Homo sapiens
MARGPKKHLKRVAAPKHWMLDKLTGVFAPRPSTGPHKLRECLPLIVFLRNRLKYALTGDEVKKICMQRFIKIDGKVRVDVTYPAGFMDVISIEKTGEHFRLVYDTKGRFAVHRITVEEAKYKLCKVRKITVGVKGIPHLVTHDARTIRYPDPVIKVNDTVQIDLGTGKIINFIKFDTGNLCMVIGGANLGRVGVITNRERHPGSFDVVHVKDANGNSFATRLSNIFVIGNC

SEQ ID NO: 853790 - protein, 182 aa, Homo sapiens
MARGPKKHLKRVAAPKHWMLDKLTGVFAPRPSTGPHKLRECLPLIVFLRNRLKYALTGDEVKKICMQRFIKIDGKVRVDVTYPAGFMDVISIEKTGEHFRLVYDTKGRFAVHRITVEEAKYKLCKVRKITVGVKGIPHLVTHDARTIRYPDPVIKVNDTVQIDLGTGKIINLDILVLLMWCM

SEQ ID NO: 853791 - protein, 182 aa, Homo sapiens; identical to SEQ ID NO: 853790

SEQ ID NO: 853792 - protein, 75 aa, Homo sapiens
EPARHEEGTGSHASTHSAVQPFSLNSPQPFHPFIPSQRFENLFRRGKQACPDEQTLTDTWMHKHPGDARSHKPTQ

SEQ ID NO: 853793 - protein, 130 aa, Homo sapiens
GRVRSGASSLESGMSVSSCPCPLLNGNPHQLPREPVSLHSIRICSSSVTSAMDSFRSSTNFCISSEPRAQKCSTCFFSLNSPQPFHPFIPSQRFENLFRRGKQACPDEQTLTDTWMHKHPGDARSHKPTQ

SEQ ID NO: 853794 - protein, 580 aa, Homo sapiens
MSDTWSSIQAHKKQLDSLRERLQRRRKQDSGHLDLRNPEAALSPTFRSDSPVPTAPTSGGPKPSTASAVPELATDPELEKKLLHHLSDLALTLPTDAVSICLAISTPDAPATQDGVESLLQKFAAQELIEVKRGLLQDDAHPTLVTYADHSKLSAMMGAVAEKKGPGEVAGTVTGQKRRAEQDSTTVAAFASSLVSGLNSSASEPAKEPAKKSRKHAASDVDLEIESLLNQQSTKEQQSKKVSQEILELLNTTTAKEQSIVEKFRSRGRAQVQEFCDYGTKEECMKASDADRPCRKLHFRRIINKHTDESLGDCSFLNTCFHMDTCKYVHYEIDACMDSEAPGSKDHTPSQELALTQSVGGDSSADRLFPPQWICCDIRYLDVSILGKFAVVMADPPWDIHMELPYGTLTDDEMRRLNIPVLQDDGFLFLWVTGRAMELGRECLNLWGYERVDEIIWVKTNQLQRIIRTGRTGHWLNHGKEHCLVGVKGNPQGFNQGLDCDVIVAEVRSTSHKPDEIYGMIERLSPGTRKIELFGRPHNVQPNWITLGNQLDGIHLLDPDVVARFKQRYPDGIISKPKNL

SEQ ID NO: 853795 - protein, 580 aa, Homo sapiens; identical to SEQ ID NO: 853794

SEQ ID NO: 853796 - protein, 305 aa, Homo sapiens
MSDTWSSIQAHKKQLDSLRERLQRRRKQDSGHLDLRNPEAALSPTFRSDSPVPTAPTSGGPKPSTASAVPELATDPELEKKLLHHLSDLALTLPTDAVSICLAISTPDAPATQDGVESLLQKFAAQELIEVKRGLLQDDAHPTLVTYADHSKLSAMMGAVAEKKGPGEVAGTVTGQKRRAEQDSTTVAAFASSLVSGLNSSASEPAKEPAKKSRKHAASDVDLEIESLLNQQSTKEQQSKKVSQEILELLNTTTAKEQSIVEKFRSRGRAQVQEFCDYGTKEECMKASDADRPCRKLHFRSLGRE

SEQ ID NO: 853797 - protein, 505 aa, Homo sapiens
MSDTWSSIQAHKKQLDSLRERLQRRRKQDSGHLDLRNPEAALSPTFRSDSPVPTAPTSGGPKPSTASAVPELATDPELEKKLLHHLSDLALTLPTDAVSICLAISTPDAPATQDGVESLLQKFAAQELIEVKRGLLQDDAHPTLVTYADHSKLSAMMGAVAEKKGPGEVAGTVTGQKRRAEQDSTTVAAFASSLVSGLNSSASEPAKEPAKKSRKHAASDVDLEIESLLNQQSTKEQQSKKVSQEILELLNTTTAKEQSIVEKFRSRGRAQVQEFCDYGTKEECMKASDADRPCRKLHFRRIINKHTDESLGDCSFLNTCFHMDTCKYVHYEIDACMDSEAPGSKDHTPSQELALTQSVGGDSSADRLFPPQWICCDIRYLDVSILGKFAVVMADPPWDIHMELPYGTLTDDEMRRLNIPVLQDDGFLFLWVTGRAMELGRECLNLWGYERVDEIIWVKTNQLQRIIRTGRTGHWLNHGKEHCLVSSSGAQFNRWSTKKNHLISY

SEQ ID NO: 853798 - protein, 505 aa, Homo sapiens; identical to SEQ ID NO: 853797

SEQ ID NO: 853799 - protein, 448 aa, Homo sapiens
MSDTWSSIQAHKKQLDSLRERLQRRRKQDSGHLDLRNPEAALSPTFRSDSPVPTAPTSGGPKPSTASAVPELATDPELEKKLLHHLSDLALTLPTDAVSICLAISTPDAPATQDGVESLLQKFAAQELIEVKRGLLQDDAHPTLVTYADHSKLSAMMGAVAEKKGPGEVAGTVTGQKRRAEQDSTTVAAFASSLVSGLNSSASEPAKEPAKKSRKHAASDVDLEIESLLNQQSTKEQQSKKVSQEILELLNTTTAKEQSIVEKFRSRGRAQVQEFCDYGTKEECMKASDADRPCRKLHFRRIINKHTDESLGDCSFLNTCFHMDTCKYVHYEIDACMDSEAPGSKDHTPSQELALTQSVGGDSSADRLFPPQWICCDIRYLDVSILGKFAVVMADPPWDIHMELPYGTLTDDEMRRLNIPVLQDDGFLFLWVTGRAMELGRECLNLWG

SEQ ID NO: 853800 - protein, 505 aa, Homo sapiens; identical to SEQ ID NO: 853797

SEQ ID NO: 853801 - protein, 435 aa, Homo sapiens [sequence omitted]

SEQ ID NO: 853802 - protein, 425 aa, Homo sapiens
MMGAVAEKKGPGEVAGTVTGQKRRAEQDSTTVAAFASSLVSGLNSSASEPAKEPAKKSRKHAASDVDLEIESLLNQQSTKEQQSKKVSQEILELLNTTTAKEQSIVEKFRSRGRAQVQEFCDYGTKEECMKASDADRPCRKLHFRRIINKHTDESLGDCSFLNTCFHMDTCKYVHYEIDACMDSEAPGSKDHTPSQELALTQSVGGDSSADRLFPPQWICCDIRYLDVSILGKFAVVMADPPWDIHMELPYGTLTDDEMRRLNIPVLQDDGFLFLWVTGRAMELGRECLNLWGYERVDEIIWVKTNQLQRIIRTGRTGHWLNHGKEHCLVGVKGNPQGFNQGLDCDVIVAEVRSTSHKPDEIYGMIERLSPGTRKIELFGRPHNVQPNWITLGNQLDGIHLLDPDVVARFKQRYPDGIISKPKNL

SEQ ID NO: 853803 - protein, 245 aa, Homo sapiens [sequence omitted]

SEQ ID NO: 853804 - protein, 296 aa, Homo sapiens
MKASDADRPCRKLHFRRIINKHTDESLGDCSFLNTCFHMDTCKYVHYEIDACMDSEAPGSKDHTPSQELALTQSVGGDSSADRLFPPQWICCDIRYLDVSILGKFAVVMADPPWDIHMELPYGTLTDDEMRRLNIPVLQDDGFLFLWVTGRAMELGRECLNLWGYERVDEIIWVKTNQLQRIIRTGRTGHWLNHGKEHCLVGVKGNPQGFNQGLDCDVIVAEVRSTSHKPDEIYGMIERLSPGTRKIELFGRPHNVQPNWITLGNQLDGIHLLDPDVVARFKQRYPDGIISKPKNL

SEQ ID NO: 853805 - protein, 258 aa, Homo sapiens
MDTCKYVHYEIDACMDSEAPGSKDHTPSQELALTQSVGGDSSADRLFPPQWICCDIRYLDVSILGKFAVVMADPPWDIHMELPYGTLTDDEMRRLNIPVLQDDGFLFLWVTGRAMELGRECLNLWGYERVDEIIWVKTNQLQRIIRTGRTGHWLNHGKEHCLVGVKGNPQGFNQGLDCDVIVAEVRSTSHKPDEIYGMIERLSPGTRKIELFGRPHNVQPNWITLGNQLDGIHLLDPDVVARFKQRYPDGIISKPKNL

SEQ ID NO: 853806 - protein, 580 aa, Homo sapiens; identical to SEQ ID NO: 853794

SEQ ID NO: 853807 - protein, 505 aa, Homo sapiens; identical to SEQ ID NO: 853797

SEQ ID NO: 853808 - protein, 305 aa, Homo sapiens; identical to SEQ ID NO: 853796

SEQ ID NO: 853809 - protein, 258 aa, Homo sapiens
MSDTWSSIQAHKKQLDSLRERLQRRRKQDSGHLDLRNPEAALSPTFRSDSPVPTAPTSGGPKPSTASAVPELATDPELEKKLLHHLSDLALTLPTDAVSICLAISTPDAPATQDGVESLLQKFAAQELIEVKRGLLQDDAHPTLVTYADHSKLSAMMGAVAEKKGPGEVAGTVTGQKRRAEQDSTTVAAFASSLVSGLNSSASEPAKEPAKKSRKHAASDVDLEIESLLNQQSTKEQQSKKVGPKCKNSVTMEPRRSA

SEQ ID NO: 853810 - protein, 609 aa, Homo sapiens
MSDTWSSIQAHKKQLDSLRERLQRRRKQDSGHLDLRNPEAALSPTFRSDSPVPTAPTSGGPKPSTASAVPELATDPELEKKLLHHLSDLALTLPTDAVSICLAISTVNDLTELGFTTYFQFTVSVLLPIPPLVLKPDAPATQDGVESLLQKFAAQELIEVKRGLLQDDAHPTLVTYADHSKLSAMMGAVAEKKGPGEVAGTVTGQKRRAEQDSTTVAAFASSLVSGLNSSASEPAKEPAKKSRKHAASDVDLEIESLLNQQSTKEQQSKKVSQEILELLNTTTAKEQSIVEKFRSRGRAQVQEFCDYGTKEECMKASDADRPCRKLHFRRIINKHTDESLGDCSFLNTCFHMDTCKYVHYEIDACMDSEAPGSKDHTPSQELALTQSVGGDSSADRLFPPQWICCDIRYLDVSILGKFAVVMADPPWDIHMELPYGTLTDDEMRRLNIPVLQDDGFLFLWVTGRAMELGRECLNLWGYERVDEIIWVKTNQLQRIIRTGRTGHWLNHGKEHCLVGVKGNPQGFNQGLDCDVIVAEVRSTSHKPDEIYGMIERLSPGTRKIELFGRPHNVQPNWITLGNQLDGIHLLDPDVVARFKQRYPDGIISKPKNL

SEQ ID NO: 853811 - protein, 296 aa, Homo sapiens; identical to SEQ ID NO: 853804

SEQ ID NO: 853812 - protein, 103 aa, Homo sapiens
MSDTWSSIQAHKKQLDSLRERLQRRRKQDSGHLAADVRPSASSSRFLLTLGLGSSSSLLPDGRLSPTLVRLAHSSSDCEDVAFVRLLSPLSREAARTPFCCCF

SEQ ID NO: 853813 - protein, 558 aa, Homo sapiens
MAKNRRDRNSWGGFSEKTYEWSSEEEEPVKKAGPVQVLIVKDDHSFELDETALNRILLSEAVRDKEVVAVSVAGAFRKGKSFLMDFMLRYMYNQESVDWVGDYNEPLTGFSWRGGSERETTGIQIWSEIFLINKPDGKKVAVLLMDTQGTFDSQSTLRDSATVFALSTMISSIQVYNLSQNVQEDDLQHLQLFTEYGRLAMEETFLKPFQSLIFLVRDWSFPYEFSYGADGGAKFLEKRLKVSGNQHEELQNVRKHIHSCFTNISCFLLPHPGLKVATNPNFDGKLKEIDDEFIKNLKILIPWLLSPESLDIKEINGNKITCRGLVEYFKAYIKIYQGEELPHPKSMLQATAEANNLAAVATAKDTYNKKMEEICGGDKPFLAPNDLQTKHLQLKEESVKLFRGVKKMGGEEFSRRYLQQLESEIDELYIQYIKHNDSKNIFHAARTPATLFVVIFITYVIAGVTGFIGLDIIASLCNMIMGLTLITLCTWAYIRYSGEYRELGAVIDQVAAALWDQGSTNEALYKLYSAAATHRHLYHQAFPTPKSESTEQSEKKKM

SEQ ID NO: 853814 - protein, 558 aa, Homo sapiens; identical to SEQ ID NO: 853813

SEQ ID NO: 853815 - protein, 286 aa, Homo sapiens
SSSLRSSINFDGKLKEIDDEFIKNLKILIPWLLSPESLDIKEINGNKITCRGLVEYFKAYIKIYQGEELPHPKSMLQATAEANNLAAVATAKDTYNKKMEEICGGDKPFLAPNDLQTKHLQLKEESVKLFRGVKKMGGEEFSRRYLQQLESEIDELYIQYIKHNDSKNIFHAARTPATLFVVIFITYVIAGVTGFIGLDIIASLCNMIMGLTLITLCTWAYIRYSGEYRELGAVIDQVAAALWDQGSTNEALYKLYSAAATHRHLYHQAFPTPKSESTEQSEKKKM

SEQ ID NO: 853816 - protein, 558 aa, Homo sapiens; identical to SEQ ID NO: 853813

SEQ ID NO: 853817 - protein, 295 aa, Homo sapiens [sequence omitted]

SEQ ID NO: 853818 - protein, 175 aa, Homo sapiens
MAKNRRDRNSWGGFSEKTYEWSSEEEEPVKKAGPVQVLIVKDDHSFELDETALNRILLSEAVRDKEVVAVSVAGAFRKGKSFLMDFMLRYMYNQESVDWVGDYNEPLTGFSWRGGSERETTGIQIWSEIFLINKPDGKKVAVLLMDTQGTFDSQSTLRDSATVFALSTMISSIQV

SEQ ID NO: 853819 - protein, 1167 aa, Homo sapiens
MKVNRETKRLYVGGLSQDISEADLQNQFSRFGEVSDVEIITRKDDQGNPQKVFAYINISVAEADLKKCMSVLNKTKWKGGTLQIQLAKESFLHRLAQEREAAKAKKEESTTGNANLLEKTGGVDFHMKAVPGTEVPGHKNWVVSKFGRVLPVLHLKNQHKRKIIKYDPSKYCHNLKKIGEDFSNTIPISSLTWELEGGNDPMSKKRRGEFSDFHGPPKKIIKVQKDESSTGSLAMSTRPRRVIERPPLTQQQAAQKRTCDSITPSKSSPVPVSDTQKLKNLPFKTSGLETAKKRNSISDDDTDSEDELRMMIAKEENLQRTTQPSINESESDPFEVVRDDFKSGVHKLHSLIGLGIKNRVSCHDSDDDIMRNDREYDSGDTDEIIAMKKNVAKVKNSTEFSQMEKSTKKTSFKNRENCELSDHCIKLQKRKSNVESALSHGLKSLNRKSPSHSSSSEDADSASELADSEGGEEYNAMMKNCLRVNLTLADLEQLAGSDLKVPNEDTKSDGPETTTQCKFDRGSKSPKTPTGLRRGRQCIRPAEIVASLLEGEENTCGKQKPKENNLKPKFQAFKGVGCLYEKESMKKSLKDSVASNNKDQNSMKHEDPSIISMEDGSPYVNGSLGEVTPCQHAKKANGPNYIQPQKRQTTFESQDRKAVSPSSSEKRSKNPISRPLEGKKSLSLSAKTHNIGFDKDSCHSTTKTEASQEERSDSSGLTSLKKSPKVSSKDTREIKTDFSLSISNSSDVSAKDKHAEDNEKRLAALEARQKAKEVQKKLVHNALANLDGHPEDKPTHIIFGSDSECETEETSTQEQSHPGEEWVKESMGKTSGKLFDSSDDDESDSEDDSNRFKIKPQFEGRAGQKLMDLQSHFGTDDRFRMDSRFLETDSEEEQEEVNEKKTAEEEELAEEKKKALNVVQSVLQINLSNSTNRGSVAAKKFKDIIHYDPTKQDHATYERKRDDKPKESKAKRKKKREEAEKLPEVSKEMYYNIAMDLKEIFQTTKYTSEKEEGTPWNEDCGKEKPEEIQDPAALTSDAEQPSGFTFSFFDSDTKDIKEETYRVETVKPGKIVWQEDPRLQDSSSEEEDVTEETDHRNSSPGEASLLEKETTRFFFFSKNDERLQGSDLFWRGVGSNMSRNSWEARTTNLRMDCRKKHKDAKRKMKPK

SEQ ID NO: 853820 - protein, 1167 aa, Homo sapiens; identical to SEQ ID NO: 853819

SEQ ID NO: 853821 - protein, 1135 aa, Homo sapiens
MKVNRETKRLYVGGLSQDISEADLQNQFSRFGEVSDVEIITRKDDQGNPQKVFAYINISVAEADLKKCMSVLNKTKWKGGTLQIQLAKESFLHRLAQEREAAKAKKEESTTGNANLLEKTGGVDFHMKAVPGTEVPGHKNWVVSKFGRVLPVLHLKNQHKRKIIKYDPSKYCHNLKKIGEDFSNTIPISSLTWELEGGNDPMSKKRRGEFSDFHGPPKKIIKVQKDESSTGSLAMSTRPRRVIERPPLTQQQAAQKRTCDSITPSKSSPVPVSDTQKLKNLPFKTSGLETAKKRNSISDDDTDSEDELRMMIAKEENLQRTTQPSINESESDPFEVVRDDFKSGVHKLHSLIGLGIKNRVSCHDSDDDIMRNDREYDSGDTDEIIAMKKNVAKVKNSTEFSQMEKSTKKTSFKNRENCELSDHCIKLQKRKSNVESALSHGLKSLNRKSPSHSSSSEDADSASELADSEGGEEYNAMMKNCLRVNLTLADLEQLAGSDLKVPNEDTKSDGPETTTQCKFDRGSKSPKTPTGLRRGRQCIRPAEIVASLLEGEENTCGKQKPKENNLKPKFQAFKGVGCLYEKESMKKSLKDSVASNNKDQNSMKHEDPSIISMEDGSPYVNGSLGEVTPCQHAKKANGPNYIQPQKRQTTFESQDRKAVSPSSSEKRSKNPISRPLEGKKSLSLSAKTHNIGFDKDSCHSTTKTEASQEERSDSSGLTSLKKSPKVSSKDTREIKTDFSLSISNSSDVSAKDKHAEDNEKRLAALEARQKAKEVQKKLVHNALANLDGHPEDKPTHIIFGSDSECETEETSTQEQSHPGEEWVKESMGKTSGKLFDSSDDDESDSEDDSNRFKIKPQFEGRAGQKLMDLQSHFGTDDRFRMDSRFLETDSEEEQEEVNEKKTAEEEELAEEKKKALNVVQSVLQINLSNSTNRGSVAAKKFKDIIHYDPTKQDHATYERKRDDKPKESKAKRKKKREEAEKLPEVSKEMYYNIAMDLKEIFQTTKYTSEKEEGTPWNEDCGKEKPEEIQDPAALTSDAEQPSGFTFSFFDSDTKDIKEETYRVETVKPGKIVWQEDPRLQDSSSEEEDVTEETDHRNSSPGEASLLEKETTRFFFFSKNDERLQGQSIFFIKLHT

SEQ ID NO: 853822 - protein, 1037 aa, Homo sapiens
MKVNRETKRLYVGGLSQDISEADLQNQFSRFGEVSDVEIITRKDDQGNPQKVFAYINISVAEADLKKCMSVLNKTKWKGGTLQIQLAKESFLHRLAQEREAAKAKKEESTTGNANLLEKTGGVDFHMKAVPGTEVPGHKNWVVSKFGRVLPVLHLKNQHKRKIIKYDPSKYCHNLKKIGEDFSNTIPISSLTWELEGGNDPMSKKRRGEFSDFHGPPKKIIKVQKDESSTGSLAMSTRPRRVIERPPLTQQQAAQKRTCDSITPSKSSPVPVSDTQKLKNLPFKTSGLETAKKRNSISDDDTDSEDELRMMIAKEENLQRTTQPSINESESDPFEVVRDDFKSGVHKLHSLIGLGIKNRVSCHDSDDDIMRNDREYDSGDTDEIIAMKKNVAKVKNSTEFSQMEKSTKKTSFKNRENCELSDHCIKLQKRKSNVESALSHGLKSLNRKSPSHSSSSEDADSASELADSEGGEEYNAMMKNCLRVNLTLADLEQLAGSDLKVPNEDTKSDGPETTTQCKFDRGSKSPKTPTGLRRGRQCIRPAEIVASLLEGEENTCGKQKPKENNLKPKFQAFKGVGCLYEKESMKKSLKDSVASNNKDQNSMKHEDPSIISMEDGSPYVNGSLGEVTPCQHAKKANGPNYIQPQKRQTTFESQDRKAVSPSSSEKRSKNPISRPLEGKKSLSLSAKTHNIGFDKDSCHSTTKTEASQEERSDSSGLTSLKKSPKVSSKDTREIKTDFSLSISNSSDVSAKDKHAEDNEKRLAALEARQKAKEVQKKLVHNALANLDGHPEDKPTHIIFGSDSECETEETSTQEQSHPGEEWVKESMGKTSGKLFDSSDDDESDSEDDSNRFKIKPQFEGRAGQKLMDLQSHFGTDDRFRMDSRFLETDSEEEQEEVNEKKTAEEEELAEEKKKALNVVQSVLQINLSNSTNRGSVAAKKFKDIIHYDPTKQDHATYERKRDDKPKESKAKRKKKREEAEKLPEVSKEMYYNIAMDLKEIFQTTKYTSEKEEGTPWNEDCGKEKPEEIQDPAALPSN

SEQ ID NO: 853823 - protein, 855 aa, Homo sapiens
MKVNRETKRLYVGGLSQDISEADLQNQFSRFGEVSDVEIITRKDDQGNPQKVFAYINISVAEADLKKCMSVLNKTKWKGGTLQIQLAKESFLHRLAQEREAAKAKKEESTTGNANLLEKTGGVDFHMKAVPGTEVPGHKNWVVSKFGRVLPVLHLKNQHKRKIIKYDPSKYCHNLKKIGEDFSNTIPISSLTWELEGGNDPMSKKRRGEFSDFHGPPKKIIKVQKDESSTGSLAMSTRPRRVIERPPLTQQQAAQKRTCDSITPSKSSPVPVSDTQKLKNLPFKTSGLETAKKRNSISDDDTDSEDELRMMIAKEENLQRTTQPSINESESDPFEVVRDDFKSGVHKLHSLIGLGIKNRVSCHDSDDDIMRNDREYDSGDTDEIIAMKKNVAKVKNSTEFSQMEKSTKKTSFKNRENCELSDHCIKLQKRKSNVESALSHGLKSLNRKSPSHSSSSEDADSASELADSEGGEEYNAMMKNCLRVNLTLADLEQLAGSDLKVPNEDTKSDGPETTTQCKFDRGSKSPKTPTGLRRGRQCIRPAEIVASLLEGEENTCGKQKPKENNLKPKFQAFKGVGCLYEKESMKKSLKDSVASNNKDQNSMKHEDPSIISMEDGSPYVNGSLGEVTPCQHAKKANGPNYIQPQKRQTTFESQDRKAVSPSSSEKRSKNPISRPLEGKKSLSLSAKTHNIGFDKDSCHSTTKTEASQEERSDSSGLTSLKKSPKVSSKDTREIKTDFSLSISNSSDVSAKDKHAEDNEKRLAALEARQKAKEVQKKLVHNALANLDGHPEDKPTHIIFGSDSECETEETSTQEQSHPGEEWVKSLWVKHQGSQQGQSSRRGSAETNLTRIDRST

SEQ ID NO: 853824 - protein, 382 aa, Homo sapiens
LTNKVSGTVDTINEVWMHECETEETSTQEQSHPGEEWVKESMGKTSGKLFDSSDDDESDSEDDSNRFKIKPQFEGRAGQKLMDLQSHFGTDDRFRMDSRFLETDSEEEQEEVNEKKTAEEEELAEEKKKALNVVQSVLQINLSNSTNRGSVAAKKFKDIIHYDPTKQDHATYERKRDDKPKESKAKRKKKREEAEKLPEVSKEMYYNIAMDLKEIFQTTKYTSEKEEGTPWNEDCGKEKPEEIQDPAALTSDAEQPSGFTFSFFDSDTKDIKEETYRVETVKPGKIVWQEDPRLQDSSSEEEDVTEETDHRNSSPGEASLLEKETTRFFFFSKNDERLQGSDLFWRGVGSNMSRNSWEARTTNLRMDCRKKHKDAKRKMKPK

SEQ ID NO: 853825 - protein, 287 aa, Homo sapiens
KHKNEQNLETNLHLEEVNEKKTAEEEELAEEKKKALNVVQSVLQINLSNSTNRGSVAAKKFKDIIHYDPTKQDHATYERKRDDKPKESKAKRKKKREEAEKLPEVSKEMYYNIAMDLKEIFQTTKYTSEKEEGTPWNEDCGKEKPEEIQDPAALTSDAEQPSGFTFSFFDSDTKDIKEETYRVETVKPGKIVWQEDPRLQDSSSEEEDVTEETDHRNSSPGEASLLEKETTRFFFFSKNDERLQGSDLFWRGVGSNMSRNSWEARTTNLRMDCRKKHKDAKRKMKPK

SEQ ID NO: 853826 - protein, 1167 aa, Homo sapiens; identical to SEQ ID NO: 853819

SEQ ID NO: 853827 - protein, 1167 aa, Homo sapiens; identical to SEQ ID NO: 853819

SEQ ID NO: 853828 - protein, 1129 aa, Homo sapiens
MKVNRETKRLYVGGLSQDISEADLQNQFSRFGEVSDVEIITRKDDQGNPQKVFAYINISVAEADLKKCMSVLNKTKWKGGTLQIQLAKESFLHRLAQEREAAKAKKEESTTGNANLLEKTGGVDFHMKAVPGTEVPGHKNWVVSKFGRVLPVLHLKNQHKRKIIKYDPSKYCHNLKKIGEDFSNTIPISSLTWELEGGNDPMSKKRRGEFSDFHGPPKKIIKVQKDESSTGSLAMSTRPRRVIERPPLTQQQAAQKRTCDSITPSKSSPVPVSDTQKLKNLPFKTSGLETAKKRNSISDDDTDSEDELRMMIAKEENLQRTTQPSINESESDPFEVVRDDFKSGVHKLHSLIGLGIKNRVSCHDSDDDIMRNDREYDSGDTDEIIAMKKNVAKVKNSTEFSQMEKSTKKTSFKNRENCELSDHCIKLQKRKSNVESALSHGLKSLNRKSPSHSSSSEDADSASELADSEGGEEYNAMMKNCLRVNLTLADLEQLAGSDLKVPNEDTKSDGPETTTQCKFDRGSKSPKTPTGLRRGRQCIRPAEIVASLLEGEENTCGKQKPKENNLKPKFQAFKGVGCLYEKESMKKSLKDSVASNNKDQNSMKHEDPSIISMEDGSPYVNGSLGEVTPCQHAKKANGPNYIQPQKRQTTFESQDRKAVSPSSSEKRSKNPISRPLEGKKSLSLSAKTHNIGFDKDSCHSTTKTEASQEERSDSSGLTSLKKSPKVSSKDTREIKTDFSLSISNSSDVSAKDKHAEDNEKRLAALEARQKAKEVQKKLVHNALANLESMGKTSGKLFDSSDDDESDSEDDSNRFKIKPQFEGRAGQKLMDLQSHFGTDDRFRMDSRFLETDSEEEQEEVNEKKTAEEEELAEEKKKALNVVQSVLQINLSNSTNRGSVAAKKFKDIIHYDPTKQDHATYERKRDDKPKESKAKRKKKREEAEKLPEVSKEMYYNIAMDLKEIFQTTKYTSEKEEGTPWNEDCGKEKPEEIQDPAALTSDAEQPSGFTFSFFDSDTKDIKEETYRVETVKPGKIVWQEDPRLQDSSSEEEDVTEETDHRNSSPGEASLLEKETTRFFFFSKNDERLQGSDLFWRGVGSNMSRNSWEARTTNLRMDCRKKHKDAKRKMKPK

SEQ ID NO: 853829 - protein, 805 aa, Homo sapiens
MKVNRETKRLYVGGLSQDISEADLQNQFSRFGEVSDVEIITRKDDQGNPQKVFAYINISVAEADLKKCMSVLNKTKWKGGTLQIQLAKESFLHRLAQEREAAKAKKEESTTGNANLLEKTGGVDFHMKAVPGTEVPGHKNWVVSKFGRVLPVLHLKNQHKRKIIKYDPSKYCHNLKKIGEDFSNTIPISSLTWELEGGNDPMSKKRRGEFSDFHGPPKKIIKVQKDESSTGSLAMSTRPRRVIERPPLTQQQAAQKRTCDSITPSKSSPVPVSDTQKLKNLPFKTSGLETAKKRNSISDDDTDSEDELRMMIAKEENLQRTTQPSINESESDPFEVVRDDFKSGVHKLHSLIGLGIKNRVSCHDSDDDIMRNDREYDSGDTDEIIAMKKNVAKVKNSTEFSQMEKSTKKTSFKNRENCELSDHCIKLQKRKSNVESALSHGLKSLNRKSPSHSSSSEDADSASELADSEGGEEYNAMMKNCLRVNLTLADLEQLAGSDLKVPNEDTKSDGPETTTQCKFDRGSKSPKTPTGLRRGRQCIRPAEIVASLLEGEENTCGKQKPKENNLKPKFQAFKGVGCLYEKESMKKSLKDSVASNNKDQNSMKHEDPSIISMEDGSPYVNGSLGEVTPCQHAKKANGPNYIQPQKRQTTFESQDRKAVSPSSSEKRSKNPISRPLEGKKSLSLSAKTHNIGFDKDSCHSTTKTEASQEERSDSSGLTSLKKSPKVSSKDTREIKTDFSLSISNSSDVSAKDKHAEDNEKRLAALEARQKAKEVQKKLVHNALANLMVTQRITHNIMLRFTRSAP

SEQ ID NO: 853830 - protein, 341 aa, Homo sapiens
MGKTSGKLFDSSDDDESDSEDDSNRFKIKPQFEGRAGQKLMDLQSHFGTDDRFRMDSRFLETDSEEEQEEVNEKKTAEEEELAEEKKKALNVVQSVLQINLSNSTNRGSVAAKKFKDIIHYDPTKQDHATYERKRDDKPKESKAKRKKKREEAEKLPEVSKEMYYNIAMDLKEIFQTTKYTSEKEEGTPWNEDCGKEKPEEIQDPAALTSDAEQPSGFTFSFFDSDTKDIKEETYRVETVKPGKIVWQEDPRLQDSSSEEEDVTEETDHRNSSPGEASLLEKETTRFFFFSKNDERLQGSDLFWRGVGSNMSRNSWEARTTNLRMDCRKKHKDAKRKMKPK

SEQ ID NO: 853831 - protein, 339 aa, Homo sapiens
TNTVEKIMQPKKESSMTHAVTWMNLENIYAERSQTQKLMDLQSHFGTDDRFRMDSRFLETDSEEEQEEVNEKKTAEEEELAEEKKKALNVVQSVLQINLSNSTNRGSVAAKKFKDIIHYDPTKQDHATYERKRDDKPKESKAKRKKKREEAEKLPEVSKEMYYNIAMDLKEIFQTTKYTSEKEEGTPWNEDCGKEKPEEIQDPAALTSDAEQPSGFTFSFFDSDTKDIKEETYRVETVKPGKIVWQEDPRLQDSSSEEEDVTEETDHRNSSPGEASLLEKETTRFFFFSKNDERLQGSDLFWRGVGSNMSRNSWEARTTNLRMDCRKKHKDAKRKMKPK

SEQ ID NO: 853832 - protein, 201 aa, Homo sapiens
MAAAKDTHEDHDTSTENTDESNHDPQFEPIVSLPEQEIKTLEEDEEELFKMRAKLFRFASENDLPEWKERGTGDVKLLKHKEKGAIRLLMRRDKTLKICANHYITPMMELKPNAGSDRAWVWNTHADFADECPKPELLAIRFLNAENAQKFKTKFEECRKEIEEREKKAGSGKNDHAEKVAEKLEALSVKEETKEDAEEKQ

SEQ ID NO: 853833 - protein, 201 aa, Homo sapiens; identical to SEQ ID NO: 853832

SEQ ID NO: 853834 - protein, 201 aa, Homo sapiens; identical to SEQ ID NO: 853832

SEQ ID NO: 853835 - protein, 201 aa, Homo sapiens; identical to SEQ ID NO: 853832

SEQ ID NO: 853836 - protein, 151 aa, Homo sapiens
MRAKLFRFASENDLPEWKERGTGDVKLLKHKEKGAIRLLMRRDKTLKICANHYITPMMELKPNAGSDRAWVWNTHADFADECPKPELLAIRFLNAENAQKFKTKFEECRKEIEEREKKAGSGKNDHAEKVAEKLEALSVKEETKEDAEEKQ

SEQ ID NO: 853837 - protein, 209 aa, Homo sapiens
MAAAKDTHEDHDTSTENTDESNHDPQFEPIVSLPEQEIKTLEEDEEELFKMRAKLFRFASENDLPEWKERGTGDVKLLKHKEKGAIRLLMRRDKTLKICANHYITPMMELKPNAGSDRAWVWNTHADFADECPKPELLAIRFLNAENAQKFKTKFEECRKEIEEREKKAGSGKNDHAEKVAEKLEALSVKEETKGECGAIWCRAGEAYW

SEQ ID NO: 853838 - protein, 313 aa, Homo sapiens
SAGPRWRGVGARGVWGLEACGVGAFGGAGSAEAWGLQGPRVTLGWVGERPSPRGTAPASRNWCGRRVSSGSAHLGLPTSTVHLFFPSPTQHFIHSVLTSGTATGLCGRSSRSSVGQQDTHEDHDTSTENTDESNHDPQFEPIVSLPEQEIKTLEEDEEELFKMRAKLFRFASENDLPEWKERGTGDVKLLKHKEKGAIRLLMRRDKTLKICANHYITPMMELKPNAGSDRAWVWNTHADFADECPKPELLAIRFLNAENAQKFKTKFEECRKEIEEREKKAGSGKNDHAEKVAEKLEALSVKEETKEDAEEKQ

SEQ ID NO: 853839 - protein, 155 aa, Homo sapiens
MVEGERAKLFRFASENDLPEWKERGTGDVKLLKHKEKGAIRLLMRRDKTLKICANHYITPMMELKPNAGSDRAWVWNTHADFADECPKPELLAIRFLNAENAQKFKTKFEECRKEIEEREKKAGSGKNDHAEKVAEKLEALSVKEETKEDAEEKQ

SEQ ID NO: 853840 - protein, 163 aa, Homo sapiens
MAAAKDTHEDHDTSTENTDESNHDPQFEPIVSLPEQEIKTLEEDEEELFKMRAKLFRFASENDLPEWKERGTGDVKLLKHKEKGAIRLLMRRDKTLKICANHYITPMMELKPNAGSDRAWVWNTHADFADECPKPELLAIRFLNAENAQKFKTKFEECRKGGC

SEQ ID NO: 853841 - protein, 344 aa, Homo sapiens
SAGPRWRGVGARGVWGLEACGVGAFGGAGSAEAWGLQGPRVTLGWVGERPSPRGTAQPPGTGAGGGFPPARPTWGSPLDTHEDHDTSTENTDESNHDPQFEPIVSLPEQEIKTLEEDEEELFKMRAKLFRFASENDLPEWKERGTGDVKLLKHKEKGAIRLLMRRDKTLKICANHYITPMMELKPNAGSDRAWVWNTHADFADECPKPELLAIRFLNAENAQKFKTKFEECRKEIEEREKKGDVVPWVGGLLCRLTLHLTILPGGCFFCLPDKHSRVLWPPHVSRVMQLPGDTGASWGALSTCQCCWPQSNWAGIGVRALPGAHQKVLYDGPRFVSQRAWSPLP

SEQ ID NO: 853842 - protein, 240 aa, Homo sapiens
MAAAKDTHEDHDTSTENTDESNHDPQFEPIVSLPEQEIKTLEEDEEELFKMRAKLFRFASENDLPEWKERGTGDVKLLKHKEKGAIRLLMRRDKTLKICANHYNVPLNSEQARSELRAHGGVESARRALMGGRSAQAGLGTRITPMMELKPNAGSDRAWVWNTHADFADECPKPELLAIRFLNAENAQKFKTKFEECRKEIEEREKKAGSGKNDHAEKVAEKLEALSVKEETKEDAEEKQ

SEQ ID NO: 853843 - protein, 67 aa, Homo sapiens
MPLLPCSQLHEGHPILLLCPLAWRPHCPFLPLASEDPGSPLVEQGVLSFCSIDFFGIVKLINPPPGV

SEQ ID NO: 853844 - protein, 118 aa, Homo sapiens
SAGPRWRGVGARGVWGLEACGVGAFGGAGSAEAWGLQGPRVTLGWVGERPSPRGTAPASRNWCGRRVSSGSAHLGLPTSTVHLFFPSPTQHFIHSVLTSGTATGLCGRSSRSSVGHRS

SEQ ID NO: 853845 - protein, 278 aa, Homo sapiens
MGSALGRARRTLSGRPFQRAPCKTRRALSLSAALRNVTKAQGGCPKSLVLWGCRPKRPRKRRTSLKLAWRGTFCSSSLKISEDTHEDHDTSTENTDESNHDPQFEPIVSLPEQEIKTLEEDEEELFKMRAKLFRFASENDLPEWKERGTGDVKLLKHKEKGAIRLLMRRDKTLKICANHYITPMMELKPNAGSDRAWVWNTHADFADECPKPELLAIRFLNAENAQKFKTKFEECRKEIEEREKKAGSGKNDHAEKVAEKLEALSVKEETKEDAEEKQ

SEQ ID NO: 853846 - protein, 201 aa, Homo sapiens; identical to SEQ ID NO: 853832

SEQ ID NO: 853847 - protein, 201 aa, Homo sapiens; identical to SEQ ID NO: 853832

SEQ ID NO: 853848 - protein, 313 aa, Homo sapiens; identical to SEQ ID NO: 853838

SEQ ID NO: 853849 - protein, 271 aa, Homo sapiens
MAAAKDTHEDHDTSTENTDESNHDPQFEPIVSLPEQEIKTLEEDEEELFKMRAKLFRFASENDLPEWKERGTGDVKLLKHKEKGAIRLLMRRDKTLKICANHYITPMMELKPNAGSDRAWVWNTHADFADECPKPELLAIRFLNAENAQKFKTKFEECRKEIEEREKKGDVVPWVGGLLCRLTLHLTILPGGCFFCLPDKHSRVLWPPHVSRVMQLPGDTGASWGALSTCQCCWPQSNWAGIGVRALPGAHQKVLYDGPRFVSQRAWSPLP

SEQ ID NO: 853850 - protein, 271 aa, Homo sapiens; identical to SEQ ID NO: 853849

SEQ ID NO: 853851 - protein, 112 aa, Homo sapiens
MRRDKTLKICANHYITPMMELKPNAGSDRAWVWNTHADFADECPKPELLAIRFLNAENAQKFKTKFEECRKEIEEREKKAGSGKNDHAEKVAEKLEALSVKEETKEDAEEKQ

SEQ ID NO: 853852 - protein, 240 aa, Homo sapiens; identical to SEQ ID NO: 853842

SEQ ID NO: 853853 - protein, 240 aa, Homo sapiens; identical to SEQ ID NO: 853842

SEQ ID NO: 853854 - protein, 42 aa, Homo sapiens
MGMDDKSKVDTLREEESAGGEPWDVSAFAAHATTDEPVRDKG

SEQ ID NO: 853855 - protein, 179 aa, Homo sapiens
MTPSEGARAGTGRELEMLDSLLALGGLVLLRDSVEWEGRSLLKALVKKSALCGEQVHILGCEVSEEEFREGFDSDINNRLVYHDFFRDPLNWSKTEEAFPGGPLGALRAMCKRTDPVPVTIALDSLSWLLLRLPCTTLCQVLHAVSHQDSCPGETPPSLFPLIHLPLPRSVPLFLSTLE

SEQ ID NO: 853856 - protein, 279 aa, Homo sapiens
MTPSEGARAGTGRELEMLDSLLALGGLVLLRDSVEWEGRSLLKALVKKSALCGEQVHILGCEVSEEEFREGFDSDINNRLVYHDFFRDPLNWSKTEEAFPGGPLGALRAMCKRTDPVPVTIALDSLSWLLLRLPCTTLCQVLHAVSHQDSCPGDSSSVGKVSVLGLLHEELHGPGPVGALSSLAQTEVTLGGTMGQASAHILCRRPRQRPTDQTQWFSILPDFSLDLQEGPSVESQPYSDPHIPPVSKNAKARTRKCSLVSGHGRENKSCRGWGWGQGF

SEQ ID NO: 853857 - protein, 279 aa, Homo sapiens; identical to SEQ ID NO: 853856

SEQ ID NO: 853858 - protein, 316 aa, Homo sapiens
MTPSEGARAGTGRELEMLDSLLALGGLVLLRDSVEWEGRSLLKALVKKSALCGEQVHILGCEVSEEEFREGFDSDINNRLVYHDFFRDPLNWSKTEEAFPGGPLGALRAMCKRTDPVPVTIALDSLSWLLLRLPCTTLCQVLHAVSHQDSCPGDSSSVGKVSVLGLLHEELHGPGPVGALSSLAQTEVTLGGTMGQASAHILCRRPRQRPTDQTQWFSILPDFSLDLQEGPSVESQPYSDPHIPPVDPTTHLTFNLHLSKKEREARDSLILPFQFSSEKQQALLRPRPGQATSHIFYEPDAYDDLDQEDPDDDLDI

SEQ ID NO: 853859 - protein, 279 aa, Homo sapiens; identical to SEQ ID NO: 853856

SEQ ID NO: 853860 - protein, 252 aa, Homo sapiens
MTPSEGARAGTGRELEMLDSLLALGGLVLLRDSVEWEGRSLLKALVKKSALCGEQVHILGCEVSEEEFREGFDSDINNRLVYHDFFRDPLNWSKTEEAFPGGPLGALRAMCKRTDPVPVTIALDSLSWLLLRLPCTTLCQVLHAVSHQDSCPGDSSSVGKVSVLGLLHEELHGPGPVGALSSLAQTEVTLGGTMGQASAHILCRRPRQRPTDQTQWFSILPDFSLDLQEGPSVESQPYSDPHIPPTAGSPAA

SEQ ID NO: 853861 - protein, 319 aa, Homo sapiens
RKGQGSQARCGNRDGFAKAVIPALSYPLSVPRSADSVEWEGRSLLKALVKKSALCGEQVHILGCEVSEEEFREGFDSDINNRLVYHDFFRDPLNWSKTEEAFPGGPLGALRAMCKRTDPVPVTIALDSLSWLLLRLPCTTLCQVLHAVSHQDSCPGDSSSVGKVSVLGLLHEELHGPGPVGALSSLAQTEVTLGGTMGQASAHILCRRPRQRPTDQTQWFSILPDFSLDLQEGPSVESQPYSDPHIPPVDPTTHLTFNLHLSKKEREARDSLILPFQFSSEKQQALLRPRPGQATSHIFYEPDAYDDLDQEDPDDDLDI

SEQ ID NO: 853862 - protein, 291 aa, Homo sapiens
NYRLGSDSVEWEGRSLLKALVKKSALCGEQVHILGCEVSEEEFREGFDSDINNRLVYHDFFRDPLNWSKTEEAFPGGPLGALRAMCKRTDPVPVTIALDSLSWLLLRLPCTTLCQVLHAVSHQDSCPGDSSSVGKVSVLGLLHEELHGPGPVGALSSLAQTEVTLGGTMGQASAHILCRRPRQRPTDQTQWFSILPDFSLDLQEGPSVESQPYSDPHIPPVDPTTHLTFNLHLSKKEREARDSLILPFQFSSEKQQALLRPRPGQATSHIFYEPDAYDDLDQEDPDDDLDI

SEQ ID NO: 853863 - protein, 257 aa, Homo sapiens
MLSAKMLLSELFPILALSSSLVYHDFFRDPLNWSKTEEAFPGGPLGALRAMCKRTDPVPVTIALDSLSWLLLRLPCTTLCQVLHAVSHQDSCPGDSSSVGKVSVLGLLHEELHGPGPVGALSSLAQTEVTLGGTMGQASAHILCRRPRQRPTDQTQWFSILPDFSLDLQEGPSVESQPYSDPHIPPVDPTTHLTFNLHLSKKEREARDSLILPFQFSSEKQQALLRPRPGQATSHIFYEPDAYDDLDQEDPDDDLDI

SEQ ID NO: 853864 - protein, 279 aa, Homo sapiens
LGCDLVTGRDSVEWEGRSLLKALVKKSALCGEQVHILGCEVSEEEFREGFDSDINNRLVYHDFFRDPLNWSKTEEAFPGGPLGALRAMCKRTDPVPVTIALDSLSWLLLRLPCTTRDSSSVGKVSVLGLLHEELHGPGPVGALSSLAQTEVTLGGTMGQASAHILCRRPRQRPTDQTQWFSILPDFSLDLQEGPSVESQPYSDPHIPPVDPTTHLTFNLHLSKKEREARDSLILPFQFSSEKQQALLRPRPGQATSHIFYEPDAYDDLDQEDPDDDLDI

SEQ ID NO: 853865 - protein, 264 aa, Homo sapiens
MTPSEGARAGTGRELEMLDSLLALGGLVLLRDSVEWEGRSLLKALVKKSALCGEQVHILGCEVSEEEFREGFDSDINNRLVYHDFFRDPLNWSKTEEAFPGGPLGALRAMCKRTDPVPVTIALDSLSWLLLRLPCTTRDSSSVGKVSVLGLLHEELHGPGPVGALSSLAQTEVTLGGTMGQASAHILCRRPRQRPTDQTQWFSILPDFSLDLQEGPSVESQPYSDPHIPPVSKNAKARTRKCSLVSGHGRENKSCRGWGWGQGF

SEQ ID NO: 853866 - protein, 146 aa, Homo sapiens
MTPSEGARAGTGRELEMLDSLLALGGLVLLRDSVEWEGRSLLKALVKKSALCGEQVHILGCEVSEEEFREGFDSDINNRLVYHDFFRDPLNWSKTEEAFPGGPLGALRAMCKRTDPVPVTIALDSLSWLLLRLPCTTRKREKPEIA

SEQ ID NO: 853867 - protein, 316 aa, Homo sapiens; identical to SEQ ID NO: 853858

SEQ ID NO: 853868 - protein, 316 aa, Homo sapiens; identical to SEQ ID NO: 853858

SEQ ID NO: 853869 - protein, 279 aa, Homo sapiens; identical to SEQ ID NO: 853856

SEQ ID NO: 853870 - protein, 294 aa, Homo sapiens
MTPSEGARAGTGRELEMLDSLLALGGLVLLRDSVEWEGRSLLKALVKKSALCGEQVHILGCEVSEEEFREGFDSDINNRLVYHDFFRDPLNWSKTEEAFPGGPLGALRAMCKRTDPVPVTIALDSLSWLLLRLPCTTLCQVLHAVSHQDSCPGDSSSVGKVSVLGLLHEELHGPGPVGALSSLAQTEVTLGGTMGQASAHILCRRPRQRPTDQTQWFSILPDFSLDLQEGPSVESQPYSDPHIPPVDPTTHLTFNLHLSKKEREARDSLILPFQFSSEKGGLWASRADAFLAVE

SEQ ID NO: 853871 - protein, 316 aa, Homo sapiens; identical to SEQ ID NO: 853858

SEQ ID NO: 853872 - protein, 299 aa, Homo sapiens
MTPSEGARAGTGRELEMLDSLLALGGLVLLRDSVEWEGRSLLKALVKKSALCGEQVHILGCEVSEEEFREGFDSDINNRLVYHDFFRDPLNWSKTEEAFPGGPLGALRAMCKRTDPVPVTIALDSLSWLLLRLPCTTLCQVLHAVSHQDSCPGDSSSVGKVSVLGLLHEELHGPGPVGALSSLAQTEVTLGGTMGQASAHILCRRPRQRPTDQTQWFSILPDFSLDLQEGPSVESQPYSDPHIPPVDPTTHLTFNLHLSNIFLLFVLALPCPCPTLVPLVYGAPPCEPGSSVSSGQKVG

SEQ ID NO: 853873 - protein, 267 aa, Homo sapiens
MTPSEGARAGTGRELEMLDSLLALGGLVLLRDSVEWEGRSLLKALVKKSALCGEQVHILGCEVSEEEFREGFDSDINNRLVYHDFFRDPLNWSKTEEAFPGGPLGALRAMCKRTDPVPVTIALDSLSWLLLRLPCTTLCQVLHAVSHQDSCPGDSSSVGKVSVLGLLHEELHGPGPVGALSSLAQTEVTLGGTMGQASAHITQWFSILPDFSLDLQEGPSVESQPYSDPHIPPVSKNAKARTRKCSLVSGHGRENKSCRGWGWGQGF

SEQ ID NO: 853874 - protein, 123 aa, Homo sapiens
MGQASAHILCRRPRQRPTDQTQWFSILPDFSLDLQEGPSVESQPYSDPHIPPVDPTTHLTFNLHLSKKEREARDSLILPFQFSSEKQQALLRPRPGQATSHIFYEPDAYDDLDQEDPDDDLDI

SEQ ID NO: 853875 - protein, 179 aa, Homo sapiens; identical to SEQ ID NO: 853855

SEQ ID NO: 853876 - protein, 172 aa, Homo sapiens
MTSSETLSTGRTDPVPVTIALDSLSWLLLRLPCTTLCQVLHAVSHQDSCPGDSSSVGKVSVLGLLHEELHGPGPVGALSSLAQTEVTLGGTMGQASAHILCRRPRQRPTDQTQWFSILPDFSLDLQEGPSVESQPYSDPHIPPTAGFLRLCRAATSTSFMSNAMMTGPKRPN

SEQ ID NO: 853877 - protein, 1000 aa, Homo sapiens
PASQPSPRRLGSLALPGVLSARSPLASPRCSVPCPARPGADTTAIMPAVSKGDGMRGLAVFISDIRNCKSKEAEIKRINKELANIRSKFKGDKALDGYSKKKYVCKLLFIFLLGHDIDFGHMEAVNLLSSNKYTEKQIGYLFISVLVNSNSELIRLINNAIKNDLASRNPTFMCLALHCIANVGSREMGEAFAADIPRILVAGDSMDSVKQSAALCLLRLYKASPDLVPMGEWTARVVHLLNDQHMGVVTAAVSLITCLCKKNPDDFKTCVSLAVSRLSRIVSSASTDLQDYTYYFVPAPWLSVKLLRLLQCYPPPEDAAVKGRLVECLETVLNKAQEPPKSKKVQHSNAKNAILFETISLIIHYDSEPNLLVRACNQLGQFLQHRETNLRYLALESMCTLASSEFSHEAVKTHIDTVINALKTERDVSVRQRAADLLYAMCDRSNAKQIVSEMLRYLETADYAIREEIVLKVAILAEKYAVDYSWYVDTILNLIRIAGDYVSEEVWYRVLQIVTNRDDVQGYAAKTVFEALQAPACHENMVKVGGYILGEFGNLIAGDPRSSPPVQFSLLHSKFHLCSVATRALLLSTYIKFINLFPETKATIQGVLRAGSQLRNADVELQQRAVEYLTLSSVASTDVLATVLEEMPPFPERESSILAKLKRKKGPGAGSALDDGRRDPSSNDINGGMEPTPSTVSTPSPSADLLGLRAAPPPAAPPASAGAGNLLVDVFDGPAAQPSLGPTPEEAFLSPGPEDIGPPIPEADELLNKFVCKNNGVLFENQLLQIGVKSEFRQNLGRMYLFYGNKTSVQFQNFSPTVVHPGDLQTQLAVQTKRVAAQVDGGAQVQQVLNIECLRDFLTPPLLSVRFRYGGAPQALTLKLPVTINKFFQPTEMAAQDFFQRWKQLSLPQQEAQKIFKANHPMDAEVTKAKLLGFGSALLDNVDPNPENFVGAGIIQTKALQVGCLLRLEPNAQAQMYRLTLRTSKEPVSRHLCELLAQQF

SEQ ID NO: 853878 - protein, 91 aa, Homo sapiens
GGCFTDLSERAWDLDEVVIVEVRAKRRKLRESTRNWPTSAPSSKRDKSLWMRYEKKQIVCVNWLFILPCLAYDYGLVGTVEGCEFVSSFQL

SEQ ID NO: 853879 - protein, 1022 aa, Homo sapiens
PASQPSPRRLGSLALPGVLSARSPLASPRCSVPCPARPGADTTAIMPAVSKGDGMRGLAVFISDIRNCKSKEAEIKRINKELANIRSKFKGDKALDGYSKKKYVCKLLFIFLLGHDIDFGHMEAVNLLSSNKYTEKQIGYLFISVLVNSNSELIRLINNAIKNDLASRNPTFMCLALHCIANVGSREMGEAFAADIPRILVAGDSMDSVKQSAALCLLRLYKASPDLVPMGEWTARVVHLLNDQHMGVVTAAVSLITCLCKKNPDDFKTCVSLAVSRLSRIVSSASTDLQDYTYYFVPAPWLSVKLLRLLQCYPPPEDAAVKGRLVECLETVLNKAQEPPKSKKVQHSNAKNAILFETISLIIHYDSEPNLLVRACNQLGQFLQHRETNLRYLALESMCTLASSEFSHEAVKTHIDTVINALKTERDVSVRQRAADLLYAMCDRSNAKQIVSEMLRYLETADYAIREEIVLKVAILAEKYAVDYSWYVDTILNLIRIAGDYVSEEVWYRVLQIVTNRDDVQGYAAKTVFEALQAPACHENMVKVGGYILGEFGNLIAGDPRSSPPVQFSLLHSKFHLCSVATRALLLSTYIKFINLFPETKATIQGVLRAGSQLRNADVELQQRAVEYLTLSSVASTDVLATVLEEMPPFPERESSILAKLKRKKGPGAGSALDDGRRDPSSNDINGGMEPTPSTVSTPSPSADLLGLRAAPPPAAPPASAGAGNLLVDVFDGPAAQPSLGPTPEEAFLSELEPPAPESPMALLADPAPAADPGPEDIGPPIPEADELLNKFVCKNNGVLFENQLLQIGVKSEFRQNLGRMYLFYGNKTSVQFQNFSPTVVHPGDLQTQLAVQTKRVAAQVDGGAQVQQVLNIECLRDFLTPPLLSVRFRYGGAPQALTLKLPVTINKFFQPTEMAAQDFFQRWKQLSLPQQEAQKIFKANHPMDAEVTKAKLLGFGSALLDNVDPNPENFVGAGIIQTKALQVGCLLRLEPNAQAQMYRLTLRTSKEPVSRHLCELLAQQF

SEQ ID NO: 853880 - protein, 574 aa, Homo sapiens
PASQPSPRRLGSLALPGVLSARSPLASPRCSVPCPARPGADTTAIMPAVSKGDGMRGLAVFISDIRNCKSKEAEIKRINKELANIRSKFKGDKALDGYSKKKYVCKLLFIFLLGHDIDFGHMEAVNLLSSNKYTEKQIGYLFISVLVNSNSELIRLINNAIKNDLASRNPTFMCLALHCIANVGSREMGEAFAADIPRILVAGDSMDSVKQSAALCLLRLYKASPDLVPMGEWTARVVHLLNDQHMGVVTAAVSLITCLCKKNPDDFKTCVSLAVSRLSRIVSSASTDLQDYTYYFVPAPWLSVKLLRLLQCYPPPEDAAVKGRLVECLETVLNKAQEPPKSKKVQHSNAKNAILFETISLIIHYDSEPNLLVRACNQLGQFLQHRETNLRYLALESMCTLASSEFSHEAVKTHIDTVINALKTERDVSVRQRAADLLYAMCDRSNAKQIVSEMLRYLETADYAIREEIVLKVAILAEKYAVDYSWYVDTILNLIRIAGDYVSEEVWYRVLQIVTNRDDVQGYAAKTVFEALQAPACHENMVKVGGYILGEFGNLIAGDPRSSPPVQFSLLHSN

SEQ ID NO: 853881 - protein, 633 aa, Homo sapiens
PASQPSPRRLGSLALPGVLSARSPLASPRCSVPCPARPGADTTAIMPAVSKGDGMRGLAVFISDIRNCKSKEAEIKRINKELANIRSKFKGDKALDGYSKKKYVCKLLFIFLLGHDIDFGHMEAVNLLSSNKYTEKQIGYLFISVLVNSNSELIRLINNAIKNDLASRNPTFMCLALHCIANVGSREMGEAFAADIPRILVAGDSMDSVKQSAALCLLRLYKASPDLVPMGEWTARVVHLLNDQHMGVVTAAVSLITCLCKKNPDDFKTCVSLAVSRLSRIVSSASTDLQDYTYYFVPAPWLSVKLLRLLQCYPPPEDAAVKGRLVECLETVLNKAQEPPKSKKVQHSNAKNAILFETISLIIHYDSEPNLLVRACNQLGQFLQHRETNLRYLALESMCTLASSEFSHEAVKTHIDTVINALKTERDVSVRQRAADLLYAMCDRSNAKQIVSEMLRYLETADYAIREEIVLKVAILAEKYAVDYSWYVDTILNLIRIAGDYVSEEVWYRVLQIVTNRDDVQGYAAKTVFEALQAPACHENMVKVGGYILGEFGNLIAGDPRSSRRPRPPPTSWGCGQPLPRQHPRLLQEQGTFWWTSSMARPPSPAWGPPPRRPSSAQVLRTSALPFRKPMSC

SEQ ID NO: 853882 - protein, 771 aa, Homo sapiens
PISRLPTLANAVQGQHMGVVTAAVSLITCLCKKNPDDFKTCVSLAVSRLSRIVSSASTDLQDYTYYFVPAPWLSVKLLRLLQCYPPPEDAAVKGRLVECLETVLNKAQEPPKSKKVQHSNAKNAILFETISLIIHYDSEPNLLVRACNQLGQFLQHRETNLRYLALESMCTLASSEFSHEAVKTHIDTVINALKTERDVSVRQRAADLLYAMCDRSNAKQIVSEMLRYLETADYAIREEIVLKVAILAEKYAVDYSWYVDTILNLIRIAGDYVSEEVWYRVLQIVTNRDDVQGYAAKTVFEALQAPACHENMVKVGGYILGEFGNLIAGDPRSSPPVQFSLLHSKFHLCSVATRALLLSTYIKFINLFPETKATIQGVLRAGSQLRNADVELQQRAVEYLTLSSVASTDVLATVLEEMPPFPERESSILAKLKRKKGPGAGSALDDGRRDPSSNDINGGMEPTPSTVSTPSPSADLLGLRAAPPPAAPPASAGAGNLLVDVFDGPAAQPSLGPTPEEAFLSPGPEDIGPPIPEADELLNKFVCKNNGVLFENQLLQIGVKSEFRQNLGRMYLFYGNKTSVQFQNFSPTVVHPGDLQTQLAVQTKRVAAQVDGGAQVQQVLNIECLRDFLTPPLLSVRFRYGGAPQALTLKLPVTINKFFQPTEMAAQDFFQRWKQLSLPQQEAQKIFKANHPMDAEVTKAKLLGFGSALLDNVDPNPENFVGAGIIQTKALQVGCLLRLEPNAQAQMYRLTLRTSKEPVSRHLCELLAQQF

SEQ ID NO: 853883 - protein, 619 aa, Homo sapiens
PASQPSPRRLGSLALPGVLSARSPLASPRCSVPCPARPGADTTAIMPAVSKGDGMRGLAVFISDIRNCKSKEAEIKRINKELANIRSKFKGDKALDGYSKKKYVCKLLFIFLLGHDIDFGHMEAVNLLSSNKYTEKQIGYLFISVLVNSNSELIRLINNAIKNDLASRNPTFMCLALHCIANVGSREMGEAFAADIPRILVAGDSMDSVKQSAALCLLRLYKASPDLVPMGEWTARVVHLLNDQHMGVVTAAVSLITCLCKKNPDDFKTCVSLAVSRLSRIVSSASTDLQDYTYYFVPAPWLSVKLLRLLQCYPPPEDAAVKGRLVECLETVLNKAQEPPKSKKVQHSNAKNAILFETISLIIHYDSEPNLLVRACNQLGQFLQHRETNLRYLALESMCTLASSEFSHEAVKTHIDTVINALKTERDVSVRQRAADLLYAMCDRSNAKQIVSEMLRYLETADYAIREEIVLKVAILAEKYAVDYSWYVDTILNLIRIAGDYVSEEVWYRVLQIVTNRDDVQGYAAKTVFEALQAPACHENMVKVGGYILGEFGNLIAGDPRSSPPVQFSLLHSKFHLCSVATRALLLSTYIKFINLSPLPPHPVVAPPTPSPSRGCVLL

SEQ ID NO: 853884 - protein, 570 aa, Homo sapiens
PASQPSPRRLGSLALPGVLSARSPLASPRCSVPCPARPGADTTAIMPAVSKGDGMRGLAVFISDIRNCKSKEAEIKRINKELANIRSKFKGDKALDGYSKKKYVCKLLFIFLLGHDIDFGHMEAVNLLSSNKYTEKQIGYLFISVLVNSNSELIRLINNAIKNDLASRNPTFMCLALHCIANVGSREMGEAFAADIPRILVAGDSMDSVKQSAALCLLRLYKASPDLVPMGEWTARVVHLLNDQHMGVVTAAVSLITCLCKKNPDDFKTCVSLAVSRLSRIVSSASTDLQDYTYYFVPAPWLSVKLLRLLQCYPPPEDAAVKGRLVECLETVLNKAQEPPKSKKVQHSNAKNAILFETISLIIHYDSEPNLLVRACNQLGQFLQHRETNLRYLALESMCTLASSEFSHEAVKTHIDTVINALKTERDVSVRQRAADLLYAMCDRSNAKQIVSEMLRYLETADYAIREEIVLKVAILAEKYAVDYSWYVDTILNLIRIAGDYVSEEVWYRVLQIVTNRDDVQGYAAKTVFEALQAPACHENMVKVGGYILGEFGNLIAGDPRSRLRLPQPA

SEQ ID NO: 853885 - protein, 106 aa, Homo sapiens
AVQVPDLTFPVPSPQQEAQKIFKANHPMDAEVTKAKLLGFGSALLDNVDPNPENFVGAGIIQTKALQVGCLLRLEPNAQAQMYRLTLRTSKEPVSRHLCELLAQQF

SEQ ID NO: 853886 - protein, 88 aa, Homo sapiens
LPMRGHGPGFYSHWRPLLDGCEVPRGSVRGLDMWFWGSVLRACSRTQSLWAFAPPHQVPSHLTLLHASSPGPEDIGPPIPEADELLNK

SEQ ID NO: 853887 - protein, 980 aa, Homo sapiens
PASQPSPRRLGSLALPGVLSARSPLASPRCSVPCPARPGADTTAIMPAVSKGDGMRGLAVFISDIRNCKSKEAEIKRINKELANIRSKFKGDKALDGYSKKKYVCKLLFIFLLGHDIDFGHMEAVNLLSSNKYTEKQIGYLFISVLVNSNSELIRLINNAIKNDLASRNPTFMCLALHCIANVGSREMGEAFAADIPRILVAGDSMDSVKQSAALCLLRLYKASPDLVPMGEWTARVVHLLNDQHMGVVTAAVSLITCLCKKNPDDFKTCVSLAVSRLSRIVSSASTDLQDYTYYFVPAPWLSVKLLRLLQCYPPPEDAAVKGRLVECLETVLNKAQEPPKSKKVQHSNAKNAILFETISLIIHYDSEPNLLVRACNQLGQFLQHRETNLRYLALESMCTLASSEFSHEAVKTHIDTVINALKTERDVSVRQRAADLLYAMCDRSNAKQIVSEMLRYLETADYAIREEIVLKVAILAEKYAVDYSWYVDTILNLIRIAGDYVSEEVWYRVLQIVTNRDDVQGYAAKTVFEALQAPACHENMVKVGGYILGEFGNLIAGDPRSSPPVQFSLLHSKFHLCSVATRALLLSTYIKFINLFPETKATIQGVLRAGSQLRNADVELQQRAVEYLTLSSVASTDVLATVLEEMPPFPERESSILAKLKRKKGPGAGSALDDGRRDPSSNDINGGMEPTPSTVSTPSPSADLLGLRAAPPPAAPPASAGAGNLLVDVFDGPAAQPSLGPTPEEAFLSPGPEDIGPPIPEADELLNKFVCKNNGVLFENQLLQIGVKSEFRQNLGRMYLFYGNKTSVQFQNFSPTVVHPGDLQTQLAVQTKRVAAQVDGGAQVQQVLNIECLRDFLTPPLLSVRFRYGGAPQALTLKLPVTINKFFQPTEMAAQDFFQRWKQLSLPQQEAQKIFKANHPMDAEVTKAKLLGFGSALLDNVDPNLVTEKTPGFGGCLGLSSGLLYFYFCSSAAVYILGG

SEQ ID NO: 853888 - protein, 1000 aa, Homo sapiens; identical to SEQ ID NO: 853877

SEQ ID NO: 853889 - protein, 955 aa, Homo sapiens
PASQPSPRRLGSLALPGVLSARSPLASPRCSVPCPARPGADTTAIMPAVSKGDGMRGLAVFISDIRNCKSKEAEIKRINKELANIRSKFKGDKALDGYSKKKYVCKLLFIFLLGHDIDFGHMEAVNLLSSNKYTEKQIGYLFISVLVNSNSELIRLINNAIKNDLASRNPTFMCLALHCIANVGSREMGEAFAADIPRILVAGDSMDSVKQSAALCLLRLYKASPDLVPMGEWTARVVHLLNDQHMGVVTAAVSLITCLCKKNPDDFKTCVSLAVSRLSRIVSSASTDLQDYTYYFVPAPWLSVKLLRLLQCYPPPEDAAVKGRLVECLETVLNKAQEPPKSKKVQHSNAKNAILFETISLIIHYDSEPNLLVRACNQLGQFLQHRETNLRYLALESMCTLASSEFSHEAVKTHIDTVINALKTERDVSVRQRAADLLYAMCDRSNAKQIVSEMLRYLETADYAIREEIVLKVAILAEKYAVDYSWYVDTILNLIRIAGDYVSEEVWYRVLQIVTNRDDVQGYAAKTVFEALQAPACHENMVKVGGYILGEFGNLIAGDPRSSPPVQFSLLHSKFHLCSVATRALLLSTYIKFINLFPETKATIQGVLRAGSQLRNADVELQQRAVEYLTLSSVASTDVLATVLEEMPPFPERESSILAKLKRKKGPGAGSALDDGRRDPSSNDINGGMEPTPSTVSTPSPSADLLGLRAAPPPAAPPASAGAGNLLVDVFDGPAAQPSLGPTPEEAFLSPGPEDIGPPIPEADELLNKFVCKNNGVLFENQLLQIGVKSEFRQNLGRMYLFYGNKTSVQFQNFSPTVVHPGDLQTQLAVQTKRVAAQVDGGAQVQQVLNIECLRDFLTPPLLSVRFRYGGAPQALTLKLPVTINKFFQPTEMAAQDFFQRWKQLSLFWGLALLSWTMWTPTLRTSWGRGSSRLKPCRWAVCFGWSPMPRPRCTG

SEQ ID NO: 853890 - protein, 795 aa, Homo sapiens
MDSVKQSAALCLLRLYKASPDLVPMGEWTARVVHLLNDQHMGVVTAAVSLITCLCKKNPDDFKTCVSLAVSRLSRIVSSASTDLQDYTYYFVPAPWLSVKLLRLLQCYPPPEDAAVKGRLVECLETVLNKAQEPPKSKKVQHSNAKNAILFETISLIIHYDSEPNLLVRACNQLGQFLQHRETNLRYLALESMCTLASSEFSHEAVKTHIDTVINALKTERDVSVRQRAADLLYAMCDRSNAKQIVSEMLRYLETADYAIREEIVLKVAILAEKYAVDYSWYVDTILNLIRIAGDYVSEEVWYRVLQIVTNRDDVQGYAAKTVFEALQAPACHENMVKVGGYILGEFGNLIAGDPRSSPPVQFSLLHSKFHLCSVATRALLLSTYIKFINLFPETKATIQGVLRAGSQLRNADVELQQRAVEYLTLSSVASTDVLATVLEEMPPFPERESSILAKLKRKKGPGAGSALDDGRRDPSSNDINGGMEPTPSTVSTPSPSADLLGLRAAPPPAAPPASAGAGNLLVDVFDGPAAQPSLGPTPEEAFLSPGPEDIGPPIPEADELLNKFVCKNNGVLFENQLLQIGVKSEFRQNLGRMYLFYGNKTSVQFQNFSPTVVHPGDLQTQLAVQTKRVAAQVDGGAQVQQVLNIECLRDFLTPPLLSVRFRYGGAPQALTLKLPVTINKFFQPTEMAAQDFFQRWKQLSLPQQEAQKIFKANHPMDAEVTKAKLLGFGSALLDNVDPNPENFVGAGIIQTKALQVGCLLRLEPNAQAQMYRLTLRTSKEPVSRHLCELLAQQF

SEQ ID NO: 853891 - protein, 619 aa, Homo sapiens; identical to SEQ ID NO: 853883

SEQ ID NO: 853892 - protein, 280 aa, Homo sapiens
CSGIGWLSELEPPAPESPMALLADPAPAADPGPEDIGPPIPEADELLNKFVCKNNGVLFENQLLQIGVKSEFRQNLGRMYLFYGNKTSVQFQNFSPTVVHPGDLQTQLAVQTKRVAAQVDGGAQVQQVLNIECLRDFLTPPLLSVRFRYGGAPQALTLKLPVTINKFFQPTEMAAQDFFQRWKQLSLPQQEAQKIFKANHPMDAEVTKAKLLGFGSALLDNVDPNPENFVGAGIIQTKALQVGCLLRLEPNAQAQMYRLTLRTSKEPVSRHLCELLAQQF

SEQ ID NO: 853893 - protein, 221 aa, Homo sapiens
PASQPSPRRLGSLALPGVLSARSPLASPRCSVPCPARPGADTTAIMPAVSKGDGMRGLAVFISDIRNCKSKEAEIKRINKELANIRSKFKGDKALDGYSKKKYVCKLLFIFLLGHDIDFGHMEAVNLLSSNKYTEKQIGYLFISVLVNSNSELIRLINNAIKNDLASRNPTFMCLALHCIANVGSREMGEALYSQKEAQAALCLTLSKLPPATRCGDVSGK

SEQ ID NO: 853894 - protein, 62 aa, Homo sapiens
MWAGHSAGGVPFVSPEDAAVKGRLVECLETVLNKAQEPPKSKKVQHSNAKNAILFETISLII

SEQ ID NO: 853895 - protein, 310 aa, Homo sapiens
AGSSLGRCAEARRLYNSAVVTMPVVRKIFRRRRGDSESEEDEQDSEEVRLKLEETREVQNLRKRPNGVSAVALLVGEKVQEETTLVDDPFQMKTGGMVDMKKLKERGKDKISEEEDLHLGTSFSAETNRRDEDADMMKYIETELKKRKGIVEHEEQKVKPKNAEDCLYELPENIRVSSAKKTEEMLSNQMLSGIPEVDLGIDAKIKNIISTEDAKARLLAEQQNKKKDSETSFVPTNMAVNYVQHNRFYHEELNAPIRRNKEEPKARPLRVGDTEKPEPERSPPNRKRPANEKATDDYHYEKFKKMNRRY

SEQ ID NO: 853896 - protein, 289 aa, Homo sapiens
MPVVRKIFRRRRGDSESEEDEQDSEEVRLKLEETREVQNLRKRPNGVSAVALLVGEKVQEETTLVDDPFQMKTGGMVDMKKLKERGKDKISEEEDLHLGTSFSAETNRRDEDADMMKYIETELKKRKGIVEHEEQKVKPKNAEDCLYELPENIRVSSAKKTEEMLSNQMLSGIPEVDLGIDAKIKNIISTEDAKARLLAEQQNKKKDSETSFVPTNMAVNYVQHNRFYHEELNAPIRRNKEEPKARPLRVGDTEKPEPERSPPNRKRPANEKATDDYHYEKFKKMNRRY

SEQ ID NO: 853897 - protein, 310 aa, Homo sapiens; identical to SEQ ID NO: 853895

SEQ ID NO: 853898 - protein, 310 aa, Homo sapiens; identical to SEQ ID NO: 853895

SEQ ID NO: 853899 - protein, 309 aa, Homo sapiens
HSGQSAVAHHSLIENNRKPNYLMHCLLQFYWVSILPSYKPHSTSSPPPGTCKIGTPGYIARHVPGGLSAVALLVGEKVQEETTLVDDPFQMKTGGMVDMKKLKERGKDKISEEEDLHLGTSFSAETNRRDEDADMMKYIETELKKRKGIVEHEEQKVKPKNAEDCLYELPENIRVSSAKKTEEMLSNQMLSGIPEVDLGIDAKIKNIISTEDAKARLLAEQQNKKKDSETSFVPTNMAVNYVQHNRFYHEELNAPIRRNKEEPKARPLRVGDTEKPEPERSPPNRKRPANEKATDDYHYEKFKKMNRRY

SEQ ID NO: 853900 - protein, 211 aa, Homo sapiens
MKKLKERGKDKISEEEDLHLGTSFSAETNRRDEDADMMKYIETELKKRKGIVEHEEQKVKPKNAEDCLYELPENIRVSSAKKTEEMLSNQMLSGIPEVDLGIDAKIKNIISTEDAKARLLAEQQNKKKDSETSFVPTNMAVNYVQHNRFYHEELNAPIRRNKEEPKARPLRVGDTEKPEPERSPPNRKRPANEKATDDYHYEKFKKMNRRY

SEQ ID NO: 853901 - protein, 126 aa, Homo sapiens
MLSNQMLSGIPEVDLGIDAKIKNIISTEDAKARLLAEQQNKKKDSETSFVPTNMAVNYVQHNRFYHEELNAPIRRNKEEPKARPLRVGDTEKPEPERSPPNRKRPANEKATDDYHYEKFKKMNRRY

SEQ ID NO: 853902 - protein, 274 aa, Homo sapiens
AGSSLGRCAEARRLYNSAVVTMPVVRKIFRRRRGDSESEEDEQDSEEVRLKLEETREVQNLRKRPNGVSAVALLVGEKVQEETTLVDDPFQMKTGGMVDMKKLKERGKDKISEEEDLHLGTSFSAETNRRDEDADMMKYIETELKKRKGIVEHEEQKVKPKNAEDCLYELPENIRVSSAKKTEEMLSNQMLSGIPEVDLGIDAKIKNIISTEDAKARLLAEQQNKKKDSETSFVPTNMAVNYVQHNRFYHEELNARHTDYRREPSSLAREIVSR

SEQ ID NO: 853903 - protein, 72 aa, Homo sapiens
SLGKALGLLCGKETGSCLCLHGVKSSSGFQHGKPPFLFFSFSGSPPNRKRPANEKATDDYHYEKFKKMNRRY

SEQ ID NO: 853904 - protein, 187 aa, Homo sapiens
AGSSLGRCAEARRLYNSAVVTMPVVRKIFRRRRGDSESEEDEQDSEEVRLKLEETREVQNLRKRPNGVSAVALLVGEKVQEETTLVDDPFQMKTGGMVDMKKLKERGKDKISEEEDLHLGTSFSAETNRRDEDADMMKYIETELKKRKGIVEHEEQKVKPKNAEDCLYELPENIRVSSAKPQKGYRA

SEQ ID NO: 853905 - protein, 253 aa, Homo sapiens
MPVVRKIFRRRRGDSESEEDEQDSEEVRLKLEETREVQNLRKRPNGVSAVALLVGEKVQEETTLVDDPFQMKTGGMVDMKKLKERGKDKISEEEDLHLGTSFSAETNRRDEDADMMKYIETELKKRKGIVEHEEQKVKPKNAEDCLYELPENIRVSSAKKTEEMLSNQMLSGIPEVDLGIDAKIKNIISTEDAKARLLAEQQNKKKDSETSFVPTNMAVNYVQHNRFYHEELNARHTDYRREPSSLAREIVSR

SEQ ID NO: 853906 - protein, 310 aa, Homo sapiens; identical to SEQ ID NO: 853895

SEQ ID NO: 853907 - protein, 310 aa, Homo sapiens; identical to SEQ ID NO: 853895

SEQ ID NO: 853908 - protein, 268 aa, Homo sapiens
ARQGSEPEERKVSARDARRHADAFNASAVALLVGEKVQEETTLVDDPFQMKTGGMVDMKKLKERGKDKISEEEDLHLGTSFSAETNRRDEDADMMKYIETELKKRKGIVEHEEQKVKPKNAEDCLYELPENIRVSSAKKTEEMLSNQMLSGIPEVDLGIDAKIKNIISTEDAKARLLAEQQNKKKDSETSFVPTNMAVNYVQHNRFYHEELNAPIRRNKEEPKARPLRVGDTEKPEPERSPPNRKRPANEKATDDYHYEKFKKMNRRY

SEQ ID NO: 853909 - protein, 362 aa, Homo sapiens
AGSSLGRCAEARRLYNSAVVTMPVVRKIFRRRRGDSESEEDEQDSEEVRLKLEETREVQNLRKRPNGVSAVALLVGEKVQEETTLVDDPFQMKTGGMVDMKKLKERGKDKISEEEDLHLGTSFSAETNRRDEDADMMKYIETELKKRKGIVEHEEQKVKPKNAEDCLYELPENIRVSSAKKTEEMLSNQMLSGIPEVDLGIDAKIKNIISTEDAKARLLAEQQNKKKDSETSFVPTNMAVNYVQHNRFYHEELNAPIRRNKEEPKARPLRVGDTEKPEPERSPPKPASVLAKRERQAVMTVVNVVKKSFIDTTESRDEYLKICCHDGGECKSIRPVRVLARIVPPAPVREIGFLAGRGGSCL

SEQ ID NO: 853910 - protein, 273 aa, Homo sapiens
AGSSLGRCAEARRLYNSAVVTMPVVRKIFRRRRGDSESEEDEQDSEEVRLKLEETREVQNLRKRPNGVSAVALLVGEKVQEETTLVDDPFQMKTGGMVDMKKLKERGKDKISEEEDLHLGTSFSAETNRRDEDADMMKYIETELKKRKGIVEHEEQKVKPKNAEDCLYELPENIRVSSAKKTEEMLSNQMLSGIPEVDLGIDAKIKNIISTEDAKARLLAEQQNKKKDSETSFVPTNMAVNYVQHNRFYHEELNAPIRRNKEEPKARPLRVPS

SEQ ID NO: 853911 - protein, 81 aa, Homo sapiens
EIKSKKDKAIETKLNELIKDNDDLMKGSQYSMQMPKARPLRVGDTEKPEPERSPPNRKRPANEKATDDYHYEKFKKMNRRY

SEQ ID NO: 853912 - protein, 536 aa, Homo sapiens
MNTADQARVGPADDGPAPSGEEEGEGGGEAGGKEPAADAAPGPSAAFRLMVTRREPAVKLQYAVSGLEPLAWSEDHRVSVSTARSIAVLELICDVHNPGQDLVIHRTSVPAPLNSCLLKVGSKTEVAECKEKFAASKDPTVSQTFMLDRVFNPEGKALPPMRGFKYTSWSPMGCDANGRCLLAALTMDNRLTIQANLNRLQWVQLVDLTEIYGERLYETSYRLSKNEAPEGNLGDFAEFQRRHSMQTPVRMEWSGICTTQQVKHNNECRDVGSVLLAVLFENGNIAVWQFQLPFVGKESISSCNTIESGITSPSVLFWWEYEHNNRKMSGLIVGSAFGPIKILPVNLKAVKGYFTLRQPVILWKEMDQLPVHSIKCVPLYHPYQKCSCSLVVAARGSYVFWCLLLISKAGLNVHNSHVTGLHSLPIVSMTADKQNGTVYTCSSDGKVRQLIPIFTDVALKFEHQLIKLSDVFGSVRTHGIAVSPCGAYLAIITTEGMINGLHPVNKNYQVQFVTLKTFEEQLLSSWNLQFKTFLSR

SEQ ID NO: 853913 - protein, 822 aa, Homo sapiens
MNTADQARVGPADDGPAPSGEEEGEGGGEAGGKEPAADAAPGPSAAFRLMVTRREPAVKLQYAVSGLEPLAWSEDHRVSVSTARSIAVLELICDVHNPGQDLVIHRTSVPAPLNSCLLKVGSKTEVAECKEKFAASKDPTVSQTFMLDRVFNPEGKALPPMRGFKYTSWSPMGCDANGRCLLAALTMDNRLTIQANLNRLQWVQLVDLTEIYGERLYETSYRLSKNEAPEGNLGDFAEFQRRHSMQTPVRMEWSGICTTQQVKHNNECRDVGSVLLAVLFENGNIAVWQFQLPFVGKESISSCNTIESGITSPSVLFWWEYEHNNRKMSGLIVGSAFGPIKILPVNLKAVKGYFTLRQPVILWKEMDQLPVHSIKCVPLYHPYQKCSCSLVVAARGSYVFWCLLLISKAGLNVHNSHVTGLHSLPIVSMTADKQNGTVYTCSSDGKVRQLIPIFTDVALKFEHQLIKLSDVFGSVRTHGIAVSPCGAYLAIITTEGMINGLHPVNKNYQVQFVTLKTFEEAAAQLLESSVQNLFKQVDLIDLVRWKILKDKHIPQFLQEALEKKIESSGVTYFWRFKLFLLRILYQSMQKTPSEALWKPTHEDSKILLVDSPGMGNADDEQQEEGTSSKQVVKQGLQERSKEGDVEEPTDDSLPTTGDAGGREPMEEKLLEIQGKIEAVEMHLTREHMKRVLGEVYLHTWITENTSIPTRGLCNFLMSDEEYDDRTARVLIGHISKKMNKQTFPEHCSLCKEILPFTDRKQAVCSNGHIWLRCFLTYQSCQSLIYRRCLLHDSIARHPAPEDPDWIKRLLQSPCPFCDSPVF

SEQ ID NO: 853914 - protein, 822 aa, Homo sapiens; identical to SEQ ID NO: 853913

SEQ ID NO: 853915 - protein, 234 aa, Homo sapiens
MNTADQARVGPADDGPAPSGEEEGEGGGEAGGKEPAADAAPGPSAAFRLMVTRREPAVKLQYAVSGLEPLAWSEDHRVSVSTARSIAVLELICDVHNPGQDLVIHRTSVPAPLNSCLLKVGSKTEVAECKEKFAASKDPTVSQTFMLDRVFNPEGKALPPMRGFKYTSWSPMGCDANGRCLLAALTMDNRLTIQANLTSAWARLETASKKKEKKCWYLDDTMTATSPPPPRIDR

SEQ ID NO: 853916 - protein, 143 aa, Homo sapiens
  misc_feature (1)..(1): Xaa can be any naturally occurring amino acid
XYTIQLGTPSTTAPVTTALVDSPGMGNADDEQQEEGTSSKQVVKQGLQERSKEGDVEEPTDDSLPTTGDAGGREPMEEKLLEIQGKIEAVEMHLTREHMKRVLGEVYLHTWITENTSIPTRGLCNFLMSDEEYDDRTARVGVY

SEQ ID NO: 853917 - protein, 822 aa, Homo sapiens; identical to SEQ ID NO: 853913

SEQ ID NO: 853918 - protein, 804 aa, Homo sapiens
MNTADQARVGPADDGPAPSGEEEGEGGGEAGGKEPAADAAPGPSAAFRLMVTRREPAVKLQYAVSGLEPLAWSEDHRVSVSTARSIAVLELICDVHNPGQDLVIHRTSVPAPLNSCLLKVGSKTEVAECKEKFAASKDPTVSQTFMLDRVFNPEGKALPPMRGFKYTSWSPMGCDANGRCLLAALTMDNRLTIQANLNRLQWVQLVDLTEIYGERLYETSYRLSKNEAPEGNLGDFAEFQRRHSMQTPVRMEWSGICTTQQVKHNNECRDVGSVLLAVLFENGNIAVWQFQLPFVGKESISSCNTIESGITSPSVLFWWEYEHNNRKMSGLIVGSAFGPIKILPVNLKAVKGYFTLRQPVILWKEMDQLPVHSIKCVPLYHPYQKCSCSLVVAARGSYVFWCLLLISKAGLNVHNSHVTGLHSLPIVSMTADKQNGTVYTCSSDGKVRQLIPIFTDVALKFEHQLIKLSDVFGSVRTHGIAVSPCGAYLAIITTEGMINGLHPVNKNYQVQFVTLKTFEEAAAQLLESSVQNLFKQVDLIDLVRWKILKDKHIPQFLQEALEKKIESSGVTYFWRFKLFLLRILYQSMQKTPSEALWKPTHEDSKILLVDSPGMGNADDEQQEEGTSSKQVVKQGLQERSKEGDVEEPTDDSLPTTGDAGGREPMEEKLLEIQGKIEAVEMHLTREHMKRVLGEVYLHTWITEYDDRTARVLIGHISKKMNKQTFPEHCSLCKEILPFTDRKQAVCSNGHIWLRCFLTYQSCQSLIYRRCLLHDSIARHPAPEDPDWIKRLLQSPCPFCDSPVF

SEQ ID NO: 853919 - protein, 138 aa, Homo sapiens
MNTADQARVGPADDGPAPSGEEEGEGGGEAGGKEPAADAAPGPSAAFRLMVTRREPAVKLQYAVSGLEPLAWSEDHRVSVSTARSIAVLELICDVHNPGQDLVIHRTSVPAPLNSCLLKVSHPPPSLGSSPVPLSRPH

SEQ ID NO: 853920 - protein, 1060 aa, Homo sapiens
GRAGLSQPRWSPGVREERGPRGGRGGGGGAGRASAGGRRSQGHRAPPLNMVAAHAAHSSSSAEWIACLDKRPLERSSEDVDIIFTRLKEVKAFEKFHPNLLHQICLCGYYENLEKGITLFRQGDIGTNWYAVLAGSLDVKVSETSSHQDAVTICTLGIGTAFGESILDNTPRHATIVTRESSELLRIEQKDFKALWEKYRQYMAGLLAPPYGVMETGSNNDRIPDKENTPLIEPHVPLRPANTITKVPSEKILRAGKILRNAILSRAPHMIRDRKYHLKTYRQCCVGTELVDWMMQQTPCVHSRTQAVGMWQVLLEDGVLNHVDQEHHFQDKYLFYRFLDDEHEDAPLPTEEEKKECDEELQDTMLLLSQMGPDAHMRMILRKPPGQRTVDDLEIIYEELLHIKALSHLSTTVKRELAGVLIFESHAKGGTVLFNQGEEGTSWYIILKGSVNVVIYGKGVVCTLHEGDDFGKLALVNDAPRAASIVLREDNCHFLRVDKEDFNRILRDVEANTVRLKEHDQDVLVLEKVPAGNRASNQGNSQPQQKYTVMSGTPEKILEHFLETIRLEATLNEATDSVLNDFIMMHCVFMPNTQLCPALVAHYHAQPSQGTEQEKMDYALNNKRRVIRLVLQWAAMYGDLLQEDDVSMAFLEEFYVSVSDDARMIAALKEQLPELEKIVKQISEDAKAPQKKHKVLLQQFNTGDERAQKRQPIRGSDEVLFKVYCMDHTYTTIRVPVATSVKEVISAVADKLGSGEGLIIVKMSSGGEKVVLKPNDVSVFTTLTINGRLFACPREQFDSLTPLPEQEGPTVGTVGTFELMSSKDLAYQMTIYDWELFNCVHELELIYHTFGRHNFKKTTANLDLFLRRFNEIQFWVVTEICLCSQLSKRVQLLKKFIKIAAHCKEYKNLNSFFAIVMGLSNVAVSRLALTWEKLPSKFKKFYAEFESLMDPSRNHRAYRLTVAKLEPPLIPFMPLLIKDMTFTHEGNKTFIDNLVNFEKMRMIANTARTVRYYRSQPFNPDAAQANKNHQDVRSYVRQLNVIDNQRTLSQMSHRLEPRRP

SEQ ID NO: 853921 - protein, 652 aa, Homo sapiens
GRAGLSQPRWSPGVREERGPRGGRGGGGGAGRASAGGRRSQGHRAPPLNMVAAHAAHSSSSAEWIACLDKRPLERSSEDVDIIFTRLKEVKAFEKFHPNLLHQICLCGYYENLEKGITLFRQGDIGTNWYAVLAGSLDVKVSETSSHQDAVTICTLGIGTAFGESILDNTPRHATIVTRESSELLRIEQKDFKALWEKYRQYMAGLLAPPYGVMETGSNNDRIPDKENTPLIEPHVPLRPANTITKVPSEKILRAGKILRNAILSRAPHMIRDRKYHLKTYRQCCVGTELVDWMMQQTPCVHSRTQAVGMWQVLLEDGVLNHVDQEHHFQDKYLFYRFLDDEHEDAPLPTEEEKKECDEELQDTMLLLSQMGPDAHMRMILRKPPGQRTVDDLEIIYEELLHIKALSHLSTTVKRELAGVLIFESHAKGGTVLFNQGEEGTSWYIILKGSVNVVIYGKGVVCTLHEGDDFGKLALVNDAPRAASIVLREDNCHFLRVDKEDFNRILRDVEANTVRLKEHDQDVLVLEKVPAGNRASNQGNSQPQQKYTVMSGTPEKILEHFLETIRLEATLNEATDSVLNDFIMMHCVFMPNTQLCPALVAHYHAQPSQGTEQEKMDYALNNKRRVIRLVLQWAAMYGDLLSSPSCLCSLKI

SEQ ID NO: 853922 - protein, 255 aa, Homo sapiens
MPTTQETDGFQVKRPGDLNVKCTLLLMLDHQPPQYKLDPRLARLLGVHTQTRAAIMQALWLYIKHNQLQDGHEREYINCNRYFRQIFSCGRLRFSEIPMKLAGLLQHPDPIVINHVISVDPNDQKKTACYDIDVEVDDPLKAQMSNFLASTTNQQEIASLDVKIHETIESINQLKTQRDFMLSFSTDPQDFIQEWLRSQRRDLKIITDVIGNPEEERRAAFYHQPWAQEAVGRHIFAKVQQRRQELEQVLGIRLT

SEQ ID NO: 853923 - protein, 255 aa, Homo sapiens; identical to SEQ ID NO: 853922

SEQ ID NO: 853924 - protein, 317 aa, Homo sapiens
ECRLSGEFRLYGPALWELRVEGKLLDDPSKQKRKFSSFFKSLVIELDKELYGPDNHLVEWHRMPTTQETDGFQVKRPGDLNVKCTLLLMLDHQPPQYKLDPRLARLLGVHTQTRAAIMQALWLYIKHNQLQDGHEREYINCNRYFRQIFSCGRLRFSEIPMKLAGLLQHPDPIVINHVISVDPNDQKKTACYDIDVEVDDPLKAQMSNFLASTTNQQEIASLDVKIHETIESINQLKTQRDFMLSFSTDPQDFIQEWLRSQRRDLKIITDVIGNPEEERRAAFYHQPWAQEAVGRHIFAKVQQRRQELEQVLGIRLT

SEQ ID NO: 853925 - protein, 255 aa, Homo sapiens; identical to SEQ ID NO: 853922

SEQ ID NO: 853926 - protein, 150 aa, Homo sapiens
MSQETDGHLHVTGVDPNDQKKTACYDIDVEVDDPLKAQMSNFLASTTNQQEIASLDVKIHETIESINQLKTQRDFMLSFSTDPQDFIQEWLRSQRRDLKIITDVIGNPEEERRAAFYHQPWAQEAVGRHIFAKVQQRRQELEQVLGIRLT

SEQ ID NO: 853927 - protein, 255 aa, Homo sapiens; identical to SEQ ID NO: 853922

SEQ ID NO: 853928 - protein, 197 aa, Homo sapiens
MPTTQETDGFQVKRPGDLNVKCTLLLMLDHQPPQYKLDPRLARLLGVHTQTRAAIMQALWLYIKHNQLQDGHEREYINCNRYFRQIFSCGRLRFSEIPMKLAGLLQHPDPIVINHVISVDPNDQKKTACYDIDVEVDDPLKAQMSNFLASTTNQQEIASLDVKIHETIESINQLKTQRAASPAAWAGEGTLQFSSMA

SEQ ID NO: 853929 - protein, 240 aa, Homo sapiens
MSGRGAGGFPLPPLSPGGGAVAAALGAPPPPAGPGMLPGPALRGPGPAGGVGGPGAAAFRPMGPAGPAAQYQRPGMSPGNRMPMAGLQVGPPAGSPFGAAAPLRPGMPPTMMDPFRKRLLVPQAQPPMPAQRRGLKRRKMADKVLPQRIRELVPESQAYMDLLAFERKLDQTIARKRMEIQEAIKKPLTQKRKLRIYISNTFSPSKAEGDSAGTAGDPWGNPSRGQGGFLGTPSGRKTAG

SEQ ID NO: 853930 - protein, 105 aa, Homo sapiens [sequence omitted]

SEQ ID NO: 853931 - protein, 66 aa, Homo sapiens
GRGALLQARWRLICVVITVFLQMAVECLEEVPRGLQEGTISLPPVCPESCFHPSGPRNLQYPELQG

SEQ ID NO: 853932 - protein, 255 aa, Homo sapiens; identical to SEQ ID NO: 853922

SEQ ID NO: 853933 - protein, 297 aa, Homo sapiens
NEGLSSTMLSSTEGPQLNDGPQLNDGPQLNDGPPAHLVEWHRMPTTQETDGFQVKRPGDLNVKCTLLLMLDHQPPQYKLDPRLARLLGVHTQTRAAIMQALWLYIKHNQLQDGHEREYINCNRYFRQIFSCGRLRFSEIPMKLAGLLQHPDPIVINHVISVDPNDQKKTACYDIDVEVDDPLKAQMSNFLASTTNQQEIASLDVKIHETIESINQLKTQRDFMLSFSTDPQDFIQEWLRSQRRDLKIITDVIGNPEEERRAAFYHQPWAQEAVGRHIFAKVQQRRQELEQVLGIRLT

SEQ ID NO: 853934 - protein, 255 aa, Homo sapiens; identical to SEQ ID NO: 853922

SEQ ID NO: 853935 - protein, 255 aa, Homo sapiens
MPTTQETDGFQVKRPGDLNVKCTLLLMLDHQPPQYKLDPRLARLLGVHTQTRAAIMQALWLYIKHNQLQDGHEREYINCNRYFRQIFSCGRLRFSEIPMKLAGLLQHPDPIVINHVISVDPNDQKKTACYDIDVEVDDPLKAQMSNFLASTTNQQEIASLDVKIHETIESINQLKTQRDFMLSFSTDPQDFIQEWLRSQRRDLKIFLVWMENLRRTETQLFLTQAVPERAGPFAGARTATWSRDPARRELPPAGD

SEQ ID NO: 853936 - protein, 240 aa, Homo sapiens; identical to SEQ ID NO: 853929

SEQ ID NO: 853937 - protein, 111 aa, Homo sapiens
MADKVLPQRIRELVPESQAYMDLLAFERKLDQTIARKRMEIQEAIKKPLTVCVALTTSSLPRFPCLPPPCFPGAKQVGLEPGFSHAGCSPLVEYELSGMCWGQYVLNEYMT

SEQ ID NO: 853938 - protein, 138 aa, Homo sapiens
ETIESINQLKTQRDFMLSFSTDPQDFIQEWLRSQRRDLKVCPLSRGDSYVKLWVIFTHSSSQGGLAQGWGLCYGFPPGSLQIITDVIGNPEEERRAAFYHQPWAQEAVGRHIFAKVRLCPVFPPLAVSSKGLSHLVSP

SEQ ID NO: 853939 - protein, 311 aa, Homo sapiens
PVLPSLLALLHPLSHHPPLPSPPLPRPELPLPHLLQARSLRTITCPPKPTVLPPGTPLLKPPAPASPSPVRRGSPPAPSVPPPLQAPFPGFDSPRVYPSPPREVSGLSVCQSFRPSAPELQAASAIVSRAGGAGGPGAWVPAARAERPASQVLWPDPQEELLWVTMRETLEALSSLGFSVGQPEMAPQSEPREGSHNAQEQMSSSREERALGVCSGHEAPTPEEGAHTEQAEAPCRGQACSAQKAQPVGTCPVSRGPCHETAWGEQGDLGCCPKVWPPRDTCFLPAVSASAQHTQLGPPRTETQRTLAGNR

SEQ ID NO: 853940 - protein, 747 aa, Homo sapiens
PVLPSLLALLHPLSHHPPLPSPPLPRPELPLPHLLQARSLRTITCPPKPTVLPPGTPLLKPPAPASPSPVRRGSPPAPSVPPPLQAPFPGFDSPRVYPSPPREVSGLSVCQSFRPSAPELQAASAIVSRAGGAGGPGAWVPAARAERPASQVLWPDPQEELLWVTMRETLEALSSLGFSVGQPEMAPQSEPREGSHNAQEQMSSSREERALGVCSGHEAPTPEEGAHTEQAEAPCRGQACSAQKAQPVGTCPGEEWMIRKVKVEDEDQEAEEEVEWPQHLSLLPSPFPAPDLGHLAAAYKLEPGAPGALSGLALSGWGPMPEKPYGCGECERRFRDQLTLRLHQRLHRGEGPCACPDCGRSFTQRAHMLLHQRSHRGERPFPCSECDKRFSKKAHLTRHLRTHTGERPYPCAECGKRFSQKIHLGSHQKTHTGERPFPCTECEKRFRKKTHLIRHQRIHTGERPYQCAQCARSFTHKQHLVRHQRVHQTAGPARPSPDSSASPHSTAPSPTPSFPGPKPFACSDCGLSFGWKKNLATHQCLHRSEGRPFGCDECALGATVDAPAAKPLASAPGGPGCGPGSDPVVPQRAPSGERSFFCPDCGRGFSHGQHLARHPRVHTGERPFACTQCDRRFGSRPNLVAHSRAHSGARPFACAQCGRRFSRKSHLGRHQAVHTGSRPHACAVCARSFSSKTNLVRHQAIHTGSPSLSSPRRAGSVAPSGWLKATGLCSHSLHWGCRGERVTFARS

SEQ ID NO: 853941 - protein, 760 aa, Homo sapiens
PVLPSLLALLHPLSHHPPLPSPPLPRPELPLPHLLQARSLRTITCPPKPTVLPPGTPLLKPPAPASPSPVRRGSPPAPSVPPPLQAPFPGFDSPRVYPSPPREVSGLSVCQSFRPSAPELQAASAIVSRAGGAGGPGAWVPAARAERPASQVLWPDPQEELLWVTMRETLEALSSLGFSVGQPEMAPQSEPREGSHNAQEQMSSSREERALGVCSGHEAPTPEEGAHTEQAEAPCRGQACSAQKAQPVGTCPGEEWMIRKVKVEDEDQEAEEEVEWPQHLSLLPSPFPAPDLGHLAAAYKLEPGAPGALSGLALSGWGPMPEKPYGCGECERRFRDQLTLRLHQRLHRGEGPCACPDCGRSFTQRAHMLLHQRSHRGERPFPCSECDKRFSKKAHLTRHLRTHTGERPYPCAECGKRFSQKIHLGSHQKTHTGERPFPCTECEKRFRKKTHLIRHQRIHTGERPYQCAQCARSFTHKQHLVRHQRVHQTAGPARPSPDSSASPHSTAPSPTPSFPGPKPFACSDCGLSFGWKKNLATHQCLHRSEGRPFGCDECALGATVDAPAAKPLASAPGGPGCGPGSDPVVPQRAPSGERSFFCPDCGRGFSHGQHLARHPRVHTGERPFACTQCDRRFGSRPNLVAHSRAHSGARPFACAQCGRRFSRKSHLGRHQAVHTGSRPHACAVCARSFSSKTNLVRHQAIHTGSRPFSCPQCGKSFSRKTHLVRHQLIHGEAAHAAPDAALAAPAWSAPPEVAPPPLFF

SEQ ID NO: 853942 - protein, 553 aa, Homo sapiens
LEVSYSLPGHEAPTPEEGAHTEQAEAPCRGQACSAQKAQPVGTCPGEEWMIRKVKVEDEDQEAEEEVEWPQHLSLLPSPFPAPDLGHLAAAYKLEPGAPGALSGLALSGWGPMPEKPYGCGECERRFRDQLTLRLHQRLHRGEGPCACPDCGRSFTQRAHMLLHQRSHRGERPFPCSECDKRFSKKAHLTRHLRTHTGERPYPCAECGKRFSQKIHLGSHQKTHTGERPFPCTECEKRFRKKTHLIRHQRIHTGERPYQCAQCARSFTHKQHLVRHQRVHQTAGPARPSPDSSASPHSTAPSPTPSFPGPKPFACSDCGLSFGWKKNLATHQCLHRSEGRPFGCDECALGATVDAPAAKPLASAPGGPGCGPGSDPVVPQRAPSGERSFFCPDCGRGFSHGQHLARHPRVHTGERPFACTQCDRRFGSRPNLVAHSRAHSGARPFACAQCGRRFSRKSHLGRHQAVHTGSRPHACAVCARSFSSKTNLVRHQAIHTGSRPFSCPQCGKSFSRKTHLVRHQLIHGEAAHAAPDAALAAPAWSAPPEVAPPPLFF

SEQ ID NO: 853943 - protein, 103 aa, Homo sapiens
MIRKVKVEDEDQEAEEEVEWPQHLSLLPSPFPAPDLGHLAAAYKLEPGAPGALSGLALSGWGPMPEKPYGCGECERRFRDQLTLRLHQRLHRGEGPCACPDCG

SEQ ID NO: 853944 - protein, 557 aa, Homo sapiens
MYKRNGLMASVLVTSATPQGSSSSDSLEGQSCDYASKSYDAVVFDVLKVTPEEFASQITLMDIPVFKAIQPEELASCGWSKKEKHSLAPNVVAFTRRFNQVSFWVVREILTAQTLKIRAEILSHFVKIAKKLLELNNLHSLMSVVSALQSAPIFRLTKTWALLNRKDKTTFEKLDYLMSKEDNYKRTREYIRSLKMVPSIPYLGIYLLDLIYIDSAYPASGSIMENEQRSNQMNNILRIIADLQVSCSYDHLTTLPHVQKYLKSVRYIEELQKFVEDDNYKLSLRIEPGSSSPRLVSSKEDLAGPSAGSGSARFSRRPTCPDTSVAGSLPTPPVPRHRKSHSLGNNMMCQLSVVESKSATFPSEKARHLLDDSVLESRSPRRGLALTSSSAVTNGLSLGSSESSEFSEEMSSGLESPTGPCICSLGNSAAVPTMEGPLRRKTLLKEGRKPALSSWTRYWVILSGSTLLYYGAKSLRGTDRKHYKSTPGKKVSIVGWMVQLPDDPEHPDIFQLNNPDKGNVYKFQTGSRFHAILWHKHLDDACKSNRPQVPANLMSFE

SEQ ID NO: 853945 - protein, 209 aa, Homo sapiens
AAQALERTVPTAAGHRLRSRVCPRSSCAWPGPGPARRGPGLQAKAPLPLGRSQGHEEAAAATAARVKVTGRDCGGGESGGLLQTGYVTCRGCPEAPCGLETMYKRNGLMASVLVTSATPQGSSSSDSLEGQSCDYASKSYDAVVFDVLKVTPEEFASQITLMDIPVFKAIQPEKGWPARMEDSLQKSTVSSRPHDTLQFRKTLPVGPGT

SEQ ID NO: 853946 - protein, 616 aa, Homo sapiens
AAQALERTVPTAAGHRLRSRVCPRSSCAWPGPGPARRGPGLQAKAPLPLGRSQGHEEAAAATAARVKVTGRDCGGGESGGLLQTGYVTCRGCPEAPCGLETMYKRNGLMASVLVTSATPQGSSSSDSLEGQSCDYASKSYDAVVFDVLKVTPEEFASQITLMDIPVFKAIQPEELASCGWSKKEKHSLAPNVVAFTRRFNQVSFWVVREILTAQTLKIRAEILSHFVKIAKKLLELNNLHSLMSVVSALQSAPIFRLTKTWALLNRKDKTTFEKLDYLMSKEDNYKRTREYIRSLKMVPSIPYLGIYLLDLIYIDSAYPASGSIMENEQRSNQMNNILRIIADLQVSCSYDHLTTLPHVQKYLKSVRYIEELQKFVEDDNYKLSLRIEPGSSSPRLVSSKEDLAGPSAGSGSARFSRRPTCPDTSVAGSLPTPPVPRHRKSHSLGNNRGRLYATLGPNWRVPVRNSPRTRSCVYSPTGPCICSLGNSAAVPTMEGPLRRKTLLKEGRKPALSSWTRYWVILSGSTLLYYGAKSLRGTDRKHYKSTPGKKVSIVGWMVQLPDDPEHPDIFQLNNPDKGNVYKFQTGSRFHAILWHKHLDDACKSNRPQVPANLMSFE

SEQ ID NO: 853947 - protein, 658 aa, Homo sapiens
AAQALERTVPTAAGHRLRSRVCPRSSCAWPGPGPARRGPGLQAKAPLPLGRSQGHEEAAAATAARVKVTGRDCGGGESGGLLQTGYVTCRGCPEAPCGLETMYKRNGLMASVLVTSATPQGSSSSDSLEGQSCDYASKSYDAVVFDVLKVTPEEFASQITLMDIPVFKAIQPEELASCGWSKKEKHSLAPNVVAFTRRFNQVSFWVVREILTAQTLKIRAEILSHFVKIAKKLLELNNLHSLMSVVSALQSAPIFRLTKTWALLNRKDKTTFEKLDYLMSKEDNYKRTREYIRSLKMVPSIPYLGIYLLDLIYIDSAYPASGSIMENEQRSNQMNNILRIIADLQVSCSYDHLTTLPHVQKYLKSVRYIEELQKFVEDDNYKLSLRIEPGSSSPRLVSSKEDLAGPSAGSGSARFSRRPTCPDTSVAGSLPTPPVPRHRKSHSLGNNMMCQLSVVESKSATFPSEKARHLLDDSVLESRSPRRGLALTSSSAVTNGLSLGSSESSEFSEEMSSGLESPTGPCICSLGNSAAVPTMEGPLRRKTLLKEGRKPALSSWTRYWVILSGSTLLYYGAKSLRGTDRKHYKSTPGKKVSIVGWMVQLPDDPEHPDIFQLNNPDKGNVYKFQTGSRFHAILWHKHLDDACKSNRPQVPANLMSFE

SEQ ID NO: 853948 - protein, 628 aa, Homo sapiens
AAQALERTVPTAAGHRLRSRVCPRSSCAWPGPGPARRGPGLQAKAPLPLGRSQGHEEAAAATAARVKVTGRDCGGGESGGLLQTGYVTCRGCPEAPCGLETMYKRNGLMASVLVTSATPQGSSSSDSLEGQSCDYASKSYDAVVFDVLKVTPEEFASQITLMDIPVFKAIQPEELASCGWSKKEKHSLAPNVVAFTRRFNQKLLELNNLHSLMSVVSALQSAPIFRLTKTWALLNRKDKTTFEKLDYLMSKEDNYKRTREYIRSLKMVPSIPYLGIYLLDLIYIDSAYPASGSIMENEQRSNQMNNILRIIADLQVSCSYDHLTTLPHVQKYLKSVRYIEELQKFVEDDNYKLSLRIEPGSSSPRLVSSKEDLAGPSAGSGSARFSRRPTCPDTSVAGSLPTPPVPRHRKSHSLGNNMMCQLSVVESKSATFPSEKARHLLDDSVLESRSPRRGLALTSSSAVTNGLSLGSSESSEFSEEMSSGLESPTGPCICSLGNSAAVPTMEGPLRRKTLLKEGRKPALSSWTRYWVILSGSTLLYYGAKSLRGTDRKHYKSTPGKKVSIVGWMVQLPDDPEHPDIFQLNNPDKGNVYKFQTGSRFHAILWHKHLDDACKSNRPQVPANLMSFE

SEQ ID NO: 853949 - protein, 630 aa, Homo sapiens
AAQALERTVPTAAGHRLRSRVCPRSSCAWPGPGPARRGPGLQAKAPLPLGRSQGHEEAAAATAARVKVTGRDCGGGESGGLLQTGYVTCRGCPEAPCGLETMYKRNGLMASVLVTSATPQGSSSSDSLEGQSCDYASKSYDAVVFDVLKVTPEEFASQITLMDIPVFKAIQPEELASCGWSKKEKHSLAPNVVAFTRRFNQVSFWVVREILTAQTLKIRAEILSHFVKIAKKLLELNNLHSLMSVVSALQSAPIFRLTKTWALLNRKDKTTFEKLDYLMSKEDNYKRTREYIRSLKMVPSIPYLGIYLLDLIYIDSAYPASGSIMENEQRSNQMNNILRIIADLQVSCSYDHLTTLPHVQKYLKSVRYIEELQKFVEDDNYKLSLRIEPGSSSPRLVSSKEDLAGPSAGSGSARFSRRPTCPDTSVAGSLPTPPVPRHRKSHSLGNNRGRLYATLGPNWRVPVRNSPRTRSCVYSPTGPCICSLGNSAAVPTMEGPLRRKTLLKEGRKPALSSWTRYWVILSGSTLLYYGAKSLRGTDRKHVSIVGWMVQLPDDPEHPDIFQLNNPDKGNVYKFQTGSRFHAILWHKHLDDACKSNRPQEAGAAPGPTGTDSHEVDHLEGGAGKEAGPCA

SEQ ID NO: 853950 - protein, 174 aa, Homo sapiens
AAQALERTVPTAAGHRLRSRVCPRSSCAWPGPGPARRGPGLQAKAPLPLGRSQGHEEAAAATAARVKVTGRDCGGGESGGLLQTGYVTCRGCPEAPCGLETMYKRNGLMASVLVTSATPQGSSSSDSLEGQSCDYASKSYDAVVFDVLKVTPEEFASQITLMDIPVFKAIQPEE

SEQ ID NO: 853951 - protein, 658 aa, Homo sapiens; identical to SEQ ID NO: 853947

SEQ ID NO: 853952 - protein, 177 aa, Homo sapiens
VYWPGSSSRGRLYATLGPNWRVPVRNSPRTRSCVYSPTGPCICSLGNSAAVPTMEGPLRRKTLLKEGRKPALSSWTRYWVILSGSTLLYYGAKSLRGTDRKHYKSTPGKKVSIVGWMVQLPDDPEHPDIFQLNNPDKGNVYKFQTGSRFHAILWHKHLDDACKSNRPQVPANLMSFE

SEQ ID NO: 853953 - protein, 323 aa, Homo sapiens
AAQALERTVPTAAGHRLRSRVCPRSSCAWPGPGPARRGPGLQAKAPLPLGRSQGHEEAAAATAARVKVTGRDCGGGESGGLLQTGYVTCRGCPEAPCGLETMYKRNGLMASVLVTSATPQGSSSSDSLEGQSCDYASKSYDAVVFDVLKVTPEEFASQITLMDIPVFKAIQPEELASCGWSKKEKHSLAPNVVAFTRRFNQVSFWVVREILTAQTLKIRAEILSHFVKIAKKLLELNNLHSLMSVVSALQSAPIFRLTKTWALLNRKDKTTFEKLDYLMSKEDNYKRTREYIRSLKMVPSIPYLGIQLLCVWQSCEEARVARD

SEQ ID NO: 853954 - protein, 177 aa, Homo sapiens
MVGFGANRRAGRLPSLVLVVLLVVIVVLAFNYWSISSRHVLLQEEVAELQGQVQRTEVARGRLEKRNSDLLLLVDTHKKQIDQKEADYGRLSSRLQAREGLGKRCEDDKVKLQNNISYQMADIHHLKEQLAELRQEFLRQEDQLQDYRKNNTYLVKRLEYESKRPKRFNQMMERNWI

SEQ ID NO: 853955 - protein, 136 aa, Homo sapiens
MVGFGANRRAGRLPSLVLVVLLVVIVVLAFNYWSISSRHVLLQEEVAELQGQVQRTEVARGRLEKRNSDLLLLVDTHKKQIDQKEADYGRLSSRLQAREGLGKRCEDDKSNLLSFVRNFFDKKTSFRTIGRTILTL

SEQ ID NO: 853956 - protein, 186 aa, Homo sapiens
MPGIEENDLAKVDDLPPALRKPPISVSQHESHQAISHLPTGQPLSPNMPPDSHINHNGNPGTSKQNPSSPLQRLIPGSNLDSEPRIQTDILKQATKDRVSDFHKLKQSRFFDENESPVDPQHGSKLADYNGDDGNVGEYEADKQAELAYNEEEDGDGGEEDVQDDEERELQMDPADYGKQHFNDVL

SEQ ID NO: 853957 - protein, 436 aa, Homo sapiens [sequence omitted]

SEQ ID NO: 853958 - protein, 436 aa, Homo sapiens [sequence omitted]

SEQ ID NO: 853959 - protein, 436 aa, Homo sapiens [sequence omitted]

SEQ ID NO: 853960 - protein, 273 aa, Homo sapiens
MVGFGANRRAGRLPSLVLVVLLVVIVVLAFNYWSISSRHVLLQEEVAELQGQVQRTEVARGRLEKRNSDLLLLVDTHKKQIDQKEADYGRLSSRLQAREGLGKRCEDDKVKLQNNISYQMADIHHLKEQLAELRQEFLRQEDQLQDYRKNNTYLVKRLEYESFQCGQQMKELRAQHEENIKKLADQFLEEQKQETQKIQSNDGKELDINNQVVPKNIPKVAENVADKNEEPSSNHIPHGKEQIKRGGDAGMPGIEENDLAKVDDLPPASRKSF

SEQ ID NO: 853961 - protein, 436 aa, Homo sapiens [sequence omitted]

SEQ ID NO: 853962 - protein, 380 aa, Homo sapiens
MVGFGANRRAGRLPSLVLVVLLVVIVVLAFNYWSISSRHVLLQEEVAELQGQVQRTEVARGRLEKRNSDLLLLVDTHKKQIDQKEADYGRLSSRLQAREGLGKRCEDDKVKLQNNISYQMADIHHLKEQLAELRQEFLRQEDQLQDYRKNNTYLVKRLEYESFQCGQQMKELRAQHEENIKKLADQFLEEQKQETQKIQSNDGKELDINNQVVPKNIPKVAENVADKNEEPSSNHIPHGKEQIKRGGDAGMPGIEENDLAKVDDLPPALRKPPISVSQHESHQAISHLPTGQPLSPNMPPDSHINHNGNPGTSKQNPSSPLQRLIPGSNLDSEPRIQTDILKQATKDRVSDFHKLKQNDEERELQMDPADYGKQHFNDVL

SEQ ID NO: 853963 - protein, 436 aa, Homo sapiens [sequence omitted]

SEQ ID NO: 853964 - protein, 436 aa, Homo sapiens [sequence omitted]

SEQ ID NO: 853965 - protein, 436 aa, Homo sapiens [sequence omitted]

SEQ ID NO: 853966 - protein, 269 aa, Homo sapiens
MVGFGANRRAGRLPSLVLVVLLVVIVVLAFNYWSISSRHVLLQEEVAELQGQVQRTEVARGRLEKRNSDLLLLVDTHKKQIDQKEADYGRLSSRLQAREGLGKRCEDDKVKLQNNISYQMADIHHLKEQLAELRQEFLRQEDQLQDYRKNNTYLVKRLEYESFQCGQQMKELRAQHEENIKKLADQFLEEQKQETQKIQSNDGKELDINNQVVPKNIPKVAENVADKNEEPSSNHIPHGKEQIKRGGDAGMPGIEENDLAKVDDLPPVL

SEQ ID NO: 853967 - protein, 365 aa, Homo sapiens
FIKNMITGTSQADCAVLIVAAGVGEFEAGISKNGQTREHALLAYTLGVKQLIVGVNKMDSTEPPYSQKRYEEIVKEVSTYIKKIGYNPDTVAFVPISGWNGDNMLEPSANMPWFKGWKVTRKDGNASGTTLLEALDCILPPTRPTDKPLRLPLQDVYKIGGIGTVLVGRVETGVLKPGMVVTFAPVNVTTEVKSVEMHHEALSEALPGDNVGFNVKNVSVKDVHRGNVAGDSKNDPPMEAAGFTAQVIILNHPGQISAGYAPVLDCHTAHIACKFAELKEKIDRRSGKKLEDGPKFLKSGDAAIADMVPGKPMCVESFSDYPPLGRFAVRDMRQTVAVGVIKAVDKKAAGAGKVTKSAQKAQKAK

SEQ ID NO: 853968 - protein, 245 aa, Homo sapiens
MNNKFDALKDDDSGDHDQNEENSTQKDGEKEKTERDKNQSSSKRKAVVPGPAEHPLQYNYTFWYSRRTPGRPTSSQSYEQNIKQIGTFASVEQFWRFYSHMVRPGDLTGHSDFHLFKEGIKPMWEDDANKNGGKWIIRLRKGLASRCWENLILAMLGEQFMVGEEICGAVVSVRFQEDIISIWNKTASDQATTARIRDTLRRVLNLPPNTIMEYKTHTDSIKMPGRLGPQRLLFQNLWKPRLNVP

SEQ ID NO: 853969 - protein, 302 aa, Homo sapiens
MNNKFDALKDDDSGDHDQNEENSTQKDGEKEKTERDKNQSSSKRKAVVPGPAEHPLQYNYTFWYSRRTPGRPTSSQSYEQNIKQIGTFASVEQFWRFYSHMVRPGDLTGHSDFHLFKEGIKPMWEDDANKNGGKWIIRLRKGLASRCWENLILAMLGEQFMVGEEICGAVVSVRFQEDIISIWNKTASDQATTARIRDTLRRVLNLPPNTIMEYKTHTDSIKMPGRLAPRSFKLWKRVMCMTFLWMDIMKWVIEAWLWVHRNLCPQDGDLCLKVDAGHTVDIRAQKKPALGRKGRSAFRSLV

SEQ ID NO: 853970 - protein, 136 aa, Homo sapiens
LGLGRRKPCGTGFPAGIRLRDLAWTGGEEGAGEQWIPESRRPQGRPNRGRRAGPGGGVAVPPGRGRFSDAPPWWMRIACDVEGWGPRRFGCFRSLAALPLNPAFPTHSLSPLSLSFLICRVGTVTPFVVEFGGCNE

SEQ ID NO: 853971 - protein, 245 aa, Homo sapiens; identical to SEQ ID NO: 853968

SEQ ID NO: 853972 - protein, 245 aa, Homo sapiens; identical to SEQ ID NO: 853968

SEQ ID NO: 853973 - protein, 233 aa, Homo sapiens
MNNKFDALKDDDSGDHDQNEENSTQKDGEKEKTERDKNQSSSKRKAVVPGPAEHPLQYNYTFWYSRRTPGRPTSSQSYEQNIKQIGTFASVEQFWRFYSHMVRPGDLTGHSDFHLFKEGIKPMWEDDANKNGGKWIIRLRKGLASRCWENLILAMLGEQFMVGEEICGAVVSVRFQEDIISIWNKTASDQATTARIRDTLRRVLNLPPNTIMEYKTHTDSIKYVLGGYGRTCP

SEQ ID NO: 853974 - protein, 322 aa, Homo sapiens
MNNKFDALKDDDSGDHDQNEENSTQKDGEKEKTERDKNQSSSKRKAVVPGPAEHPLQYNYTFWYSRRTPGRPTSSQSYEQNIKQIGTFASVEQFWRFYSHMVRPGDLTGHSDFHLFKEGIKPMWEDDANKNGGKWIIRLRKGLASRCWENLILAMLGEQFMVGEEICGAVVSVRFQEDIISIWNKTASDQATTARIRDTLRRVLNLPPNTIMEYKTHTDSIKAWEEFHGLVNSMRPLIGRSPSVSHTQGTIQAFEIQKSHCESTQAGNNPFLYVCVCPKWMGGLQPVLPLLTEGTSLSRALSFCTHSWRTDSARHPPASLTL

SEQ ID NO: 853975 - protein, 322 aa, Homo sapiens; identical to SEQ ID NO: 853974

SEQ ID NO: 853976 - protein, 222 aa, Homo sapiens
MVRPGDLTGHSDFHLFKEGIKPMWEDDANKNGGKWIIRLRKGLASRCWENLILAMLGEQFMVGEEICGAVVSVRFQEDIISIWNKTASDQATTARIRDTLRRVLNLPPNTIMEYKTHTDSIKAWEEFHGLVNSMRPLIGRSPSVSHTQGTIQAFEIQKSHCESTQAGNNPFLYVCVCPKWMGGLQPVLPLLTEGTSLSRALSFCTHSWRTDSARHPPASLTL

SEQ ID NO: 853977 - protein, 374 aa, Homo sapiens
LGLGRRKPCGTGFPAGIRLRDLAWTGGEEGAGEQWIPESRRPQGRPNRGRRAGPGGGVAVPPGRGRFSDAPPWWMRIACDVEGWGPRRFGCFRSLAALPLNPAFPTHSLSPLSLSFLICRVGTVTPFVVELEDAMSLKDDDSGDHDQNEENSTQKDGEKEKTERDKNQSSSKRKAVVPGPAEHPLQYNYTFWYSRRTPGRPTSSQSYEQNIKQIGTFASVEQFWRFYSHMVRPGDLTGHSDFHLFKEGIKPMWEDDANKNGGKWIIRLRKGLASRCWENLILAMLGEQFMVGEEICGAVVSVRFQEDIISIWNKTASDQATTARIRDTLRRVLNLPPNTIMEYKTHTDSIKMPGRLGPQRLLFQNLWKPRLNVP

SEQ ID NO: 853978 - protein, 245 aa, Homo sapiens; identical to SEQ ID NO: 853968

SEQ ID NO: 853979 - protein, 322 aa, Homo sapiens; identical to SEQ ID NO: 853974

SEQ ID NO: 853980 - protein, 234 aa, Homo sapiens
MNNKFDALKDDDSGDHDQNEENSTQKDGEKEKTERDKNQSSSKRKAVVPGPAEHPLQYNYTFWYSRRTPGRPTSSQSYEQNIKQIGTFASVEQFWRFYSHMVRPGDLTGHSDFHLFKEGIKPMWEDDANKNGGKWIIRLRKGLASRCWENLILAMLGEQFMVGEEICGAVVSVRFQEDIISIWNKTASDQATTARIRDTLRRVLNLPPNTIMEYKTHTDSIKDNSSFRNTKITL

SEQ ID NO: 853981 - protein, 322 aa, Homo sapiens; identical to SEQ ID NO: 853974

SEQ ID NO: 853982 - protein, 322 aa, Homo sapiens; identical to SEQ ID NO: 853974

SEQ ID NO: 853983 - protein, 322 aa, Homo sapiens; identical to SEQ ID NO: 853974

SEQ ID NO: 853984 - protein, 322 aa, Homo sapiens; identical to SEQ ID NO: 853974

SEQ ID NO: 853985 - protein, 252 aa, Homo sapiens
MNNKFDALKDDDSGDHDQNEENSTQKDGEKEKTERDKNQSSSKRKAVVPGPAEHPLQYNYTFWYSRRTPGRPTSSQSYEQNIKQIGTFASVEQFWRFYSHMVRPGDLTGHSDFHLFKEGIKPMWEDDANKNGGKWIIRLRKGLASRCWENLILAMLGEQFMVGEEICGAVVSVRFQEDIISIWNKTASDQATTARIRDTLRRVLNLPPNTIMEYKTHTDSIKARSSSSLSQPCLQDLRVTALPFLLGPVLLH

SEQ ID NO: 853986 - protein, 451 aa, Homo sapiens
LGLGRRKPCGTGFPAGIRLRDLAWTGGEEGAGEQWIPESRRPQGRPNRGRRAGPGGGVAVPPGRGRFSDAPPWWMRIACDVEGWGPRRFGCFRSLAALPLNPAFPTHSLSPLSLSFLICRVGTVTPFVVELEDAMSLKDDDSGDHDQNEENSTQKDGEKEKTERDKNQSSSKRKAVVPGPAEHPLQYNYTFWYSRRTPGRPTSSQSYEQNIKQIGTFASVEQFWRFYSHMVRPGDLTGHSDFHLFKEGIKPMWEDDANKNGGKWIIRLRKGLASRCWENLILAMLGEQFMVGEEICGAVVSVRFQEDIISIWNKTASDQATTARIRDTLRRVLNLPPNTIMEYKTHTDSIKAWEEFHGLVNSMRPLIGRSPSVSHTQGTIQAFEIQKSHCESTQAGNNPFLYVCVCPKWMGGLQPVLPLLTEGTSLSRALSFCTHSWRTDSARHPPASLTL

SEQ ID NO: 853987 - protein, 338 aa, Homo sapiens
RIHKNRQVRSRILVRRMNNKFDALKDDDSGDHDQNEENSTQKDGEKEKTERDKNQSSSKRKAVVPGPAEHPLQYNYTFWYSRRTPGRPTSSQSYEQNIKQIGTFASVEQFWRFYSHMVRPGDLTGHSDFHLFKEGIKPMWEDDANKNGGKWIIRLRKGLASRCWENLILAMLGEQFMVGEEICGAVVSVRFQEDIISIWNKTASDQATTARIRDTLRRVLNLPPNTIMEYKTHTDSIKAWEEFHGLVNSMRPLIGRSPSVSHTQGTIQAFEIQKSHCESTQAGNNPFLYVCVCPKWMGGLQPVLPLLTEGTSLSRALSFCTHSWRTDSARHPPASLTL

SEQ ID NO: 853988 - protein, 183 aa, Homo sapiens
QEGSDVIGKQALYPWQRPWQAGWVPAVADPGEAACLHQPGLQRAAAAGPAAMAKDILGEAGLHFDELNKLRVLDPEVTQQTIELKEECKDFVDKIGQFQKIVGGLIELVDQLAKEAENEKMKAIGARNLLKSIAKQREAQQQQLQALIAEKKMQLERYRVEYEALCKVEAEQNEFIDQFIFQK

SEQ ID NO: 853989 - protein, 129 aa, Homo sapiens
QEGSDVIGKQALYPWQRPWQAGWVPAVADPGEAACLHQPGLQRAAAAGPAAMAKDILGEAGLHFDELNKLRVLDPEVTQQTIELKEECKDFVDSEYWGDTVPLSFELPFQLYPRLILALPQWSCWLPGG

SEQ ID NO: 853990 - protein, 195 aa, Homo sapiens
QEGSDVIGKQALYPWQRPWQAGWVPAVADPGEAACLHQPGLQRAAAAGPAEQNSSREPGWETAMAKDILGEAGLHFDELNKLRVLDPEVTQQTIELKEECKDFVDKIGQFQKIVGGLIELVDQLAKEAENEKMKAIGARNLLKSIAKQREAQQQQLQALIAEKKMQLERYRVEYEALCKVEAEQNEFIDQFIFQK

SEQ ID NO: 853991 - protein, 122 aa, Homo sapiens
MTHLLLTATVTPSEQNSSREPGWETAMAKDILGEAGLHFDELNKLRVLDPEVTQQTIELKEECKDFVDKIGQFQKIVGGLIELVDQLAKEAENEKMKVRSACLPPTSWPGTLVHYPLIPLPS

SEQ ID NO: 853992 - protein, 132 aa, Homo sapiens
MTHLLLTATVTPSEQNSSREPGWETAMAKDILGEAGLHFDELNKLRVLDPEVTQQTIELKEECKDFVDKIGQFQKIVGGLIELVDQLAKEAENEKMKAIGARNLLKSIAKQREAQQQQLQALIAEKKMQLER

SEQ ID NO: 853993 - protein, 157 aa, Homo sapiens
QEGSDVIGKQALYPWQRPWQAGWVPAVADPGEAACLHQPGLQRAAAAGPAAMAKDILGEAGLHFDELNKLRVLDPEVTQQTIELKEECKDFVDKIGQFQKIVGGLIELVDQLAKEAENEKMKAIGARNLLKSIAKQREAQQQQLQALIAEKKMQLER

SEQ ID NO: 853994 - protein, 125 aa, Homo sapiens
QEGSDVIGKQALYPWQRPWQAGWVPAVADPGEAACLHQPGLQRAAAAGPAAMAKDILGEAGLHFDELNKLRVLDPEVTQQTIELKEECKDFVDKIGQFQKIVGGLIELVDQLAKEAENEKMKVSG

SEQ ID NO: 853995 - protein, 122 aa, Homo sapiens; identical to SEQ ID NO: 853991

SEQ ID NO: 853996 - protein, 197 aa, Homo sapiens
QEGSDVIGKQALYPWQRPWQAGWVPAVADPGEAACLHQPGLQRAAAAGPAAMAKDILGEAGLHFDELNKLRVLDPEVTQQTIELKEECKDFVDKIGQFQKIVGGLIELVDQLAKEAENEKMKSLAVSPRLECTGAISAHCKLCLSDSSDSPTSPSRVGGSHRCSELAQIYSKAERSSTAATSSPNSRKENAARKVSG

SEQ ID NO: 853997 - protein, 158 aa, Homo sapiens
MTHLLLTATVTPSEQNSSREPGWETAMAKDILGEAGLHFDELNKLRVLDPEVTQQTIELKEECKDFVDKIGQFQKIVGGLIELVDQLAKEAENEKMKAIGARNLLKSIAKQREAQQQQLQALIAEKKMQLERYRVEYEALCKVEAEQNEFIDQFIFQK

SEQ ID NO: 853998 - protein, 147 aa, Homo sapiens
QEGSDVIGKQALYPWQRPWQAGWVPAVADPGEAACLHQPGLQRAAAAGPAAMAKDILGEAGLHFDELNKLRVLDPEVTQQTIELKEECKDFVDKIGQFQKIVGGLIELVDQLAKEAENEKMKVRSACLPPTSWPGTLVHYPLIPLPS

SEQ ID NO: 853999 - protein, 141 aa, Homo sapiens
MTHLLLTATVTPSEQNSSREPGWETAMAKDILGEAGLHFDELNKLRVLDPEVTQQTIELKEECKDFVDKIGQFQKIVGGLIELVDQLAKEAENEKMKAIGARNLLKSIAKQREAQQQQLQALIAEKKMQLERNSISLVILI

SEQ ID NO: 854000 - protein, 76 aa, Homo sapiens
QEGSDVIGKQALYPWQRPWQAGWVPAVADPGEAACLHQPGLQRAAAAGPAAELCALQGGHRVAFIFVPPASSSVGM

SEQ ID NO: 854001 - protein, 183 aa, Homo sapiens; identical to SEQ ID NO: 853988

SEQ ID NO: 854002 - protein, 220 aa, Homo sapiens
HDRRWHMRNSETLERGVGGCRVFSCLGSYPGIEGAGLALLAGLALGGRLLGTHMSQWHHPRSGWGRRRDFSGRSSAKKKGGNHIPERWKDYLPVGQRMPGTRFIAFKVPLQKSFEKKLAPEECFSPLDLFNKIREQNEELGLIIDLTYTQRYYKPEDLPETVPYLKIFTVGHQVPDDETIFKFKHAVNGFLKENKDNDKLIGVHCTHGLNRTGYLICSIQ

SEQ ID NO: 854003 - protein, 248 aa, Homo sapiens
DDGGRAGVMSSTRLSAIINQRDLPETVPYLKIFTVGHQVPDDETIFKFKHAVNGFLKENKDNDKLIGVHCTHGLNRTGYLICRYLIDVEGVRPDDAIELFNRCRGHCLERQNYIEDLQNGPIRKNWNSSVPRSSDFEDSAHLMQPVHNKPVKQGPRYNLHQIQGHSAPRHFHTQTQSLQQSVRKFSENPHVYQRHHLPPPGPPGEDYSHRRYSWNVKPNASRAAQDRRRWYPYNYSRLSYPACWEWTQ

SEQ ID NO: 854004 - protein, 383 aa, Homo sapiens
HDRRWHMRNSETLERGVGGCRVFSCLGSYPGIEGAGLALLAGLALGGRLLGTHMSQWHHPRSGWGRRRDFSGRSSAKKKGGNHIPERWKDYLPVGQRMPGTRFIAFKVPLQKSFEKKLAPEECFSPLDLFNKIREQNEELGLIIDLTYTQRYYKPEDLPETVPYLKIFTVGHQVPDDETIFKFKHAVNGFLKENKDNDKLIGVHCTHGLNRTGYLICRYLIDVEGVRPDDAIELFNRCRGHCLERQNYIEDLQNGPIRKNWNSSVPRSSDFEDSAHLMQPVHNKPVKQGPRYNLHQIQGHSAPRHFHTQTQSLQQSVRKFSENPHVYQRHHLPPPGPPGEDYSHRRYSWNVKPNASRAAQDRRRWYPYNYSRLSYPACWEWTQ

SEQ ID NO: 854005 - protein, 383 aa, Homo sapiens; identical to SEQ ID NO: 854004

SEQ ID NO: 854006 - protein, 324 aa, Homo sapiens
HDRRWHMRNSETLERGVGGCRVFSCLGSYPGIEGAGLALLAGLALGGRLLGTHMSQWHHPRSGWGRRRDFSGRSSAKKKGGNHIPERWKDYLPVGQRMPGTRFIAFKVPLQKSFEKKLAPEECFSPLDLFNKIREQNEELGLIIDLTYTQRYYKPEDLPETVPYLKIFTVGHQVPDDETIFKFKHAVNGFLKENKDNDKLIGVHCTHGLNRTGYLICRYLIDVEGVRPDDAIELFNRCRGHCLERQNYIEDLQNGPIRKKFSENPHVYQRHHLPPPGPPGEDYSHRRYSWNVKPNASRAAQDRRRWYPYNYSRLSYPACWEWTQ

SEQ ID NO: 854007 - protein, 279 aa, Homo sapiens
HDRRWHMRNSETLERGVGGCRVFSCLGSYPGIEGAGLALLAGLALGGRLLGTHMSQWHHPRSGWGRRRDFSGRSSAKKKGGNHIPERWKDYLPVGQRMPGTRFIAFKVPLQKSFEKKLAPEECFSPLDLFNKIREQNEELGLIIDLTYTQRYYKPEDLPETVPYLKIFTVGHQVPDDETIFKFKHAVNGFLKENKDNDKLIGVHCTHGLNRTGYLICRRSLALSPRLECSGTISTHSKFCFPGSRRSPASASQVAGTTGARHHARLIFCIFSRDVVSPC

SEQ ID NO: 854008 - protein, 66 aa, Homo sapiens
SPTPPPLPPPHPRPNRLVRGLVLLRVVMALTYEEKPPYAMLRNNLEALLQDLRVSPYDPIGLPMVP

SEQ ID NO: 854009 - protein, 474 aa, Homo sapiens
MISFCPDCGKSIQAAFKFCPYCGNSLPVEEHVGSQTFVNPHVSSFQGSKRGLNSSFETSPKKVKWSSTVTSPRLSLFSDGDSSESEDTLSSSERSKGSGSRPPTPKSSPQKTRKSPQVTRGSPQKTSCSPQKTRQSPQTLKRSRVTTSLEALPTGTVLTDKSGRQWKLKSFQTRDNQGILYEAAPTSTLTCDSGPQKQKFSLKLDAKDGRLFNEQNFFQRAAKPLQVNKWKKLYSTPLLAIPTCMGFGVHQDKYRFLVLPSLGRSLQSALDVSPKHVLSERSVLQVACRLLDALEFLHENEYVHGNVTAENIFVDPEDQSQVTLAGYGFAFRYCPSGKHVAYVEGSRSPHEGDLEFISMDLHKGCGPSRRSDLQSLGYCMLKWLYGFLPWTNCLPNTEDIMKQKQKFVDKPGPFVGPCGHWIRPSETLQKYLKVVMALTYEEKPPYAMLRNNLEALLQDLRVSPYDPIGLPMVP

SEQ ID NO: 854010 - protein, 474 aa, Homo sapiens; identical to SEQ ID NO: 854009

SEQ ID NO: 854011 - protein, 474 aa, Homo sapiens; identical to SEQ ID NO: 854009

SEQ ID NO: 854012 - protein, 412 aa, Homo sapiens
MISFCPDCGKSIQAAFKFCPYCGNSLPVEEHVGSQTFVNPHVSSFQGSKRGLNSSFETSPKKVKWSSTVTSPRLSLFSDGDSSESEDTLSSSERSKGSGSRPPTPKSSPQKTRKSPQVTRGSPQKTSCSPQKTRQSPQTLKRSRVTTSLEALPTGTVLTDKSGRQWKLKSFQTRDNQGILYEAAPTSTLTCDSGPQKQKFSLKLDAKDGRLFNEQNFFQRAAKPLQVNKWKKLYSTPLLAIPTCMGFGVHQDKYRFLVLPSLGRSLQSALDVSPKHVLSERSVLQVACRLLDALEFLHENEYVHGNVTAENIFVDPEDQSQVTLAGYGFAFRYCPSGKHVAYVEGSRSPHEGDLEFISMDLHKGCGPSRRSDLQSLGYCMLKWLYGFLPWTNCLPNTEDIMKQKQKLPWDSF

SEQ ID NO: 854013 - protein, 463 aa, Homo sapiens
MISFCPDCGKSIQAAFKFCPYCGNSLPVEEHVGSQTFVNPHVSSFQGSKRGLNSSFETSPKKVKWSSTVTSPRLSLFSDGDSSESEDTLSSSERSKGSGSRPPTPKSSPQKTRKSPQVTRGSPQKTSCSPQKTRQSPQTLKRSRVTTSLEALPTGTVLTDKSGRQWKLKSFQTRDNQGILYEAAPTSTLTCDSGPQKQKFSLKLDAKDGRLFNEQNFFQRAAKPLQVNKWKKLYSTPLLAIPTCMGFGVHQDKYRFLVLPSLGRSLQSALDVSPKHVLSERSVLQVACRLLDALEFLHENEYVHGNVTAENIFVDPEDQSQVTLAGYGFAFRYCPSGKHVAYVEGSRSPHEGDLEFISMDLHKGCGPSRRSDLQSLGYCMLKWLYGFLPWTNCLPNTEDIMKQKQKNKARSPSAVCSFPPPPSSSVWLTQISPLCSRLRGTTSLPLSQPQTAYLTAPLAPTFH

SEQ ID NO: 854014 - protein, 474 aa, Homo sapiens; identical to SEQ ID NO: 854009

SEQ ID NO: 854015 - protein, 474 aa, Homo sapiens; identical to SEQ ID NO: 854009

SEQ ID NO: 854016 - protein, 412 aa, Homo sapiens; identical to SEQ ID NO: 854012

SEQ ID NO: 854017 - protein, 412 aa, Homo sapiens; identical to SEQ ID NO: 854012

SEQ ID NO: 854018 - protein, 437 aa, Homo sapiens
MISFCPDCGKSIQAAFKFCPYCGNSLPVEEHVGSQTFVNPHVSSFQGSKRGLNSSFETSPKKVKWSSTVTSPRLSLFSDGDSSESEDTLSSSERSKGSGSRPPTPKSSPQKTRKSPQVTRGSPQKTSCSPQKTRQSPQTLKRSRVTTSLEALPTGTVLTDKSGRQWKLKSFQTRDNQGILYEAAPTSTLTCDSGPQKQKFSLKLDAKDGRLFNEQNFFQRAAKPLQVNKWKKLYSTPLLAIPTCMGFGVHQDKYRFLVLPSLGRSLQSALDVSPKHVLSERSVLQVACRLLDALEFLHENEYVHGNVTAENIFVDPEDQSQVTLAGYGFAFRYCPSGKHVAYVEGSRSPHEGDLEFISMDLHKGCGPSRRSDLQSLGYCMLKWLYGFLPWTNCLPNTEDIMKQKQNLGDKARLRLGLVAQVIWEAAGHLRLKCRSEV

SEQ ID NO: 854019 - protein, 424 aa, Homo sapiens
MISFCPDCGKSIQAAFKFCPYCGNSLPVEEHVGSQTFVNPHVSSFQGSGSRPPTPKSSPQKTRKSPQVTRGSPQKTSCSPQKTRQSPQTLKRSRVTTSLEALPTGTVLTDKSGRQWKLKSFQTRDNQGILYEAAPTSTLTCDSGPQKQKFSLKLDAKDGRLFNEQNFFQRAAKPLQVNKWKKLYSTPLLAIPTCMGFGVHQDKYRFLVLPSLGRSLQSALDVSPKHVLSERSVLQVACRLLDALEFLHENEYVHGNVTAENIFVDPEDQSQVTLAGYGFAFRYCPSGKHVAYVEGSRSPHEGDLEFISMDLHKGCGPSRRSDLQSLGYCMLKWLYGFLPWTNCLPNTEDIMKQKQKFVDKPGPFVGPCGHWIRPSETLQKYLKVVMALTYEEKPPYAMLRNNLEALLQDLRVSPYDPIGLPMVP

SEQ ID NO: 854020 - protein, 424 aa, Homo sapiens; identical to SEQ ID NO: 854019

SEQ ID NO: 854021 - protein, 230 aa, Homo sapiens [sequence omitted]

SEQ ID NO: 854022 - protein, 254 aa, Homo sapiens
MISFCPDCGKSIQAAFKFCPYCGNSLPVEEHVGSQTFVNPHVSSFQGSKRGLNSSFETSPKKVKWSSTVTSPRLSLFSDGDSSESEDTLSSSERSKGSGSRPPTPKSSPQKTRKSPQVTRGSPQKTSCSPQKTRQSPQTLKRSRVTTSLEALPTGTVLTDKSGRQWKLKSFQTRDNQGILYEAAPTSTLTCDSGPQKQKFSLKLSTSGRSCTRPHCWPSLPAWVSVFTRTNTASRSGGTQPGEELNGLVFAKHV

SEQ ID NO: 854023 - protein, 188 aa, Homo sapiens
MISFCPDCGKSIQAAFKFCPYCGNSLPVEEHVGSQTFVNPHVSSFQGSKRGLNSSFETSPKKVKWSSTVTSPRLSLFSDGDSSESEDTLSSSERSKGSGSRPPTPKSSPQKTRKSPQVTRGSPQKTSCSPQKTRQSPQTLKRSRVTTSLEALPTGTVLTDKSGRQWKLKSFQTWNVHSCHWFQDTHQS

SEQ ID NO: 854024 - protein, 101 aa, Homo sapiens
VQHQEQQAAGHKREVLGMWVQHQGQRSTKGKRCGYEFSTKDSGQLILAGVLGMHFRHEYQLPRPGTVVHALIPALWEAKADGSRGQQFETSLANIVKLCLY

SEQ ID NO: 854025 - protein, 474 aa, Homo sapiens; identical to SEQ ID NO: 854009

SEQ ID NO: 854026 - protein, 474 aa, Homo sapiens; identical to SEQ ID NO: 854009

SEQ ID NO: 854027 - protein, 474 aa, Homo sapiens; identical to SEQ ID NO: 854009

SEQ ID NO: 854028 - protein, 412 aa, Homo sapiens; identical to SEQ ID NO: 854012

SEQ ID NO: 854029 - protein, 243 aa, Homo sapiens
MKLHPPPPSPVTQDHRSKSSHSNWFLVLPSLGRSLQSALDVSPKHVLSERSVLQVACRLLDALEFLHENEYVHGNVTAENIFVDPEDQSQVTLAGYGFAFRYCPSGKHVAYVEGSRSPHEGDLEFISMDLHKGCGPSRRSDLQSLGYCMLKWLYGFLPWTNCLPNTEDIMKQKQKFVDKPGPFVGPCGHWIRPSETLQKYLKVVMALTYEEKPPYAMLRNNLEALLQDLRVSPYDPIGLPMVP

SEQ ID NO: 854030 - protein, 504 aa, Homo sapiens
CVFFVSRMCTSSRRVVESSPVISADRDPLSMISFCPDCGKSIQAAFKFCPYCGNSLPVEEHVGSQTFVNPHVSSFQGSKRGLNSSFETSPKKVKWSSTVTSPRLSLFSDGDSSESEDTLSSSERSKGSGSRPPTPKSSPQKTRKSPQVTRGSPQKTSCSPQKTRQSPQTLKRSRVTTSLEALPTGTVLTDKSGRQWKLKSFQTRDNQGILYEAAPTSTLTCDSGPQKQKFSLKLDAKDGRLFNEQNFFQRAAKPLQVNKWKKLYSTPLLAIPTCMGFGVHQDKYRFLVLPSLGRSLQSALDVSPKHVLSERSVLQVACRLLDALEFLHENEYVHGNVTAENIFVDPEDQSQVTLAGYGFAFRYCPSGKHVAYVEGSRSPHEGDLEFISMDLHKGCGPSRRSDLQSLGYCMLKWLYGFLPWTNCLPNTEDIMKQKQKFVDKPGPFVGPCGHWIRPSETLQKYLKVVMALTYEEKPPYAMLRNNLEALLQDLRVSPYDPIGLPMVP

SEQ ID NO: 854031 - protein, 269 aa, Homo sapiens
MISFCPDCGKSIQAAFKFCPYCGNSLPVEEHVGSQTFVNPHVSSFQGSKRGLNSSFETSPKKVKWSSTVTSPRLSLFSDGDSSESEDTLSSSERSKGSGSRPPTPKSSPQKTRKSPQVTRGSPQKTSCSPQKTRQSPQTLKRSRVTTSLEALPTGTVLTDKSGRQWKLKSFQTRDNQGILYEAAPTSTLTCDSGPQKQKFSLKLDAKDGRLFNEQNFFQRAAKPLQVNKWKKLYSTPLLAIPTCMGFGVHQDKYSTFWCTSWGEAQSAG

SEQ ID NO: 854032 - protein, 188 aa, Homo sapiens; identical to SEQ ID NO: 854023

SEQ ID NO: 854033 - protein, 419 aa, Homo sapiens
MNRHLWKSQLCEMVQPSGGPAADQDVLGEESPLGKPAMLHLPSEQGAPETLQRCLEENQELRDAIRQSNQILRERCEELLHFQASQREEKEFLMCKFQEARKLVERLGLEKLDLKRQKEQALREVEHLKRCQQQMAEDKASVKAQVTSLLGELQESQSRLEAATKECQALEGRARAASEQARQLESEREALQQQHSVQVDQLRMQGQSVEAALRMERQAASEEKRKLAQLQVAYHQLFQEYDNHIKSSVVGSERKRGMQLEDLKQQLQQAEEALVAKQEVIDKLKEEAEQHKIVMETVPVLKAQADIYKADFQAERQAREKLAEKKELLQEQLEQLQREYSKLKASCQESARIEDMRKRHVEVSQAPLPPAPAYLSSPLALPSQRRSPPEEPPDFCCPKCQYQAPDMDTLQIHVMECIE

SEQ ID NO: 854034 - protein, 76 aa, Homo sapiens
SPFLLRASGALAKAGRFRTQVTWAASWTVSTPPSSSTAGSDPTPCVRTPLVQRHILFTKLDCALSRSLNSSEMPHI

SEQ ID NO: 854035 - protein, 419 aa, Homo sapiens; identical to SEQ ID NO: 854033

SEQ ID NO: 854036 - protein, 320 aa, Homo sapiens
MNRHLWKSQLCEMVQPSGGPAADQDVLGEESPLGKPAMLHLPSEQGAPETLQRCLEENQELRDAIRQSNQILRERCEELLHFQASQREEKEFLMCKFQEARKLVERLGLEKLDLKRQKEQALREVEHLKRCQQQMAEDKASVKAQVTSLLGELQESQSRLEAATKECQALEGRRKLAQLQVAYHQLFQEYDNHIKSSVVGSERKRADIYKADFQAERQAREKLAEKKELLQEQLEQLQREYSKLKASCQESARIEDMRKRHVEVSQAPLPPAPAYLSSPLALPSQRRSPPEEPPDFCCPKCQYQAPDMDTLQIHVMECIE

SEQ ID NO: 854037 - protein, 407 aa, Homo sapiens
MVQPSGGPAADQDVLGEESPLGKPAMLHLPSEQGAPETLQRCLEENQELRDAIRQSNQILRERCEELLHFQASQREEKEFLMCKFQEARKLVERLGLEKLDLKRQKEQALREVEHLKRCQQQMAEDKASVKAQVTSLLGELQESQSRLEAATKECQALEGRARAASEQARQLESEREALQQQHSVQVDQLRMQGQSVEAALRMERQAASEEKRKLAQLQVAYHQLFQEYDNHIKSSVVGSERKRGMQLEDLKQQLQQAEEALVAKQEVIDKLKEEAEQHKIVMETVPVLKAQADIYKADFQAERQAREKLAEKKELLQEQLEQLQREYSKLKASCQESARIEDMRKRHVEVSQAPLPPAPAYLSSPLALPSQRRSPPEEPPDFCCPKCQYQAPDMDTLQIHVMECIE

SEQ ID NO: 854038 - protein, 294 aa, Homo sapiens
MNRHLWKSQLCEMVQPSGGPAADQDVLGEESPLGKPAMLHLPSEQGAPETLQRCLEENQELRDAIRQSNQILRERCEELLHFQASQREEKEFLMCKFQEARKLVERLGLEKLDLKRQKEQALREVEHLKRCQQQMAEDKASVKAQVTSLLGELQESQSRLEAATKECQALEGRPGRPRSRPRPLHRARERCDTPTPRSCTHLTSGPQPWTVGPGMTSQGRLRTKGSGPIAAPIPVQHRTTSHPRPTAPPPDINPRAAPATGQPPRPITRTHHAPHPVPAPHQTTPRNPPPTPPT

SEQ ID NO: 854039 - protein, 376 aa, Homo sapiens
MNRHLWKSQLCEMVQPSGGPAADQDVLGEESPLGKPAMLHLPSEQGAPETLQRCLEENQELRDAIRQSNQILRERCEELLHFQASQREEKEFLMCKFQEARKLVERLGLEKLDLKRQKEQALREVEHLKRCQQQMAEDKASVKAQVTSLLGELQESQSRLEAATKECQALEGRPGRLSEALRSWHLTPSSPLEPAPLREAGQTSGGHGRRIELGERPRIPDHSRDNDWPLEALHHRRQSHRQIIINHRPQKMVQKLAQTEDAALDSLERLATTIAPGSGRKQDRQGPKTSDRTPSAGATWEIPKPGSTDTRAEGPRGRTPTPPPHEGVGQHRGKRTAKRRRGTRPRAAQDRGKEHTQQATERDHRDERHAPHHGSS

SEQ ID NO: 854040 - protein, 73 aa, Homo sapiens
MVQPSGGPAADQDVLGEESPLGKPAMLHLPSEQGAPETLQRCLEENQELRGMWVPAGQAIGGYGPPPAGRGAP

SEQ ID NO: 854041 - protein, 419 aa, Homo sapiens; identical to SEQ ID NO: 854033

SEQ ID NO: 854042 - protein, 487 aa, Homo sapiens
MALVIQVGKLRPREVRTPQTINPSLFPSLPVKLSSIIEVPSGGEGCCSRRTLVYKARAFWKGAPLPCWMNRHLWKSQLCEMVQPSGGPAADQDVLGEESPLGKPAMLHLPSEQGAPETLQRCLEENQELRDAIRQSNQILRERCEELLHFQASQREEKEFLMCKFQEARKLVERLGLEKLDLKRQKEQALREVEHLKRCQQQMAEDKASVKAQVTSLLGELQESQSRLEAATKECQALEGRARAASEQARQLESEREALQQQHSVQVDQLRMQGQSVEAALRMERQAASEEKRKLAQLQVAYHQLFQEYDNHIKSSVVGSERKRGMQLEDLKQQLQQAEEALVAKQEVIDKLKEEAEQHKIVMETVPVLKAQADIYKADFQAERQAREKLAEKKELLQEQLEQLQREYSKLKASCQESARIEDMRKRHVEVSQAPLPPAPAYLSSPLALPSQRRSPPEEPPDFCCPKCQYQAPDMDTLQIHVMECIE

SEQ ID NO: 854043 - protein, 419 aa, Homo sapiens; identical to SEQ ID NO: 854033

SEQ ID NO: 854044 - protein, 407 aa, Homo sapiens; identical to SEQ ID NO: 854037

SEQ ID NO: 854045 - protein, 162 aa, Homo sapiens [sequence omitted]

SEQ ID NO: 854046 - protein, 273 aa, Homo sapiens
  misc_feature (257)..(257): Xaa can be any naturally occurring amino acid
MNRHLWKSQLCEMVQPSGGPAADQDVLGEESPLGKPAMLHLPSEQGAPETLQRCLEENQELRDAIRQSNQILRERCEELLHFQASQREEKEFLMCKFQEARKLVERLGLEKLDLKRQKEQALREVEHLKRCQQQMAEDKASVKAQVTSLLGELQESQSRLEAATKECQALEGRRKLAQLQVAYHQLFQEYDNHIKSSVVGSERKRGMQLEDLKQQLQQAEEALVAKQEVIDKLKEEAEQHKIVMETVPVLKAQRISXSGLQAESRPGKLAKKR

SEQ ID NO: 854047 - protein, 827 aa, Homo sapiens
TGGAAATPPPPRRNLRGPEAACFLFVRRGDMAAAPVAAGSGAGRGRRSAATVAAWGGWGGRPRPGNILLQLRQGQLTGRGLVRAVQFTETFLTERDKQSKWSGIPQLLLKLHTTSHLHSDFVECQNILKEISPLLSMEAMAFVTEERKLTQETTYPNTYIFDLFGGVDLLVEILMRPTISIRGQKLKISDEMSKDCLSILYNTCVCTEGVTKRLAEKNDFVIFLFTLMTSKKTFLQTATLIEDILGVKKEMIRLDEVPNLSSLVSNFDQQQLANFCRILAVTISEMDTGNDDKHTLLAKNAQQKKSLSLGPSAAEINQAALLSIPGFVERLCKLATRKVSESTGTASFLQELEEWYTWLDNALVLDALMRVANEESEHNQASIVFPPPGASEENGLPHTSARTQLPQSMKIMHEIMYKLEVLYVLCVLLMGRQRNQVHRMIAEFKLIPGLNNLFDKLIWRKHSASALVLHGHNQNCDCSPDITLKIQFLRLLQSFSDHHENKYLLLNNQELNELSAISLKANIPEVEAVLNTDRSLVCDGKRGLLTRLLQVMKKEPAESSFRFWQARAVESFLRGTTSYADQMFLLKRGLLEHILYCIVDSECKSRDVLQSYFDLLGELMKFNVDAFKRFNKYINTDAKFQVFLKQINSSLVDSNMLVRCVTLSLDRFENQVDMKVAEVLSECRLLAYISQVPTQMSFLFRLINIIHVQTLTQENVSCLNTSLVILMLARRKERLPLYLRLLQRMEHSKKYPGFLLNNFHNLLRFWQQHYLHKDKDSTCLENSSCISFSYWKETVSILLNPDRQSPSALVSYIEEPYMDIDRDFTEE

SEQ ID NO: 854048 - protein, 314 aa, Homo sapiens
MDTGNDDKHTLLAKNAQQKKSLSLGPSAAEINQAALLSIPGFVERLCKLATRKVSESTGTASFLQELEEWYTWLDNALVLDALMRVANEESEHNQASIVFPPPGASEENGLPHTSARTQLPQSMKIMHEIMYKLEVLYVLCVLLMGRQRNQVHRMIAEFKLIPGLNNLFDKLIWRKHSASALVLHGHNQNCDCSPDITLKIQFLRLLQSFSDHHENKYLLLNNQELNELSAISLKANIPEVEAVLNTDRSLVCDGKRGLLTRLLQVMKKEPAESSFSWEVRLGSPPGPPCDNVLGTGLGNLEGRGAGGPNARGE

SEQ ID NO: 854049 - protein, 123 aa, Homo sapiens
MSFLFRLINIIHVQTLTQVRGPGRHTAGKVDWKPLPLSWCPAGFCPPLQKCVSGDPALLRTVLRRNQCPIVQTGPKEGGLASALRSQADLQASALPASPMSTSLTPSALLGFGIGPEAAQLPH

SEQ ID NO: 854050 - protein, 711 aa, Homo sapiens
  misc_feature (1)..(1): Xaa can be any naturally occurring amino acid
XKTKTAKVARPGCEISPLLSMEAMAFVTEERKLTQETTYPNTYIFDLFGGVDLLVEILMRPTISIRGQKLKISDEMSKDCLSILYNTCVCTEGVTKRLAEKNDFVIFLFTLMTSKKTFLQTATLIEDILGVKKEMIRLDEVPNLSSLVSNFDQQQLANFCRILAVTISEMDTGNDDKHTLLAKNAQQKKSLSLGPSAAEINQAALLSIPGFVERLCKLATRKVSESTGTASFLQELEEWYTWLDNALVLDALMRVANEESEHNQASIVFPPPGASEENGLPHTSARTQLPQSMKIMHEIMYKLEVLYVLCVLLMGRQRNQVHRMIAEFKLIPGLNNLFDKLIWRKHSASALVLHGHNQNCDCSPDITLKIQFLRLLQSFSDHHENKYLLLNNQELNELSAISLKANIPEVEAVLNTDRSLVCDGKRGLLTRLLQVMKKEPAESSFRFWQARAVESFLRGTTSYADQMFLLKRGLLEHILYCIVDSECKSRDVLQSYFDLLGELMKFNVDAFKRFNKYINTDAKFQVFLKQINSSLVDSNMLVRCVTLSLDRFENQVDMKVAEVLSECRLLAYISQVPTQMSFLFRLINIIHVQTLTQENVSCLNTSLVILMLARRKERLPLYLRLLQRMEHSKKYPGFLLNNFHNLLRFWQQHYLHKDKDSTCLENSSCISFSYWKETVSILLNPDRQSPSALVSYIEEPYMDIDRDFTEE

SEQ ID NO: 854051 - protein, 399 aa, Homo sapiens
MRSQSTIKVHRMIAEFKLIPGLNNLFDKLIWRKHSASALVLHGHNQNCDCSPDITLKIQFLRLLQSFSDHHENKYLLLNNQELNELSAISLKANIPEVEAVLNTDRSLVCDGKRGLLTRLLQVMKKEPAESSFRFWQARAVESFLRGTTSYADQMFLLKRGLLEHILYCIVDSECKSRDVLQSYFDLLGELMKFNVDAFKRFNKYINTDAKFQVFLKQINSSLVDSNMLVRCVTLSLDRFENQVDMKVAEVLSECRLLAYISQVPTQMSFLFRLINIIHVQTLTQENVSCLNTSLVILMLARRKERLPLYLRLLQRMEHSKKYPGFLLNNFHNLLRFWQQHYLHKDKDSTCLENSSCISFSYWKETVSILLNPDRQSPSALVSYIEEPYMDIDRDFTEE

SEQ ID NO: 854052 - protein, 999 aa, Homo sapiens
TGGAAATPPPPRRNLRGPEAACFLFVRRGDMAAAPVAAGSGAGRGRRSAATVAAWGGWGGRPRPGNILLQLRQGQLTGRGLVRAVQFTETFLTERDKQSKWSGIPQLLLKLHTTSHLHSDFVECQNILKEISPLLSMEAMAFVTEERKLTQETTYPNTYIFDLFGGVDLLVEILMRPTISIRGQKLKISDEMSKDCLSILYNTCVCTEGVTKRLAEKNDFVIFLFTLMTSKKTFLQTATLIEDILGVKKEMIRLDEVPNLSSLVSNFDQQQLANFCRILAVTISEMDTGNDDKHTLLAKNAQQKKSLSLGPSAAEINQAALLSIPGFVERLCKLATRKVSESTGTASFLQELEEWYTWLDNALVLDALMRVANEESEHNQASIVFPPPGASEENGLPHTSARTQLPQSMKIMHEIMYKLEVLYVLCVLLMGRQRNQVHRMIAEFKLIPGLNNLFDKLIWRKHSASALVLHGHNQNCDCSPVSRRPPGTDGASLAWSSCFKTCCCPFDLFSFGSRAETKIISYSPLIGSYLGVGSEGTPLPTPTYAEIPFKIFLGWAQCLGLPKCCDYRCNHHAPPYFLLSVMACFEQEGGHISLICCGSDVEVNRWFSNYRKVLMVHEDRGLEKQAPTRVSACVILEPCGCGPNIEAVHVFQDITLKIQFLRLLQSFSDHHENKYLLLNNQELNELSAISLKANIPEVEAVLNTDRSLVCDGKRGLLTRLLQVMKKEPAESSFRFWQARAVESFLRGTTSYADQMFLLKRGLLEHILYCIVDSECKSRDVLQSYFDLLGELMKFNVDAFKRFNKYINTDAKFQVFLKQINSSLVDSNMLVRCVTLSLDRFENQVDMKVAEVLSECRLLAYISQVPTQMSFLFRLINIIHVQTLTQENVSCLNTSLVILMLARRKERLPLYLRLLQRMEHSKKYPGFLLNNFHNLLRFWQQHYLHKDKDSTCLENSSCISFSYWKETVSILLNPDRQSPSALVSYIEEPYMDIDRDFTEE

SEQ ID NO: 854053 - protein, 532 aa, Homo sapiens
AYYYYYYYYNERPLDPSAAEINQAALLSIPGFVERLCKLATRKVSESTGTASFLQELEEWYTWLDNALVLDALMRVANEESEHNQASIVFPPPGASEENGLPHTSARTQLPQSMKIMHEIMYKLEVLYVLCVLLMGRQRNQVHRMIAEFKLIPGLNNLFDKLIWRKHSASALVLHGHNQNCDCSPDITLKIQFLRLLQSFSDHHENKYLLLNNQELNELSAISLKANIPEVEAVLNTDRSLVCDGKRGLLTRLLQVMKKEPAESSFRFWQARAVESFLRGTTSYADQMFLLKRGLLEHILYCIVDSECKSRDVLQSYFDLLGELMKFNVDAFKRFNKYINTDAKFQVFLKQINSSLVDSNMLVRCVTLSLDRFENQVDMKVAEVLSECRLLAYISQVPTQMSFLFRLINIIHVQTLTQENVSCLNTSLVILMLARRKERLPLYLRLLQRMEHSKKYPGFLLNNFHNLLRFWQQHYLHKDKDSTCLENSSCISFSYWKETVSILLNPDRQSPSALVSYIEEPYMDIDRDFTEE

SEQ ID NO: 854054 - protein, 677 aa, Homo sapiens
TGGAAATPPPPRRNLRGPEAACFLFVRRGDMAAAPVAAGSGAGRGRRSAATVAAWGGWGGRPRPGNILLQLRQGQLTGRGLVRAVQFTETFLTERDKQSKWSGIPQLLLKLHTTSHLHSDFVECQNILKEISPLLSMEAMAFVTEERKLTQETTYPNTYIFDLFGGVDLLVEILMRPTISIRGQKLKISDEMSKDCLSILYNTCVCTEGVTKRLAEKNDFVIFLFTLMTSKKTFLQTATLIEDILGVKKEMIRLDEVPNLSSLVSNFDQQQLANFCRILAVTISEMDTGNDDKHTLLAKNAQQKKSLSLGPSAAEINQAALLSIPGFVERLCKLATRKVSESTGTASFLQELEEWYTWLDNALVLDALMRVANEESEHNQASIVFPPPGASEENGLPHTSARTQLPQSMKIMHEIMYKLEVLYVLCVLLMGRQRNQVHRMIAEFKLIPGLNNLFDKLIWRKHSASALVLHGHNQNCDCSPDITLKIQFLRLLQSFSDHHENKYLLLNNQELNELSAISLKANIPEVEAVLNTDRSLVCDGKRGLLTRLLQVMKKEPAESSFRFWQARAVESFLRGTTSYADQMFLLKRGLLEHILYCIVDSECKSRDVLQSYFDLLGELMKFNVDAFKRFNKYINTDAKFQVFLKQINSSLVDSNMLVRCVTLSLDRFENQVDMKGT

SEQ ID NO: 854055 - protein, 385 aa, Homo sapiens
MVHEDRGLEKQAPTRVSACVILEPCGCGPNIEAVHVFQDITLKIQFLRLLQSFSDHHENKYLLLNNQELNELSAISLKANIPEVEAVLNTDRSLVCDGKRGLLTRLLQVMKKEPAESSFRFWQARAVESFLRGTTSYADQMFLLKRGLLEHILYCIVDSECKSRDVLQSYFDLLGELMKFNVDAFKRFNKYINTDAKFQVFLKQINSSLVDSNMLVRCVTLSLDRFENQVDMKVAEVLSECRLLAYISQVPTQMSFLFRLINIIHVQTLTQENVSCLNTSLVILMLARRKERLPLYLRLLQRMEHSKKYPGFLLNNFHNLLRFWQQHYLHKDKDSTCLENSSCISFSYWKETVSILLNPDRQSPSALVSYIEEPYMDIDRDFTEE

SEQ ID NO: 854056 - protein, 813 aa, Homo sapiens
TGGAAATPPPPRRNLRGPEAACFLFVRRGDMAAAPVAAGSGAGRGRRSAATVAAWGGWGGRPRPGNILLQLRQGQLTGRGLVRAVQFTETFLTERDKQSKWSGIPQLLLKLHTTSHLHSDFVECQNILKEISPLLSMEAMAFVTEERKLTQETTYPNTYIFDLFGGVDLLVEILMRPTISIRGQKLKISDEMSKDCLSILYNTCVCTEGVTKRLAEKNDFVIFLFTLMTSKKTFLQTATLIEDILGVKKEMIRLDEVPNLSSLVSNFDQQQLANFCRILAVTISEMDTGNDDKHTLLAKNAQQKKSLSLGPSAAEINQAALLSIPGFVERLCKLATRKVSESTGTASFLQELEEWYTWLDNALVLDALMRVANEESEHNQASIVFPPPGASEENGLPHTSARTQLPQSMKIMHEIMYKLEVLYVLCVLLMGRQRNQVHRMIAEFKLIPGLNNLFDKLIWRKHSASALVLHGHNQNCDCSPDITLKIQFLRLLQSFSDHHENKYLLLNNQELNELSAISLKANIPEVEAVLNTDRSLVCDGKRGLLTRLLQVMKKEPAESSFRFWQARAVESFLRGTTSYADQMFLLKRGLLEHILYCIVDSECKSRDVLQSYFDLLGELMKFNVDAFKRFNKYINTDAKFQVFLKQINSSLVDSNMLVRCVTLSLDRFENQVDMKVAEVLSECRLLAYISQVPTQMSFLFRLINIIHVQTLTQENVSCLNTSLVILMLARRKERLPLYLRLLQRMEHSKKYPGFLLNNFHNLLRFWQQHYLHKDKDSTCLENSSCISFSYWKETVSILLNPDRQSPSALISSV

SEQ ID NO: 854057 - protein, 827 aa, Homo sapiens; identical to SEQ ID NO: 854047

SEQ ID NO: 854058 - protein, 827 aa, Homo sapiens; identical to SEQ ID NO: 854047

SEQ ID NO: 854059 - protein, 827 aa, Homo sapiens; identical to SEQ ID NO: 854047

SEQ ID NO: 854060 - protein, 786 aa, Homo sapiens
TGGAAATPPPPRRNLRGPEAACFLFVRRGDMAAAPVAAGSGAGRGRRSAATVAAWGGWGGRPRPGNILLQLRQGQLTGRGLVRAVQFTETFLTERDKQSKWSGIPQLLLKLHTTSHLHSDFVECQNILKEISPLLSMEAMAFVTEERKLTQETTYPNTYIFDLFGGVDLLVEILMRPTISIRGQKLKISDEMSKDCLSILYNTCVCTEGVTKRLAEKNDFVIFLFTLMTSKKTFLQTATLIEDILGVKKEMIRLDEVPNLSSLVSNFDQQQLANFCRILAVTISEMDTGNDDKHTLLAKNAQQKKSLSLGPSAAEINQAALLSIPGFVERLCKLATRKVSESTGTASFLQELEEWYTWLDNALVLDALMRVANEESEHNQASIVFPPPGASEENGLPHTSARTQLPQSMKIMHEIMYKLEVLYVLCVLLMGRQRNQVHRMIAEFKLIPGLNNLFDKLIWRKHSASALVLHGHNQNCDCSPDITLKIQFLRLLQSFSDHHENKYLLLNNQELNELSAISLKANIPEVEAVLNTDRSLVCDGKRGLLTRLLQVMKKEPAESSFRFWQARAVESFLRGTTSYADQMFLLKRGLLEHILYCIVDSECKSRDVLQSYFDLLGELMKFNVDAFKRFNKYINTDAKFQVFLKQINSSLVDSNMLVRCVTLSLDRFENQVDMKVAEVLSECRLLAYISQVPTQMSFLFRLINIIHVQTLTQENVSCLNTSLVILMLARRKERLPLYLRLLQRMEHSKKYPGFLLNNFHNLLRFWQQHYLHKDKDSTCLENAAPA

SEQ ID NO: 854061 - protein, 697 aa, Homo sapiens
TGGAAATPPPPRRNLRGPEAACFLFVRRGDMAAAPVAAGSGAGRGRRSAATVAAWGGWGGRPRPGNILLQLRQGQLTGRGLVRAVQFTETFLTERDKQSKWSGIPQLLLKLHTTSHLHSDFVECQNILKEISPLLSMEAMAFVTEERKLTQETTYPNTYIFDLFGGVDLLVEILMRPTISIRGQKLKISDEMSKDCLSILYNTCVCTEGVTKRLAEKNDFVIFLFTLMTSKKTFLQTATLIEDILGVKKEMIRLDEVPNLSSLVSNFDQQQLANFCRILAVTISEMDTGNDDKHTLLAKNAQQKKSLSLGPSAAEINQAALLSIPGFVERLCKLATRKVSESTGTASFLQELEEWYTWLDNALVLDALMRVANEESEHNQASIVFPPPGASEENGLPHTSARTQLPQSMKIMHEIMYKLEVLYVLCVLLMGRQRNQVHRMIAEFKLIPGLNNLFDKLIWRKHSASALVLHGHNQNCDCSPDITLKIQFLRLLQSFSDHHENKYLLLNNQELNELSAISLKANIPEVEAVLNTDRSLVCDGKRGLLTRLLQVMKKEPAESSFRFWQARAVESFLRGTTSYADQMFLLKRGLLEHILYCIVDSECKSRDVLQSYFDLLGELMKFNVDAFKRFNKYINTDAKFQVFLKQINSSLVDSNMLVRCVTPYWPAGQYGCGEDGKLQEMQLKEAKHIAEDSDRKY

SEQ ID NO: 854062 - protein, 134 aa, Homo sapiens
AYYYYYYYKLAAADPSAAEINQAALLSIPGFVERLCKLATRKVSESTGTASFLQELEEWYTWLDNALVLDALMRVANEESEHNQASIVFPPPGASEENGLPHTSARTQLPQSMKIMHEIMYKLEVLYVLCAAPA

SEQ ID NO: 854063 - protein, 102 aa, Homo sapiens [sequence omitted]

SEQ ID NO: 854064 - protein, 819 aa, Homo sapiens
TGGAAATPPPPRRNLRGPEAACFLFVRRGDMAAAPVAAGSGAGRGRRSAATVAAWGGWGGRPRPGNILLQLRQGQLTGRGLVRAVQFTETFLTERDKQSKWSGIPQLLLKLHTTSHLHSDFVECQNILKEISPLLSMEAMAFVTEERKLTQETTYPNTYIFDLFGGVDLLVEILMRPTISIRGQKLKISDEMSKDCLSILYNTCVCTEGVTKRLAEKNDFVIFLFTLMTSKKTFLQTATLIEDILGVKKEMIRLDEVPNLSSLVSNFDQQQLANFCRILAVTISEMDTGNDDKHTLLAKNAQQKKSLSLGPSAAEINQAALLSIPGFVERLCKLATRKVSESTGTASFLQELEEWYTWLDNALVLDALMRVANEESEHNQGASEENGLPHTSARTQLPQSMKIMHEIMYKLEVLYVLCVLLMGRQRNQVHRMIAEFKLIPGLNNLFDKLIWRKHSASALVLHGHNQNCDCSPDITLKIQFLRLLQSFSDHHENKYLLLNNQELNELSAISLKANIPEVEAVLNTDRSLVCDGKRGLLTRLLQVMKKEPAESSFRFWQARAVESFLRGTTSYADQMFLLKRGLLEHILYCIVDSECKSRDVLQSYFDLLGELMKFNVDAFKRFNKYINTDAKFQVFLKQINSSLVDSNMLVRCVTLSLDRFENQVDMKVAEVLSECRLLAYISQVPTQMSFLFRLINIIHVQTLTQENVSCLNTSLVILMLARRKERLPLYLRLLQRMEHSKKYPGFLLNNFHNLLRFWQQHYLHKDKDSTCLENSSCISFSYWKETVSILLNPDRQSPSALVSYIEEPYMDIDRDFTEE

SEQ ID NO: 854065 - protein, 542 aa, Homo sapiens
MDTGNDDKHTLLAKNAQQKKSLSLGPSAAEINQAALLSIPGFVERLCKLATRKVSESTGTASFLQELEEWYTWLDNALVLDALMRVANEESEHNQASIVFPPPGASEENGLPHTSARTQLPQSMKIMHEIMYKLEVLYVLCVLLMGRQRNQVHRMIAEFKLIPGLNNLFDKLIWRKHSASALVLHGHNQNCDCSPDITLKIQFLRLLQSFSDHHENKYLLLNNQELNELSAISLKANIPEVEAVLNTDRSLVCDGKRGLLTRLLQVMKKEPAESSFRFWQARAVESFLRGTTSYADQMFLLKRGLLEHILYCIVDSECKSRDVLQSYFDLLGELMKFNVDAFKRFNKYINTDAKFQVFLKQINSSLVDSNMLVRCVTLSLDRFENQVDMKVAEVLSECRLLAYISQVPTQMSFLFRLINIIHVQTLTQENVSCLNTSLVILMLARRKERLPLYLRLLQRMEHSKKYPGFLLNNFHNLLRFWQQHYLHKDKDSTCLENSSCISFSYWKETVSILLNPDRQSPSALVSYIEEPYMDIDRDFTEE

SEQ ID NO: 854066 - protein, 677 aa, Homo sapiens; identical to SEQ ID NO: 854054

SEQ ID NO: 854067 - protein, 694 aa, Homo sapiens
TGGAAATPPPPRRNLRGPEAACFLFVRRGDMAAAPVAAGSGAGRGRRSAATVAAWGGWGGRPRPGNILLQLRQGQLTGRGLVRAVQFTETFLTERDKQSKWSGIPQLLLKLHTTSHLHSDFVECQNILKEISPLLSMEAMAFVTEERKLTQETTYPNTYIFDLFGGVDLLVEILMRPTISIRGQKLKISDEMSKDCLSILYNTCVCTEGVTKRLAEKNDFVIFLFTLMTSKKTFLQTATLIEDILGVKKEMIRLDEVPNLSSLVSNFDQQQLANFCRILAVTISEMDTGNDDKHTLLAKNAQQKKSLSLGPSAAEINQAALLSIPGFVERLCKLATRKVSESTGTASFLQELEEWYTWLDNALVLDALMRVANEESEHNQASIVFPPPGASEENGLPHTSARTQLPQSMKIMHEIMYKLEVLYVLCVLLMGRQRNQVHRMIAEFKLIPGLNNLFDKLIWRKHSASALVLHGHNQNCDCSPDITLKIQFLRLLQSFSDHHENKYLLLNNQELNELSAISLKANIPEVEAVLNTDRSLVCDGKRGLLTRLLQVMKKEPAESSFRFWQARAVESFLRGTTSYADQMFLLKRGLLEHILYCIVDSECKSRDVLQSYFDLLGELMKFNVDAFKRFNKYINTDAKVKLTQGSVECAGLSRSSPGVLVCQALGTGFTLETTGESGQSLANIHWNLLCLALC

SEQ ID NO: 854068 - protein, 827 aa, Homo sapiens; identical to SEQ ID NO: 854047

SEQ ID NO: 854069 - protein, 827 aa, Homo sapiens; identical to SEQ ID NO: 854047

SEQ ID NO: 854070 - protein, 827 aa, Homo sapiens; identical to SEQ ID NO: 854047

SEQ ID NO: 854071 - protein, 774 aa, Homo sapiens
TGGAAATPPPPRRNLRGPEAACFLFVRRGDMAAAPVAAGSGAGRGRRSAATVAAWGGWGGRPRPGNILLQLRQGQLTGRGLVRAVQFTETFLTERDKQSKWSGIPQLLLKLHTTSHLHSDFVECQNILKEISPLLSMEAMAFVTEERKLTQETTYPNTYIFDLFGGVDLLVEILMRPTISIRGQKLKISDEMSKDCLSILYNTCVCTEGVTKRLAEKNDFVIFLFTLMTSKKTFLQTATLIEDILGVKKEMIRLDEVPNLSSLVSNFDQQQLANFCRILAVTISEMDTGNDDKHTLLAKNAQQKKSLSLGPSAAEINQAALLSIPGFVERLCKLATRKVSESTGTASFLQELEEWYTWLDNALVLDALMRVANEESEHNQASIVFPPPGASEENGLPHTSARTQLPQSMKIMHEIMYKLEVLYVLCVLLMGRQRNQVHRMIAEFKLIPGLNNLFDKLIWRKHSASALVLHGHNQNCDCSPDITLKIQFLRLLQSFSDHHENKYLLLNNQELNELSAISLKANIPEVEAVLNTDRSLVCDGKRGLLTRLLQVMKKEPAESSFRFWQARAVESFLRGTTSYADQMFLLKRGLLEHILYCIVDSECKSRDVLQSYFDLLGELMKFNVDAFKRFNKYINTDAKFQVFLKQINSSLVDSNMLVRCVTLSLDRFENQVDMKVAEVLSECRLLAYISQVPTQMSFLFRLINIIHVQTLTQENVSCLNTSLVILMLARRKERLPLYLRLLQRMEHSKKYPGFLLNNFHNLLRFWQQHYAAPA

SEQ ID NO: 854072 - protein, 503 aa, Homo sapiens
TGGAAATPPPPRRNLRGPEAACFLFVRRGDMAAAPVAAGSGAGRGRRSAATVAAWGGWGGRPRPGNILLQLRQGQLTGRGLVRAVQFTETFLTERDKQSKWSGIPQLLLKLHTTSHLHSDFVECQNILKEISPLLSMEAMAFVTEERKLTQETTYPNTYIFDLFGGVDLLVEILMRPTISIRGQKLKISDEMSKDCLSILYNTCVCTEGVTKRLAEKNDFVIFLFTLMTSKKTFLQTATLIEDILGVKKEMIRLDEVPNLSSLVSNFDQQQLANFCRILAVTISEMDTGNDDKHTLLAKNAQQKKSLSLGPSAAEINQAALLSIPGFVERLCKLATRKVSESTGTASFLQELEEWYTWLDNALVLDALMRVANEESEHNQASIVFPPPGASEENGLPHTSARTQLPQSMKIMHEIMYKLEVLYVLCVLLMGRQRNQVHRMIAEFKLIPGLNNLFDKLIWRKHSASALVLHGHNQNCDCSPVSRRPPGTDGASLAWSSCFKTCC

SEQ ID NO: 854073 - protein, 94 aa, Homo sapiens
QTSKYLTEGPVPIRRREDLGDGQRLSPTPTGAAESELAFPSFLLQCFLGALWLALSGTLFSTPGPLRASSHSLQDPVHTEKIPEEPPAPPQLPV

SEQ ID NO: 854074 - protein, 960 aa, Homo sapiens
RGSSGVRRRGREAAMAAHGKLRRERGLQAEYETQVKEMRWQLSEQLRCLELQGELRRELLQELAEFMRRRAEVELEYSRGLEKLAERFSSRGGRLGSSREHQSFRKEPSLLSPLHCWAVLLQHTRQQSRESAALSEVLAGPLAQRLSHIAEDVGRLVKKSRDLEQQLQDELLEVVSELQTAKKTYQAYHMESVNAEAKLREAERQEEKRAGRSVPTTTAGATEAGPLRKSSLKKGGRLVEKRQAKFMEHKLKCTKARNEYLLSLASVNAAVSNYYLHDVLDLMDCCDTGFHLALGQVLRSYTAAESRTQASQVQGLGSLEEAVEALDPPGDKAKVLEVHATVFCPPLRFDYHPHDGDEVAEICVEMELRDEILPRAQNIQSRLDRQTIETEEVNKTLKATLQALLEVVASDDGDVLDSFQTSPSTESLKSTSSDPGSRQAGRRRGQQQETETFYLTKLQEYLSGRSILAKLQAKHEKLQEALQRGDKEEQEVSWTQYTQRKFQKSRQPRPSSQYNQRLFGGDMEKFIQSSGQPVPLVVESCIRFINLNGLQHEGIFRVSGAQLRVSEIRDAFERGEDPLVEGCTAHDLDSVAGVLKLYFRSLEPPLFPPDLFGELLASSELEATAERVEHVSRLLWRLPAPVLVVLRYLFTFLNHLAQYSDENMMDPYNLAVCFGPTLLPVPAGQDPVALQGRVNQLVQTLIVQPDRVFPPLTSLPGPVYEKCMAPPSASCLGDAQLESLGADNEPELEAEMPAQEDDLEGVVEAVACFAYTGRTAQELSFRRGDVLRLHERASSDWWRGEHNGMRGLIPHKYITLPAGTEKQVVGAGLQTAGESGSSPEGLLASELVHRPEPCTSPEAMGPSGHRRRCLVPASPEQHVEVDKAVAQNMDSVFKELLGKTSVRQGLGPASTTSPSPGPRSPKAPPSSRLGRNKGFSRGPGAPASPSASHPQGLDTTPKPH

SEQ ID NO: 854075 - protein, 934 aa, Homo sapiens
RGSSGVRRRGREAAMAAHGKLRRERGLQAEYETQVKEMRWQLSEQLRCLELQGELRRELLQELAEFMRRRAEVELEYSRGLEKLAERFSSRGGRLGSSREHQSFRKEPSLLSPLHCWAVLLQHTRQQSRESAALSEVLAGPLAQRLSHIAEDVGRLVKKSRDLEQQLQDELLEVVSELQTAKKTYQAYHMESVNAEAKLREAERQEEKRAGRSVPTTTAGATEAGPLRKSSLKKGGRLVEKRQAKFMEHKLKCTKARNEYLLSLASVNAAVSNYYLHDVLDLMDCCDTGFHLALGQVLRSYTAAESRTQASQVQGLGSLEEAVEALDPPGDKAKVLEVHATVFCPPLRFDYHPHDGDEVAEICVEMELRDEILPRAQNIQSRLDRQTIETEEVNKTLKATLQALLEVVASDDGDVLDSFQTSPSTESLKSTSSDPGSRQAGRRRGQQQETETFYLTKLQEYLSGRSILAKLQAKHEKLQEALQRGDKEEQEVSWTQYTQRKFQKSRQPRPSSQYNQRLFGGDMEKFIQSSGQPVPLVVESCIRFINLNGEDPLVEGCTAHDLDSVAGVLKLYFRSLEPPLFPPDLFGELLASSELEATAERVEHVSRLLWRLPAPVLVVLRYLFTFLNHLAQYSDENMMDPYNLAVCFGPTLLPVPAGQDPVALQGRVNQLVQTLIVQPDRVFPPLTSLPGPVYEKCMAPPSASCLGDAQLESLGADNEPELEAEMPAQEDDLEGVVEAVACFAYTGRTAQELSFRRGDVLRLHERASSDWWRGEHNGMRGLIPHKYITLPAGTEKQVVGAGLQTAGESGSSPEGLLASELVHRPEPCTSPEAMGPSGHRRRCLVPASPEQHVEVDKAVAQNMDSVFKELLGKTSVRQGLGPASTTSPSPGPRSPKAPPSSRLGRNKGFSRGPGAPASPSASHPQGLDTTPKPH

SEQ ID NO: 854076 - protein, 939 aa, Homo sapiens
RGSSGVRRRGREAAMAAHGKLRRERGLQAEYETQVKEMRWQLSEQLRCLELQGELRRELLQELAEFMRRRAEVELEYSRGLEKLAERFSSRGGRLGSSREHQSFRKEPSLLSPLHCWAVLLQHTRQQSRESAALSEVLAGPLAQRLSHIAEDVGRLVKKSRDLEQQLQDELLEVVSELQTAKKTYQAYHMESVNAEAKLREAERQEEKRAGRSVPTTTAGATEAGPLRKSSLKKGGRLVEKRQAKFMEHKLKCTKARNEYLLSLASVNAAVSNYYLHDVLDLMDCCDTGFHLALGQVLRSYTAAESRTQASQVQGLGSLEEAVEALDPPGDKAKVLEVHATVFCPPLRFDYHPHDGDEVAEICVEMELRDEILPRAQNIQSRLDRQTIETEEVNKTLKATLQALLEVVASDDGDVLDSFQTSPSTESLKSTSSDPGSRQAGRRRGQQQETETFYLTKLQEYLSGRSILAKLQAKHEKLQEALQRGDKEEQEVSWTQYTQRKSRRAASPAPAPSITRDSWGRHGEVYPGLQHEGIFRVSGAQLRVSEIRDAFERGEDPLVEGCTAHDLDSVAGVLKLYFRSLEPPLFPPDLFGELLASSELEATAERVEHVSRLLWRLPAPVLVVLRYLFTFLNHLAQYSDENMMDPYNLAVCFGPTLLPVPAGQDPVALQGRVNQLVQTLIVQPDRVFPPLTSLPGPVYEKCMAPPSASCLGDAQLESLGADNEPELEAEMPAQEDDLEGVVEAVACFAYTGRTAQELSFRRGDVLRLHERASSDWWRGEHNGMRGLIPHKYITLPAGTEKQVVGAGLQTAGESGSSPEGLLASELVHRPEPCTSPEAMGPSGHRRRCLVPASPEQHVEVDKAVAQNMDSVFKELLGKTSVRQGLGPASTTSPSPGPRSPKAPPSSRLGRNKGFSRGPGAPASPSASHPQGLDTTPKPH

SEQ ID NO: 854077 - protein, 183 aa, Homo sapiens
EGLGWAREQSLSDHSWLARRLLALDPVQEKEHSKQAGPSHRRTEKQVVGAGLQTAGESGSSPEGLLASELVHRPEPCTSPEAMGPSGHRRRCLVPASPEQHVEVDKAVAQNMDSVFKELLGKTSVRQGLGPASTTSPSPGPRSPKAPPSSRLGRNKGFSRGPGAPASPSASHPQGLDTTPKPH

SEQ ID NO: 854078 - protein, 535 aa, Homo sapiens
RGSSGVRRRGREAAMAAHGKLRRERGLQAEYETQVKEMRWQLSEQLRCLELQGELRRELLQELAEFMRRRAEVELEYSRGLEKLAERFSSRGGRLGSSREHQSFRKEPSLLSPLHCWAVLLQHTRQQSRESAALSEVLAGPLAQRLSHIAEDVGRLVKKSRDLEQQLQDELLEVVSELQTAKKTYQAYHMESVNAEAKLREAERQEEKRAGRSVPTTTAGATEAGPLRKSSLKKGGRLVEKRQAKFMEHKLKCTKARNEYLLSLASVNAAVSNYYLHDVLDLMDCCDTGFHLALGQVLRSYTAAESRTQASQVQGLGSLEEAVEALDPPGDKAKVLEVHATVFCPPLRFDYHPHDGDEVAEICVEMELRDEILPRAQNIQSRLDRQTIETEEVNKTLKATLQALLEVVASDDGDVLDSFQTSPSTESLKSTSSDPGSRQAGRRRGQQQETETFYLTKLQEYLSGRSILAKLQAKHEKLQEALQRGDKEEQEVSWTQYTQRKFQKSRQPRPSSQYNQRLFGGDMEKFIQQQFANTT

SEQ ID NO: 854079 - protein, 102 aa, Homo sapiens
SARLCVRGSMASGEVHGSGRWRVDKAVAQNMDSVFKELLGKTSVRQGLGPASTTSPSPGPRSPKAPPSSRLGRNKGFSRGPGAPASPSASHPQGLDTTPKPH

SEQ ID NO: 854080 - protein, 960 aa, Homo sapiens; identical to SEQ ID NO: 854074

SEQ ID NO: 854081 - protein, 962 aa, Homo sapiens
CKGGCHLPEPGYRRERKSQGKPFRGFPGTRERQEAKLKEMRWQLSEQLRCLELQGELRRELLQELAEFMRRRAEVELEYSRGLEKLAERFSSRGGRLGSSREHQSFRKEPSLLSPLHCWAVLLQHTRQQSRESAALSEVLAGPLAQRLSHIAEDVGRLVKKSRDLEQQLQDELLEVVSELQTAKKTYQAYHMESVNAEAKLREAERQEEKRAGRSVPTTTAGATEAGPLRKSSLKKGGRLVEKRQAKFMEHKLKCTKARNEYLLSLASVNAAVSNYYLHDVLDLMDCCDTGFHLALGQVLRSYTAAESRTQASQVQGLGSLEEAVEALDPPGDKAKVLEVHATVFCPPLRFDYHPHDGDEVAEICVEMELRDEILPRAQNIQSRLDRQTIETEEVNKTLKATLQALLEVVASDDGDVLDSFQTSPSTESLKSTSSDPGSRQAGRRRGQQQETETFYLTKLQEYLSGRSILAKLQAKHEKLQEALQRGDKEEQEVSWTQYTQRKFQKSRQPRPSSQYNQRLFGGDMEKFIQSSGQPVPLVVESCIRFINLNGLQHEGIFRVSGAQLRVSEIRDAFERGEDPLVEGCTAHDLDSVAGVLKLYFRSLEPPLFPPDLFGELLASSELEATAERVEHVSRLLWRLPAPVLVVLRYLFTFLNHLAQYSDENMMDPYNLAVCFGPTLLPVPAGQDPVALQGRVNQLVQTLIVQPDRVFPPLTSLPGPVYEKCMAPPSASCLGDAQLESLGADNEPELEAEMPAQEDDLEGVVEAVACFAYTGRTAQELSFRRGDVLRLHERASSDWWRGEHNGMRGLIPHKYITLPAGTEKQVVGAGLQTAGESGSSPEGLLASELVHRPEPCTSPEAMGPSGHRRRCLVPASPEQHVEVDKAVAQNMDSVFKELLGKTSVRQGLGPASTTSPSPGPRSPKAPPSSRLGRNKGFSRGPGAPASPSASHPQGLDTTPKPH

SEQ ID NO: 854082 - protein, 988 aa, Homo sapiens
RGSSGVRRRGREAAMAAHGKLRRERGLQAEYETQVKEMRWQLSEQLRCLELQGELRRELLQELAEFMRRRAEVELEYSRGLEKLAERFSSRGGRLGSSREHQSFRKEPSLLSPLHCWAVLLQHTRQQSRESAALSEVLAGPLAQRLSHIAEDVGRLVKKSRDLEQQLQDELLEVVSELQTAKKTYQAYHMESVNAEAKLREAERQEEKRAGRSVPTTTAGATEAGPLRKSSLKKGGRLVEKRQAKFMEHKLKCTKARNEYLLSLASVNAAVSNYYLHDVLDLMDCCDTGFHLALGQVLRSYTAAESRTQASQVQGLGSLEEAVEALDPPGDKAKVLEVHATVFCPPLRFDYHPHDGDEVAEICVEMELRDEILPRAQNIQSRLDRQTIETEEVNKTLKATLQALLEVVASDDGDVLDSFQTSPSTESLKSTSSDPGSRQAGRRRGQQQETETFYLTKLQEYLSGRSILAKLQAKHEKLQEALQRGDKEEQEVSWTQYTQRKFQKSRQPRPSSQYNQRLFGGDMEKFIQSSGQPVPLVVESCIRFINLNGLQHEGIFRVSGAQLRVSEIRDAFERGEDPLVEGCTAHDLDSVAGVLKLYFRSLEPPLFPPDLFGELLASSELEATAERVEHVSRLLWRLPAPVLVVLRYLFTFLNHLAQYSDENMMDPYNLAVCFGPTLLPVPAGQDPVALQGRVNQLVQTLIVQPDRVFPPLTSLPGPVYEKCMAPPSASCLGYTLGAAEGTGGSTGEEPPSSASSALNLRDAQLESLGADNEPELEAEMPAQEDDLEGVVEAVACFAYTGRTAQELSFRRGDVLRLHERASSDWWRGEHNGMRGLIPHKYITLPAGTEKQVVGAGLQTAGESGSSPEGLLASELVHRPEPCTSPEAMGPSGHRRRCLVPASPEQHVEVDKAVAQNMDSVFKELLGKTSVRQGLGPASTTSPSPGPRSPKAPPSSRLGRNKGFSRGPGAPASPSASHPQGLDTTPKPH

SEQ ID NO: 854083 - protein, 39 aa, Homo sapiens
MDSRAVHVTVGVCGESVYVSVLPPHPPLPGSKETPCHVE

SEQ ID NO: 854084 - protein, 139 aa, Homo sapiens
RGSSGVRRRGREAAMAAHGKLRRERGLQAEYETQVKGERAPGAPGPFPAENPRSCGSSKRPRRLSHIAEDVGRLVKKLDRQTIETEEVNKTLKATLQALLEVVASDDGDVLDSFQTSPSTESLKSTPGRAGWRFIKTSC

SEQ ID NO: 854085 - protein, 137 aa, Homo sapiens
MMIDLAKVADLVLMLIDASFGFEMEMFEFLNICQAHGFPKILGVLTHLDSFKHNKQLKKTKKRLKHRFWTEVYQVAKLFYLSGMVHGEYQNQEIHNLGHFITVMKFRPLMANFSPLYPGRQDGRFDKPGGYPNKHQM

SEQ ID NO: 854086 - protein, 137 aa, Homo sapiens; identical to SEQ ID NO: 854085

SEQ ID NO: 854087 - protein, 344 aa, Homo sapiens
RAHSRTVIDAMSALLRLLRTGAPAAACLRLGTSAGTGSRRAMALYHTEERGQPCSQNYRLFFKNVTGHYISPFHDIPLKVNSKEENGIPMKKARNDEYENLFNMIVEIPRWTNAKMEIATKEPMNPIKQYVKDGKLRYVANIFPYKGYIWNYGTLPQTWEDPHEKDKSTNCFGDNDPIDVCEIGSKILSCGEVIHVKILGILALIDEGETDWKLIAINANDPEASKFHDIDDVKKFKPGYLEATLNWFRLYKVPDGKPENQFAFNGEFKNKAFALEVIKSTHQCWKALLMKKCNGGAINCTNVQISDSPFRCTQEEARSLVESVSSSPNKESNEEEQVWHFLGK

SEQ ID NO: 854088 - protein, 359 aa, Homo sapiens
RAHSRTVIDAMSALLRLLRTGAPAAACLRLGTSAGTGSRRAMALYHTEERGQPCSQNYRLFFKNVTGHYISPFHDIPLKVNSKEDTEAQGIFIDLSEDLENGIPMKKARNDEYENLFNMIVEIPRWTNAKMEIATKEPMNPIKQYVKDGKLRYVANIFPYKGYIWNYGTLPQTWEDPHEKDKSTNCFGDNDPIDVCEIGSKILSCGEVIHVKILGILALIDEGETDWKLIAINANDPEASKFHDIDDVKKFKPGYLEATLNWFRLYKVPDGKPENQFAFNGEFKNKAFALEVIKSTHQCWKALLMKKCNGGAINCTNVQISDSPFRCTQEEARSLVESVSSSPNKESNEEEQVWHFLGK

SEQ ID NO: 854089 - protein, 291 aa, Homo sapiens
RAHSRTVIDAMSALLRLLRTGAPAAACLRLGTSAGTGSRRAMALYHTEERGQPCSQNYRLFFKNVTGHYISPFHDIPLKVNSKEENGIPMKKARNDEYENLFNMIVEIPRWTNAKMEIATKEPMNPIKQYVKDGKLRYVANIFPYKGYIWNYGTLPQTWEDPHEKDKSTNCFGDNDPIDVCEIGSKILSCGEVIHVKILGILALIDEGETDWKLIAINANDPEASKFHGLRNIPVYTINRIVILPSLDRSQTSSLSYLPAHQDSCVPLDAALHVVLYFWSLLGLQSYLSCF

SEQ ID NO: 854090 - protein, 344 aa, Homo sapiens; identical to SEQ ID NO: 854087

SEQ ID NO: 854091 - protein, 345 aa, Homo sapiens
RAHSRTVIDAMSALLRLLRTGAPAAACLRLGTSAGTGSRRAMALYHTEERGQPCSQNYRLFFKNVTGHYISPFHDIPLKVNSKEENGIPMKKARNDEYENLFNMIVEIPRWTNAKMEIATKEPMNPIKQYVKDGKLRYVANIFPYKGYIWNYGTLPQTWEDPHEKDKSTNCFGDNDPIDVCEIGSKILSCGEVIHVKILGILALIDEGETDWKLIAINANDPEASKFHDIDDVKKFKPGYLEATLNWFRLYKVPDGKPENQFAFNGEFKNKAFALEVIKSTHQCWKALLMKKCNGGAINCTNVQISDSPFRCTQEEARSLVESVSSSPNKESNEEDRVSLLPPRL

SEQ ID NO: 854092 - protein, 345 aa, Homo sapiens; identical to SEQ ID NO: 854091

SEQ ID NO: 854093 - protein, 241 aa, Homo sapiens
MIVEIPRWTNAKMEIATKEPMNPIKQYVKDGKLRYVANIFPYKGYIWNYGTLPQTWEDPHEKDKSTNCFGDNDPIDVCEIGSKILSCGEVIHVKILGILALIDEGETDWKLIAINANDPEASKFHDIDDVKKFKPGYLEATLNWFRLYKVPDGKPENQFAFNGEFKNKAFALEVIKSTHQCWKALLMKKCNGGAINCTNVQISDSPFRCTQEEARSLVESVSSSPNKESNEEEQVWHFLGK

SEQ ID NO: 854094 - protein, 315 aa, Homo sapiens
RAHSRTVIDAMSALLRLLRTGAPAAACLRLGTSAGTGSRRAMALYHTEERGQPCSQNYRLFFKNVTGHYISPFHDIPLKVNSKEENGIPMKKARNDEYENLFNMIVEIPRWTNAKMEIATKEPMNPIKQYVKDGKLRYVANIFPYKGYIWNYGTLPQILSCGEVIHVKILGILALIDEGETDWKLIAINANDPEASKFHDIDDVKKFKPGYLEATLNWFRLYKVPDGKPENQFAFNGEFKNKAFALEVIKSTHQCWKALLMKKCNGGAINCTNVQISDSPFRCTQEEARSLVESVSSSPNKESNEEEQVWHFLGK

SEQ ID NO: 854095 - protein, 212 aa, Homo sapiens
MIVEIPRWTNAKMEIATKEPMNPIKQYVKDGKLRYVANIFPYKGYIWNYGTLPQILSCGEVIHVKILGILALIDEGETDWKLIAINANDPEASKFHDIDDVKKFKPGYLEATLNWFRLYKVPDGKPENQFAFNGEFKNKAFALEVIKSTHQCWKALLMKKCNGGAINCTNVQISDSPFRCTQEEARSLVESVSSSPNKESNEEEQVWHFLGK

SEQ ID NO: 854096 - protein, 242 aa, Homo sapiens
RAHSRTVIDAMSALLRLLRTGAPAAACLRLGTSAGTGSRRAMALYHTEERGQPCSQNYRLFFKNVTGHYISPFHDIPLKVNSKEILSCGEVIHVKILGILALIDEGETDWKLIAINANDPEASKFHDIDDVKKFKPGYLEATLNWFRLYKVPDGKPENQFAFNGEFKNKAFALEVIKSTHQCWKALLMKKCNGGAINCTNVQISDSPFRCTQEEARSLVESVSSSPNKESNEEEQVWHFLGK

SEQ ID NO: 854097 - protein, 167 aa, Homo sapiens
RAHSRTVIDAMSALLRLLRTGAPAAACLRLGTSAGTGSRRAMALYHTEERGQPCSQNYRLFFRPSAVAARSRPPYFPRERAPSHENCQRGGGGSRPQSGEQRRRAAGWGVDSALCPASRPPRGVGRVQAATPRRPAAISRPGRRSRFTQLSEEGKAEPAHTPAFLEA

SEQ ID NO: 854098 - protein, 143 aa, Homo sapiens
IHASGPTRPVGGRYGEEENGTFFLHLLYIDDVKKFKPGYLEATLNWFRLYKVPDGKPENQFAFNGEFKNKAFALEVIKSTHQCWKALLMKKCNGGAINCTNVQISDSPFRCTQEEARSLVESVSSSPNKESNEEEQVWHFLGK

SEQ ID NO: 854099 - protein, 344 aa, Homo sapiens; identical to SEQ ID NO: 854087

SEQ ID NO: 854100 - protein, 255 aa, Homo sapiens
MKKARNDEYENLFNMIVEIPRWTNAKMEIATKEPMNPIKQYVKDGKLRYVANIFPYKGYIWNYGTLPQTWEDPHEKDKSTNCFGDNDPIDVCEIGSKILSCGEVIHVKILGILALIDEGETDWKLIAINANDPEASKFHDIDDVKKFKPGYLEATLNWFRLYKVPDGKPENQFAFNGEFKNKAFALEVIKSTHQCWKALLMKKCNGGAINCTNVQISDSPFRCTQEEARSLVESVSSSPNKESNEEEQVWHFLGK

SEQ ID NO: 854101 - protein, 255 aa, Homo sapiens; identical to SEQ ID NO: 854100

SEQ ID NO: 854102 - protein, 326 aa, Homo sapiens
RAHSRTVIDAMSALLRLLRTGAPAAACLRLGTSAGTGSRRAMALYHTEERGQPCSQNYRLFFKNVTGHYISPFHDIPLKVNSKEENGIPMKKARNDEYEIATKEPMNPIKQYVKDGKLRYVANIFPYKGYIWNYGTLPQTWEDPHEKDKSTNCFGDNDPIDVCEIGSKILSCGEVIHVKILGILALIDEGETDWKLIAINANDPEASKFHDIDDVKKFKPGYLEATLNWFRLYKVPDGKPENQFAFNGEFKNKAFALEVIKSTHQCWKALLMKKCNGGAINCTNVQISDSPFRCTQEEARSLVESVSSSPNKESNEEEQVWHFLGK

SEQ ID NO: 854103 - protein, 167 aa, Homo sapiens; identical to SEQ ID NO: 854097

SEQ ID NO: 854104 - protein, 178 aa, Homo sapiens
RAHSRTVIDAMSALLRLLRTGAPAAACLRLGTSAGTGSRRAMALYHTEERGQPCSQNYRLFFKNVTGHYISPFHDIPLKVNSKEENGIPMKKARNDEYENLFNMIVEIPRWTNAKMEIATKEPMNPIKQYVKDGKLRYVANIFPYKGYIWNYGTLPQVSSSPNKESNEEEQVWHFLGK

SEQ ID NO: 854105 - protein, 176 aa, Homo sapiens
CGWGPVQGPGRAVLWPCTTLRSAASPARRITASSLVSSSRRFAERRTGETWVGDGMGDTWDAPRGLPSLFLGPSAVAARSRPPYFPRERAPSHENCQRGGGGSRPQSGEQRRRAAGWGVDSALCPASRPPRGVGRVQAATPRRPAAISRPGRRSRFTQLSEEGKAEPAHTPAFLEA

SEQ ID NO: 854106 - protein, 673 aa, Homo sapiens
RQRNATSSLSVHKMAPYSLLVTRLQKALGVRQYHVASVLCQRAKVAMSHFEPNEYIHYDLLEKNINIVRKRLNRPLTLSEKIVYGHLDDPASQEIERGKSYLRLRPDRVAMQDATAQMAMLQFISSGLSKVAVPSTIHCDHLIEAQVGGEKDLRRAKDINQEVYNFLATAGAKYGVGFWKPGSGIIHQIILENYAYPGVLLIGTDSHTPNGGGLGGICIGVGGADAVDVMAGIPWELKCPKVIGVKLTGSLSGWSSPKDVILKVAGILTVKGGTGAIVEYHGPGVDSISCTGMATICNMGAEIGATTSVFPYNHRMKKYLSKTGREDIANLADEFKDHLVPDPGCHYDQLIEINLSELKPHINGPFTPDLAHPVAEVGKVAEKEGWPLDIRVGLIGSCTNSSYEDMGRSAAVAKQALAHGLKCKSQFTITPGSEQIRATIERDGYAQILRDLGGIVLANACGPCIGQWDRKDIKKGEKNTIVTSYNRNFTGRNDANPETHAFVTSPEIVTALAIAGTLKFNPETDYLTGTDGKKFRLEAPDADELPKGEFDPGQDTYQHPPKDSSGQHVDVTAAPPASACSSWSLLTSGMARTWRTCRSSSRSKGSVPLTTSQLLAPGSSSVGTWITSPTTCSLVPSTLKTARPTPCAMPSLRSLAPSLTLPATTRNMASGGW

SEQ ID NO: 854107 - protein, 745 aa, Homo sapiens
RQRNATSSLSVHKMAPYSLLVTRLQKALGVRQYHVASVLCQRAKVAMSHFEPNEYIHYDLLEKNINIVRKRLNRPLTLSEKIVYGHLDDPASQEIERGKSYLRLRPDRVAMQDATAQMAMLQFISSGLSKVAVPSTIHCDHLIEAQVGGEKDLRRAKDINQEVYNFLATAGAKYGVGFWKPGSGIIHQIILENYAYPGVLLIGTDSHTPNGGGLGGICIGVGGADAVDVMAGIPWELKCPKVIGVKLTGSLSGWSSPKDVILKVAGILTVKGGTGAIVEYHGPGVDSISCTGMATICNMGAEIGATTSVFPYNHRMKKYLSKTGREDIANLADEFKDHLVPDPGCHYDQLIEINLSELKPHINGPFTPDLAHPVAEVGKVAEKEGWPLDIRVGLIGSCTNSSYEDMGRSAAVAKQALAHGLKCKSQFTITPGSEQIRATIERDGYVSAHIPLPISPTPCCVMPPGGTSPEACWAGAGAGPSGCPGVPVQHFVLQPPHHPFPSDSHPPLTFCLPLSLAAQILRDLGGIVLANACGPCIGQWDRKDIKKGEKNTIVTSYNRNFTGRNDANPETHAFVTSPEIVTALAIAGTLKFNPETDYLTGTDGKKFRLEAPDADELPKGEFDPGQDTYQHPPKDSSGQHVDVTAAPPASACSSWSLLTSGMARTWRTCRSSSRSKGSVPLTTSQLLAPGSSSVGTWITSPTTCSLVPSTLKTARPTPCAMPSLRSLAPSLTLPATTRNMASGGW

SEQ ID NO: 854108 - protein, 673 aa, Homo sapiens; identical to SEQ ID NO: 854106

SEQ ID NO: 854109 - protein, 660 aa, Homo sapiens
MAPYSLLVTRLQKALGVRQYHVASVLCQRAKVAMSHFEPNEYIHYDLLEKNINIVRKRLNRPLTLSEKIVYGHLDDPASQEIERGKSYLRLRPDRVAMQDATAQMAMLQFISSGLSKVAVPSTIHCDHLIEAQVGGEKDLRRAKDINQEVYNFLATAGAKYGVGFWKPGSGIIHQIILENYAYPGVLLIGTDSHTPNGGGLGGICIGVGGADAVDVMAGIPWELKCPKVIGVKLTGSLSGWSSPKDVILKVAGILTVKGGTGAIVEYHGPGVDSISCTGMATICNMGAEIGATTSVFPYNHRMKKYLSKTGREDIANLADEFKDHLVPDPGCHYDQLIEINLSELKPHINGPFTPDLAHPVAEVGKVAEKEGWPLDIRVGLIGSCTNSSYEDMGRSAAVAKQALAHGLKCKSQFTITPGSEQIRATIERDGYAQILRDLGGIVLANACGPCIGQWDRKDIKKGEKNTIVTSYNRNFTGRNDANPETHAFVTSPEIVTALAIAGTLKFNPETDYLTGTDGKKFRLEAPDADELPKGEFDPGQDTYQHPPKDSSGQHVDVTAAPPASACSSWSLLTSGMARTWRTCRSSSRSKGSVPLTTSQLLAPGSSSVGTWITSPTTCSLVPSTLKTARPTPCAMPSLRSLAPSLTLPATTRNMASGGW

SEQ ID NO: 854110 - protein, 386 aa, Homo sapiens
IVIADSRVYPADPQDCFGTTSVFPYNHRMKKYLSKTGREDIANLADEFKDHLVPDPGCHYDQLIEINLSELKPHINGPFTPDLAHPVAEVGKVAEKEGWPLDIRVGLIGSCTNSSYEDMGRSAAVAKQALAHGLKCKSQFTITPGSEQIRATIERDGYAQILRDLGGIVLANACGPCIGQWDRKDIKKGEKNTIVTSYNRNFTGRNDANPETHAFVTSPEIVTALAIAGTLKFNPETDYLTGTDGKKFRLEAPDADELPKGEFDPGQDTYQHPPKDSSGQHVDVTAAPPASACSSWSLLTSGMARTWRTCRSSSRSKGSVPLTTSQLLAPGSSSVGTWITSPTTCSLVPSTLKTARPTPCAMPSLRSLAPSLTLPATTRNMASGGW

SEQ ID NO: 854111 - protein, 327 aa, Homo sapiens
IRHRIEINLSELKPHINGPFTPDLAHPVAEVGKVAEKEGWPLDIRVGLIGSCTNSSYEDMGRSAAVAKQALAHGLKCKSQFTITPGSEQIRATIERDGYAQILRDLGGIVLANACGPCIGQWDRKDIKKGEKNTIVTSYNRNFTGRNDANPETHAFVTSPEIVTALAIAGTLKFNPETDYLTGTDGKKFRLEAPDADELPKGEFDPGQDTYQHPPKDSSGQHVDVTAAPPASACSSWSLLTSGMARTWRTCRSSSRSKGSVPLTTSQLLAPGSSSVGTWITSPTTCSLVPSTLKTARPTPCAMPSLRSLAPSLTLPATTRNMASGGW

SEQ ID NO: 854112 - protein, 268 aa, Homo sapiens
MGRSAAVAKQALAHGLKCKSQFTITPGSEQIRATIERDGYAQILRDLGGIVLANACGPCIGQWDRKDIKKGEKNTIVTSYNRNFTGRNDANPETHAFVTSPEIVTALAIAGTLKFNPETDYLTGTDGKKFRLEAPDADELPKGEFDPGQDTYQHPPKDSSGQHVDVTAAPPASACSSWSLLTSGMARTWRTCRSSSRSKGSVPLTTSQLLAPGSSSVGTWITSPTTCSLVPSTLKTARPTPCAMPSLRSLAPSLTLPATTRNMASGGW

SEQ ID NO: 854113 - protein, 152 aa, Homo sapiens [sequence omitted]

SEQ ID NO: 854114 - protein, 673 aa, Homo sapiens; identical to SEQ ID NO: 854106

SEQ ID NO: 854115 - protein, 701 aa, Homo sapiens
RQRNATSSLSVHKMAPYSLLVTRLQKALGVRQYHVASVLCQRAKVAMSHFEPNEYIHYDLLEKNINIVRKRLNRPLTLSEKIVYGHLDDPASQEIERGKSYLRLRPDRVAMQDATAQMAMLQFISSGLSKVAVPSTIHCDHLIEAQVGGEKDLRRAKDINQEVYNFLATAGAKYGVGFWKPGSGIIHQIILENYAYPGVLLIGTDSHTPNGGGLGGICIGVGGADAVDVMAGIPWELKCPKVIGVKLTGSLSGWSSPKDVILKVAGILTVKGGTGAIVEYHGPGVDSISCTGMATICNMGAEIGATTSVFPYNHRMKKYLSKTGREDIANLADEFKDHLVPDPGCHYDQLIEINLSELKPHINGPFTPDLAHPVAEVGKVAEKEGWPLDIRVGLIGSCTNSSYEDMGRSAAVAKQALAHGLKCKSQFTITPGSEQIRATIERDGYAQILRDLGGIVLANACGPCIGQWDRKDIKKGEKNTIVTSYNRNFTGRNDANPETHAFVTSPEIVTALAIAGTLKFNPETDYLTGTDGKKFRLEAPDADELPKGEFDPGQDTYQHPPKDSSGQHVDVTAAPPASACSSWSLLTSGMARTWRTCRSSSRSKGSVPLTTSQLLAPGSSSVGTWITSPTTCSLVPSTLKTARPTPCAMPSLRSLAPSLTLPATTSHGFLFQDGVTRHASCSPLSPRSDCGCGGGVLKITF

SEQ ID NO: 854116 - protein, 673 aa, Homo sapiens; identical to SEQ ID NO: 854106

SEQ ID NO: 854117 - protein, 673 aa, Homo sapiens; identical to SEQ ID NO: 854106

SEQ ID NO: 854118 - protein, 359 aa, Homo sapiens
RQRNATSSLSVHKMAPYSLLVTRLQKALGVRQYHVASVLCQRAKVAMSHFEPNEYIHYDLLEKNINIVRKRLNRPLTLSEKIVYGHLDDPASQEIERGKSYLRLRPDRVAMQDATAQMAMLQFISSGLSKVAVPSTIHCDHLIEAQVGGEKDLRRAKDINQEVYNFLATAGAKYGVGFWKPGSGIIHQIILENYAYPGVLLIGTDSHTPNGGGLGGICIGVGGADAVDVMAGIPWELKCPKVIGVKLTGSLSGWSSPKDVILKVAGILTVKGGTGAIVEYHGPGVDSISCTGMATICNMGAEIGATTSVFPYNHRMKKYLSKTGREDIANLADEFKDHLVPDPGCHYDQLIEINLSEMV

SEQ ID NO: 854119 - protein, 470 aa, Homo sapiens
RQRNATSSLSVHKMAPYSLLVTRLQKALGVRQYHVASVLCQRAKVAMSHFEPNEYIHYDLLEKNINIVRKRLNRPLTLSEKIVYGHLDDPASQEIERGKSYLRLRPDRVAMQDATAQMAMLQFISSGLSKVAVPSTIHCDHLIEAQVGGEKDLRRAKDINQEVYNFLATAGAKYGVGFWKPGSGIIHQIILENYAYPGVLLIGTDSHTPNGGGLGGICIGVGGADAVDVMAGIPWELKCPKVIGVKLTGSLSGWSSPKDVILKVAGILTVKGGTGAIVEYHGPGVDSISCTGMATICNMGAEIGATTSVFPYNHRMKKYLSKTGREDIANLADEFKDHLVPDPGCHYDQLIEINLSELKPHINGPFTPDLAHPVAEVGKVAEKEGWPLDIRVGLIGSCTNSSYEDMGRSAAVAKQALAHGLKCKSQFTITPGSEQIRATIERDGYAQILRDLGGIVLANACGPCIGQWDR

SEQ ID NO: 854120 - protein, 435 aa, Homo sapiens
RQRNATSSLSVHKMAPYSLLVTRLQKALGVRQYHVASVLCQRAKVAMSHFEPNEYIHYDLLEKNINIVRKRLNRPLTLSEKIVYGHLDDPASQEIERGKSYLRLRPDRVAMQDATAQMAMLQFISSGLSKVAVPSTIHCDHLIEAQVGGEKDLRRAKDINQEVYNFLATAGAKYGVGFWKPGSGIIHQIILENYAYPGVLLIGTDSHTPNGGGLGGICIGVGGADAVDVMAGIPWELKCPKVIGVKLTGSLSGWSSPKDVILKVAGILTVKGGTGAIVEYHGPGVDSISCTGMATICNMGAEIGATTSVFPYNHRMKKYLSKTGREDIANLADEFKDHLVPDPGCHYDQLIEINLSELKPHINGPFTPDLAHPVAEVGKVAEKEGWPLDIRVDALACQSLASAAAGYSVAVKSMEPGARWPGLESWLCHLTATNS

SEQ ID NO: 854121 - protein, 413 aa, Homo sapiens
RQRNATSSLSVHKMAPYSLLVTRLQKALGVRQYHVASVLCQRAKVAMSHFEPNEYIHYDLLEKNINIVRKRLNRPLTLSEKIVYGHLDDPASQEIERGKSYLRLRPDRVAMQDATAQMAMLQFISSGLSKVAVPSTIHCDHLIEAQVGGEKDLRRAKDINQEVYNFLATAGAKYGVGFWKPGSGIIHQIILENYAYPGVLLIGTDSHTPNGGGLGGICIGVGGADAVDVMAGIPWELKCPKVIGVKLTGSLSGWSSPKDVILKVAGILTVKGGTGAIVEYHGPGVDSISCTGMATICNMGAEIGATTSVFPYNHRMKKYLSKTGREDIANLADEFKDHLVPDPGCHYDQLIEINLSELKPHINGPFTPDLAHPVAEVGKVAEKEGWPLDIRVGEHLPPHLFSRSQGQWLCPGL

SEQ ID NO: 854122 - protein, 126 aa, Homo sapiens
MAPYSLLVTRLQKALGVRQYHVASVLCQRAKVAMSHFEPNEYIHYDLLEKNINIVRKRPDLAHPVAEVGKVAEKEGWPLDIRVDALACQSLASAAAGYSVAVKSMEPGARWPGLESWLCHLTATNS

SEQ ID NO: 854123 - protein, 207 aa, Homo sapiens
MGEGMAPSMFLVSCALSRFASYQHFCARAPTPSRIAVRRENSTAGPALQGWERPHCPWLPESSAGPRPRGPKDRPAALASEEHRGLGRTWKFPGFLSQFWPRLLVGAGDRSGNWCCPTNWPPPFQIVTALAIAGTLKFNPETDYLTGTDGKKFRLEAPDADELPKGVSAHAPCLLVAVWPRHFLLNLTAPPVQAGRALLVRRKQLCS

SEQ ID NO: 854124 - protein, 108 aa, Homo sapiens
MFIVENIHNQEEFLKLLISTPSQEQALRALGEVCCVSVYCVHRFSRFTFYITHAALCDFSCFTHADALACQSLASAAAGYSVAVKSMEPGARWPGLESWLCHLTATNS

SEQ ID NO: 854125 - protein, 673 aa, Homo sapiens; identical to SEQ ID NO: 854106

SEQ ID NO: 854126 - protein, 440 aa, Homo sapiens
RQRNATSSLSVHKMAPYSLLVTRLQKALGVRQYHVASVLCQRAKVAMSHFEPNEYIHYDLLEKNINIVRKRLNRPLTLSEKIVYGHLDDPASQEIERGKSYLRLRPDRVAMQDATAQMAMLQFISSGLSKVAVPSTIHCDHLIEAQVGGEKDLRRAKDINQEVYNFLATAGAKYGVGFWKPGSGIIHQIILENYAYPGVLLIGTDSHTPNGGGLGGISSPTSQRLQLLEPFDKWDGKDLEDLQILIKVKGKCTTDHISAAGPWLKFRGHLDNISNNLLIGAINIENGKANSVRNAVTQEFGPVPDTARYYKKHGIRWVVIGDENYGEGSSREHAALEPRHLGGRAIITKSFARIHETNLKKQGLLPLTFADPADYNKIHPVDKLTIQGLKDFTPGKPLKCIIKHPNGTQETILLNHTFNETQIEWFRAGSALNRMKELQQ

SEQ ID NO: 854127 - protein, 253 aa, Homo sapiens
MRICSEPGVMVNWDLHLRPWASACLAQLLSSSPTSQRLQLLEPFDKWDGKDLEDLQILIKVKGKCTTDHISAAGPWLKFRGHLDNISNNLLIGAINIENGKANSVRNAVTQEFGPVPDTARYYKKHGIRWVVIGDENYGEGSSREHAALEPRHLGGRAIITKSFARIHETNLKKQGLLPLTFADPADYNKIHPVDKLTIQGLKDFTPGKPLKCIIKHPNGTQETILLNHTFNETQIEWFRAGSALNRMKELQQ

SEQ ID NO: 854128 - protein, 673 aa, Homo sapiens; identical to SEQ ID NO: 854106

SEQ ID NO: 854129 - protein, 585 aa, Homo sapiens
RQRNATSSLSVHKMAPYSLLVTRLQKALGVRQYHVASVLCQRAKVAMSHFEPNEYIHYDLLEKNINIVRKRLNRPLTLSEKIVYGHLDDPASQEIERGKSYLRLRPDRVAMQDATAQMAMLQFISSGLSKVAVPSTIHCDHLIEAQVGGEKDLRRAKDINQEVYNFLATAGAKYGVGFWKPGSGIIHQIILENYAYPGVLLIGTDSHTPNGGGLGGICIGVGGADAVDVMAGIPWELKCPKVIGVKLTGSLSGWSSPKDVILKVAGILTVKGGTGAIVEYHGPGVDSISCTGMATICNMGAEIGATTSVFPYNHRMKKYLSKTGREDIANLADEFKDHLVPDPGCHYDQLIEINLSELKPHINGPFTPDLAHPVAEVGKVAEKEGWPLDIRVGLIGSCTNSSYEDMGRSAAVAKQALAHGLKCKSQFTITPGSEQIRATIERDGYAQILRDLGGIVLANACGPCIGQWDRKDIKKGEKNTIVTSYNRNFTGRNDANPETHAFVTSPEIVTALAIAGTLKFNPETDYLTGTDGKKFRLEAPDADELPKGEFDPGQDTYQHPPKDSSGQHVDVTHGVTVVVVGGFLK

SEQ ID NO: 854130 - protein, 103 aa, Homo sapiens
DHHPPDAMFLVERAVSVHETNLKKQGLLPLTFADPADYNKIHPVDKLTIQGLKDFTPGKPLKCIIKHPNGTQETILLNHTFNETQIEWFRAGSALNRMKELQQ

SEQ ID NO: 854131 - protein, 435 aa, Homo sapiens; identical to SEQ ID NO: 854120

SEQ ID NO: 854132 - protein, 201 aa, Homo sapiens
RQRNATSSLSVHKMAPYSLLVTRLQKALGVRQYHVASVLCQRAKVAMSHFEPNEYIHYDLLEKNINIVRKRLNRPLTLSEKIVYGHLDDPASQEIERGKSYLRLRPDRVAMQDATAQMAMLQFISSGLSKVAVPSTIHCDHLIEAQVGGEKDLRRAKVSRRWLWGWASGQDWARGLTLTLEQTRALPPNSHTSLDWSAFKT

SEQ ID NO: 854133 - protein, 283 aa, Homo sapiens
MAVFRSGLLVLTTPLASLAPRLASILTSAARLVNHTLYVHLQPGMSLEGPAQPQSSPVQATFEVLDFITHLYAGADVHRHLDVRILLTNIRTKSTFLPPLPTSVQNLAHPPEVVLTDFQTLDGSQYNPVKQQLVRYATSCYSCCPRLASVLLYSDYGIGEVPVEPLDVPLPSTIRPASPVAGSPKQPVRGYYRGAVGGTFDRLHNAHKVLLSVACILAQEQLVVGVADKDLLKRKVAPELVQTYYERVGHLEDSWGTQASLFDCPLGPPGPCFTPGLGAGTIG

SEQ ID NO: 854134 - protein, 564 aa, Homo sapiens
MAVFRSGLLVLTTPLASLAPRLASILTSAARLVNHTLYVHLQPGMSLEGPAQPQSSPVQATFEVLDFITHLYAGADVHRHLDVRILLTNIRTKSTFLPPLPTSVQNLAHPPEVVLTDFQTLDGSQYNPVKQQLVRYATSCYSCCPRLASVLLYSDYGIGEVPVEPLDVPLPSTIRPASPVAGSPKQPVRGYYRGAVGGTFDRLHNAHKVLLSVACILAQEQLVVGVADKDLLKSKLLPELLQPYTERVEHLSEFLVDIKPSLTFDVIPLLDPYGPAGSDPSLEFLVVSEETYRGGMAINRFRLENDLEELALYQIQLLKDLRHTENEEDKVSSSSFRQRMLGNLLRPPYERPELPTCLYVIGLTGISGSGKSSIAQRLKGLGAFVIDSDHLGHRAYAPGGPAYQPVVEAFGTDILHKDGIINRKVLGSRVFGNKKQLKILTDIMWPIIAKLAREEMDRAVAEGKRVCVIDAAVLLEAGWQNLVHEVWTAVIPETEAVRRIVERDGLSEAAAQSRLQSQMSGQQLVEQSHVVLSTLWEPHITQRQVEKAWALLQKRIPKTHQALD

SEQ ID NO: 854135 - protein, 564 aa, Homo sapiens; identical to SEQ ID NO: 854134

SEQ ID NO: 854136 - protein, 564 aa, Homo sapiens; identical to SEQ ID NO: 854134

SEQ ID NO: 854137 - protein, 593 aa, Homo sapiens
MRTPRLRAQPRGAVYQAPSPPPAPVGLGSMAVFRSGLLVLTTPLASLAPRLASILTSAARLVNHTLYVHLQPGMSLEGPAQPQSSPVQATFEVLDFITHLYAGADVHRHLDVRILLTNIRTKSTFLPPLPTSVQNLAHPPEVVLTDFQTLDGSQYNPVKQQLVRYATSCYSCCPRLASVLLYSDYGIGEVPVEPLDVPLPSTIRPASPVAGSPKQPVRGYYRGAVGGTFDRLHNAHKVLLSVACILAQEQLVVGVADKDLLKSKLLPELLQPYTERVEHLSEFLVDIKPSLTFDVIPLLDPYGPAGSDPSLEFLVVSEETYRGGMAINRFRLENDLEELALYQIQLLKDLRHTENEEDKVSSSSFRQRMLGNLLRPPYERPELPTCLYVIGLTGISGSGKSSIAQRLKGLGAFVIDSDHLGHRAYAPGGPAYQPVVEAFGTDILHKDGIINRKVLGSRVFGNKKQLKILTDIMWPIIAKLAREEMDRAVAEGKRVCVIDAAVLLEAGWQNLVHEVWTAVIPETEAVRRIVERDGLSEAAAQSRLQSQMSGQQLVEQSHVVLSTLWEPHITQRQVEKAWALLQKRIPKTHQALD

SEQ ID NO: 854138 - protein, 269 aa, Homo sapiens
MAINRFRLENDLEELALYQIQLLKDLRHTENEEDKVSSSSFRQRMLGNLLRPPYERPELPTCLYVIGLTGISGSGKSSIAQRLKGLGAFVIDSDHLGHRAYAPGGPAYQPVVEAFGTDILHKDGIINRKVLGSRVFGNKKQLKILTDIMWPIIAKLAREEMDRAVAEGKRVCVIDAAVLLEAGWQNLVHEVWTAVIPETEAVRRIVERDGLSEAAAQSRLQSQMSGQQLVEQSHVVLSTLWEPHITQRQVEKAWALLQKRIPKTHQALD

SEQ ID NO: 854139 - protein, 608 aa, Homo sapiens
MAVFRSGLLVLTTPLASLAPRLASILTSAARLVNHTLYVHLQPGMSLEGPAQPQSSPVQATFEVLDFITHLYAGADVHRHLDVRILLTNIRTKSTFLPPLPTSVQNLAHPPEVVLTDFQTLDGSQYNPVKQQLVRYATSCYSCCPRLASVLLYSDYGIGEVPVEPLDVPLPSTIRPASPVAGSPKQPVRGYYRGAVGGTFDRLHNAHKVLLSVACILAQEQLVVGVADKDLLKSKLLPELLQPYTERVEHLSEFLVDIKPSLTFDVIPLLDPYGPAGSDPSLEFLVVSEETYRGGMAINRFRLENDLEELALYQIQLLKDLRHTENEEDKVSSSSFRQRMLGNLLRPPYVSSSPSFPPAWCPGNAGEVEAEGLSPRHEAEGPSNCGFPFTYPQERPELPTCLYVIGLTGISGSGKSSIAQRLKGLGAFVIDSDHLGHRAYAPGGPAYQPVVEAFGTDILHKDGIINRKVLGSRVFGNKKQLKILTDIMWPIIAKLAREEMDRAVAEGKRVCVIDAAVLLEAGWQNLVHEVWTAVIPETEAVRRIVERDGLSEAAAQSRLQSQMSGQQLVEQSHVVLSTLWEPHITQRQVEKAWALLQKRIPKTHQALD

SEQ ID NO: 854140 - protein, 564 aa, Homo sapiens; identical to SEQ ID NO: 854134

SEQ ID NO: 854141 - protein, 345 aa, Homo sapiens
TERVEHLSEFLVEQRKLLPELLQPYTERVEHLSEFLVDIKPSLTFDVIPLLDPYGPAGSDPSLEFLVVSEETYRGGMAINRFRLENDLEELALYQIQLLKDLRHTENEEDKVSSSSFRQRMLGNLLRPPYERPELPTCLYVIGLTGISGSGKSSIAQRLKGLGAFVIDSDHLGHRAYAPGGPAYQPVVEAFGTDILHKDGIINRKVLGSRVFGNKKQLKILTDIMWPIIAKLAREEMDRAVAEGKRVCVIDAAVLLEAGWQNLVHEVWTAVIPETEAVRRIVERDGLSEAAAQSRLQSQMSGQQLVEQSHVVLSTLWEPHITQRQVEKAWALLQKRIPKTHQALD

SEQ ID NO: 854142 - protein, 565 aa, Homo sapiens
MAVFRSGLLVLTTPLASLAPRLASILTSAARLVNHTLYVHLQPGMSLEGPAQPQSSPVQATFEVLDFITHLYAGADVHRHLDVRILLTNIRTKSTFLPPLPTSVQNLAHPPEVVLTDFQTLDGSQYNPVKQQLVRYATSCYSCCPRLASVLLYSDYGIGEVPVEPLDVPLPSTIRPASPVAGSPKQPVRGYYRGAVGGTFDRLHNAHKVLLSVACILAQEQLVVGVADKDLLKSKLLPELLQPYTERVEHLSEFLVDIKPSLTFDVIPLLDPYGPAGSDPSLEFLVVSEETYRGGMAINRFRLENDLEELALYQIQLLKDLRHTENEEDKVSSSSFRQRMLGNLLRPPYERPELPTCLYVIGLTGISGSGKSSIAQRLKGLGAFVIDSDHLGHRAYAPGGPAYQPVVEAFGTDILHKDGIINRKVLGSRVFGNKKQLKILTDIMWPIIAKLAREEMDRAVAEGKRVCVIDAAVLLEAGWQNLVHEVWTAVIPETEFPRLIRPSTEKFSVGPDWLLELTSDPVVRRNGGLDAHPGSGPEVQAILCRTWPGLVDTGSLPNTLVFGQH

SEQ ID NO: 854143 - protein, 205 aa, Homo sapiens
  misc_feature (5)..(5): Xaa can be any naturally occurring amino acid
MDATXAHSGSGKSSIAQRLKGLGAFVIDSDHLGHRAYAPGGPAYQPVVEAFGTDILHKDGIINRKVLGSRVFGNKKQLKILTDIMWPIIAKLAREEMDRAVAEGKRVCVIDAAVLLEAGWQNLVHEVWTAVIPETEAVRRIVERDGLSEAAAQSRLQSQMSGQQLVEQSHVVLSTLWEPHITQRQVEKAWALLQKRIPKTHQALD

SEQ ID NO: 854144 - protein, 259 aa, Homo sapiens
MAVFRSGLLVLTTPLASLAPRLASILTSAARLVNHTLYVHLQPGMSLEGPAQPQSSPVQATFEVLDFITHLYAGADVHRHLDVRILLTNIRTKSTFLPPLPTSVQNLAHPPEVVLTDFQTLDGSQYNPVKQQLVRYATSCYSCCPRLASVLLYSDYGIGEVPVEPLDVPLLTNGRKPGAGHNNRRVNTGEPRRQHDGRTSPKGCQRRDQHQTKRRNPTGRHTTHHKKGHRRTNQTKQRKTDTNPTSDKQQTQPTPPPLP

SEQ ID NO: 854145 - protein, 165 aa, Homo sapiens
MAVFRSGLLVLTTPLASLAPRLASILTSAARLVNHTLYVHLQPGMSLEGPAQPQSSPVQATFEVLDFITHLYAGADVHRHLDVRILLTNIRTKSTFPRLIRPSTEKFSVGPDWLLELTSDPVVRRNGGLDAHPGSGPEVQAILCRTWPGLVDTGSLPNTLVFGQH

SEQ ID NO: 854146 - protein, 113 aa, Homo sapiens
GSQYNPVKQQLVRYATSCYSCCPRLASVLLYSDYGIGEVPVEPLDVPLPSTIRPASPVAGSPKQPVRGYYRGAVGGTFDRLHNAHKVLLSVACILAQEQLVVGVADKDLLKSE

SEQ ID NO: 854147 - protein, 165 aa, Homo sapiens; identical to SEQ ID NO: 854145

SEQ ID NO: 854148 - protein, 81 aa, Homo sapiens
RHEGTAVIPETEAVRRIVERDGLSEAAAQSRLQSQMSGQQLVEQSHVVLSTLWEPHITQRQVEKAWALLQKRIPKTHQALD

SEQ ID NO: 854149 - protein, 564 aa, Homo sapiens; identical to SEQ ID NO: 854134

SEQ ID NO: 854150 - protein, 564 aa, Homo sapiens; identical to SEQ ID NO: 854134

SEQ ID NO: 854151 - protein, 593 aa, Homo sapiens; identical to SEQ ID NO: 854137

SEQ ID NO: 854152 - protein, 564 aa, Homo sapiens; identical to SEQ ID NO: 854134

SEQ ID NO: 854153 - protein, 425 aa, Homo sapiens
TGVSALQPTSCDMRDCPINVPGFTQIVIWTFSSTIRPASPVAGSPKQPVRGYYRGAVGGTFDRLHNAHKVLLSVACILAQEQLVVGVADKDLLKSKLLPELLQPYTERVEHLSEFLVDIKPSLTFDVIPLLDPYGPAGSDPSLEFLVVSEETYRGGMAINRFRLENDLEELALYQIQLLKDLRHTENEEDKVSSSSFRQRMLGNLLRPPYERPELPTCLYVIGLTGISGSGKSSIAQRLKGLGAFVIDSDHLGHRAYAPGGPAYQPVVEAFGTDILHKDGIINRKVLGSRVFGNKKQLKILTDIMWPIIAKLAREEMDRAVAEGKRVCVIDAAVLLEAGWQNLVHEVWTAVIPETEAVRRIVERDGLSEAAAQSRLQSQMSGQQLVEQSHVVLSTLWEPHITQRQVEKAWALLQKRIPKTHQALD

SEQ ID NO: 854154 - protein, 636 aa, Homo sapiens
MAVFRSGLLVLTTPLASLAPRLASILTSAARLVNHTLYVHLQPGMSLEGPAQPQSSPVQATFEVLDFITHLYAGADVHRHLDVRILLTNIRTKSTFLPPLPTSVQNLAHPPEVVLTDFQTLDGSQYNPVKQQLVRYATSCYSCCPRLASVLLYSDYGIGEVPVEPLDVPLPSTIRPASPVAGSPKQPVRGYYRGAVGGTFDRLHNAHKVLLSVACILAQEQLVVGVADKDLLKSKLLPELLQPYTERVEHLSEFLVDIKPSLTFDVIPLLDPYGPAGSDPSLEFLVVSEETYRGGMAINRFRLENDLEELALYQIQLLKDLRHTENEEDKVSSSSFRQRMLGNLLRPPYVSSSPSFPPAWCPGNAGEVEAEGLSPRHEAEGPSNCGFPFTYPQERPELPTCLYVIGLTGISGSGKSSIAQRLKGLGAFVIDSDHLGHRAYAPGGPAYQPVVEAFGTGNNWGRLKVAWSEELARPLCSVVCLCCPDILHKDGIINRKVLGSRVFGNKKQLKILTDIMWPIIAKLAREEMDRAVAEGKRVCVIDAAVLLEAGWQNLVHEVWTAVIPETEAVRRIVERDGLSEAAAQSRLQSQMSGQQLVEQSHVVLSTLWEPHITQRQVEKAWALLQKRIPKTHQALD

SEQ ID NO: 854155 - protein, 564 aa, Homo sapiens; identical to SEQ ID NO: 854134

SEQ ID NO: 854156 - protein, 509 aa, Homo sapiens
MAVFRSGLLVLTTPLASLAPRLASILTSAARLVNHTLYVHLQPGMSLEGPAQPQSSPVQATFEVLDFITHLYAGADVHRHLDVRILLTNIRTKSTFLPPLPTSVQNLAHPPEVVLTDFQTLDGSQYNPVKQQLVRYATSCYSCCPRLASVLLYSDYGIGEVPVEPLDVPLPSTIRPASPVAGSPKQPVRGYYRGAVGGTFDRLHNAHKVLLSVACILAQEQLVVGVADKDLLKSKLLPELLQPYTERVEHLSEFLVDIKPSLTFDVIPLLDPYGPAGSDPSLEFLVVSEETYRGGMAINRFRLENDLEELALYQIQLLKDLRHTENEEDKVSSSSFRQRMLGNLLRPPYERPELPTCLYVIGLTGISGSGKSSIAQRLKGLGAFVIDSDHLGHRAYAPGGPAYQPVVEAFGTDILHKDGIINRKVLGSRVFGNKKQLKILTDIMWPIIAKLAREEMDRAVAEGKRVCVIDAAVLLEPTQHAGIWPTLRMWFMGEQSPPHSCPWVTLTHS

SEQ ID NO: 854157 - protein, 367 aa, Homo sapiens
MAVFRSGLLVLTTPLASLAPRLASILTSAARLVNHTLYVHLQPGMSLEGPAQPQSSPVQATFEVLDFITHLYAGADVHRHLDVRILLTNIRTKSTFLPPLPTSVQNLAHPPEVVLTDFQTLDGSQYNPVKQQLVRYATSCYSCCPRLASVLLYSDYGIGEVPVEPLDVPLPSTIRPASPVAGSPKQPVRGYYRGAVGGTFDRLHNAHKVLLSVACILAQEQLVVGVADKDLLKSKLLPELLQPYTERVEHLSEFLVDIKPSLTFDVIPLLDPYGPAGSDPSLEFLVVSEETYRGGMAINRFRLENDLEELALYQIQLLKDLRHTENEEDKVSSSSFRQRMLGNLLRPPYVSSSPSFPPAWCPGNAGE

SEQ ID NO: 854158 - protein, 187 aa, Homo sapiens
MWGLGAFVIDSDHLGHRAYAPGGPAYQPVVEAFGTDILHKDGIINRKVLGSRVFGNKKQLKILTDIMWPIIAKLAREEMDRAVAEGKRVCVIDAAVLLEAGWQNLVHEVWTAVIPETEAVRRIVERDGLSEAAAQSRLQSQMSGQQLVEQSHVVLSTLWEPHITQRQVEKAWALLQKRIPKTHQALD

SEQ ID NO: 854159 - protein, 108 aa, Homo sapiens
SVPAGEGKRVCVIDAAVLLEAGWQNLVHEVWTAVIPETEAVRRIVERDGLSEAAAQSRLQSQMSGQQLVEQSHVVLSTLWEPHITQRQVEKAWALLQKRIPKTHQALD

SEQ ID NO: 854160 - protein, 158 aa, Homo sapiens
RFRLENVTPEGDWQREWMGDGEGHFEGAVGSTMAPEERSGGSGWWEEARRNWFSVCPLSRRRRSLGRKGRMGGQVGCQGLPLTPSFPLFTLSSLPQDLEELALYQIQLLKDLRHTENEEDKVSSSSFRQRMLGNLLRPPYVSSSPSFPPAWCPGNAGE

SEQ ID NO: 854161 - protein, 119 aa, Homo sapiens
MRTEGDSFQVCQWPAKSQYAKLSPPGHRLQPELAPACAAPPTHTSGFRSAHPLVLPFSSAGHRGRSCGLVSLRRQGSHGLQKRSLGWAMTGPGGSRPFFLASPGITRQPFPSLRPYLRM

SEQ ID NO: 854162 - protein, 373 aa, Homo sapiens
MWACHPCLPGSWVGIAPLPDTLIVLRGGGSALLPAPIPPVTLEEKQTLTRLLAARGATIQELNTIRKALSQLKGGGLAQAAYPAQVVSLILSDVVGDPVEVIASGPTVASSHNVQDCLHILNRYGLRAALPRSVKTVLSRADSDPHGPHTCGHVLNVIIGSNVLALAEAQRQAEALGYQAVVLSAAMQGDVKSMAQFYGLLAHVARTRLTPSMAGASVEEDAQLHELAAELQIPDLQLEEALETMAWGRGPVCLLAGGEPTVQLQGSGRGGRNQELALRVGAELRRWPLGPIDVLFLSGGTDGQDGPTEAAGAWVTPELASQAAAEGLDIATFLAHNDSHTFFCCLQGGAHLLHTGMTGTNVMDTHLLFLRPR

SEQ ID NO: 854163 - protein, 373 aa, Homo sapiens; identical to SEQ ID NO: 854162

SEQ ID NO: 854164 - protein, 396 aa, Homo sapiens
MLLKPHSRVQVFEGAEDNLPDRDALRAALAIQQLAEGLTADDLLLVLISGGGSALLPAPIPPVTLEEKQTLTRLLAARGATIQELNTIRKALSQLKGGGLAQAAYPAQVVSLILSDVVGDPVEVIASGPTVASSHNVQDCLHILNRYGLRAALPRSVKTVLSRADSDPHGPHTCGHVLNVIIGSNVLALAEAQRQAEALGYQAVVLSAAMQGDVKSMAQFYGLLAHVARTRLTPSMAGASVEEDAQLHELAAELQIPDLQLEEALETMAWGRGPVCLLAGGEPTVQLQGSGRGGRNQELALRVGAELRRWPLGPIDVLFLSGGTDGQDGPTEAAGAWVTPELASQAAAEGLDIATFLAHNDSHTFFCCLQGGAHLLHTGMTGTNVMDTHLLFLRPR

SEQ ID NO: 854165 - protein, 373 aa, Homo sapiens; identical to SEQ ID NO: 854162

SEQ ID NO: 854166 - protein, 283 aa, Homo sapiens
MELLLSQSCIWWPMVGEGRTIISCGIKAMERSGNYLIWLQKGEMLLKPHSRVQVFEGAEDNLPDRDALRAALAIQQLAEGLTADDLLLVLISGGGSALLPAPIPPVTLEEKQTLTRLLAARGATIQELNTIRKALSQLKGGGLAQAAYPAQVVSLILSDVVGDPVEVIASGPTVASSHNVQDCLHILNRYGLRAALPRSVKTVLSRADSDPHGPHTCGHVLNVIIGSNVLALAEAQRQAEALGYQAVVLSAAMQGWGTPAAHRDDRYQCHGHPPLVPAASVMA

SEQ ID NO: 854167 - protein, 205 aa, Homo sapiens
MAAALQVLPRLARAPLHPLLWRGSVARLASSMALAEQARQLFESAVGAVLPGPMLHRALSLDPGGRQLKVRDRNFQLRQNLYLVGFGKAVLGMAAAAEELLGQHLVQGVISVPKGIRAAMERAGKQEMLLKPHSRVQVFEGAEDNLPDRDALRAALAIQQLAEGLTADDLLLVLISGWGTPAAHRDDRYQCHGHPPLVPAASVMA

SEQ ID NO: 854168 - protein, 523 aa, Homo sapiens
MAAALQVLPRLARAPLHPLLWRGSVARLASSMALAEQARQLFESAVGAVLPGPMLHRALSLDPGGRQLKVRDRNFQLRQNLYLVGFGKAVLGMAAAAEELLGQHLVQGVISVPKGIRAAMERAGKQEMLLKPHSRVQVFEGAEDNLPDRDALRAALAIQQLAEGLTADDLLLVLISGGGSALLPAPIPPVTLEEKQTLTRLLAARGATIQELNTIRKALSQLKGGGLAQAAYPAQVVSLILSDVVGDPVEVIASGPTVASSHNVQDCLHILNRYGLRAALPRSVKTVLSRADSDPHGPHTCGHVLNVIIGSNVLALAEAQRQAEALGYQAVVLSAAMQGDVKSMAQFYGLLAHVARTRLTPSMAGASVEEDAQLHELAAELQIPDLQLEEALETMAWGRGPVCLLAGGEPTVQLQGSGRGGRNQELALRVGAELRRWPLGPIDVLFLSGGTDGQDGPTEAAGAWVTPELASQAAAEGLDIATFLAHNDSHTFFCCLQGGAHLLHTGMTGTNVMDTHLLFLRPR

SEQ ID NO: 854169 - protein, 192 aa, Homo sapiens
MAAALQVLPRLARAPLHPLLWRGSVARLASSMALAEQARQLFESAVGAVLPGPMLHRALSLDPGGRQLKVRDRNFQLRQNLYLVGFGKAVLGMAAAAEELLGQHLVQGVISVPKGIRAAMERAGKQEMLLKPHSRVQVFEGAEDNLPDRDALRAALAIQQLAEGLTADDLLLVLISGVVPHWPKTVGGGCTT

SEQ ID NO: 854170 - protein, 457 aa, Homo sapiens
MAAALQVLPRLARAPLHPLLWRGSVARLASSMALAEQARQLFESAVGAVLPGPMLHRALSLDPGGRQLKVRDRNFQLRQNLYLVGFGKAVLGMAAAAEELLGQHLVQGVISVPKGIRAAPIPPVTLEEKQTLTRLLAARGATIQELNTIRKALSQLKGGGLAQAAYPAQVVSLILSDVVGDPVEVIASGPTVASSHNVQDCLHILNRYGLRAALPRSVKTVLSRADSDPHGPHTCGHVLNVIIGSNVLALAEAQRQAEALGYQAVVLSAAMQGDVKSMAQFYGLLAHVARTRLTPSMAGASVEEDAQLHELAAELQIPDLQLEEALETMAWGRGPVCLLAGGEPTVQLQGSGRGGRNQELALRVGAELRRWPLGPIDVLFLSGGTDGQDGPTEAAGAWVTPELASQAAAEGLDIATFLAHNDSHTFFCCLQGGAHLLHTGMTGTNVMDTHLLFLRPR

SEQ ID NO: 854171 - protein, 94 aa, Homo sapiens
RPRATPGTPEAPRTHLHKAVGVREAWQHHLSVGFGCAGRRQDPGLPGKLLKKASSSNCASSLQYPLNSSKQTLFPADIAGTILVNTEWELSTHL

SEQ ID NO: 854172 - protein, 102 aa, Homo sapiens
GGRGRLLVPPRPRELTFTKLSASGKPGSTISPSDLVALVADRTLGSRVLGGAIFSACTARLARACRPRRRDACAPRMRQVEAAGGASDYSVGSLRLGWGACD

SEQ ID NO: 854173 - protein, 102 aa, Homo sapiens; identical to SEQ ID NO: 854172

SEQ ID NO: 854174 - protein, 126 aa, Homo sapiens
RPRATPGTPEAPRTHLHKAVGVREAWQHHLSVGFGCAGRRQDPGLPGTGWRHFFSLHGSSRESLSAEETGRVRTTHAPGKLLKKASSSNCASSLQYPLNSSKQTLFPADIAGTILVNTEWELSTHL

SEQ ID NO: 854175 - protein, 1669 aa, Homo sapiens
MGPRLSVWLLLLPAALLLHEEHSRAAAKGGCAGSGCGKCDCHGVKGQKGERGLPGLQGVIGFPGMQGPEGPQGPPGQKGDTGEPGLPGTKGTRGPPGASGYPGNPGLPGIPGQDGPPGPPGIPGCNGTKGERGPLGPPGLPGFAGNPGPPGLPGMKGDPGEILGHVPGMLLKGERGFPGIPGTPGPPGLPGLQGPVGPPGFTGPPGPPGPPGPPGEKGQMGLSFQGPKGDKGDQGVSGPPGVPGQAQVQEKGDFATKGEKGQKGEPGFQGMPGVGEKGEPGKPGPRGKPGKDGDKGEKGSPGFPGEPGYPGLIGRQGPQGEKGEAGPPGPPGIVIGTGPLGEKGERGYPGTPGPRGEPGPKGFPGLPGQPGPPGLPVPGQAGAPGFPGERGEKGDRGFPGTSLPGPSGRDGLPGPPGSPGPPGQPGYTNGIVECQPGPPGDQGPPGIPGQPGFIGEIGEKGQKGESCLICDIDGYRGPPGPQGPPGEIGFPGQPGAKGDRGLPGRDGVAGVPGPQGTPGLIGQPGAKGEPGEFYFDLRLKGDKGDPGFPGQPGMPGRAGSPGRDGHPGLPGPKGSPGSVGLKGERGPPGGVGFPGSRGDTGPPGPPGYGPAGPIGDKGQAGFPGGPGSPGLPGPKGEPGKIVPLPGPPGAEGLPGSPGFPGPQGDRGFPGTPGRPGLPGEKGAVGQPGIGFPGPPGPKGVDGLPGDMGPPGTPGRPGFNGLPGNPGVQGQKGEPGVGLPGLKGLPGLPGIPGTPGEKGSIGVPGVPGEHGAIGPPGLQGIRGEPGPPGLPGSVGSPGVPGIGPPGARGPPGGQGPPGLSGPPGIKGEKGFPGFPGLDMPGPKGDKGAQGLPGITGQSGLPGLPGQQGAPGIPGFPGSKGEMGVMGTPGQPGSPGPVGAPGLPGEKGDHGFPGSSGPRGDPGLKGDKGDVGLPGKPGSMDKVDMGSMKGQKGDQGEKGQIGPIGEKGSRGDPGTPGVPGKDGQAGQPGQPGPKGDPGISGTPGAPGLPGPKGSVGGMGLPGTPGEKGVPGIPGPQGSPGLPGDKGAKGEKGQAGPPGIGIPGLRGEKGDQGIAGFPGSPGEKGEKGSIGIPGMPGSPGLKGSPGSVGYPGSPGLPGEKGDKGLPGLDGIPGVKGEAGLPGTPGPTGPAGQKGEPGSDGIPGSAGEKGEPGLPGRGFPGFPGAKGDKGSKGEVGFPGLAGSPGIPGSKGEQGFMGPPGPQGQPGLPGSPGHATEGPKGDRGPQGQPGLPGLPGPMGPPGLPGIDGVKGDKGNPGWPGAPGVPGPKGDPGFQGMPGIGGSPGITGSKGDMGPPGVPGFQGPKGLPGLQGIKGDQGDQGVPGAKGLPGPPGPPGPYDIIKGEPGLPGPEGPPGLKGLQGLPGPKGQQGVTGLVGIPGPPGIPGFDGAPGQKGEMGPAGPTGPRGFPGPPGPDGLPGSMGPPGTPSVDHGFLVTRHSQTIDDPQCPSGTKILYHGYSLLYVQGNERAHGQDLGTAGSCLRKFSTMPFLFCNINNVCNFASRNDYSYWLSTPEPMPMSMAPITGENIRPFISRCAVCEAPAMVMAVHSQTIQIPPCPSGWSSLWIGYSFVMHTSAGAEGSGQALASPGSCLEEFRSAPFIECHGRGTCNYYANAYSFWLATIERSEMFKKPTPSTLKAGELRTHVSRCQVCMRRT

SEQ ID NO: 854176 - protein, 1605 aa, Homo sapiens
MQGPEGPQGPPGQKGDTGEPGLPGTKGTRGPPGASGYPGNPGLPGIPGQDGPPGPPGIPGCNGTKGERGPLGPPGLPGFAGNPGPPGLPGMKGDPGEILGHVPGMLLKGERGFPGIPGTPGPPGLPGLQGPVGPPGFTGPPGPPGPPGPPGEKGQMGLSFQGPKGDKGDQGVSGPPGVPGQAQVQEKGDFATKGEKGQKGEPGFQGMPGVGEKGEPGKPGPRGKPGKDGDKGEKGSPGFPGEPGYPGLIGRQGPQGEKGEAGPPGPPGIVIGTGPLGEKGERGYPGTPGPRGEPGPKGFPGLPGQPGPPGLPVPGQAGAPGFPGERGEKGDRGFPGTSLPGPSGRDGLPGPPGSPGPPGQPGYTNGIVECQPGPPGDQGPPGIPGQPGFIGEIGEKGQKGESCLICDIDGYRGPPGPQGPPGEIGFPGQPGAKGDRGLPGRDGVAGVPGPQGTPGLIGQPGAKGEPGEFYFDLRLKGDKGDPGFPGQPGMPGRAGSPGRDGHPGLPGPKGSPGSVGLKGERGPPGGVGFPGSRGDTGPPGPPGYGPAGPIGDKGQAGFPGGPGSPGLPGPKGEPGKIVPLPGPPGAEGLPGSPGFPGPQGDRGFPGTPGRPGLPGEKGAVGQPGIGFPGPPGPKGVDGLPGDMGPPGTPGRPGFNGLPGNPGVQGQKGEPGVGLPGLKGLPGLPGIPGTPGEKGSIGVPGVPGEHGAIGPPGLQGIRGEPGPPGLPGSVGSPGVPGIGPPGARGPPGGQGPPGLSGPPGIKGEKGFPGFPGLDMPGPKGDKGAQGLPGITGQSGLPGLPGQQGAPGIPGFPGSKGEMGVMGTPGQPGSPGPVGAPGLPGEKGDHGFPGSSGPRGDPGLKGDKGDVGLPGKPGSMDKVDMGSMKGQKGDQGEKGQIGPIGEKGSRGDPGTPGVPGKDGQAGQPGQPGPKGDPGISGTPGAPGLPGPKGSVGGMGLPGTPGEKGVPGIPGPQGSPGLPGDKGAKGEKGQAGPPGIGIPGLRGEKGDQGIAGFPGSPGEKGEKGSIGIPGMPGSPGLKGSPGSVGYPGSPGLPGEKGDKGLPGLDGIPGVKGEAGLPGTPGPTGPAGQKGEPGSDGIPGSAGEKGEPGLPGRGFPGFPGAKGDKGSKGEVGFPGLAGSPGIPGSKGEQGFMGPPGPQGQPGLPGSPGHATEGPKGDRGPQGQPGLPGLPGPMGPPGLPGIDGVKGDKGNPGWPGAPGVPGPKGDPGFQGMPGIGGSPGITGSKGDMGPPGVPGFQGPKGLPGLQGIKGDQGDQGVPGAKGLPGPPGPPGPYDIIKGEPGLPGPEGPPGLKGLQGLPGPKGQQGVTGLVGIPGPPGIPGFDGAPGQKGEMGPAGPTGPRGFPGPPGPDGLPGSMGPPGTPSVDHGFLVTRHSQTIDDPQCPSGTKILYHGYSLLYVQGNERAHGQDLGTAGSCLRKFSTMPFLFCNINNVCNFASRNDYSYWLSTPEPMPMSMAPITGENIRPFISRCAVCEAPAMVMAVHSQTIQIPPCPSGWSSLWIGYSFVMHTSAGAEGSGQALASPGSCLEEFRSAPFIECHGRGTCNYYANAYSFWLATIERSEMFKKPTPSTLKAGELRTHVSRCQVCMRRT

SEQ ID NO: 854177 - protein, 1649 aa, Homo sapiens
MQGPEGPQGPPGQKGDTGEPGLPGTKGTRGPPGASGYPGNPGLPGIPGQDGPPGPPGIPGCNGTKGERGPLGPPGLPGFAGNPGPPGLPGMKGDPGEILGHVPGMLLKGERGFPGIPGTPGPPGLPGLQGPVGPPGFTGPPGPPGPPGPPGEKGQMGLSFQGPKGDKGDQGVSGPPGVPGQAQVQEKGDFATKGEKGQKGEPGFQGMPGVGEKGEPGKPGPRGKPGKDGDKGEKGSPGFPGEPGYPGLIGRQGPQGEKGEAGPPGPPGIVIGTGPLGEKGERGYPGTPGPRGEPGPKGFPGLPGQPGPPGLPVPGQAGAPGFPGERGEKGDRGFPGTSLPGPSGRDGLPGPPGSPGPPGQPGYTNGIVECQPGPPGDQGPPGIPGQPGFIGEIGEKGQKGESCLICDIDGYRGPPGPQGPPGEIGFPGQPGAKGDRGLPGRDGVAGVPGPQGTPGLIGQPGAKGEPGEFYFDLRLKGDKGDPGFPGQPGMPGRAGSPGRDGHPGLPGPKGSPGSVGLKGERGPPGGVGFPGSRGDTGPPGPPGYGPAGPIGDKGQAGFPGGPGSPGLPGPKGEPGKIVPLPGPPGAEGLPGSPGFPGPQGDRGFPGTPGRPGLPGEKGAVGQPGIGFPGPPGPKGVDGLPGDMGPPGTPGRPGFNGLPGNPGVQGQKGEPGVGLPGLKGLPGLPGIPGTPGEKGSIGVPGVPGEHGAIGPPGLQGIRGEPGPPGLPGSVGSPGVPGIGPPGARGPPGGQGPPGLSGPPGIKGEKGFPGFPGLDMPGPKGDKGAQGLPGITGQSGLPGLPGQQGAPGIPGFPGEVIFELLPGSIMKTWASPYSFYDSAFTVSIQSKKMFTAFPLATGSKGEMGVMGTPGQPGSPGPVGAPGLPGEKGDHGFPGSSGPRGDPGLKGDKGDVGLPGKPGSMDKVDMGSMKGQKGDQGEKGQIGPIGEKGSRGDPGTPGVPGKDGQAGQPGQPGPKGDPGISGTPGAPGLPGPKGSVGGMGLPGTPGEKGVPGIPGPQGSPGLPGDKGAKGEKGQAGPPGIGIPGLRGEKGDQGIAGFPGSPGEKGEKGSIGIPGMPGSPGLKGSPGSVGYPGSPGLPGEKGDKGLPGLDGIPGVKGEAGLPGTPGPTGPAGQKGEPGSDGIPGSAGEKGEPGLPGRGFPGFPGAKGDKGSKGEVGFPGLAGSPGIPGSKGEQGFMGPPGPQGQPGLPGSPGHATEGPKGDRGPQGQPGLPGLPGPMGPPGLPGIDGVKGDKGNPGWPGAPGVPGPKGDPGFQGMPGIGGSPGITGSKGDMGPPGVPGFQGPKGLPGLQGIKGDQGDQGVPGAKGLPGPPGPPGPYDIIKGEPGLPGPEGPPGLKGLQGLPGPKGQQGVTGLVGIPGPPGIPGFDGAPGQKGEMGPAGPTGPRGFPGPPGPDGLPGSMGPPGTPSVDHGFLVTRHSQTIDDPQCPSGTKILYHGYSLLYVQGNERAHGQDLGTAGSCLRKFSTMPFLFCNINNVCNFASRNDYSYWLSTPEPMPMSMAPITGENIRPFISRCAVCEAPAMVMAVHSQTIQIPPCPSGWSSLWIGYSFVMHTSAGAEGSGQALASPGSCLEEFRSAPFIECHGRGTCNYYANAYSFWLATIERSEMFKKPTPSTLKAGELRTHVSRCQVCMRRT

SEQ ID NO: 854178 - protein, 577 aa, Homo sapiens
AGWVRNSRDPGSVGYPGSPGLPGEKGDKGLPGLDGIPGVKGEAGLPGTPGPTGPAGQKGEPGSDGIPGSAGEKGEPGLPGRGFPGFPGAKGDKGSKGEVGFPGLAGSPGIPGSKGEQGFMGPPGPQGQPGLPGSPGHATEGPKGDRGPQGQPGLPGLPGPMGPPGLPGIDGVKGDKGNPGWPGAPGVPGPKGDPGFQGMPGIGGSPGITGSKGDMGPPGVPGFQGPKGLPGLQGIKGDQGDQGVPGAKGLPGPPGPPGPYDIIKGEPGLPGPEGPPGLKGLQGLPGPKGQQGVTGLVGIPGPPGIPGFDGAPGQKGEMGPAGPTGPRGFPGPPGPDGLPGSMGPPGTPSVDHGFLVTRHSQTIDDPQCPSGTKILYHGYSLLYVQGNERAHGQDLGTAGSCLRKFSTMPFLFCNINNVCNFASRNDYSYWLSTPEPMPMSMAPITGENIRPFISRCAVCEAPAMVMAVHSQTIQIPPCPSGWSSLWIGYSFVMHTSAGAEGSGQALASPGSCLEEFRSAPFIECHGRGTCNYYANAYSFWLATIERSEMFKKPTPSTLKAGELRTHVSRCQVCMRRT

SEQ ID NO: 854179 - protein, 1669 aa, Homo sapiens; identical to SEQ ID NO: 854175

SEQ ID NO: 854180 - protein, 458 aa, Homo sapiens [sequence omitted]

SEQ ID NO: 854181 - protein, 1651 aa, Homo sapiens
MGPRLSVWLLLLPAALLLHEEHSRAAAKGGCAGSGCGKCDCHGVKGQKGERGLPGLQGVIGFPGMQGPEGPQGPPGQKGDTGEPGLPGTKGTRGPPGASGYPGNPGLPGIPGQDGPPGPPGIPGCNGTKGERGPLGPPGLPGFAGNPGPPGLPGMKGDPGEILGHVPGMLLKGERGFPGIPGTPGPPGLPGLQGPVGPPGFTGPPGPPGPPGPPGEKGQMGLSFQGPKGDKGDQGVSGPPGVPGQAQVQEKGDFATKGEKGQKGEPGFQGMPGVGEKGEPGKPGPRGKPGKDGDKGEKGSPGFPGEPGYPGLIGRQGPQGEKGEAGPPGPPGIVIGTGPLGEKGERGYPGTPGPRGEPGPKGFPGLPGQPGPPGLPVPGQAGAPGFPGERGEKGDRGFPGTSLPGPSGRDGLPGPPGSPGPPGQPGYTNGIVECQPGPPGDQGPPGIPGQPGFIGEIGEKGQKGESCLICDIDGYRGPPGPQGPPGEIGFPGQPGAKGDRGLPGRDGVAGVPGPQGTPGLIGQPGAKGEPGEFYFDLRLKGDKGDPGFPGQPGMPGRAGSPGRDGHPGLPGPKGSPGSVGLKGERGPPGGVGFPGSRGDTGPPGPPGYGPAGPIGDKGQAGFPGGPGSPGLPGPKGEPGKIVPLPGPPGAEGLPGSPGFPGPQGDRGFPGTPGRPGLPGEKGAVGQPGIGFPGPPGPKGVDGLPGDMGPPGTPGRPGFNGLPGNPGVQGQKGEPGVGLPGLKGLPGLPGIPGTPGEKGSIGVPGVPGEHGAIGPPGLQGIRGEPGPPGLPGSVGSPGVPGIGPPGARGPPGGQGPPGLSGPPGIKGEKGFPGFPGLDMPGPKGDKGAQGLPGITGQSGLPGLPGQQGAPGIPGFPGSKGEMGVMGTPGQPGSPGPVGAPGLPGEKGDHGFPGSSGPRGDPGLKGDKGDVGLPGKPGSMDKVDMGSMKGQKGDQGEKGQIGPIGEKGSRGDPGTPGVPGKDGQAGQPGQPGPKGDPGISGTPGAPGLPGPKGSVGGMGLPGTPGEKGVPGIPGPQGSPGLPGDKGAKGEKGQAGPPGIGIPGLRGEKGDQGIAGFPGSPGEKGEKGSIGIPGMPGSPGLKGSPGSVGYPGSPGLPGEKGDKGLPGLDGIPGVKGEAGLPGTPGPTGPAGQKGEPGSDGIPGSAGEKGEPGLPGRGFPGFPGAKGDKGSKGEVGFPGLAGSPGIPGSKGEQGFMGPPGPQGQPGLPGSPGHATEGPKGDRGPQGQPGLPGLPGPMGPPGLPGIDGVKGDKGNPGWPGAPGVPGPKGDPGFQGMPGIGGSPGITGSKGDMGPPGVPGFQGPKGLPGLQGIKGDQGDQGVPGAKGLPGPPGPPGPYDIIKGEPGLPGPEGPPGLKGLQGLPGPKGQQGVTGLVGIPGPPGIPGFDGAPGQKGEMGPAGPTGPRGFPGPPGPDGLPGSMGPPGTPSVDHGFLVTRHSQTIDDPQCPSGTKILYHGYSLLYVQGNERAHGQDLGTAGSCLRKFSTMPFLFCNINNVCNFASRNDYSYWLSTPEPMPMSMAPITGVMAVHSQTIQIPPCPSGWSSLWIGYSFVMHTSAGAEGSGQALASPGSCLEEFRSAPFIECHGRGTCNYYANAYSFWLATIERSEMFKKPTPSTLKAGELRTHVSRCQVCMRRT

SEQ ID NO: 854182 - protein, 372 aa, Homo sapiens
FLNDPRRGDMGPPGVPGFQGPKGLPGLQGIKGDQGDQGVPGAKGLPGPPGPPGPYDIIKGEPGLPGPEGPPGLKGLQGLPGPKGQQGVTGLVGIPGPPGIPGFDGAPGQKGEMGPAGPTGPRGFPGPPGPDGLPGSMGPPGTPSVDHGFLVTRHSQTIDDPQCPSGTKILYHGYSLLYVQGNERAHGQDLGTAGSCLRKFSTMPFLFCNINNVCNFASRNDYSYWLSTPEPMPMSMAPITGENIRPFISRCAVCEAPAMVMAVHSQTIQIPPCPSGWSSLWIGYSFVMHTSAGAEGSGQALASPGSCLEEFRSAPFIECHGRGTCNYYANAYSFWLATIERSEMFKKPTPSTLKAGELRTHVSRCQVCMRRT

SEQ ID NO: 854183 - protein, 1681 aa, Homo sapiens
MGPRLSVWLLLLPAALLLHEEHSRAAAKGGCAGSGCGKCDCHGVKGQKGERGLPGLQGVIGFPGMQGPEGPQGPPGQKGDTGEPGLPGTKGTRGPPGASGYPGNPGLPGIPGQDGPPGPPGIPGCNGTKGERGPLGPPGLPGFAGNPGPPGLPGMKGDPGEILGHVPGMLLKGERGFPGIPGTPGPPGLPGLQGPVGPPGFTGPPGPPGPPGPPGEKGQMGLSFQGPKGDKGDQGVSGPPGVPGQAQVQEKGDFATKGEKGQKGEPGFQGMPGVGEKGEPGKPGPRGKPGKDGDKGEKGSPGFPGEPGYPGLIGRQGPQGEKGEAGPPGPPGIVIGTGPLGEKGERGYPGTPGPRGEPGPKGFPGLPGQPGPPGLPVPGQAGAPGFPGERGEKGDRGFPGTSLPGPSGRDGLPGPPGSPGPPGQPGYTNGIVECQPGPPGDQGPPGIPGQPGFIGEIGEKGQKGESCLICDIDGYRGPPGPQGPPGEIGFPGQPGAKGDRGLPGRDGVAGVPGPQGTPGLIGQPGAKGEPGEFYFDLRLKGDKGDPGFPGQPGMPGRAGSPGRDGHPGLPGPKGSPGSVGLKGERGPPGGVGFPGSRGDTGPPGPPGYGPAGPIGDKGQAGFPGGPGSPGLPGPKGEPGKIVPLPGPPGAEGLPGSPGFPGPQGDRGFPGTPGRPGLPGEKGAVGQPGIGFPGPPGPKGVDGLPGDMGPPGTPGRPGFNGLPGNPGVQGQKGEPGVGLPGLKGLPGLPGIPGTPGEKGSIGVPGVPGEHGAIGPPGLQGIRGEPGPPGLPGSVGSPGVPGIGPPGARGPPGGQGPPGLSGPPGIKGEKGFPGFPGLDMPGPKGDKGAQGLPGITGQSGLPGLPGQQGAPGIPGFPGSKGEMGVMGTPGQPGSPGPVGAPGLPGEKGDHGFPGSSGPRGDPGLKGDKGDVGLPGKPGSMDKVDMGSMKGQKGDQGEKGQIGPIGEKGSRGDPGTPGVPGKDGQAGQPGQPGPKGDPGISGTPGAPGLPGPKGSVGGMGLPGTPGEKGVPGIPGPQGSPGLPGDKGAKGEKGQAGPPGIGIPGLRGEKGDQGIAGFPGSPGEKGEKGSIGIPGMPGSPGLKGSPGSVGYPGSPGLPGEKGDKGLPGLDGIPGVKGEAGLPGTPGPTGPAGQKGEPGSDGIPGSAGEKGEPGLPGRGFPGFPGAKGDKGSKGEVGFPGLAGSPGIPGSKGEQGFMGPPGPQGQPGLPGSPGHATEGPKGDRGPQGQPGLPGLPGPMGPPGLPGIDGVKGDKGNPGWPGAPGVPGPKGDPGFQGMPGIGGSPGITGSKGDMGPPGVPGFQGPKGLPGLQGIKGDQGDQGVPGAKGLPGPPGPPGPYDIIKGEPGLPGPEGPPGLKGLQGLPGPKGQQGVTGLVGIPGPPGIPGFDGAPGQKGEMGPAGPTGPRGFPGPPGPDGLPGSMGPPGTPSVDHGFLVTRHSQTIDDPQCPSGTKILYHGYSLLYVQGNERAHGQDLGTAGSCLRKFSTMPFLFCNINNVCNFASRNDYSYWLSTPEPMPMSMAPITGENIRPFISRCAVCEAPAMVMAVHSQTIQIPPCPSGWSSLWIGYSFVMKCAIHRVSRPWDLQLLRKRLQLLARHHREERDVQEAYAVHLEGRGAAHARQPLPSLYEKNIMKPDSANVTTWCYFFFFLLTATNPRNISCVPHCPI

SEQ ID NO: 854184 - protein, 431 aa, Homo sapiens
MGPRLSVWLLLLPAALLLHEEHSRAAAKGGCAGSGCGKCDCHGVKGQKGERGLPGLQGVIGFPGMQGPEGPQGPPGQKGDTGEPGLPGTKGTRGPPGASGYPGNPGLPGIPGQDGPPGPPGIPGCNGTKGERGPLGPPGLPGFAGNPGPPGLPGMKGDPGEILGHVPGMLLKGERGFPGIPGTPGPPGLPGLQGPVGPPGFTGPPGPPGPPGPPGEEDDPQCPSGTKILYHGYSLLYVQGNERAHGQDLGTAGSCLRKFSTMPFLFCNINNVCNFASRNDYSYWLSTPEPMPMSMAPITGENIRPFISRCAVCEAPAMVMAVHSQTIQIPPCPSGWSSLWIGYSFVMHTSAGAEGSGQALASPGSCLEEFRSAPFIECHGRGTCNYYANAYSFWLATIERSEMFKKPTPSTLKAGELRTHVSRCQVCMRRT

SEQ ID NO: 854185 - protein, 1669 aa, Homo sapiens; identical to SEQ ID NO: 854175

SEQ ID NO: 854186 - protein, 1669 aa, Homo sapiens; identical to SEQ ID NO: 854175

SEQ ID NO: 854187 - protein, 1669 aa, Homo sapiens; identical to SEQ ID NO: 854175

SEQ ID NO: 854188 - protein, 1669 aa, Homo sapiens; identical to SEQ ID NO: 854175

SEQ ID NO: 854189 - protein, 270 aa, Homo sapiens
MGPRLSVWLLLLPAALLLHEEHSRAAAKGGCAGSGCGKCDCHGVKGQKGERGLPGLQGVIGFPGMQGPEGPQGPPGQKGDTGEPGLPGTKGTRGPPGASGYPGNPGLPGIPGQDGPPGPPGIPGCNGTKGERGPLGPPGLPGFAGNPGPPGLPGMKGDPGEILGHVPGMLLKGERGFPGIPGTPGPPGLPGLQGPVGPPGFTGPPGPPGPPGPPGEKGQMGLSFQGPKGDKGDIDNHVPSHRSCCHSAACTEETESFSYSNKSIRVLKKK

SEQ ID NO: 854190 - protein, 1669 aa, Homo sapiens; identical to SEQ ID NO: 854175

SEQ ID NO: 854191 - protein, 1297 aa, Homo sapiens
MFLLWKGLCSGSLKLVSVDVLAAVLGRDISLPGPSGRDGLPGPPGSPGPPGQPGYTNGIVECQPGPPGDQGPPGIPGQPGFIGEIGEKGQKGESCLICDIDGYRGPPGPQGPPGEIGFPGQPGAKGDRGLPGRDGVAGVPGPQGTPGLIGQPGAKGEPGEFYFDLRLKGDKGDPGFPGQPGMPGRAGSPGRDGHPGLPGPKGSPGSVGLKGERGPPGGVGFPGSRGDTGPPGPPGYGPAGPIGDKGQAGFPGGPGSPGLPGPKGEPGKIVPLPGPPGAEGLPGSPGFPGPQGDRGFPGTPGRPGLPGEKGAVGQPGIGFPGPPGPKGVDGLPGDMGPPGTPGRPGFNGLPGNPGVQGQKGEPGVGLPGLKGLPGLPGIPGTPGEKGSIGVPGVPGEHGAIGPPGLQGIRGEPGPPGLPGSVGSPGVPGIGPPGARGPPGGQGPPGLSGPPGIKGEKGFPGFPGLDMPGPKGDKGAQGLPGITGQSGLPGLPGQQGAPGIPGFPGSKGEMGVMGTPGQPGSPGPVGAPGLPGEKGDHGFPGSSGPRGDPGLKGDKGDVGLPGKPGSMDKVDMGSMKGQKGDQGEKGQIGPIGEKGSRGDPGTPGVPGKDGQAGQPGQPGPKGDPGISGTPGAPGLPGPKGSVGGMGLPGTPGEKGVPGIPGPQGSPGLPGDKGAKGEKGQAGPPGIGIPGLRGEKGDQGIAGFPGSPGEKGEKGSIGIPGMPGSPGLKGSPGSVGYPGSPGLPGEKGDKGLPGLDGIPGVKGEAGLPGTPGPTGPAGQKGEPGSDGIPGSAGEKGEPGLPGRGFPGFPGAKGDKGSKGEVGFPGLAGSPGIPGSKGEQGFMGPPGPQGQPGLPGSPGHATEGPKGDRGPQGQPGLPGLPGPMGPPGLPGIDGVKGDKGNPGWPGAPGVPGPKGDPGFQGMPGIGGSPGITGSKGDMGPPGVPGFQGPKGLPGLQGIKGDQGDQGVPGAKGLPGPPGPPGPYDIIKGEPGLPGPEGPPGLKGLQGLPGPKGQQGVTGLVGIPGPPGIPGFDGAPGQKGEMGPAGPTGPRGFPGPPGPDGLPGSMGPPGTPSVDHGFLVTRHSQTIDDPQCPSGTKILYHGYSLLYVQGNERAHGQDLGTAGSCLRKFSTMPFLFCNINNVCNFASRNDYSYWLSTPEPMPMSMAPITGENIRPFISRCAVCEAPAMVMAVHSQTIQIPPCPSGWSSLWIGYSFVMHTSAGAEGSGQALASPGSCLEEFRSAPFIECHGRGTCNYYANAYSFWLATIERSEMFKKPTPSTLKAGELRTHVSRCQVCMRRT

SEQ ID NO: 854192 - protein, 671 aa, Homo sapiens
  misc_feature (11)..(11): Xaa can be any naturally occurring amino acid
APLYGGEAKKXYTVSVVIAGPTARDTDEWRTSKLPQGSPGLPGDKGAKGEKGQAGPPGIGIPGLRGEKGDQGIAGFPGSPGEKGEKGSIGIPGMPGSPGLKGSPGSVGYPGSPGLPGEKGDKGLPGLDGIPGVKGEAGLPGTPGPTGPAGQKGEPGSDGIPGSAGEKGEPGLPGRGFPGFPGAKGDKGSKGEVGFPGLAGSPGIPGSKGEQGFMGPPGPQGQPGLPGSPGHATEGPKGDRGPQGQPGLPGLPGPMGPPGLPGIDGVKGDKGNPGWPGAPGVPGPKGDPGFQGMPGIGGSPGITGSKGDMGPPGVPGFQGPKGLPGLQGIKGDQGDQGVPGAKGLPGPPGPPGPYDIIKGEPGLPGPEGPPGLKGLQGLPGPKGQQGVTGLVGIPGPPGIPGFDGAPGQKGEMGPAGPTGPRGFPGPPGPDGLPGSMGPPGTPSVDHGFLVTRHSQTIDDPQCPSGTKILYHGYSLLYVQGNERAHGQDLGTAGSCLRKFSTMPFLFCNINNVCNFASRNDYSYWLSTPEPMPMSMAPITGENIRPFISRCAVCEAPAMVMAVHSQTIQIPPCPSGWSSLWIGYSFVMHTSAGAEGSGQALASPGSCLEEFRSAPFIECHGRGTCNYYANAYSFWLATIERSEMFKKPTPSTLKAGELRTHVSRCQVCMRRT

SEQ ID NO: 854193 - protein, 129 aa, Homo sapiens
CLCSTSRCAVCEAPAMVMAVHSQTIQIPPCPSGWSSLWIGYSFVMHTSAGAEGSGQALASPGSCLEEFRSAPFIECHGRGTCNYYANAYSFWLATIERSEMFKKPTPSTLKAGELRTHVSRCQVCMRRT

SEQ ID NO: 854194 - protein, 1669 aa, Homo sapiens; identical to SEQ ID NO: 854175

SEQ ID NO: 854195 - protein, 1669 aa, Homo sapiens; identical to SEQ ID NO: 854175

SEQ ID NO: 854196 - protein, 294 aa, Homo sapiens
MGPRLSVWLLLLPAALLLHEEHSRAAAKGGCAGSGCGKCDCHGVKGQKGERGLPGLQGVIGFPGMQGPEGPQGPPGQKGDTGEPGLPGTKGTRGPPGASGYPGNPGLPGIPGQDGPPGPPGIPGCNGTKGERGPLGPPGLPGFAGNPGPPGLPGMKGDPGEILGHVPGMLLKGERGFPGIPGTPGPPGLPGLQGPVGPPGFTGPPGPPGPPGPPGEKGQMGLSFQGPKGDKGDQGVSGPPGVPGQAQVQEKGDFATKGEKGQKGEPGFQGMPGVGEKGEPGKPGPRRRRADSDH

SEQ ID NO: 854197 - protein, 87 aa, Homo sapiens
CQDQVEEMGSRVLLVPLGPLGSLATQVSSLRNGLMWGASRHQGAGQTQVGGCDSPPQPECNRKAWILLIIHIPLRESSENEPCYKKQ

SEQ ID NO: 854198 - protein, 777 aa, Homo sapiens
MLPRPLRLLLDTSPPGGVVLSSFRSRDPEEGGGPGGLVVGGGQEEEEEEEEEAPVSVWDEEEDGAVFTVTSRQYRPLDPLVPMPPPRSSRRLRAGTLEALVRHLLDTRTSGTDVSFMSAFLATHRAFTSTPALLGLMADRLEALESHPTDELERTTEVAISVLSTWLASHPEDFGSEAKGQLDRLESFLLQTGYAAGKGVGGGSADLIRNLRSRVDPQAPDLPKPLALPGDPPADPTDVLVFLADHLAEQLTLLDAELFLNLIPSQCLGGLWGHRDRPGHSHLCPSVRATVTQFNKVAGAVVSSVLGATSTGEGPGEVTIRPLRPPQRARLLEKWIRVAEECRLLRNFSSVYAVVSALQSSPIHRLRAAWGEATRDSLRVFSSLCQIFSEEDNYSQSRELLVQEVKLQSPLEPHSKKAPRSGSRGGGVVPYLGTFLKDLVMLDAASKDELENGYINFDKRRKEFAVLSELRRLQNECRGYNLQPDHDIQRWLQGLRPLTEAQSHRVSCEVEPPGSSDPPAPRVLRPTLVISQWTEVLGSVGVPTPLVSCDRPSTGGDEAPTTPAPLLTRLAQHMKWPSVSSLDSALESSPSLHSPADPSHLSPPASSPRPSRGHRRSASCGSPLSGGAEEASGGTGYGGEGSGPGASDCRIIRVQMELGEDGSVYKSILVTSQDKAPSVISRVLKKNNRDSAVASEYELVQLLPGERELTIPASANVFYAMDGASHDFLLRQRRRSSTATPGVTSGPSASGTPPSEGGGGSFPRIKATGRKIARALF

SEQ ID NO: 854199 - protein, 779 aa, Homo sapiens
  misc_feature (53)..(54): Xaa can be any naturally occurring amino acid
  misc_feature (56)..(56): Xaa can be any naturally occurring amino acid
  misc_feature (61)..(61): Xaa can be any naturally occurring amino acid
  misc_feature (75)..(78): Xaa can be any naturally occurring amino acid
MLPRPLRLLLDTSPPGGVVLSSFRSRDPEEGGGPGGLVVGGGQEEEEEEEEEXXCXFVDYXFFFFFFFFYIYFFXXXXLIPWVPMPPPRSSRRLRAGTLEALVRHLLDTRTSGTDVSFMSAFLATHRAFTSTPALLGLMADRLEALESHPTDELERTTEVAISVLSTWLASHPEDFGSEAKGQLDRLESFLLQTGYAAGKGVGGGSADLIRNLRSRVDPQAPDLPKPLALPGDPPADPTDVLVFLADHLAEQLTLLDAELFLNLIPSQCLGGLWGHRDRPGHSHLCPSVRATVTQFNKVAGAVVSSVLGATSTGEGPGEVTIRPLRPPQRARLLEKWIRVAEECRLLRNFSSVYAVVSALQSSPIHRLRAAWGEATRDSLRVFSSLCQIFSEEDNYSQSRELLVQEVKLQSPLEPHSKKAPRSGSRGGGVVPYLGTFLKDLVMLDAASKDELENGYINFDKRRKEFAVLSELRRLQNECRGYNLQPDHDIQRWLQGLRPLTEAQSHRVSCEVEPPGSSDPPAPRVLRPTLVISQWTEVLGSVGVPTPLVSCDRPSTGGDEAPTTPAPLLTRLAQHMKWPSVSSLDSALESSPSLHSPADPSHLSPPASSPRPSRGHRRSASCGSPLSGGAEEASGGTGYGGEGSGPGASDCRIIRVQMELGEDGSVYKSILVTSQDKAPSVISRVLKKNNRDSAVASEYELVQLLPGERELTIPASANVFYAMDGASHDFLLRQRRRSSTATPGVTSGPSASGTPPSEGGGGSFPRIKATGRKIARALF

SEQ ID NO: 854200 - protein, 695 aa, Homo sapiens
MPPPRSSRRLRAGTLEALVRHLLDTRTSGTDVSFMSAFLATHRAFTSTPALLGLMADRLEALESHPTDELERTTEVAISVLSTWLASHPEDFGSEAKGQLDRLESFLLQTGYAAGKGVGGGSADLIRNLRSRVDPQAPDLPKPLALPGDPPADPTDVLVFLADHLAEQLTLLDAELFLNLIPSQCLGGLWGHRDRPGHSHLCPSVRATVTQFNKVAGAVVSSVLGATSTGEGPGEVTIRPLRPPQRARLLEKWIRVAEECRLLRNFSSVYAVVSALQSSPIHRLRAAWGEATRDSLRVFSSLCQIFSEEDNYSQSRELLVQEVKLQSPLEPHSKKAPRSGSRGGGVVPYLGTFLKDLVMLDAASKDELENGYINFDKRRKEFAVLSELRRLQNECRGYNLQPDHDIQRWLQGLRPLTEAQSHRVSCEVEPPGSSDPPAPRVLRPTLVISQWTEVLGSVGVPTPLVSCDRPSTGGDEAPTTPAPLLTRLAQHMKWPSVSSLDSALESSPSLHSPADPSHLSPPASSPRPSRGHRRSASCGSPLSGGAEEASGGTGYGGEGSGPGASDCRIIRVQMELGEDGSVYKSILVTSQDKAPSVISRVLKKNNRDSAVASEYELVQLLPGERELTIPASANVFYAMDGASHDFLLRQRRRSSTATPGVTSGPSASGTPPSEGGGGSFPRIKATGRKIARALF

SEQ ID NO: 854201 - protein, 695 aa, Homo sapiens; identical to SEQ ID NO: 854200

SEQ ID NO: 854202 - protein, 532 aa, Homo sapiens
MNFNLLTSTLQELFLNLIPSQCLGGLWGHRDRPGHSHLCPSVRATVTQFNKVAGAVVSSVLGATSTGEGPGEVTIRPLRPPQRARLLEKWIRVAEECRLLRNFSSVYAVVSALQSSPIHRLRAAWGEATRDSLRVFSSLCQIFSEEDNYSQSRELLVQEVKLQSPLEPHSKKAPRSGSRGGGVVPYLGTFLKDLVMLDAASKDELENGYINFDKRRKEFAVLSELRRLQNECRGYNLQPDHDIQRWLQGLRPLTEAQSHRVSCEVEPPGSSDPPAPRVLRPTLVISQWTEVLGSVGVPTPLVSCDRPSTGGDEAPTTPAPLLTRLAQHMKWPSVSSLDSALESSPSLHSPADPSHLSPPASSPRPSRGHRRSASCGSPLSGGAEEASGGTGYGGEGSGPGASDCRIIRVQMELGEDGSVYKSILVTSQDKAPSVISRVLKKNNRDSAVASEYELVQLLPGERELTIPASANVFYAMDGASHDFLLRQRRRSSTATPGVTSGPSASGTPPSEGGGGSFPRIKATGRKIARALF

SEQ ID NO: 854203 - protein, 803 aa, Homo sapiens
MLPRPLRLLLDTSPPGGVVLSSFRSRDPEEGGGPGGLVVGGGQEEEEEEEEEAPVSVWDEEEDGAVFTVTSRQYRPLDPLVPMPPPRSSRRLRAGTLEALVRHLLDTRTSGTDVSFMSAFLATHRAFTSTPALLGLMADRLEALESHPTDELERTTEVAISVLSTWLASHPEDFGSEAKGQLDRLESFLLQTGYAAGKGVGGGSADLIRNLRSRVDPQAPDLPKPLALPGDPPADPTDVLVFLADHLAEQLTLLDAELFLNLIPSQCLGGLWGHRDRPGHSHLCPSVRATVTQFNKVAGAVVSSVLGATSTGEGPGEVTIRPLRPPQRARLLEKWIRVAEECRLLRNFSSVYAVVSALQSSPIHRLRAAWGEATRDSLRVFSSLCQIFSEEDNYSQSRELLVQEVKLQSPLEPHSKKAPRSGSRGGGVVPYLGTFLKDLVMLDAASKDELENGYINFDKRRKEFAVLSELRRLQNECRGYNLQPDHDIQRWLQGLRPLTEAQSHRVSCEVEPPGSSDPPAPRVLRPTLVISQWTEERFTGWGVVSWDFHFSLILPISCHCRVLGSVGVPTPLVSCDRPSTGGDEAPTTPAPLLTRLAQHMKWPSVSSLDSALESSPSLHSPADPSHLSPPASSPRPSRGHRRSASCGSPLSGGAEEASGGTGYGGEGSGPGASDCRIIRVQMELGEDGSVYKSILVTSQDKAPSVISRVLKKNNRDSAVASEYELVQLLPGERELTIPASANVFYAMDGASHDFLLRQRRRSSTATPGVTSGPSASGTPPSEGGGGSFPRIKATGRKIARALF

SEQ ID NO: 854204 - protein, 816 aa, Homo sapiens
MLPRPLRLLLDTSPPGGVVLSSFRSRDPEEGGGPGGLVVGGGQEEEEEEEEEAPVSVWDEEEDGAVFTVTSRQYRPLDPLVPMPPPRSSRRLRAGTLEALVRHLLDTRTSGTDVSFMSAFLATHRAFTSTPALLGLMADRLEALESHPTDELERTTEVAISVLSTWLASHPEDFGSEAKGQLDRLESFLLQTGYAAGKGVGGGSADLIRNLRSRVDPQAPDLPKPLALPGDPPADPTDVLVFLADHLAEQLTLLDAELFLNLIPSQCLGGLWGHRDRPGHSHLCPSVRATVTQFNKVAGAVVSSVLGATSTGEGPGEVTIRPLRPPQRARLLEKWIRVAEECRLLRNFSSVYAVVSALQSSPIHRLRAAWGEATRDSLRVFSSLCQIFSEEDNYSQSRELLVQEVKLQSPLEPHSKKAPRSGSRGGGVVPYLGTFLKDLVMLDAASKDELENGYINFDKRRKVSGVSGLDAGLPYPCSRKGRGKSQGSLSFGSCSLRAPSQEFAVLSELRRLQNECRGYNLQPDHDIQRWLQGLRPLTEAQSHRVSCEVEPPGSSDPPAPRVLRPTLVISQWTEVLGSVGVPTPLVSCDRPSTGGDEAPTTPAPLLTRLAQHMKWPSVSSLDSALESSPSLHSPADPSHLSPPASSPRPSRGHRRSASCGSPLSGGAEEASGGTGYGGEGSGPGASDCRIIRVQMELGEDGSVYKSILVTSQDKAPSVISRVLKKNNRDSAVASEYELVQLLPGERELTIPASANVFYAMDGASHDFLLRQRRRSSTATPGVTSGPSASGTPPSEGGGGSFPRIKATGRKIARALF

SEQ ID NO: 854205 - protein, 783 aa, Homo sapiens
MLPRPLRLLLDTSPPGGVVLSSFRSRDPEEGGGPGGLVVGGGQEEEEEEEEEAPVSVWDEEEDGAVFTVTSRQYRPLDPLVPMPPPRSSRRLRAGTLEALVRHLLDTRTSGTDVSFMSAFLATHRAFTSTPALLGLMADRLEALESHPTDELERTTEVAISVLSTWLASHPEDFGSEAKGQLDRLESFLLQTGYAAGKGVGGGSADLIRNLRSRVDPQAPDLPKPLALPGDPPADPTDVLVFLADHLAEQLTLLDAELFLNLIPSQCLGGLWGHRDRPGHSHLCPSVRATVTQFNKVAGAVVSSVLGATSTGEGPGEVTIRPLRPPQRARLLEKWIRVAEECRLLRNFSSVYAVVSALQSSPIHRLRAAWGEATRDSLRVFSSLCQIFSEEDNYSQSRELLVQEVKLQSPLEPHSKKAPRSGSRGGGVVPYLGTFLKDLVMLDAASKDELENGYINFDKRRKFEGSSQEFAVLSELRRLQNECRGYNLQPDHDIQRWLQGLRPLTEAQSHRVSCEVEPPGSSDPPAPRVLRPTLVISQWTEVLGSVGVPTPLVSCDRPSTGGDEAPTTPAPLLTRLAQHMKWPSVSSLDSALESSPSLHSPADPSHLSPPASSPRPSRGHRRSASCGSPLSGGAEEASGGTGYGGEGSGPGASDCRIIRVQMELGEDGSVYKSILVTSQDKAPSVISRVLKKNNRDSAVASEYELVQLLPGERELTIPASANVFYAMDGASHDFLLRQRRRSSTATPGVTSGPSASGTPPSEGGGGSFPRIKATGRKIARALF

SEQ ID NO: 854206 - protein, 777 aa, Homo sapiens; identical to SEQ ID NO: 854198

SEQ ID NO: 854207 - protein, 803 aa, Homo sapiens; identical to SEQ ID NO: 854203

SEQ ID NO: 854208 - protein, 697 aa, Homo sapiens
MLPRPLRLLLDTSPPGGVVLSSFRSRDPEEGGGPGGLVVGGGQEEEEEEEEEAPVSVWDEEEDGAVFTVTSRQYRPLDPLVPMPPPRSSRRLRAGTLEALVRHLLDTRTSGTDVSFMSAFLATHRAFTSTPALLGLMADRLEALESHPTDELERTTEVAISVLSTWLASHPEDFGSEAKGQLDRLESFLLQTGYAAGKGVGGGSADLIRNLRSRVDPQAPDLPKPLALPGDPPADPTDVLVFLADHLAEQLTLLDAELFLNLIPSQCLGGLWGHRDRPGHSHLCPSVRATVTQFNKVAGAVVSSVLGATSTGEGPGEVTIRPLRPPQRARLLEKWIRVAEECRLLRNFSSVYAVVSALQSSPIHRLRAAWGEATRDSLRVFSSLCQIFSEEDNYSQSRELLVQEVKLQSPLEPHSKKAPRSGSRGGGVVPYLGTFLKDLVMLDAASKDELENGYINFDKRRKEFAVLSELRRLQNECRGYNLQPDHDIQRWLQGLRPLTEAQSHRVSCEVEPPGSSDPPAPRVLRPTLVISQWTEVLGSVGVPTPLVSCDRPSTGGDEAPTTPAPLLTRLAQHMKWPSVSSLDSALESSPSLHSPADPSHLSPPASSPRPSRGHRRSASCGSPLSGGAEEASGGTGYGGEGSGPGASDCRIIRVQMELGEDGSVYKSILVTSQDKAPSVISRVLKKNNREADYPSLG

SEQ ID NO: 854209 - protein, 777 aa, Homo sapiens; identical to SEQ ID NO: 854198

SEQ ID NO: 854210 - protein, 337 aa, Homo sapiens
MLDAASKDELENGYINFDKRRKEFAVLSELRRLQNECRGYNLQPDHDIQRWLQGLRPLTEAQSHRVSCEVEPPGSSDPPAPRVLRPTLVISQWTEVLGSVGVPTPLVSCDRPSTGGDEAPTTPAPLLTRLAQHMKWPSVSSLDSALESSPSLHSPADPSHLSPPASSPRPSRGHRRSASCGSPLSGGAEEASGGTGYGGEGSGPGASDCRIIRVQMELGEDGSVYKSILVTSQDKAPSVISRVLKKNNRDSAVASEYELVQLLPGERELTIPASANVFYAMDGASHDFLLRQRRRSSTATPGVTSGPSASGTPPSEGGGGSFPRIKATGRKIARALF

SEQ ID NO: 854211 - protein, 720 aa, Homo sapiens
MLPRPLRLLLDTSPPGGVVLSSFRSRDPEEGGGPGGLVVGGGQEEEEEEEEEAPVSVWDEEEDGAVFTVTSRQYRPLDPLVPMPPPRSSRRLRAGTLEALVRHLLDTRTSGTDVSFMSAFLATHRAFTSTPALLGLMADRLEALESHPTDELERTTEVAISVLSTWLASHPEDFGSEAKGQLDRLESFLLQTGYAAGKGVGGGSADLIRNLRSRVDPQAPDLPKPLALPGDPPADPTDVLVFLADHLAEQLTLLDAELFLNLIPSQCLGGLWGHRDRPGHSHLCPSVRATVTQFNKVAGAVVSSVLGATSTGEGPGEVTIRPLRPPQRARLLEKWIRVAEECRLLRNFSSVYAVVSALQSSPIHRLRAAWGEATRDSLRVFSSLCQIFSEEDNYSQSRELLVQEVKLQSPLEPHSKKAPRSGSRGGGVVPYLGTFLKDLVMLDAASKDELENGYINFDKRRKEFAVLSELRRLQNECRGYNLQPDHDIQRWLQGLRPLTEAQSHRVSCEVEPPGSSDPPAPRVLRPTLVISQWTEVLGSVGVPTPLVSCDRPSTGGDEAPTTPAPLLTRLAQHMKWPSVSSLDSALESSPSLHSPADPSHLSPPASSPRPSRGHRRSASCGSPLSGGAEEASGGTGYGGEGSGPGASDCRIIRVQMELGEDGSVYKSILVREPWDGVGVKDGVLLDYKCCLRFGQPNGIECSFNFDLWFWQLCFIFNFIF

SEQ ID NO: 854212 - protein, 273 aa, Homo sapiens
MSRGAGVVGASSPPVLGRSQDTSGVGTPTEPKTSVHCEMTNVGRSTHRAGFLSCLVNQWHFTAPGWLAHMKWPSVSSLDSALESSPSLHSPADPSHLSPPASSPRPSRGHRRSASCGSPLSGGAEEASGGTGYGGEGSGPGASDCRIIRVQMELGEDGSVYKSILVTSQDKAPSVISRVLKKNNRDSAVASEYELVQLLPGERELTIPASANVFYAMDGASHDFLLRQRRRSSTATPGVTSGPSASGTPPSEGGGGSFPRIKATGRKIARALF

SEQ ID NO: 854213 - protein, 777 aa, Homo sapiens; identical to SEQ ID NO: 854198

SEQ ID NO: 854214 - protein, 778 aa, Homo sapiens
MLPRPLRLLLDTSPPGGVVLSSFRSRDPEEGGGPGGLVVGGGQEEEEEEEEEAPVSVWDEEEDGAVFTVTSRQYRPLDPLVPMPPPRSSRRLRAGTLEALVRHLLDTRTSGTDVSFMSAFLATHRAFTSTPALLGLMADRLEALESHPTDELERTTEVAISVLSTWLASHPEDFGSEAKGQLDRLESFLLQTGYAAGKGVGGGSADLIRNLRSRVDPQAPDLPKPLALPGDPPADPTDVLVFLADHLAEQLTLLDAELFLNLIPSQCLGGLWGHRDRPGHSHLCPSVRATVTQFNKVAGAVVSSVLGATSTGEGPGEVTIRPLRPPQRARLLEKWIRVAEECRLLRNFSSVYAVVSALQSSPIHRLRAAWGEATRDSLRVFSSLCQIFSEEDNYSQSRELLVQEVKLQSPLEPHSKKAPRSGSRGGGVVPYLGTFLKDLVMLDAASKDELENGYINFDKRRKEFAVLSELRRLQNECRGYNLQPDHDIQRWLQGLRPLTEAQSHRVSCEVEPPGSSDPPAPRVLRPTLVISQWTEVLGSVGVPTPLVSCDRPSTGGDEAPTTPAPLLTRLAQHMKWPSVSSLDSALESSPSLHSPADPSHLSPPASSPRPSRGHRRSASCGSPLSGGAEEASGGTGYGGEGSGPGASDCRIIRVQMELGEDGSVYKSILVTSQDKAPSVISRVLKKNNRDSAVASEYELVQLLPGERELTIPASANVFYAMDGASHDFLLRQRRRSSTATPGVTMKCHWFTRQLRNPALWELVSYNQVGYLCIASHLP

SEQ ID NO: 854215 - protein, 778 aa, Homo sapiens; identical to SEQ ID NO: 854214

SEQ ID NO: 854216 - protein, 447 aa, Homo sapiens
MENKKKDKDKSDDRMARPSGRSGHNTRGTGSSSSGVLMVGPNFRVGKKIGCGNFGELRLGKNLYTNEYVAIKLEPMKSRAPQLHLEYRFYKQLGSGDGIPQVYYFGPCGKYNAMVLELLGPSLEDLFDLCDRTFSLKTVLMIAIQLISRMEYVHSKNLIYRDVKPENFLIGRPGNKTQQVIHIIDFGLAKEYIDPETKKHIPYREHKSLTGTARYMSINTHLGKEQSRRDDLEALGHMFMYFLRGSLPWQGLKADTLKERYQKIGDTKRATPIEVLCENFPEMATYLRYVRRLDFFEKPDYDYLRKLFTDLFDRKGYMFDYEYDWIGKQLPTPVGAVQQDPALSSNREAHQHRDKMQQSKNQSADHRAAWDSQQANPHHLRAHLAADRHGGSVQVVSSTNGELNTDDPTAGRSNAPITAPTEVEVMDETKCCCFFKRRKRKTIQRHK

SEQ ID NO: 854217 - protein, 447 aa, Homo sapiens; identical to SEQ ID NO: 854216

SEQ ID NO: 854218 - protein, 455 aa, Homo sapiens
MENKKKDKDKSDDRMARPSGRSGHNTRGTGSSSSGVLMVGPNFRVGKKIGCGNFGELRLGKNLYTNEYVAIKLEPMKSRAPQLHLEYRFYKQLGSGDGIPQVYYFGPCGKYNAMVLELLGPSLEDLFDLCDRTFSLKTVLMIAIQLISRMEYVHSKNLIYRDVKPENFLIGRPGNKTQQVIHIIDFGLAKEYIDPETKKHIPYREHKSLTGTARYMSINTHLGKEQSRRDDLEALGHMFMYFLRGSLPWQGLKADTLKERYQKIGDTKRATPIEVLCENFPEMATYLRYVRRLDFFEKPDYDYLRKLFTDLFDRKGYMFDYEYDWIGKQLPTPVGAVQQDPALSSNREAHQHRDKMQQSKNQSADHRAAWDSQQANPHHLRAHLAADRHGGSVQVVSSTNGELNTDDPTAGRSNAPITAPTEVEVMDETNCQKVLNMWCCCFFKRRKRKTIQRHK

SEQ ID NO: 854219 - protein, 415 aa, Homo sapiens
MENKKKDKDKSDDRMARPSGRSGHNTRGTGSSSSGVLMVGPNFRVGKKIGCGNFGELRLGKNLYTNEYVAIKLEPMKSRAPQLHLEYRFYKQLGSGDGIPQVYYFGPCGKYNAMVLELLGPSLEDLFDLCDRTFSLKTVLMIAIQLISRMEYVHSKNLIYRDVKPENFLIGRPGNKTQQVIHIIDFGLAKEYIDPETKKHIPYREHKSLTGTARYMSINTHLGKEQSRRDDLEALGHMFMYFLRGSLPWQGLKADTLKERYQKIGDTKRATPIEVLCENFPEMATYLRYVRRLDFFEKPDYDYLRKLFTDLFDRKGYMFDYEYDWIGKQLPTPVGAVQQDPALSSNREAHQHRDKMQQSKNQVVSSTNGELNTDDPTAGRSNAPITAPTEVEVMDETKCCCFFKRRKRKTIQRHK

SEQ ID NO: 854220 - protein, 302 aa, Homo sapiens
MVLELLGPSLEDLFDLCDRTFSLKTVLMIAIQLISRMEYVHSKNLIYRDVKPENFLIGRPGNKTQQVIHIIDFGLAKEYIDPETKKHIPYREHKSLTGTARYMSINTHLGKEQSRRDDLEALGHMFMYFLRGSLPWQGLKADTLKERYQKIGDTKRATPIEVLCENFPEMATYLRYVRRLDFFEKPDYDYLRKLFTDLFDRKGYMFDYEYDWIGKQLPTPVGAVQQDPALSSNREAHQHRDKMQQSKNQVVSSTNGELNTDDPTAGRSNAPITAPTEVEVMDETKCCCFFKRRKRKTIQRHK

SEQ ID NO: 854221 - protein, 415 aa, Homo sapiens; identical to SEQ ID NO: 854219

SEQ ID NO: 854222 - protein, 415 aa, Homo sapiens; identical to SEQ ID NO: 854219

SEQ ID NO: 854223 - protein, 447 aa, Homo sapiens; identical to SEQ ID NO: 854216

SEQ ID NO: 854224 - protein, 447 aa, Homo sapiens; identical to SEQ ID NO: 854216

SEQ ID NO: 854225 - protein, 447 aa, Homo sapiens; identical to SEQ ID NO: 854216

SEQ ID NO: 854226 - protein, 415 aa, Homo sapiens; identical to SEQ ID NO: 854219

SEQ ID NO: 854227 - protein, 415 aa, Homo sapiens; identical to SEQ ID NO: 854219

SEQ ID NO: 854228 - protein, 423 aa, Homo sapiens
MENKKKDKDKSDDRMARPSGRSGHNTRGTGSSSSGVLMVGPNFRVGKKIGCGNFGELRLGKNLYTNEYVAIKLEPMKSRAPQLHLEYRFYKQLGSGDGIPQVYYFGPCGKYNAMVLELLGPSLEDLFDLCDRTFSLKTVLMIAIQLISRMEYVHSKNLIYRDVKPENFLIGRPGNKTQQVIHIIDFGLAKEYIDPETKKHIPYREHKSLTGTARYMSINTHLGKEQSRRDDLEALGHMFMYFLRGSLPWQGLKADTLKERYQKIGDTKRATPIEVLCENFPEMATYLRYVRRLDFFEKPDYDYLRKLFTDLFDRKGYMFDYEYDWIGKQLPTPVGAVQQDPALSSNREAHQHRDKMQQSKNQVVSSTNGELNTDDPTAGRSNAPITAPTEVEVMDETNCQKVLNMWCCCFFKRRKRKTIQRHK

SEQ ID NO: 854229 - protein, 133 aa, Homo sapiens
MATYLRYVRRLDFFEKPDYDYLRKLFTDLFDRKGYMFDYEYDWIGKQLPTPVGAVQQDPALSSNREAHQHRDKMQQSKNQVVSSTNGELNTDDPTAGRSNAPITAPTEVEVMDETKCCCFFKRRKRKTIQRHK

SEQ ID NO: 854230 - protein, 415 aa, Homo sapiens; identical to SEQ ID NO: 854219

SEQ ID NO: 854231 - protein, 415 aa, Homo sapiens; identical to SEQ ID NO: 854219

SEQ ID NO: 854232 - protein, 870 aa, Homo sapiens
MGPPSLVLCLLSATVFSLLGGSSAFLSHHRLKGRFQRDRRNIRPNIILVLTDDQDVELGSMQVMNKTRRIMEQGGAHFINAFVTTPMCCPSRSSILTGKYVHNHNTYTNNENCSSPSWQAQHESRTFAVYLNSTGYRTAFFGKYLNEYNGSYVPPGWKEWVGLLKNSRFYNYTLCRNGVKEKHGSDYSKDYLTDLITNDSVSFFRTSKKMYPHRPVLMVISHAAPHGPEDSAPQYSRLFPNASQHITPSYNYAPNPDKHWIMRYTGPMKPIHMEFTNMLQRKRLQTLMSVDDSMETIYNMLVETGELDNTYIVYTADHGYHIGQFGLVKGKSMPYEFDIRVPFYVRGPNVEAGCLNPHIVLNIDLAPTILDIAGLDIPADMDGKSILKLLDTERPVNRFHLKKKMRVWRDSFLVERGKLLHKRDNDKVDAQEENFLPKYQRVKDLCQRAEYQTACEQLGQKWQCVEDATGKLKLHKCKGPMRLGGSRALSNLVPKYYGQGSEACTCDSGDYKLSLAGRRKKLFKKKYKASYVRSRSIRSVAIEVDGRVYHVGLGDAAQPRNLTKRHWPGAPEDQDDKDGGDFSGTGGLPDYSAANPIKVTHRCYILENDTVQCDLDLYKSLQAWKDHKLHIDHEIETLQNKIKNLREVRGHLKKKRPEECDCHKISYHTQHKGRLKHRGSSLHPFRKGLQEKDKVWLLREQKRKKKLRKLLKRLQNNDTCSMPGLTCFTHDNQHWQTAPFWTLGPFCACTSANNNTYWCMRTINETHNFLFCEFATGFLEYFDLNTDPYQLMNAVNTLDRDVLNQLHVQLMELRSCKGYKQCNPRTRNMDLGLKDGGSYEQYRQFQRRKWPEMKRPSSKSLGQLWEGWEG

SEQ ID NO: 854233 - protein, 496 aa, Homo sapiens
HGVTVRTRIAVLSLRPPVWWNVNRFHLKKKMRVWRDSFLVERGKLLHKRDNDKVDAQEENFLPKYQRVKDLCQRAEYQTACEQLGQKWQCVEDATGKLKLHKCKGPMRLGGSRALSNLVPKYYGQGSEACTCDSGDYKLSLAGRRKKLFKKKYKASYVRSRSIRSVAIEVDGRVYHVGLGDAAQPRNLTKRHWPGAPEDQDDKDGGDFSGTGGLPDYSAANPIKVTHRCYILENDTVQCDLDLYKSLQAWKDHKLHIDHEIETLQNKIKNLREVRGHLKKKRPEECDCHKISYHTQHKGRLKHRGSSLHPFRKGLQEKDKVWLLREQKRKKKLRKLLKRLQNNDTCSMPGLTCFTHDNQHWQTAPFWTLGPFCACTSANNNTYWCMRTINETHNFLFCEFATGFLEYFDLNTDPYQLMNAVNTLDRDVLNQLHVQLMELRSCKGYKQCNPRTRNMDLGLKDGGSYEQYRQFQRRKWPEMKRPSSKSLGQLWEGWEG

SEQ ID NO: 854234 - protein, 870 aa, Homo sapiens; identical to SEQ ID NO: 854232

SEQ ID NO: 854235 - protein, 866 aa, Homo sapiens
MGPPSLVLCLLSATVFSLLGGSSAFLSHHRLKGRFQRDRRNIRPNIILVLTDDQDVELGSMQVMNKTRRIMEQGGAHFINAFVTTPMCCPSRSSILTGKYVHNHNTYTNNENCSSPSWQAQHESRTFAVYLNSTGYRTAFFGKYLNEYNGSYVPPGWKEWVGLLKNSRFYNYTLCRNGVKEKHGSDYSKDYLTDLITNDSVSFFRTSKKMYPHRPVLMVISHAAPHGPEDSAPQYSRLFPNASQHITPSYNYAPNPDKHWIMRYTGPMKPIHMEFTNMLQRKRLQTLMSVDDSMETIYNMLVETGELDNTYIVYTADHGYHIGQFGLVKGKSMPYEFDIRVPFYVRGPNVEAGCLNPHIVLNIDLAPTILDIAGLDIPADMDGKSILKLLDTERPVNRFHLKKKMRVWRDSFLVERGKLLHKRDNDKVDAQEENFLPKYQRVKDLCQRAEYQTACEQLGQKWQCVEDATGKLKLHKCKGPMRLGGSRALSNLVPKYYGQGSEACTCDSGDYKLSLAGRRKKLFKKKYKASYVRSRSIRSVAIEVDGRVYHVGLGDAAQPRNLTKRHWPGAPEDQDDKDGGDFSGTGGLPDYSAANPIKVTHRCYILENDTVQCDLDLYKSLQAWKDHKLHIDHEIETLQNKIKNLREVRGHLKKKRPEECDCHKISYHTQHKGRLKHRGSSLHPFRKGLQEKDKVWLLREQKRKKKLRKLLKRLQNNDTCSMPGLTCFTHDNQHWQTAPFWTLGPFCACTSANNNTYWCMRTINETHNFLFCEFATGFLEYFDLNTDPYQLMNAVNTLDRDVLNQLHVQLMELRSCKGYKQCNPRTRNMDLGLKDGGSYEQYRYFVLLLKPKQSWAILAHPSVSSL

SEQ ID NO: 854236 - protein, 870 aa, Homo sapiens; identical to SEQ ID NO: 854232

SEQ ID NO: 854237 - protein, 833 aa, Homo sapiens
MGPPSLVLCLLSATVFSLLGGSSAFLSHHRLKGRFQRDRRNIRPNIILVLTDDQDVELGSMQVMNKTRRIMEQGGAHFINAFVTTPMCCPSRSSILTGKYVHNHNTYTNNENCSSPSWQAQHESRTFAVYLNSTGYRTAFFGKYLNEYNGSYVPPGWKEWVGLLKNSRFYNYTLCRNGVKEKHGSDYSKDYLTDLITNDSVSFFRTSKKMYPHRPVLMVISHAAPHGPEDSAPQYSRLFPNASQHITPSYNYAPNPDKHWIMRYTGPMKPIHMEFTNMLQRKRLQTLMSVDDSMETIYNMLVETGELDNTYIVYTADHGYHIGQFGLVKGKSMPYEFDIRVPFYVRGPNVEAGCLNPHIVLNIDLAPTILDIAGLDIPADMDGKSILKLLDTERPVNRFHLKKKMRVWRDSFLVERGKLLHKRDNDKVDAQEENFLPKYQRVKDLCQRAEYQTACEQLGQKWQCVEDATGKLKLHKCKGPMRLGGSRALSNLVPKYYGQGSEACTCDSGDYKLSLAGRRKKLFKKKYKASYVRSRSIRSVAIEVDGRVYHVGLGDAAQPRNLTKRHWPGAPEDQDDKDGGDFSGTGGLPDYSAANPIKVTHRCYILENDTVQCDLDLYKSLQAWKDHKLHIDHEIETLQNKIKNLREVRGHLKKKRPEECDCHKISYHTQHKGRLKHRGSSLHPFRKGLQEKDKVWLLREQKRKKKLRKLLKRLQNNDTCSMPGLTCFTHDNQHWQTAPFWTLGPFCACTSANNNTYWCMRTINETHNFLFCEFATGFLEYFDLNTDPYQLMNAVNTLDRDVLNQLHVQLMELRSCKGYKQCNPRTRNMDLGR

SEQ ID NO: 854238 - protein, 807 aa, Homo sapiens
MGPPSLVLCLLSATVFSLLGGSSAFLSHHRLKGRFQRDRRNIRPNIILVLTDDQDVELGSMQVMNKTRRIMEQGGAHFINAFVTTPMCCPSRSSILTGKYVHNHNTYTNNENCSSPSWQAQHESRTFAVYLNSTGYRTAFFGKYLNEYNGSYVPPGWKEWVGLLKNSRFYNYTLCRNGVKEKHGSDYSKDYLTDLITNDSVSFFRTSKKMYPHRPVLMVISHAAPHGPEDSAPQYSRLFPNASQHITPSYNYAPNPDKHWIMRYTGPMKPIHMEFTNMLQRKRLQTLMSVDDSMETIYNMLVETGELDNTYIVYTADHGYHIGQFGLVKGKSMPYEFDIRVPFYVRGPNVEAGCLNPHIVLNIDLAPTILDIAGLDIPADMDGKSILKLLDTERPVNRFHLKKKMRVWRDSFLVERGKLLHKRDNDKVDAQEENFLPKYQRVKDLCQRAEYQTACEQLGQKWQCVEDATGKLKLHKCKGPMRLGGSRALSNLVPKYYGQGSEACTCDSGDYKLSLAGRRKKLFKKKYKASYVRSRSIRSVAIEVDGRVYHVGLGDAAQPRNLTKRHWPGAPEDQDDKDGGDFSGTGGLPDYSAANPIKVTHRCYILENDTVQCDLDLYKSLQAWKDHKLHIDHEIETLQNKIKNLREVRGHLKKKRPEECDCHKISYHTQHKGRLKHRGSSLHPFRKGLQEKDKVWLLREQKRKKKLRKLLKRLQNNDTCSMPGLTCFTHDNQHWQTAPFWTLGPFCACTSANNNTYWCMRTINETHAPAPTITRTGAGGPVRVIACTSANNNTYWSSNSTTLAAAR

SEQ ID NO: 854239 - protein, 434 aa, Homo sapiens
MGPPSLVLCLLSATVFSLLGGSSAFLSHHRLKGRFQRDRRNIRPNIILVLTDDQDVELGSMQVMNKTRRIMEQGGAHFINAFVTTPMCCPSRSSILTGKYVHNHNTYTNNENCSSPSWQAQHESRTFAVYLNSTGYRTAFFGKYLNEYNGSYVPPGWKEWVGLLKNSRFYNYTLCRNGVKEKHGSDYSKDYLTDLITNDSVSFFRTSKKMYPHRPVLMVISHAAPHGPEDSAPQYSRLFPNASQHITPSYNYAPNPDKHWIMRYTGPMKPIHMEFTNMLQRKRLQTLMSVDDSMETIYNMLVETGELDNTYIVYTADHGYHIGQFGLVKGKSMPYEFDIRVPFYVRGPNVEAGCLNPHIVLNIDLAPTILDIAGLDIPADMDGKSILKLLDTERPVNRFHLKKKMRVWRDSFLVERGLLTQERHDSSPPARGSL

SEQ ID NO: 854240 - protein, 406 aa, Homo sapiens
  misc_feature (383)..(383): Xaa can be any naturally occurring amino acid
  misc_feature (387)..(387): Xaa can be any naturally occurring amino acid
  misc_feature (394)..(394): Xaa can be any naturally occurring amino acid
  misc_feature (405)..(405): Xaa can be any naturally occurring amino acid
MGPPSLVLCLLSATVFSLLGGSSAFLSHHRLKGRFQRDRRNIRPNIILVLTDDQDVELGSMQVMNKTRRIMEQGGAHFINAFVTTPMCCPSRSSILTGKYVHNHNTYTNNENCSSPSWQAQHESRTFAVYLNSTGYRTAFFGKYLNEYNGSYVPPGWKEWVGLLKNSRFYNYTLCRNGVKEKHGSDYSKDYLTDLITNDSVSFFRTSKKMYPHRPVLMVISHAAPHGPEDSAPQYSRLFPNASQHITPSYNYAPNPDKHWIMRYTGPMKPIHMEFTNMLQRKRLQTLMSVDDSMETIYNMLVETGELDNTYIVYTADHGYHIGQFGLVKGKSMPYEFDIRVPFYVRGPNVEAGCLNPHIVRADRSARDRPDLQRQQDRYGTSXQSFXLRFARAXGIVHRSFEVLXH

SEQ ID NO: 854241 - protein, 205 aa, Homo sapiens
MGPPSLVLCLLSATVFSLLGGSSAFLSHHRLKGRFQRDRRNIRPNIILVLTDDQDVELGSMQVMNKTRRIMEQGGAHFINAFVTTPMCCPSRSSILTGKYVHNHNTYTNNENCSSPSWQAQHESRTFAVYLNSTGYRTAFFGKYLNEYNGSYVPPGWKEWVGLLKNSRFYNYTLCRNGVKEKHGSDYSKVSCNLSSLGVAVWPSS

SEQ ID NO: 854242 - protein, 205 aa, Homo sapiens; identical to SEQ ID NO: 854241

SEQ ID NO: 854243 - protein, 733 aa, Homo sapiens
MGPPSLVLCLLSATVFSLLGGSSAFLSHHRLKGRFQRDRRNIRPNIILVLTDDQDVELAFFGKYLNEYNGSYVPPGWKEWVGLLKNSRFYNYTLCRNGVKEKHGSDYSKHAELQLRAQPGQTLDHALHGAHEAIHMEFTNMLQRKRLQTLMSVDDSMETIYNMLVETGELDNTYIVYTADHGYHIGQFGLVKGKSMPYEFDIRVPFYVRGPNVEAGCLNPHIVLNIDLAPTILDIAGLDIPADMDGKSILKLLDTERPVNRFHLKKKMRVWRDSFLVERGKLLHKRDNDKVDAQEENFLPKYQRVKDLCQRAEYQTACEQLGQKWQCVEDATGKLKLHKCKGPMRLGGSRALSNLVPKYYGQGSEACTCDSGDYKLSLAGRRKKLFKKKYKASYVRSRSIRSVAIEVDGRVYHVGLGDAAQPRNLTKRHWPGAPEDQDDKDGGDFSGTGGLPDYSAANPIKVTHRCYILENDTVQCDLDLYKSLQAWKDHKLHIDHEIETLQNKIKNLREVRGHLKKKRPEECDCHKISYHTQHKGRLKHRGSSLHPFRKGLQEKDKVWLLREQKRKKKLRKLLKRLQNNDTCSMPGLTCFTHDNQHWQTAPFWTLGPFCACTSANNNTYWCMRTINETHNFLFCEFATGFLEYFDLNTDPYQLMNAVNTLDRDVLNQLHVQLMELRSCKGYKQCNPRTRNMDLGLKDGGSYEQYRQFQRRKWPEMKRPSSKSLGQLWEGWEG

SEQ ID NO: 854244 - protein, 400 aa, Homo sapiens
  misc_feature (3)..(3): Xaa can be any naturally occurring amino acid
PWXNRSYENRCPLLAAASVVDVNAKYYGQGSEACTCDSGDYKLSLAGRRKKLFKKKYKASYVRSRSIRSVAIEVDGRVYHVGLGDAAQPRNLTKRHWPGAPEDQDDKDGGDFSGTGGLPDYSAANPIKVTHRCYILENDTVQCDLDLYKSLQAWKDHKLHIDHEIETLQNKIKNLREVRGHLKKKRPEECDCHKISYHTQHKGRLKHRGSSLHPFRKGLQEKDKVWLLREQKRKKKLRKLLKRLQNNDTCSMPGLTCFTHDNQHWQTAPFWTLGPFCACTSANNNTYWCMRTINETHNFLFCEFATGFLEYFDLNTDPYQLMNAVNTLDRDVLNQLHVQLMELRSCKGYKQCNPRTRNMDLGLKDGGSYEQYRQFQRRKWPEMKRPSSKSLGQLWEGWEG

SEQ ID NO: 854245 - protein, 852 aa, Homo sapiens
MGPPSLVLCLLSATVFSLLGGSSAFLSHHRLKGRFQRDRRNIRPNIILVLTDDQDVELGSMQVMNKTRRIMEQGGAHFINAFVTTPMCCPSRSSILTGKYVHNHNTYTNNENCSSPSWQAQHESRTFAVYLNSTGYRTAFFGKYLNEYNGSYVPPGWKEWVGLLKNSRFYNYTLCRNGVKEKHGSDYSKDYLTDLITNDSVSFFRTSKKMYPHRPVLMVISHAAPHGPEDSAPQYSRLFPNASQHITPSYNYAPNPDKHWIMRYTGPMKPIHMEFTNMLQRKRLQTLMSVDDSMETIYNMLVETGELDNTYIVYTADHGYHIGQFGLVKGKSMPYEFDIRVPFYVRGPNVEAGCLNPHIVLNIDLAPTILDIAGLDIPADMDGKSILKLLDTERPVNRFHLKKKMRVWRDSFLVERGKLLHKRDNDKVDAQEENFLPKYQRVKDLCQRAEYQTACEQLGQKWQCVEDATGKLKLHKCKGPMRLGGSRALSNLVPKYYGQGSEACTCDSGDYKLSLAGRRKKLFKKKYKASYVRSRSIRSVAIEVDGRVYHVGLGDAAQPRNLTKRHWPGAPEDQDDKDGGDFSGTGGLPDYSAANPIKVTHRCYILENDTVQCDLDLYKSLQAWKDHKLHIDHEIETLQNKIKNLREVRGHLKKKRPEECDCHKISYHTQHKGRLKHRGSSLHPFRKGLQEKDKVWLLREQKRKKKLRKLLKRLQNNDTCSMPGLTCFTHDNQHWQTAPFWTLGPFCACTSANNNTYWCMRTINETHNFLFCEFATGFLEYFDLNTDPYQLMNAVNTLDRDVLNQLHVQLMELRSCKGYKQCNPRTRNMDLGLKDGGSYEQYRGQLWEGWEG

SEQ ID NO: 854246 - protein, 870 aa, Homo sapiens; identical to SEQ ID NO: 854232

SEQ ID NO: 854247 - protein, 202 aa, Homo sapiens
LLLVLWLFFFAGFAVCLFLCCWFCLFGCCLSRLFLSRLLFGLRACGWAVLSALLSFVLLSLCRSVSVARCLFGSLSLLCCCGCCVVCVFLSCSLVPLVFVSACVLLSFLFLCCFSVGCCVVSALSFAVLSLCSLFALFLLLLSSSLGVSGFCLFLFVFALCVLVCVVLCVFLLFLPVWRGGCLIFLVSRGVLLLWVPPPLGL

SEQ ID NO: 854248 - protein, 686 aa, Homo sapiens
MGPPSLVLCLLSATVFSLLGGSSAFLSHHRLKGRFQRDRRNIRPNIILVLTDDQDVELGSMQVMNKTRRIMEQGGAHFINAFVTTPMCCPSRSSILTGKYVHNHNTYTNNENCSSPSWQAQHESRTFAVYLNSTGYRTAFFGKYLNEYNGSYVPPGWKEWVGLLKNSRFYNYTLCRNGVKEKHGSDYSKDYLTDLITNDSVSFFRTSKKMYPHRPVLMVISHAAPHGPEDSAPQYSRLFPNASQHITPSYNYAPNPDKHWIMRYTGPMKPIHMEFTNMLQRKRLQTLMSVDDSMETIYNMLVETGELDNTYIVYTADHGYHIGQFGLVKGKSMPYEFDIRVPFYVRGPNVEAGCLNPHIVLNIDLAPTILDIAGLDIPADMDGKSILKLLDTERPVNRFHLKKKMRVWRDSFLVERGKLLHKRDNDKVDAQEENFLPKYQRVKDLCQRAEYQTACEQLGQKWQCVEDATGKLKLHKCKGPMRLGGSRALSNLVPKYYGQGSEACTCDSGDYKLSLAGRRKKLFKKKYKASYVRSRSIRSVAIEVDGRVYHVGLGDAAQPRNLTKRHWPGAPEDQDDKDGGDFSGTGGLPDYSAANPIKVTHRCYILENDTVQCDLDLYKSLQAWKDHKLHIDHEIETLQNKIKNLREVRGHLKKKRPEECDCHKISYHTQHKGRLKHRGSSLHPFR

SEQ ID NO: 854249 - protein, 151 aa, Homo sapiens
MGPPSLVLCLLSATVFSLLGGSSAFLSHHRLKGRFQRDRRNIRPNIILVLTDDQDVELGSMQVMNKTRRIMEQGGAHFINAFVTTPMCCPSRSSILTGKYVHNHNTYTNNENCSSPSWQAQHESRTFAVYLNSTGYRTGPEPIKKSDPRVS

SEQ ID NO: 854250 - protein, 668 aa, Homo sapiens
MTERIHSINLHNFSNSVLETLNEQRNRGHFCDVTVRIHGSMLRAHRCVLAAGSPFFQDKLLLGYSDIEIPSVVSVQSVQKLIDFMYSGVLRVSQSEALQILTAASILQIKTVIDECTRIVSQNVGDVFPGIQDSGQDTPRGTPESGTSGQSSDTESGYLQSHPQHSVDRIYSALYACSMQNGSGERSFYSGAVVSHHETALGLPRDHHMEDPSWITRIHERSQQMERYLSTTPETTHCRKQPRPVRIQTLVGNIHIKQEMEDDYDYYGQQRVQILERNESEECTEDTDQAEGTESEPKGESFDSGVSSSIGTEPDSVEQQFGPGAARDSQAEPTQPEQAAEAPAEGGPQTNQLETGASSPERSNEVEMDSTVITVSNSSDKSVLQQPSVNTSIGQPLPSTQLYLRQTETLTSNLRMPLTLTSNTQVIGTAGNTYLPALFTTQPAGSGPKPFLFSLPQPLAGQQTQFVTVSQPGLSTFTAQLPAPQPLASSAGHSTASGQGEKKPYECTLCNKTFTAKQNYVKHMFVHTGEKPHQCSICWRSFSLKDYLIKHMVTHTGVRAYQCSICNKRFTQKSSLNVHMRLHRGEKSYECYICKKKFSHKTLLERHVALHSASNGTPPAGTPPGARAGPPGVVACTEGTTYVCSVCPAKFDQIEQFNDHMRMHVSDG

SEQ ID NO: 854251 - protein, 741 aa, Homo sapiens
MLERKKPKTAENQKASEENEITQPGGSSAKPGLPCLNFEAVLSPDPALIHSTHSLTNSHAHTGSSDCDISCKGMTERIHSINLHNFSNSVLETLNEQRNRGHFCDVTVRIHGSMLRAHRCVLAAGSPFFQDKLLLGYSDIEIPSVVSVQSVQKLIDFMYSGVLRVSQSEALQILTAASILQIKTVIDECTRIVSQNVGDVFPGIQDSGQDTPRGTPESGTSGQSSDTESGYLQSHPQHSVDRIYSALYACSMQNGSGERSFYSGAVVSHHETALGLPRDHHMEDPSWITRIHERSQQMERYLSTTPETTHCRKQPRPVRIQTLVGNIHIKQEMEDDYDYYGQQRVQILERNESEECTEDTDQAEGTESEPKGESFDSGVSSSIGTEPDSVEQQFGPGAARDSQAEPTQPEQAAEAPAEGGPQTNQLETGASSPERSNEVEMDSTVITVSNSSDKSVLQQPSVNTSIGQPLPSTQLYLRQTETLTSNLRMPLTLTSNTQVIGTAGNTYLPALFTTQPAGSGPKPFLFSLPQPLAGQQTQFVTVSQPGLSTFTAQLPAPQPLASSAGHSTASGQGEKKPYECTLCNKTFTAKQNYVKHMFVHTGEKPHQCSICWRSFSLKDYLIKHMVTHTGVRAYQCSICNKRFTQKSSLNVHMRLHRGEKSYECYICKKKFSHKTLLERHVALHSASNGTPPAGTPPGARAGPPGVVACTEGTTYVCSVCPAKFDQIEQFNDHMRMHVSDG

SEQ ID NO: 854252 - protein, 741 aa, Homo sapiens; identical to SEQ ID NO: 854251

SEQ ID NO: 854253 - protein, 668 aa, Homo sapiens; identical to SEQ ID NO: 854250

SEQ ID NO: 854254 - protein, 772 aa, Homo sapiens
MLERKKPKTAENQKASEENEITQPGGSSAKPGLPCLNFEAVLSPDPALIHSTHSLTNSHAHTGSSDCDISCKGMTERIHSINLHNFSNSVLETLNEQRNRGHFCDVTVRIHGSMLRAHRCVLAAGSPFFQDKLLLGYSDIEIPSVVSVQSVQKLIDFMYSGVLRVSQSEALQILTAASILQIKTVIDECTRIVSQNVGDVFPGIQDSGQDTPRGTPESGTSGQSSDTESGYLQSHPQHSVDRIYSALYACSMQNGSGERSFYSGAVVSHHETALGLPRDHHMEDPSWITRIHERSQQMERYLSTTPETTHCRKQPRPVRIQTLVGNIHIKQEMEDDYDYYGQQRVQILERNESEECTEDTDQAEGTESEPKGESFDSGVSSSIGTEPDSVEQQFGPGAARDSQAEPTQPEQAAEAPAEGGPQTNQLETGASSPERSNEVEMDSTVITVSNSSDKSVLQQPSVNTSIGQPLPSTQLYLRQTETLTSNLRMPLTLTSNTQVIGTAGNTYLPALFTTQPAGSGPKPFLFSLPQPLAGQQTQFVTVSQPGLSTFTAQLPAPQPLASSAGHSTASGQGEKKPYECTLCNKTFTAKQNYVKHMFVHTGEKPHQCSICWRSFSLKDYLIKHMVTHTGVRAYQCSICNKRFTQKSSLNVHMRLHRGEKSYECYICKKKFSHKTLLERHVALHSASNGTPPAGTPPGARAGPPGVVACTEGTTYVCSVCPLRVSRTLLYSFGPIQPSSYVSSSIAIGLAINNTFGVILHCGICSYSLISAS

SEQ ID NO: 854255 - protein, 741 aa, Homo sapiens; identical to SEQ ID NO: 854251

SEQ ID NO: 854256 - protein, 741 aa, Homo sapiens; identical to SEQ ID NO: 854251

SEQ ID NO: 854257 - protein, 741 aa, Homo sapiens; identical to SEQ ID NO: 854251

SEQ ID NO: 854258 - protein, 741 aa, Homo sapiens; identical to SEQ ID NO: 854251

SEQ ID NO: 854259 - protein, 737 aa, Homo sapiens
MLERKKPKTAENQKASEENEITQPGGSSAKPGLPCLNFEAVLSPDPALIHSTHSLTNSHAHTGSSDCDISCKGMTERIHSINLHNFSNSVLETLNEQRNRGHFCDVTVRIHGSMLRAHRCVLAAGSPFFQDKLLLGYSDIEIPSVVSVQSVQKLIDFMYSGVLRVSQSEALQILTAASILQIKTVIDECTRIVSQNVGDVFPGIQDSGQDTPRGTPESGTSGQSSDTESGYLQSHPQHSVDRIYSALYACSMQNGSGERSFYSGAVVSHHETALGLPRDHHMEDPSWITRIHERSQQMERYLSTTPETTHCRKQPRPVRIQTLVGNIHIKQEMEDDYDYYGQQRVQILERNESEECTEDTDQAEGTESEPKGESFDSGVSSSIGTEPDSVEQQFGPGAARDSQAEPTQPEQAAEAPAEGGPQTNQLETGASSPERSNEVEMDSTVITVSNSSDKSVLQQPSVNTSIGQPLPSTQLYLRQTETLTSNLRMPLTLTSNTQVIGTAGNTYLPALFTTQPAGSGPKPFLFSLPQPLAGQQTQFVTVSQPGLSTFTAQLPAPQPLASSAGHSTASGQGEKKPYECTLCNKTFTAKQNYVKHMFVHTGEKPHQCSICWRSFSLKDYLIKHMVTHTGVRAYQCSICNKRFTQKSSLNVHMRLHRGEKSYECYICKKKFSHKTLLERHVALHSASNGTPPAGTPPGARAGPPGVVACTEGTTYVCSVCPAKFDQIEQFNDHMRMH

SEQ ID NO: 854260 - protein, 130 aa, Homo sapiens
ERSHSRRATLEHPALVPLQPAEMVELMFPLLLLLLPFLLYMAAPQIRSVQMYCLLLRILVAGREGNIESPPKLSWKTPLGGLQDGGAQSSVGWRRGPAVLGARRTPETPGGEKGRQSGAHCFSLACFSFV

SEQ ID NO: 854261 - protein, 340 aa, Homo sapiens
ERSHSRRATLEHPALVPLQPAEMVELMFPLLLLLLPFLLYMAAPQIRKMLSSGVCTSTVQLPGKVVVVTGANTGIGKETAKELAQRGARVYLACRDVEKGELVAKEIQTTTGNQQVLVRKLDLSDTKSIRAFAKGFLAEEKHLHVLINNAGVMMCPYSKTADGFEMHIGVNHLGHFLLTHLLLEKLKESAPSRIVNVSSLAHHLGRIHFHNLQGEKFYNAGLAYCHSKLANILFTQELARRLKGSGVTTYSVHPGTVQSELVRHSSFMRWMWWLFSFFIKTPQQGAQTSLHCALTEGLEILSGNHFSDCHVAWVSAQARNETIARRLWDVSCDLLGLPID

SEQ ID NO: 854262 - protein, 340 aa, Homo sapiens; identical to SEQ ID NO: 854261

SEQ ID NO: 854263 - protein, 318 aa, Homo sapiens
MVELMFPLLLLLLPFLLYMAAPQIRKMLSSGVCTSTVQLPGKVVVVTGANTGIGKETAKELAQRGARVYLACRDVEKGELVAKEIQTTTGNQQVLVRKLDLSDTKSIRAFAKGFLAEEKHLHVLINNAGVMMCPYSKTADGFEMHIGVNHLGHFLLTHLLLEKLKESAPSRIVNVSSLAHHLGRIHFHNLQGEKFYNAGLAYCHSKLANILFTQELARRLKGSGVTTYSVHPGTVQSELVRHSSFMRWMWWLFSFFIKTPQQGAQTSLHCALTEGLEILSGNHFSDCHVAWVSAQARNETIARRLWDVSCDLLGLPID

SEQ ID NO: 854264 - protein, 327 aa, Homo sapiens
ERSHSRRATLEHPALVPLQPAEMVELMFPLLLLLLPFLLYMAAPQIRKMLSSGVCTSTVQLPGKVVVVTGANTGIGKETAKELAQRGARVYLACRDVEKGELVAKEIQTTTGNQQVLVRKLDLSDTKSIRAFAKGFLAEEKHLHVLINNAGVMMCPYSKTADGFEMHIGVNHLGHFLLTHLLLEKLKESAPSRIVNVSSLAHHLGRIHFHNLQGEKFYNAGLAYCHSKLANILFTQELARRLKVQSELVRHSSFMRWMWWLFSFFIKTPQQGAQTSLHCALTEGLEILSGNHFSDCHVAWVSAQARNETIARRLWDVSCDLLGLPID

SEQ ID NO: 854265 - protein, 282 aa, Homo sapiens
MVGSLDLSNQVSENGSIRTIQKLGLHEQGARVYLACRDVEKGELVAKEIQTTTGNQQVLVRKLDLSDTKSIRAFAKGFLAEEKHLHVLINNAGVMMCPYSKTADGFEMHIGVNHLGHFLLTHLLLEKLKESAPSRIVNVSSLAHHLGRIHFHNLQGEKFYNAGLAYCHSKLANILFTQELARRLKGSGVTTYSVHPGTVQSELVRHSSFMRWMWWLFSFFIKTPQQGAQTSLHCALTEGLEILSGNHFSDCHVAWVSAQARNETIARRLWDVSCDLLGLPID

SEQ ID NO: 854266 - protein, 178 aa, Homo sapiens
EVRLGTRLGGVRHFLLTHLLLEKLKESAPSRIVNVSSLAHHLGRIHFHNLQGEKFYNAGLAYCHSKLANILFTQELARRLKGSGVTTYSVHPGTVQSELVRHSSFMRWMWWLFSFFIKTPQQGAQTSLHCALTEGLEILSGNHFSDCHVAWVSAQARNETIARRLWDVSCDLLGLPID

SEQ ID NO: 854267 - protein, 340 aa, Homo sapiens; identical to SEQ ID NO: 854261

SEQ ID NO: 854268 - protein, 195 aa, Homo sapiens
ERSHSRRATLEHPALVPLQPAEMVELMFPLLLLLLPFLLYMAAPQIRKMLSSGVCTSTVQLPGKVVVVTGANTGIGKETAKELAQRGARVYLACRDVEKGELVAKEIQTTTGNQQVLVRKLDLSDTKSIRAFAKGFLAEEKHLHVLINNAGVMMCPYSKTADGFHEMDVVAFLLFHQDSSAGSPDQPALCLNRRS

SEQ ID NO: 854269 - protein, 340 aa, Homo sapiens; identical to SEQ ID NO: 854261

SEQ ID NO: 854270 - protein, 136 aa, Homo sapiens
ERSHSRRATLEHPALVPLQPAEMVELMFPLLLLLLPFLLYMAAPQIRKMLSSGVCTSTVQLPGKVVVVTGANTGIGKETAKELAQRGARVYLACRDVEKGELVAKEIQTTTGNQQVLVPVGPKRRLQQTTQYFLSK

SEQ ID NO: 854271 - protein, 72 aa, Homo sapiens
EVRLGTRLGGVPAEMVELMFPLLLLLLPFLLYMAAPQISDCHVAWVSAQARNETIARRLWDVSCDLLGLPID

SEQ ID NO: 854272 - protein, 340 aa, Homo sapiens; identical to SEQ ID NO: 854261

SEQ ID NO: 854273 - protein, 325 aa, Homo sapiens
ERSHSRRATLEHPALVPLQPAEMVELMFPLLLLLLPFLLYMAAPQIRKMLSSGVCTSTVQLPGKVVVVTGANTGIGKETAKELAQRGARVYLACRDVEKGELVAKEIQTTTGNQQVLVRKLDLSDTKSIRAFAKGFLAEEKHLHVLINNAGVMMCPYSKTADGFEMHIGVNHLGHFLLTHLLLEKLKESAPSRIVNVSSLAHHLGRIHFHNLQGEKFYNAGLAYCHSKLANILFTQELARRLKGSGVTTYSVHPGTVQSELVRHSSFMRWMWWLFSFFIKTPQQGAQTSLHCALTEGLEILSGNHFSWQRWRRSYVMHPCLSETP

SEQ ID NO: 854274 - protein, 323 aa, Homo sapiens
ERSHSRRATLEHPALVPLQPAEMVELMFPLLLLLLPFLLYMAAPQIRKMLSSGVCTSTVQLPGKVVVVTGANTGIGKETAKELAQRGARVYLACRDVEKGELVAKEIQTTTGNQQVLVRKLDLSDTKSIRAFAKGFLAEEKHLHVLINNAGVMMCPYSKTADGFEMHIGVNHLGHFLLTHLLLEKLKESAPSRIVNVSSLAHHLGRIHFHNLQGEKFYNAGLAYCHSKLANILFTQELARRLKGSGVTTYSVHPGTVQSELVRHSSFMRWMWWLFSFFIKTPQQGAQTSLHCALTEGLEILSGNHFSPVFFILFWIPNSIVLH

SEQ ID NO: 854275 - protein, 340 aa, Homo sapiens; identical to SEQ ID NO: 854261

SEQ ID NO: 854276 - protein, 102 aa, Homo sapiens
MQGTKRSEEERRRRSRRQRTSGRRQGAHATAPQGGTQQRKETERARRGREQEKERRRRRREEKKQRPKEANKQKQGKERTNKAQETQTAGEGKSHEGTHANT

SEQ ID NO: 854277 - protein, 340 aa, Homo sapiens; identical to SEQ ID NO: 854261

SEQ ID NO: 854278 - protein, 122 aa, Homo sapiens
ERSHSRRATLEHPALVPLQPAEMVELMFPLLLLLLPFLLYMAAPQIRKMLSSGVCTSTVQLPGKVVVVTGANTGIGKETAKELAQRGKFTSFQFPPITAVLPLTVMMIHSHCFFPVLEFKNT

SEQ ID NO: 854279 - protein, 188 aa, Homo sapiens
MMCPYSKTADGFEMHIGVNHLGHFLLTHLLLEKLKESAPSRIVNVSSLAHHLGRIHFHNLQGEKFYNAGLAYCHSKLANILFTQELARRLKGSGVTTYSVHPGTVQSELVRHSSFMRWMWWLFSFFIKTPQQGAQTSLHCALTEGLEILSGNHFSDCHVAWVSAQARNETIARRLWDVSCDLLGLPID

SEQ ID NO: 854280 - protein, 213 aa, Homo sapiens
REAIVGEQRWSIPLWCRCSRQRWLSSCSRCCSSFCPSFCIWLRPKSGHFLLTHLLLEKLKESAPSRIVNVSSLAHHLGRIHFHNLQGEKFYNAGLAYCHSKLANILFTQELARRLKGSGVTTYSVHPGTVQSELVRHSSFMRWMWWLFSFFIKTPQQGAQTSLHCALTEGLEILSGNHFSDCHVAWVSAQARNETIARRLWDVSCDLLGLPID

SEQ ID NO: 854281 - protein, 133 aa, Homo sapiens
EVRLGTRLGGYNAGLAYCHSKLANILFTQELARRLKGSGVTTYSVHPGTVQSELVRHSSFMRWMWWLFSFFIKTPQQGAQTSLHCALTEGLEILSGNHFSDCHVAWVSAQARNETIARRLWDVSCDLLGLPID

SEQ ID NO: 854282 - protein, 340 aa, Homo sapiens; identical to SEQ ID NO: 854261

SEQ ID NO: 854283 - protein, 340 aa, Homo sapiens; identical to SEQ ID NO: 854261

SEQ ID NO: 854284 - protein, 133 aa, Homo sapiens; identical to SEQ ID NO: 854281

SEQ ID NO: 854285 - protein, 148 aa, Homo sapiens
ERSHSRRATLEHPALVPLQPAEMVELMFPLLLLLLPFLLYMAAPQIRKMLSSGVCTSTVQLPGKVVVVTGANTGIGKETAKELAQRGARVYLACRDVEKGELVAKEIQTTTGNQQVLVRKLDLSDTKSIRAFAKGFLAAQSSLLILVN

SEQ ID NO: 854286 - protein, 1265 aa, Homo sapiens
MERLLAQLCGSSAAWPLPLWEGDTTGHCFTQLVLSALPHALLAVLSACYLGTPRSPDYILPCSPGWRLRLAASFLLSVFPLLDLLPVALPPGAGPGPIGLEVLAGCVAAVAWISHSLALWVLAHSPHGHSRGPLALALVALLPAPALVLTVLWHCQRGTLLPPLLPGPMARLCLLILQLAALLAYALGWAAPGGPREPWAQEPLLPEDQEPEVAEDGESWLSRFSYAWLAPLLARGACGELRQPQDICRLPHRLQPTYLARVFQAHWQEGARLWRALYGAFGRCYLALGLLKLVGTMLGFSGPLLLSLLVGFLEEGQEPLSHGLLYALGLAGGAVLGAVLQNQYGYEVYKVTLQARGAVLNILYCKALQLGPSRPPTGEALNLLGTDSERLLNFAGSFHEAWGLPLQLAITLYLLYQQVGVAFVGGLILALLLVPVNKVIATRIMASNQEMLQHKDARVKLVTELLSGIRVIKFCGWEQALGARVEACRARELGRLRVIKYLDAACVYLWAALPVVISIVIFITYVLMGHQLTATKVFTALALVRMLILPLNNFPWVINGLLEAKVSLDRIQLFLDLPNHNPQAYYSPDPPAEPSTVLELHGALFSWDPVGTSLETFISHLEVKKGMLVGIVGKVGCGKSSLLAAIAGELHRLRGHVAVRGLSKGFGLATQEPWIQFATIRDNILFGKTFDAQLYKEVLEACALNDDLSILPAGDQTEVGEKGVTLSGGQRARIALARAVYQEKELYLLDDPLAAVDADVANHLLHRCILGMLSYTTRLLCTHRTEYLERADAVLLMEAGRLIRAGPPSEILPLVQAVPKAWAENGQESDSATAQSVQNPEKTKEGLEEEQSTSGRLLQEESKKEGAVALHVYQAYWKAVGQGLALAILFSLLLMQATRNAADWWLSHWISQLKAENSSQEAQPSTSPASMGLFSPQLLLFSPGNLYIPVFPLPKAAPNGSSDIRFYLTVYATIAGVNSLCTLLRAVLFAAGTLQAAATLHRRLLHRVLMAPVTFFNATPTGRILNRFSSDVACADDSLPFILNILLANAAGLLGLLAVLGSGLPWLLLLLPPLSIMYYHVQRHYRASSRELRRLGSLTLSPLYSHLADTLAGLSVLRATGATYRFEEENLRLLELNQRCQFATSATMQWLDIRLQLMGAAVVSAIAGIALVQHQQGLANPGLVGLSLSYALSLTGLLSGLVSSFTQTEAMLVSVERLEEYTCDLPQEPQGQPLQLGTGWLTQGAWSSRTWCWRTGQGCRMPWME

SEQ ID NO: 854287 - protein, 182 aa, Homo sapiens
DSPLLTTQHPSVPTAQSCPQWLLRHPFLPHRVCDHCWCKFPLHPSPGSALCSRHPSSSCHSASPPAASSPYGLVGLSLSYALSLTGLLSGLVSSFTQTEAMLVSVERLEEYTCDLPQEPQGQPLQVGLYPHPRPKLWNPEGPSLPHNSFLFAHPSFSAPITSLHDDHNSSPCPFFPISHSLI

SEQ ID NO: 854288 - protein, 371 aa, Homo sapiens
MQATRNAADWWLSHWISQLKAENSSQEAQPSTSPASMGLFSPQLLLFSPGNLYIPVFPLPKAAPNGSSDIRFYLTVYATIAGVNSLCTLLRAVLFAAGTLQAAATLHRRLLHRVLMAPVTFFNATPTGRILNRFSSDVACADDSLPFILNILLANAAGLLGLLAVLGSGLPWLLLLLPPLSIMYYHVQRHYRASSRELRRLGSLTLSPLYSHLADTLAGLSVLRATGATYRFEEENLRLLELNQRCQFATSATMQWLDIRLQLMGAAVVSAIAGIALVQHQQGLANPGLVGLSLSYALSLTGLLSGLVSSFTQTEAMLVSVERLEEYTCDLPQEPQGQPLQLGTGWLTQGAWSSRTWCWRTGQGCRMPWME

SEQ ID NO: 854289 - protein, 1468 aa, Homo sapiens
MERLLAQLCGSSAAWPLPLWEGDTTGHCFTQLVLSALPHALLAVLSACYLGTPRSPDYILPCSPGWRLRLAASFLLSVFPLLDLLPVALPPGAGPGPIGLEVLAGCVAAVAWISHSLALWVLAHSPHGHSRGPLALALVALLPAPALVLTVLWHCQRGTLLPPLLPGPMARLCLLILQLAALLAYALGWAAPGGPREPWAQEPLLPEDQEPEVAEDGESWLSRFSYAWLAPLLARGACGELRQPQDICRLPHRLQPTYLARVFQAHWQEGARLWRALYGAFGRCYLALGLLKLVGTMLGFSGPLLLSLLVGFLEEGQEPLSHGLLYALGLAGGAVLGAVLQNQYGYEVYKVTLQARGAVLNILYCKALQLGPSRPPTGEALNLLGTDSERLLNFAGSFHEAWGLPLQLAITLYLLYQQVGVAFVGGLILALLLVPVNKVIATRIMASNQEMLQHKDARVKLVTELLSGIRVIKFCGWEQALGARVEACRARELGRLRVIKYLDAACVYLWAALPVVISIVIFITYVLMGHQLTATKVFTALALVRMLILPLNNFPWVINGLLEAKVSLDRIQLFLDLPNHNPQAYYSPDPPAEPSTVLELHGALFSWDPVGTSLETFISHLEVKKGMLVGIVGKVGCGKSSLLAAIAGELHRYPTSYAPLSLLCPLANTEPLLCVGHLLGVRGTKKSNAWSLYWESFQSGKKEVAKKGIIVIITPECFKCYNSQQRNGNIQCQLFFQKCGCAEKGSREEHRFEGGPVFSDGNKYNVVAILSTELLNRCKYNSCLAVAKELFLPFFAQNGLHEDPLTSGAAISVMCHEGGPCVEDSSLGRLLGVKGWAWRDPEEAGPHIARLALCRLRGHVAVRGLSKGFGLATQEPWIQFATIRDNILFGKTFDAQLYKEVLEACALNDDLSILPAGDQTEVGEKGVTLSGGQRARIALARAVYQEKELYLLDDPLAAVDADVANHLLHRCILGMLSYTTRLLCTHRTEYLERADAVLLMEAGRLIRAGPPSEILPLVQAVPKAWAENGQESDSATAQSVQNPEKTKEGLEEEQSTSGRLLQEESKKEGAVALHVYQAYWKAVGQGLALAILFSLLLMQATRNAADWWLSHWISQLKAENSSQEAQPSTSPASMGLFSPQLLLFSPGNLYIPVFPLPKAAPNGSSDIRFYLTVYATIAGVNSLCTLLRAVLFAAGTLQAAATLHRRLLHRVLMAPVTFFNATPTGRILNRFSSDVACADDSLPFILNILLANAAGLLGLLAVLGSGLPWLLLLLPPLSIMYYHVQRHYRASSRELRRLGSLTLSPLYSHLADTLAGLSVLRATGATYRFEEENLRLLELNQRCQFATSATMQWLDIRLQLMGAAVVSAIAGIALVQHQQGLANPGLVGLSLSYALSLTGLLSGLVSSFTQTEAMLVSVERLEEYTCDLPQEPQGQPLQLGTGWLTQGAWSSRTWCWRTGQGCRMPWME

SEQ ID NO: 854290 - protein, 1422 aa, Homo sapiens
MERLLAQLCGSSAAWPLPLWEGDTTGHCFTQLVLSALPHALLAVLSACYLGTPRSPDYILPCSPGWRLRLAASFLLSVFPLLDLLPVALPPGAGPGPIGLEVLAGCVAAVAWISHSLALWVLAHSPHGHSRGPLALALVALLPAPALVLTVLWHCQRGTLLPPLLPGPMARLCLLILQLAALLAYALGWAAPGGPREPWAQEPLLPEDQEPEVAEDGESWLSRFSYAWLAPLLARGACGELRQPQDICRLPHRLQPTYLARVFQAHWQEGARLWRALYGAFGRCYLALGLLKLVGTMLGFSGPLLLSLLVGFLEEGQEPLSHGLLYALGLAGGAVLGAVLQNQYGYEVYKVTLQARGAVLNILYCKALQLGPSRPPTGEALNLLGTDSERLLNFAGSFHEAWGLPLQLAITLYLLYQQVGVAFVGGLILALLLVPVNKVIATRIMASNQEMLQHKDARVKLVTELLSGIRVIKFCGWEQALGARVEACRARELGRLRVIKYLDAACVYLWAALPVVISIVIFITYVLMGHQLTATKVFTALALVRMLILPLNNFPWVINGLLEAKVSLDRIQLFLDLPNHNPQAYYSPDPPAEPSTVLELHGALFSWDPVGTSLETFISHLEVKKGMLVGIVGKVGCGKSSLLAAIAGELHRYPTSYAPLSLLCPLANTEPLLCVGHLLGVRGTKKSNAWSLYWESFQSGKKEVAKKGIIVIITPECFKCYNSQQRNGNIQCQLFFQKCGCAEKGSREEHRFEGGPVFSDGNKYNVVAILSTELLNRCKYNSCLAVAKELFLPFFAQNGLHEDPLTSGAAISVMCHEGGPCVEDSSLGRLLGVKGWAWRDPEEAGPHIARLALCRLRGHVAVRGLSKGFGLATQEPWIQFATIRDNILFGKTFDAQLYKEVLEACALNDDLSILPAGDQTEVGEKGVTLSGGQRARIALARAVYQEKELYLLDDPLAAVDADVANHLLHRCILGMLSYTTRLLCTHRTEYLERADAVLLMEAGRLIRAGPPSEILPLVQAVPKAWAENGQESDSATAQSVQNPEKTKEGLEEEQSTSGRLLQEESKKEGAVALHVYQAYWKAVGQGLALAILFSLLLMQATRNAADWWLSHWISQLKAENSSQEAQPSTSPASMGLFSPQLLLFSPGNLYIPVFPLPKAAPNGSSDIRFYLTVYATIAGVNSLCTLLRAVLFAAGTLQAAATLHRRLLHRVLMAPVTFFNATPTGRILNRFSSDVACADDSLPFILNILLANAAGLLGLLAVLGSGLPWLLLLLPPLSIMYYHVQRHYRASSRELRRLGSLTLSPLYSHLADTLAGLSVLRATGATYRFEEENLRLLELNQRCQFATSATMQWLDIRLQLMGAAVVSAIAGIALVQHQQGLANPGATQDPSPLPHPQVSPPLSQISPCTIPPTFSPPTQGSL

SEQ ID NO: 854291 - protein, 58 aa, Homo sapiens
MQWLDIRLQLMGAAVVSAIAGIALVQHQQGLANPGATQDPSPLPHPQVSPPLSQISPC

SEQ ID NO: 854292 - protein, 139 aa, Homo sapiens
MPAVHSLGSLPQTSRCPSSPSSWYFSPPGLVGLSLSYALSLTGLLSGLVSSFTQTEAMLVSVERLEEYTCDLPQEPQGQPLQVGLYPHPRPKLWNPEGPSLPHNSFLFAHPSFSAPITSLHDDHNSSPCPFFPISHSLI

SEQ ID NO: 854293 - protein, 652 aa, Homo sapiens
MERLLAQLCGSSAAWPLPLWEGDTTGHCFTQLVLSALPHALLAVLSACYLGTPRSPDYILPCSPGWRLRLAASFLLSVFPLLDLLPVALPPGAGPGPIGLEVLAGCVAAVAWISHSLALWVLAHSPHGHSRGPLALALVALLPAPALVLTVLWHCQRGTLLPPLLPGPMARLCLLILQLAALLAYALGWAAPGGPREPWAQEPLLPEDQEPEVAEDGESWLSRFSYAWLAPLLARGACGELRQPQDICRLPHRLQPTYLARVFQAHWQEGARLWRALYGAFGRCYLALGLLKLVGTMLGFSGPLLLSLLVGFLEEGQEPLSHGLLYALGLAGGAVLGAVLQNQYGYEVYKVTLQARGAVLNILYCKALQLGPSRPPTGEALNLLGTDSERLLNFAGSFHEAWGLPLQLAITLYLLYQQVGVAFVGGLILALLLVPVNKVIATRIMASNQEMLQHKDARVKLVTELLSGIRVIKFCGWEQALGARVEACRARELGRLRVIKYLDAACVYLWAALPVVISIVIFITYVLMGHQLTATKVFTALALVRMLILPLNNFPWVINGLLEAKVSLDRIQLFLDLPNHNPQAYYSPDPPAEPSTVLELHGALFSWDPVGTSLETFISHLEVKKGMLVGIVGKVGCGKSSLLAAIAGELHR

SEQ ID NO: 854294 - protein, 1468 aa, Homo sapiens; identical to SEQ ID NO: 854289

SEQ ID NO: 854295 - protein, 652 aa, Homo sapiens; identical to SEQ ID NO: 854293

SEQ ID NO: 854296 - protein, 192 aa, Homo sapiens
AYTSSQDIGIRCTAASSGLRFRMPGGGETGGEKQMARWVTSVQKSTGETSSRFYPWYRENGRGLASGRKRRAVPVPGGAGDRETRLGSAGKAGCYPAQPSPSTFPSGEASMERLLAQLCGSSAAWPLPLWEGDTTGHCFTQLVLSALPHALLAVLSACYLGTPRWVETGARHLSMCACRSHPRPTSSGSVTR

SEQ ID NO: 854297 - protein, 124 aa, Homo sapiens
TKNKQRVCLGDGPASSLQSLPSQAKERELGPLSLYPTRAWAPSPLPPRTWASLGGNLDTWMLEPRSEVLLSHGTVTRTVPSIPVQTGRGHPLSLALLCDLAGVMSHSRDRGIGAGLFRVMAPRR

SEQ ID NO: 854298 - protein, 75 aa, Homo sapiens
AHVAPASRQSAGLQGLRRLRESLTGTLTGGWRTGDSDLRQRVLLRHPGWSAMALSRLTATSASRIQAILLPQPPE

SEQ ID NO: 854299 - protein, 370 aa, Homo sapiens
CPRCAGLAPVRWAAGTAAPEGVADGHADWRLADRRQRPAAGPEEREQQEPHPAAMSAEVETSEGVDESEKKNSGALEKENQMRMADLSELLKEGTKEAHDRAENTQFVKDFLKGNIKKELFKLATTALYFTYSALEEEMERNKDHPAFAPLYFPMELHRKEALTKDMEYFFGENWEEQVQCPKAAQKYVERIHYIGQNEPELLVAHAYTRYMGDLSGGQVLKKVAQRALKLPSTGEGTQFYLFENVDNAQQFKQLYRARMNALDLNMKTKERIVEEANKAFEYNMQIFNELDQAGSTLARETLEDGFPVHDGKGDMRKCPFYAAEQDKGALEGSSCPFRTAMAVLRKPSLQFILAAGVALAAGLLAWYYM

SEQ ID NO: 854300 - protein, 316 aa, Homo sapiens
MSAEVETSEGVDESEKKNSGALEKENQMRMADLSELLKEGTKEAHDRAENTQFVKDFLKGNIKKELFKLATTALYFTYSALEEEMERNKDHPAFAPLYFPMELHRKEALTKDMEYFFGENWEEQVQCPKAAQKYVERIHYIGQNEPELLVAHAYTRYMGDLSGGQVLKKVAQRALKLPSTGEGTQFYLFENVDNAQQFKQLYRARMNALDLNMKTKERIVEEANKAFEYNMQIFNELDQAGSTLARETLEDGFPVHDGKGDMRKCPFYAAEQDKGALEGSSCPFRTAMAVLRKPSLQFILAAGVALAAGLLAWYYM

SEQ ID NO: 854301 - protein, 316 aa, Homo sapiens; identical to SEQ ID NO: 854300

SEQ ID NO: 854302 - protein, 287 aa, Homo sapiens
MADLSELLKEGTKEAHDRAENTQFVKDFLKGNIKKELFKLATTALYFTYSALEEEMERNKDHPAFAPLYFPMELHRKEALTKDMEYFFGENWEEQVQCPKAAQKYVERIHYIGQNEPELLVAHAYTRYMGDLSGGQVLKKVAQRALKLPSTGEGTQFYLFENVDNAQQFKQLYRARMNALDLNMKTKERIVEEANKAFEYNMQIFNELDQAGSTLARETLEDGFPVHDGKGDMRKCPFYAAEQDKGALEGSSCPFRTAMAVLRKPSLQFILAAGVALAAGLLAWYYM

SEQ ID NO: 854303 - protein, 228 aa, Homo sapiens
SSPKGYMNIVVGKRLIIKEALTKDMEYFFGENWEEQVQCPKAAQKYVERIHYIGQNEPELLVAHAYTRYMGDLSGGQVLKKVAQRALKLPSTGEGTQFYLFENVDNAQQFKQLYRARMNALDLNMKTKERIVEEANKAFEYNMQIFNELDQAGSTLARETLEDGFPVHDGKGDMRKCPFYAAEQDKGALEGSSCPFRTAMAVLRKPSLQFILAAGVALAAGLLAWYYM

SEQ ID NO: 854304 - protein, 337 aa, Homo sapiens
CPRCAGLAPVRWAAGTAAPEGVADGHADWRLADRRQRPAAGPEEREQQEPHPAAMSAEVETSEGVDESEKKNSGALEKENQMRMADLSELLKEGTKEAHDRAENTQFVKDFLKGNIKKELFKLATTALYFTYSALEEEMERNKDHPAFAPLYFPMELHRKEALTKDMEYFFGENWEEQVQCPKAAQKYVERIHYIGQNEPELLVAHAYTRYMGDLSGGQVLKKVAQRALKLPSTGEGTQFYLFENVDNAQQFKQLYRARMNALDLNMKTLEDGFPVHDGKGDMRKCPFYAAEQDKGALEGSSCPFRTAMAVLRKPSLQFILAAGVALAAGLLAWYYM

SEQ ID NO: 854305 - protein, 111 aa, Homo sapiens
MRSVGNNVLNYTFFPFSIMGRMQENLCHRVTVYTCGSRGCPLALEDGFPVHDGKGDMRKCPFYAAEQDKGALEGSSCPFRTAMAVLRKPSLQFILAAGVALAAGLLAWYYM

SEQ ID NO: 854306 - protein, 165 aa, Homo sapiens
CPRCAGLAPVRWAAGTAAPEGVADGHADWRLADRRQRPAAGPEEREQQEPHPAAMSAEVETSEGVDESEKKNSGALEKENQMRMADLSELLKEGTKEAHDRAENTQFVKDFLKGNIKKELFKVCAPHWVPDCHMGLGWGPWSHEKSAPGATLREKLGFSPHSIPS

SEQ ID NO: 854307 - protein, 370 aa, Homo sapiens; identical to SEQ ID NO: 854299

SEQ ID NO: 854308 - protein, 389 aa, Homo sapiens
AVRGRVLMAEGRTGDSDLRQSLAATPRLECNGAISAHCNLRFPDSSDSPASASRVGGTTGPEEREQQEPHPAAMSAEVETSEGVDESEKKNSGALEKENQMRMADLSELLKEGTKEAHDRAENTQFVKDFLKGNIKKELFKLATTALYFTYSALEEEMERNKDHPAFAPLYFPMELHRKEALTKDMEYFFGENWEEQVQCPKAAQKYVERIHYIGQNEPELLVAHAYTRYMGDLSGGQVLKKVAQRALKLPSTGEGTQFYLFENVDNAQQFKQLYRARMNALDLNMKTKERIVEEANKAFEYNMQIFNELDQAGSTLARETLEDGFPVHDGKGDMRKCPFYAAEQDKGALEGSSCPFRTAMAVLRKPSLQFILAAGVALAAGLLAWYYM

SEQ ID NO: 854309 - protein, 410 aa, Homo sapiens
CPRCAGLAPVRWAAGTAAPEGVADGHADWRLADRRQRPAAESLAATPRLECNGAISAHCNLRFPDSSDSPASASRVGGTTGPEEREQQEPHPAAMSAEVETSEGVDESEKKNSGALEKENQMRMADLSELLKEGTKEAHDRAENTQFVKDFLKGNIKKELFKLATTALYFTYSALEEEMERNKDHPAFAPLYFPMELHRKEALTKDMEYFFGENWEEQVQCPKAAQKYVERIHYIGQNEPELLVAHAYTRYMGDLSGGQVLKKVAQRALKLPSTGEGTQFYLFENVDNAQQFKQLYRARMNALDLNMKTKERIVEEANKAFEYNMQIFNELDQAGSTLARETLEDGFPVHDGKGDMRKCPFYAAEQDKGALEGSSCPFRTAMAVLRKPSLQFILAAGVALAAGLLAWYYM

SEQ ID NO: 854310 - protein, 343 aa, Homo sapiens
AREGTRRTAWLSSGALCRMKHYSSRDCLTAQLETSEGVDESEKKNSGALEKENQMRMADLSELLKEGTKEAHDRAENTQFVKDFLKGNIKKELFKLATTALYFTYSALEEEMERNKDHPAFAPLYFPMELHRKEALTKDMEYFFGENWEEQVQCPKAAQKYVERIHYIGQNEPELLVAHAYTRYMGDLSGGQVLKKVAQRALKLPSTGEGTQFYLFENVDNAQQFKQLYRARMNALDLNMKTKERIVEEANKAFEYNMQIFNELDQAGSTLARETLEDGFPVHDGKGDMRKCPFYAAEQDKGALEGSSCPFRTAMAVLRKPSLQFILAAGVALAAGLLAWYYM

SEQ ID NO: 854311 - protein, 337 aa, Homo sapiens; identical to SEQ ID NO: 854304

SEQ ID NO: 854312 - protein, 271 aa, Homo sapiens
CPRCAGLAPVRWAAGTAAPEGVADGHADWRLADRRQRPAAGPEEREQQEPHPAAMSAEVETSEGVDESEKKNSGALEKENQMRMADLSELLKEGTKEAHDRAENTQFVKDFLKGNIKKELFKLATTALYFTYSALEEEMERNKDHPAFAPLYFPMELHRKEALTKDMEYFFGENWEEANKAFEYNMQIFNELDQAGSTLARETLEDGFPVHDGKGDMRKCPFYAAEQDKGALEGSSCPFRTAMAVLRKPSLQFILAAGVALAAGLLAWYYM

SEQ ID NO: 854313 - protein, 70 aa, Homo sapiens
RARYRSLKEIPIPSDPLFHCLSVSWTHPGLVFALRRSLALGLPFPGTLGLIPFSSSGDFLKNAGFKKGNQ

SEQ ID NO: 854314 - protein, 301 aa, Homo sapiens
NKMQSPSPNDPARNLGSADPERTETAVLLLYRGGGMARVVREGALLHQQEIGAVLGLELPARSFARAHPDPSSRGGCFRPAAVGLTQRPARAFHALAFPLADFLFSEVAGFVLFSGSGAFPNLRMPVKRSLKLDGLLEENSFDPSKITRKKSVITYSPTTGTCQMSLFASPTSSEEQKHRNGLSNEKRKKLNHPSLTESKESTTKDNDEFMMLLSKVEKLSEEIMEIMQNLSSIQALEGSRELENLIGISCASHFLKREMQKTKELMTKVNKQKLFEKSTGLPHKASRHLDSYEFLKAILN

SEQ ID NO: 854315 - protein, 340 aa, Homo sapiens
NKMQSPSPNDPARNLGSADPERTETAVLLLYRGGGMARVVREGALLHQQEIGAVLGLELPARSFARAHPDPSSRGGCFRPAAVGLTQRPARAFHALAFPLADFLFSEVAGFVLFSGSGAFPNLRMPFAPVAQAGVQWHDFRSLQHLLPAFKRFSCLSLGSSWDYSVKRSLKLDGLLEENSFDPSKITRKKSVITYSPTTGTCQMSLFASPTSSEEQKHRNGLSNEKRKKLNHPSLTESKESTTKDNDEFMMLLSKVEKLSEEIMEIMQNLSSIQALEGSRELENLIGISCASHFLKREMQKTKELMTKVNKQKLFEKSTGLPHKASRHLDSYEFLKAILN

SEQ ID NO: 854316 - protein, 294 aa, Homo sapiens
NKMQSPSPNDPARNLGSADPERTETAVLLLYRGGGMARVVREGALLHQQEIGAVLGLELPARSFARAHPDPSSRGGCFRPAAVGLTQRPARAFHALAFPLADFLFSEVAGFVLFSGSGAFPNLRMPVKRSLKLDGLLEENSFDPSKITRKKSVITYSPTTGTCQMSLFASPTSSEEQKHRNGLSNEKRKKLNHPSLTESKESTTKDNDEFMMLLSKVEKLSEEIMEIMQNLSSIQALEGSRELENLIGISCASHFLKREMQKTKELMTKVNKQKLFEKSTGLPHKGQPQMSQPL

SEQ ID NO: 854317 - protein, 148 aa, Homo sapiens
NKMQSPSPNDPARNLGSADPERTETAVLLLYRGGGMARVVREGALLHQQEIGAVLGLELPARSFARAHPDPSSRGGCFRPAAVGLTQRPARAFHALAFPLADFLFSEVAGFVLFSGSGAFPNLRMPVKRSLKLDGLLEENIHDVAIKS

SEQ ID NO: 854318 - protein, 145 aa, Homo sapiens
NKMQSPSPNDPARNLGSADPERTETAVLLLYRGGGMARVVREGALLHQQEIGAVLGLELPARSFARAHPDPSSRGGCFRPAAVGLTQRPARAFHALAFPLADFLFSEVAGFVLFSGSGAFPNLRMPVKRSLKLDGLLEENKREKN

SEQ ID NO: 854319 - protein, 137 aa, Homo sapiens
MSLFASPTSSEEQKHRNGLSNEKRKKLNHPSLTESKESTTKDNDEFMMLLSKVEKLSEEIMEIMQNLSSIQALEGSRELENLIGISCASHFLKREMQKTKELMTKVNKQKLFEKSTGLPHKASRHLDSYEFLKAILN

SEQ ID NO: 854320 - protein, 148 aa, Homo sapiens; identical to SEQ ID NO: 854317

SEQ ID NO: 854321 - protein, 104 aa, Homo sapiens
  misc_feature (11)..(11): Xaa can be any naturally occurring amino acid
HTPCEHRQPKXARMNSCFIVEKLSEEIMEIMQNLSSIQALEGSRELENLIGISCASHFLKREMQKTKELMTKVNKQKLFEKSTGLPHKASRHLDSYEFLKAILN

SEQ ID NO: 854322 - protein, 145 aa, Homo sapiens; identical to SEQ ID NO: 854318

SEQ ID NO: 854323 - protein, 297 aa, Homo sapiens
NKMQSPSPNDPARNLGSADPERTETAVLLLYRGGGMARVVREGALLHQQEIGAVLGLELPARSFARAHPDPSSRGGCFRPAAVGLTQRPARAFHALAFPLADFLFSEVAGFVLFSGSGAFPNLRMPVKRSLKLDGLLEENSFDPSKITRKKSVITYSPTTGTCQMSLFASPTSSEEQKHRNGLSNEKRKKLNHPSLTESKESTTKDNDEFMMLLSKVEKLSEEIMEIMQNLSSIQALEGSRELENLIGISCASHFLKREMQKTKELMTKVNKQKLFEKSTGLPHKDTSILKALRFEV

SEQ ID NO: 854324 - protein, 74 aa, Homo sapiens
DASDELDGLLHVEPAVPAHHQRGLLPLRRLHGGDDTLDEVLRVVGAALEHLHPLPQPARARLLVLFYFGCRQKP

SEQ ID NO: 854325 - protein, 287 aa, Homo sapiens
NKMQSPSPNDPARNLGSADPERTETAVLLLYRGGGMARVVREGALLHQQEIGAVLGLELPARSFARAHPDPSIAGRMFPPGRGGLDATSSARFSCLGVSFGGFSVFGSCWVRFIQRQWCFPESQNASFDPSKITRKKSVITYSPTTGTCQMSLFASPTSSEEQKHRNGLSNEKRKKLNHPSLTESKESTTKDNDEFMMLLSKVEKLSEEIMEIMQNLSSIQALEGSRELENLIGISCASHFLKREMQKTKELMTKVNKQKLFEKSTGLPHKASRHLDSYEFLKAILN

SEQ ID NO: 854326 - protein, 197 aa, Homo sapiens
MAGCEGRGRLSAAGCFPGISECLLKITEVDGLLEENSFDPSKITRKKSVITYSPTTGTCQMSLFASPTSSEEQKHRNGLSNEKRKKLNHPSLTESKESTTKDNDEFMMLLSKVEKLSEEIMEIMQNLSSIQALEGSRELENLIGISCASHFLKREMQKTKELMTKVNKQKLFEKSTGLPHKASRHLDSYEFLKAILN

SEQ ID NO: 854327 - protein, 301 aa, Homo sapiens; identical to SEQ ID NO: 854314

SEQ ID NO: 854328 - protein, 340 aa, Homo sapiens; identical to SEQ ID NO: 854315

SEQ ID NO: 854329 - protein, 287 aa, Homo sapiens
NKMQSPSPNDPARNLGSADPERTETAVLLLYRGGGMARVVREGALLHQQEIGAVLGLELPARSFARAHPDPSSRGGCFRPAAVGLTQRPARAFHALAFPLADFLFSEVAGFVLFSGSGAFPNLRMPVKRSLKLDGLLEENSFDPSKITRKKSVITYSPTTGTCQMSLFASPTSSEEQKHRNGLSNEKRKKLNHPSLTESKESTTKDNDEFMMLLSKVEKLSEEIMEIMQNLSSIQALEGSRELENLIGISCASHFLKREMQKTKELMTKVNKQKLFEKSTGLPHKGK

SEQ ID NO: 854330 - protein, 205 aa, Homo sapiens
DHSSSRASTRPGRFWILAVEGVCLPLQRKMVMRPLWSLLLWEDAVPRPVVQVFIAVERDAQPSKTCQVFLSCWAPNISEITYSWRRETTMDFGMEPHSLFTDGQVLSISLGPGDRDVAYSCIVSNPVSWDLATVTPWDSCHHEAAPGKASYKDVLLVVVPVSLLLMLVTLFSAWHWCPCSGKKKKDVHADRVGPETENPLVQDLP

SEQ ID NO: 854331 - protein, 205 aa, Homo sapiens; identical to SEQ ID NO: 854330

SEQ ID NO: 854332 - protein, 205 aa, Homo sapiens; identical to SEQ ID NO: 854330

SEQ ID NO: 854333 - protein, 314 aa, Homo sapiens
DHSSSRASTRPGRFWILAVEGVCLPLQRKMVMRPLWSLLLWEALLPITVTGAQVLSKVGGSVLLVAARPPGFQVREAIWRSLWPSEELLATFFRGSLETLYHSRFLGRAQLHSNLSLELGPLESGDSGNFSVLMVDTRGQPWTQTLQLKVYDAVPRPVVQVFIAVERDAQPSKTCQVFLSCWAPNISEITYSWRRETTMDFGMEPHSLFTDGQVLSISLGPGDRDVAYSCIVSNPVSWDLATVTPWDSCHHEAAPGKASYKDVLLVVVPVSLLLMLVTLFSAWHWCPCSGKKKKDVHADRVGPETENPLVQDLP

SEQ ID NO: 854334 - protein, 205 aa, Homo sapiens; identical to SEQ ID NO: 854330

SEQ ID NO: 854335 - protein, 136 aa, Homo sapiens
  misc_feature (12)..(12): Xaa can be any naturally occurring amino acid
  misc_feature (31)..(31): Xaa can be any naturally occurring amino acid
GRGGKRDTGKGXGEKGGGGKGEKRPGEEEEXNQGTEKSARPPGQAEEEQPGQPSHHEDRKHQHVSHLPLPSPIFSYPGSSLGKMSQAEHSIQDTGSSPGSRSMGTLIVQGIPSPTTIHKVLTNWHQGIASSLSPRL

SEQ ID NO: 854336 - protein, 205 aa, Homo sapiens; identical to SEQ ID NO: 854330

SEQ ID NO: 854337 - protein, 313 aa, Homo sapiens
DHSSSRASTRPGRFWILAVEGVCLPLQRKMVMRPLWSLLLWEALLPITVTGAQVLSKVGGSVLLVAARPPGFQVREAIWRSLWPSEELLATFFRGSLETLYHSRFLGRAQLHSNLSLELGPLESGDSGNFSVLMVDTRGQPWTQTLQLKVYDAVPRPVVQVFIAVERDAQPSKTCQVFLSCWAPNISEITYSWRRETTMDFGMEPHSLFTDGQVLSISLGPGDRDVAYSCIVSNPVSWDLATVTPWDSCHHEAAPGKASYKDVLLGGGACLAAPDAGYSLLCLALVPLLRAPPQIKAALDEMGPAALPPQGDS

SEQ ID NO: 854338 - protein, 234 aa, Homo sapiens
  misc_feature (10)..(10): Xaa can be any naturally occurring amino acid
WLVRGSVNRXRVCHRSTWPASVPPRHFHLACLRPAAPLRLPPSPARRAMPVAGSELPRRPLPPAAQERDAEPRPPHGELQYLGQIQHILRCGVRKDDRTGTGTLSVFGMQARYSLRDEFPLLTTKRVFWKGVLEELLWFIKGSTNAKELSSKGVKIWDANGSRDFLDSLGFSTREEGDLGPVYGFQWRHFGAEYRDMESDYSGQGVDQLQRVIDTIKTNPDDRRIIMCAWNPRG

SEQ ID NO: 854339 - protein, 362 aa, Homo sapiens
RGTAAGKGARKGSCHRATWPASVPPRHFHLACLRPAAPLRLPPSPARRAMPVAGSELPRRPLPPAAQERDAEPRPPHGELQYLGQIQHILRCGVRKDDRTGTGTLSVFGMQARYSLRDEFPLLTTKRVFWKGVLEELLWFIKGSTNAKELSSKGVKIWDANGSRDFLDSLGFSTREEGDLGPVYGFQWRHFGAEYRDMESDYSGQGVDQLQRVIDTIKTNPDDRRIIMCAWNPRDLPLMALPPCHALCQFYVVNSELSCQLYQRSGDMGLGVPFNIASYALLTYMIAHITGLKPGDFIHTLGDAHIYLNHIEPLKIQLQREPRPFPKLRILRKVEKIDDFKAEDFQIEGYNPHPTIKMEMAV

SEQ ID NO: 854340 - protein, 349 aa, Homo sapiens
KKNKARTRLVELDKVDLACLRPAAPLRLPPSPARRAMPVAGSELPRRPLPPAAQERDAEPRPPHGELQYLGQIQHILRCGVRKDDRTGTGTLSVFGMQARYSLRDEFPLLTTKRVFWKGVLEELLWFIKGSTNAKELSSKGVKIWDANGSRDFLDSLGFSTREEGDLGPVYGFQWRHFGAEYRDMESDYSGQGVDQLQRVIDTIKTNPDDRRIIMCAWNPRDLPLMALPPCHALCQFYVVNSELSCQLYQRSGDMGLGVPFNIASYALLTYMIAHITGLKPGDFIHTLGDAHIYLNHIEPLKIQLQREPRPFPKLRILRKVEKIDDFKAEDFQIEGYNPHPTIKMEMAV

SEQ ID NO: 854341 - protein, 165 aa, Homo sapiens
MESDYSGQGVDQLQRVIDTIKTNPDDRRIIMCAWNPRDLPLMALPPCHALCQFYVVNSELSCQLYQRSGDMGLGVPFNIASYALLTYMIAHITGLKPGDFIHTLGDAHIYLNHIEPLKIQLQREPRPFPKLRILRKVEKIDDFKAEDFQIEGYNPHPTIKMEMAV

SEQ ID NO: 854342 - protein, 362 aa, Homo sapiens; identical to SEQ ID NO: 854339

SEQ ID NO: 854343 - protein, 325 aa, Homo sapiens
RGTAAGKGARKGSCHRATWPASVPPRHFHLACLRPAAPLRLPPSPARRAMPVAGSELPRRPLPPAAQERDAEPRPPHGELQYLGQIQHILRCGVRKDDRTGTGTLSVFGMQARYSLRDEFPLLTTKRVFWKGVLEELLWFIKGSTNAKELSSKGVKIWDANGSRDFLDSLGFSTREEGDLGPVYGFQWRHFGAEYRDMESDYSGQGVDQLQRVIDTIKTNPDDRRIIMCAWNPRDLPLMALPPCHALCQFYVVNSELSCQLYQRSGDMGLGVPFNIASYALLTYMIAHITGLKVGCLGKGDLPAYHTELFSSLIWENKLQSLVSD

SEQ ID NO: 854344 - protein, 263 aa, Homo sapiens
MPVAGSELPRRPLPPAAQERDAEPRPPHGELQYLGQIQHILRCGVRKDDRTGTGTLSVFGMQARYSLRDEFPLLTTKRVFWKGVLEELLWFIKGSTNAKELSSKGVKIWDANGSRDFLDSLGFSTREEGDLGPVYGFQWRHFGAEYRDMESDYSGQGVDQLQRVIDTIKTNPDDRRIIMCAWNPRDLPLMALPPCHALCQFYVVNSELSCQLYQRSGDMGLGVPFNIASYALLTYMIAHITGLKVGCLGKGDLPAYHTELFSS

SEQ ID NO: 854345 - protein, 337 aa, Homo sapiens
MPVAGSELPRRPLPPAAQERDAEPRPPHGELQYLGQIQHILRCGVRKDDRTGTGTLSVFGMQARYSLRDEFPLLTTKRVFWKGVLEELLWFIKGSTNAKELSSKGVKIWDANGSRDFLDSLGFSTREEGDLGPVYGFQWRHFGAEYRDMESDYSGQGVDQLQRVIDTIKTNPDDRRIIMCAWNPRDLPLMALPPCHALCQFYVVNSELSCQLYQRSGDMAGQLTVHHIELAEGWQLYQRSGDMGLGVPFNIASYALLTYMIAHITGLKPGDFIHTLGDAHIYLNHIEPLKIQLQREPRPFPKLRILRKVEKIDDFKAEDFQIEGYNPHPTIKMEMAV

SEQ ID NO: 854346 - protein, 263 aa, Homo sapiens; identical to SEQ ID NO: 854344

SEQ ID NO: 854347 - protein, 263 aa, Homo sapiens; identical to SEQ ID NO: 854344

SEQ ID NO: 854348 - protein, 159 aa, Homo sapiens
MSWLLFLSCFTLPLAVVFQTTIPPYLPLLVPHLPLMALPPCHALCQFYVVNSELSCQLYQRSGDMGLGVPFNIASYALLTYMIAHITGLKPGDFIHTLGDAHIYLNHIEPLKIQLQREPRPFPKLRILRKVEKIDDFKAEDFQIEGYNPHPTIKMEMAV

SEQ ID NO: 854349 - protein, 159 aa, Homo sapiens; identical to SEQ ID NO: 854348

SEQ ID NO: 854350 - protein, 248 aa, Homo sapiens
  misc_feature (231)..(231): Xaa can be any naturally occurring amino acid
  misc_feature (241)..(241): Xaa can be any naturally occurring amino acid
MPVAGSELPRRPLPPAAQERDAEPRPPHGELQYLGQIQHILRCGVRKDDRTGTGTLSVFGMQARYSLRDEFPLLTTKRVFWKGVLEELLWFIKGSTNAKELSSKGVKIWDANGSRDFLDSLGFSTREEGDLGPVYGFQWRHFGAEYRDMESDYSGQGVDQLQRVIDTIKTNPDDRRIIMCAWNPRDLPLMALPPCHALCQFYVVNSELSCQLYQRSGDMGLGVPFNNSAQXYRPLGLTVTXWNLAGQP

SEQ ID NO: 854351 - protein, 109 aa, Homo sapiens
MSWLLFLSCFTLPLAVVFQTTIPPYLPLLVPHLPLMALPPCHALCQFYVVNSELSCQLYQRSGDMGLGVPFNIASYALLTYMIAHITGLKVGCLGKGDLPAYHTELFSS

SEQ ID NO: 854352 - protein, 235 aa, Homo sapiens
RGTAAGKGARKGSCHRATWPASVPPRHFHLACLRPAAPLRLPPSPARRAMPVAGSELPRRPLPPAAQERDAEPRPPHGELQYLGQIQHILRCGVRKDDRTGTGTLSVFGMQARYSLRDEFPLLTTKRVFWKGVLEELLWFIKGSTNAKELSSKGVKIWDANGSRDFLDSLGFSTREEGDLGPVYGFQWRHFGAEYRDMESDYSGQGVDQLQRVIDTIKTNPDDRRIIMCAWNPRG

SEQ ID NO: 854353 - protein, 313 aa, Homo sapiens
MPVAGSELPRRPLPPAAQERDAEPRPPHGELQYLGQIQHILRCGVRKDDRTGTGTLSVFGMQARYSLRDEFPLLTTKRVFWKGVLEELLWFIKGSTNAKELSSKGVKIWDANGSRDFLDSLGFSTREEGDLGPVYGFQWRHFGAEYRDMESDYSGQGVDQLQRVIDTIKTNPDDRRIIMCAWNPRDLPLMALPPCHALCQFYVVNSELSCQLYQRSGDMGLGVPFNIASYALLTYMIAHITGLKPGDFIHTLGDAHIYLNHIEPLKIQLQREPRPFPKLRILRKVEKIDDFKAEDFQIEGYNPHPTIKMEMAV

SEQ ID NO: 854354 - protein, 352 aa, Homo sapiens
RDGRGKRRAEGVLPPRHLDLACLRPAAPLRLPPSPARRAMPVAGSELPRRPLPPAAQERDAEPRPPHGELQYLGQIQHILRCGVRKDDRTGTGTLSVFGMQARYSLRDEFPLLTTKRVFWKGVLEELLWFIKGSTNAKELSSKGVKIWDANGSRDFLDSLGFSTREEGDLGPVYGFQWRHFGAEYRDMESDYSGQGVDQLQRVIDTIKTNPDDRRIIMCAWNPRDLPLMALPPCHALCQFYVVNSELSCQLYQRSGDMGLGVPFNIASYALLTYMIAHITGLKPGDFIHTLGDAHIYLNHIEPLKIQLQREPRPFPKLRILRKVEKIDDFKAEDFQIEGYNPHPTIKMEMAV

SEQ ID NO: 854355 - protein, 160 aa, Homo sapiens
ELDQNLSRCFKFHEKCQKCQAHLSEDCPDVPALHTELDEAIRLVNVSNQQYGQILQMTRKHLEDTAYLVEKMRGQFGWVSELANQAPETEIIFNSIQVVPRIHEGNISKQDETMMTDLSILPSSNFTLKIPLEESAESSNFIGYVVAKALQHFKEHFKTW

SEQ ID NO: 854356 - protein, 313 aa, Homo sapiens; identical to SEQ ID NO: 854353

SEQ ID NO: 854357 - protein, 313 aa, Homo sapiens; identical to SEQ ID NO: 854353

SEQ ID NO: 854358 - protein, 362 aa, Homo sapiens; identical to SEQ ID NO: 854339

SEQ ID NO: 854359 - protein, 238 aa, Homo sapiens
QKKQNGKNNRLVQLLIGRGGLMMYELSSKGVKIWDANGSRDFLDSLGFSTREEGDLGPVYGFQWRHFGAEYRDMESDYSGQGVDQLQRVIDTIKTNPDDRRIIMCAWNPRDLPLMALPPCHALCQFYVVNSELSCQLYQRSGDMGLGVPFNIASYALLTYMIAHITGLKPGDFIHTLGDAHIYLNHIEPLKIQLQREPRPFPKLRILRKVEKIDDFKAEDFQIEGYNPHPTIKMEMAV

SEQ ID NO: 854360 - protein, 203 aa, Homo sapiens
GPTKTWSSTSRSRAEAGSRDLGPVYGFQWRHFGAEYRDMESDYSGQGVDQLQRVIDTIKTNPDDRRIIMCAWNPRDLPLMALPPCHALCQFYVVNSELSCQLYQRSGDMGLGVPFNIASYALLTYMIAHITGLKPGDFIHTLGDAHIYLNHIEPLKIQLQREPRPFPKLRILRKVEKIDDFKAEDFQIEGYNPHPTIKMEMAV

SEQ ID NO: 854361 - protein, 331 aa, Homo sapiens
RGTAAGKGARKGSCHRATWPASVPPRHFHLACLRPAAPLRLPPSPARRAMPVAGSELPRRPLPPAAQERDAEPRPPHGELQYLGQIQHILRCGVRKDDRTGTGTLSVFGMQARYSLRDEFPLLTTKRVFWKGVLEELLWFIKGSTNAKELSSKGVKIWDANGSRDFLDSLGFSTREEGDLGPVYGFQWRHFGAEYRDMESDYSGQGVDQLQRVIDTIKTNPDDRRIIMCAWNPRDLPLMALPPCHALCQFYVVNSELSCQLYQRSGDMGLGVPFNIASYALLTYMIAHITGLKPGDFIHTLGDAHIYLNHIEPLKIQVRIRCYTFGFGTFS

SEQ ID NO: 854362 - protein, 325 aa, Homo sapiens; identical to SEQ ID NO: 854343

SEQ ID NO: 854363 - protein, 325 aa, Homo sapiens; identical to SEQ ID NO: 854343

SEQ ID NO: 854364 - protein, 277 aa, Homo sapiens
ETVWQIVFHEFPLLTTKRVFWKGVLEELLWFIKGSTNAKELSSKGVKIWDANGSRDFLDSLGFSTREEGDLGPVYGFQWRHFGAEYRDMESDYSGQGVDQLQRVIDTIKTNPDDRRIIMCAWNPRDLPLMALPPCHALCQFYVVNSELSCQLYQRSGDMAGQLTVHHIELAEGWQLYQRSGDMGLGVPFNIASYALLTYMIAHITGLKPGDFIHTLGDAHIYLNHIEPLKIQLQREPRPFPKLRILRKVEKIDDFKAEDFQIEGYNPHPTIKMEMAV

SEQ ID NO: 854365 - protein, 85 aa, Homo sapiens
LALTGRLALSILCHRQIAAWLVFVLGNGKFIGGTRDKMPPLLCCGFNLPFEAEPQRAVGGAAVKRSARVTLHSQLLMRHQAPDAV

SEQ ID NO: 854366 - protein, 521 aa, Homo sapiens
LLPVLLLLLLRASCPWGQEQGARSPSEEPPEEEIPKEDGILVLSRHTLGLALREHPALLVEFYAPWCGHCQALAPEYSKAAAVLAAESMVVTLAKVDGPAQRELAEEFGVTEYPTLKFFRNGNRTHPEEYTGPRDAEGIAEWLRRRVGPSAMRLEDEAAAQALIGGRDLVVIGFFQDLQDEDVATFLALAQDALDMTFGLTDRPRLFQQFGLTKDTVVLFKKFDEGRADFPVDEELGLDLGDLSRFLVTHSMRLVTEFNSQTSAKIFAARILNHLLLFVNQTLAAHRELLAGFGEAAPRFRGQVLFVVVDVAADNEHVLQYFGLKAEAAPTLRLVNLETTKKYAPVDGGPVTAASITAFCHAVLNGQVKPYLLSQEIPPDWDQRPVKTLVGKNFEQVAFDETKNVFVKFYAPWCTHCKEMAPAWEALAEKYQDHEDIIIAELDATANELDAFAVHGFPTLKYFPAGPGRKVIEYKSTRDLETFSKFLDNGGVLPTEEPPEEPAAPFPEPPANSTMGSKEEL

SEQ ID NO: 854367 - protein, 603 aa, Homo sapiens
LLPVLLLLLLRASCPWGQEQGARSPSEEPPEEEIPKEDGILVLSRHTLGLALREHPALLVEFYAPWCGHCQALAPEYSKAAAVLAAESMVVTLAKVDGPAQRELAEEFGVTEYPTLKFFRNGNRTHPEEYTGPRDAEGIAEWLRRRVGPSAMRLEDEAAAQALIGGRDLVVIGFFQDLQDEDVATFLALAQDALDMTFGLTDRPRLFQQFGLTKDTVVLFKKVGQAQVWVGVRLQRPLTHLLLSSLMRGGQTSPWTRSLAWTWGICRASWSHTACAWSRSSTARCVGCSAWAGGVPGRVVQGWGCLGWGSCGVMSTLPTVDVCQDLRGQDPQPPAAVCQPDAGCAPGAPSGLWGGSSPLPGAGTGGLGERGSGRVAGASMDSLPQVLFVVVDVAADNEHVLQYFGLKAEAAPTLRLVNLETTKKYAPVDGGPVTAASITAFCHAVLNGQVKPYLLSQEIPPDWDQRPVKTLVGKNFEQVAFDETKNVFVKFYAPWCTHCKEMAPAWEALAEKYQDHEDIIIAELDATANELDAFAVHGFPTLKYFPAGPGRKVIEYKSTRDLETFSKFLDNGGVLPTEEPPEEPAAPFPEPPANSTMGSKEEL

SEQ ID NO: 854368 - protein, 619 aa, Homo sapiens
ATEPGCGGRGGGLSSSPKPYWSLCCSLGGHEEALVLGLSTARAQGRMEQHACSLLGCQVWRGCSWGCGGLGHSRPHPPDAPWCGHCQALAPEYSKAAAVLAAESMVVTLAKVDGPAQRELAEEFGVTEYPTLKFFRNGNRTHPEEYTGPRDAEGIAEWLRRRVGPSAMRLEDEAAAQALIGGRDLVVIGFFQDLQDEDVATFLALAQDALDMTFGLTDRPRLFQQFGLTKDTVVLFKKVGQAQVWVGVRLQRPLTHLLLSSLMRGGQTSPWTRSLAWTWGICRASWSHTACAWSRSSTARCVAAVPGLGVSQGRVVQGWGCLGWGSCGVMSTLPTVDVCQDLRGQDPQPPAAVCQPDAGCAPGAPSGLWGGSSPLPGAGTGGLGERGSGRVAGASMDSLPQVLFVVVDVAADNEHVLQYFGLKAEAAPTLRLVNLETTKKYAPVDGGPVTAASITAFCHAVLNGQVKPYLLSQEIPPDWDQRPVKTLVGKNFEQVAFDETKNVFVKFYAPWCTHCKEMAPAWEALAEKYQDHEDIIIAELDATANELDAFAVHGFPTLKYFPAGPGRKVIEYKSTRDLETFSKFLDNGGVLPTEEPPEEPAAPFPEPPANSTMGSKEEL

SEQ ID NO: 854369 - protein, 566 aa, Homo sapiens
LLPVLLLLLLRASCPWGQEQGARSPSEEPPEEEIPKEDGILVLSRHTLGLALREHPALLVEFYAPWCGHCQALAPEYSKAAAVLAAESMVVTLAKVDGPAQRELAEEFGVTEYPTLKFFRNGNRTHPEEYTGPRDAEGIAEWLRRRVGPSAMRLEDEAAAQALIGGRDLVVIGFFQDALDMTFGLTDRPRLFQQFGLTKDTVVLFKKFDEGRADFPVDEELGLDLGDLSRFLVTHSMRLVTEFNSQVRRLQCLGWGCPRVESSRDGGAYGWGSCGVMSTLPTVDVCQDLRGQDPQPPAAVCQPDAGCAPGAPSGLWGGSSPLPGAGTGGLGERGSGRVAGASMDSLPQVLFVVVDVAADNEHVLQYFGLKAEAAPTLRLVNLETTKKYAPVDGGPVTAASITAFCHAVLNGQVKPYLLSQEIPPDWDQRPVKTLVGKNFEQVAFDETKNVFVKFYAPWCTHCKEMAPAWEALAEKYQDHEDIIIAELDATANELDAFAVHGFPTLKYFPAGPGRKVIEYKSTRDLETFSKFLDNGGVLPTEEPPEEPAAPFPEPPANSTMGSKEEL

SEQ ID NO: 854370 - protein, 494 aa, Homo sapiens
SAELQARRNFPLPARPAARTVGAGRFLLGSASPSVMEKTCIDALPLTMNSSEKQETVCIFGTGDFGRSLGLKMLQCGYSVVFGSRNPQKTTLLPSGAEVLSYSEAAKKSGIIIIAIHREHYDFLTELTEVLNGKILVDISNNLKINQYPESNAEYLAHLVPGAHVVKAFNTISAWALQSGALDASRQVFVCGNDSKAKQRVMDIVRNLGLTPMDQGSLMAAKEIEKYPLQLFPMWRFPFYLSAVLCVFLFFYCVIRDVIYPYVYEKKDNTFRMAISIPNRIFPITAPYTACFGLPPWCYCCHSTTVPRHKIPSFPDWLDHWMLCRKQLGLVALGFAFLHVLYTLVIPIRYYVRWRLGNLTVTQAILKKENPFSTSSAWLSDSYVALGILGFFLFVLLGITSLPSVSNAVNWREFRFVQSKLGYLTLILCTAHTLVYGGKRFLSPSNLRWYLPAAYVLGLIIPCTVLVIKFVLIMPCVDNTLTRIRQGWERNSKH

SEQ ID NO: 854371 - protein, 318 aa, Homo sapiens
SAELQARRNFPLPARPAARTVGAGRFLLGSASPSVMEKTCIDALPLTMNSSEKQETVCIFGTGDFGRSLGLKMLQCGYSVVFGSRNPQKTTLLPSGAEVLSYSEAAKKSGIIIIAIHREHYDFLTELTEVLNGKILVDISNNLKINQYPESNAEYLAHLVPGAHVVKAFNTISAWALQSGALDASRQAILKKENPFSTSSAWLSDSYVALGILGFFLFVLLGITSLPSVSNAVNWREFRFVQSKLGYLTLILCTAHTLVYGGKRFLSPSNLRWYLPAAYVLGLIIPCTVLVIKFVLIMPCVDNTLTRIRQGWERNSKH

SEQ ID NO: 854372 - protein, 283 aa, Homo sapiens
MEKTCIDALPLTMNSSEKQETVCIFGTGDFGRSLGLKMLQCGYSVVFGSRNPQKTTLLPSGAEVLSYSEAAKKSGIIIIAIHREHYDFLTELTEVLNGKILVDISNNLKINQYPESNAEYLAHLVPGAHVVKAFNTISAWALQSGALDASRQVFVCGNDSKAKQRVMDIVRNLGLTPMDQGSLMAAKEIEKYPLQLFPMWRFPFYLSAVLCVFLFFYCVIRDVIYPYVYEKKDNTFRMAISIPNRIFPITAPYTACFGLPPWCYCCHSTTVPRHKIPSIPRLA

SEQ ID NO: 854373 - protein, 283 aa, Homo sapiens; identical to SEQ ID NO: 854372

SEQ ID NO: 854374 - protein, 283 aa, Homo sapiens; identical to SEQ ID NO: 854372

SEQ ID NO: 854375 - protein, 298 aa, Homo sapiens
CVRALPVFVACSSGWVAHFLAAPGLRGKKRLLTLLLKHRTSCTELFAKLFQPRMAVESGVISTLIPQDPPEQELILVKVEDNFSWDEKFKQNGSTQSCQELFRQQFRKFCYQETPGPREALSRLQELCYQWLMPELHTKEQILELLVLEQFLSILPEELQIWVQQHNPESGEEAVTLLEDLEREFDDPGQQVPASPQGPAVPWKDLTCLRASQESTDIHLQPLKTQLKSWKPCLSPKSELSRPPKASSAIRWECVSPGSFPGDIIAAEATHSTISCFAINTLPATILPSKNVNRKYFS

SEQ ID NO: 854376 - protein, 330 aa, Homo sapiens
CVRALPVFVACSSGWVAHFLAAPGLRGKKRLLTLLLKHRTSCTELFAKLFQPRMAVESGVISTLIPQDPPEQELILVKVEDNFSWDEKFKQNGSTQSCQELFRQQFRKFCYQETPGPREALSRLQELCYQWLMPELHTKEQILELLVLEQFLSILPEELQIWVQQHNPESGEEAVTLLEDLEREFDDPGQQVPASPQGPAVPWKDLTCLRASQESTDIHLQPLKTQLKSWKPCLSPKSDCENSETATKEGISEEKSQGLPQEPSFRGISEQLSRPPKASSAIRWECVSPGSFPGDIIAAEATHSTISCFAINTLPATILPSKNVNRKYFS

SEQ ID NO: 854377 - protein, 195 aa, Homo sapiens
CVRALPVFVACSSGWVAHFLAAPGLRGKKRLLTLLLKHRTSCTELFAKLFQPRMAVESGVISTLIPQDPPEQELILVKVEDNFSWDEKFKQNGSTQSCQELFRQQFRKFCYQETPGPREALSRLQELCYQWLMPELHTKEQILELLVLEQFLSILPEELQIWVQQHNPESGEEAVTLLEDLEREFDDPGQQQLSK

SEQ ID NO: 854378 - protein, 587 aa, Homo sapiens
CVRALPVFVACSSGWVAHFLAAPGLRGKKRLLTLLLKHRTSCTELFAKLFQPRMAVESGVISTLIPQDPPEQELILVKVEDNFSWDEKFKQNGSTQSCQELFRQQFRKFCYQETPGPREALSRLQELCYQWLMPELHTKEQILELLVLEQFLSILPEELQIWVQQHNPESGEEAVTLLEDLEREFDDPGQQVPASPQGPAVPWKDLTCLRASQESTDIHLQPLKTQLKSWKPCLSPKSDCENSETATKEGISEEKSQGLPQEPSFRGISEHESNLVWKQGSATGEKLRSPSQGGSFSQVIFTNKSLGKRDLYDEAERCLILTTDSIMCQKVPPEERPYRCDVCGHSFKQHSSLTQHQRIHTGEKPYKCNQCGKAFSLRSYLIIHQRIHSGEKAYECSECGKAFNQSSALIRHRKIHTGEKACKCNECGKAFSQSSYLIIHQRIHTGEKPYECNECGKTFSQSSKLIRHQRIHTGERPYECNECGKAFRQSSELITHQRIHSGEKPYECSECGKAFSLSSNLIRHQRIHSGEEPYQCNECGKTFKRSSALVQHQRIHSGDEAYICNECGKAFRHRSVLMRHQRVHTIK

SEQ ID NO: 854379 - protein, 539 aa, Homo sapiens
MAVESGVISTLIPQDPPEQELILVKVEDNFSWDEKFKQNGSTQSCQELFRQQFRELCYQWLMPELHTKEQILELLVLEQFLSILPEELQIWVQQHNPESGEEAVTLLEDLEREFDDPGQQGGNRRKVMWEKEFTAGACNGIITVPASPQGPAVPWKDLTCLRASQESTDIHLQPLKTQLKSWKPCLSPKSDCENSETATKEGISEEKSQGLPQEPSFRGISEHESNLVWKQGSATGEKLRSPSQGGSFSQVIFTNKSLGKRDLYDEAERCLILTTDSIMCQKVPPEERPYRCDVCGHSFKQHSSLTQHQRIHTGEKPYKCNQCGKAFSLRSYLIIHQRIHSGEKAYECSECGKAFNQSSALIRHRKIHTGEKACKCNECGKAFSQSSYLIIHQRIHTGEKPYECNECGKTFSQSSKLIRHQRIHTGERPYECNECGKAFRQSSELITHQRIHSGEKPYECSECGKAFSLSSNLIRHQRIHSGEEPYQCNECGKTFKRSSALVQHQRIHSGDEAYICNECGKAFRHRSVLMRHQRVHTIK

SEQ ID NO: 854380 - protein, 330 aa, Homo sapiens; identical to SEQ ID NO: 854376

SEQ ID NO: 854381 - protein, 189 aa, Homo sapiens
MAVESGVISTLIPQDPPEQELILVKVEDNFSWDEKFKQNGSTQSCQELFRQQFRELCYQWLMPELHTKEQILELLVLEQFLSILPEELQIWVQQHNPESGEEAVTLLEDLEREFDDPGQQVPASPQGPAVPWKDLTCLRASQESTDIHLQPLKTQLKSWKPCLSPKSGEEWEIIWKLLTLRPLFLRMQN

SEQ ID NO: 854382 - protein, 209 aa, Homo sapiens
CVRALPVFVACSSGWVAHFLAAPGLRGKKRLLTLLLKHRTSCTELFAKLFQPRMAVESGVISTLIPQDPPEQELILVKVEDNFSWDEKFKQNGSTQSCQELFRQQFRKFCYQETPGPREALSRLQELCYQWLMPELHTKEQILELLVLEQFLSILPEELQIWVQQHNPESGEEAVTLLEDLEREFDDPGQQGGNRRKVMWEKEFTAWSM

SEQ ID NO: 854383 - protein, 260 aa, Homo sapiens
CVRALPVFVACSSGWVAHFLAAPGLRGKKRLLTLLLKHRTSCTELFAKLFQPRMAVESGVISTLIPQDPPEQELILVKVEDNFSWDEKFKQNGSTQSCQELFRQQFRKFCYQETPGPREALSRLQELCYQWLMPELHTKEQILELLVLEQFLSILPEELQIWVQQHNPESGEEAVTLLEDLEREFDDPGQQVPASPQGPAVPWKDLTCLRASQESTDIHLQPLKTQLKSWKPCLSPKSGEEWEIIWKLLTLRPLFLRMQN

SEQ ID NO: 854384 - protein, 571 aa, Homo sapiens
CVRALPVFVACSSGWVAHFLAAPGLRGKKRLLTLLLKHRTSCTELFAKLFQPRMAVESGVISTLIPQDPPEQELILVKVEDNFSWDEKFKQNGSTQSCQELFRQQFRKFCYQETPGPREALSRLQELCYQWLMPELHTKEQILELLVLEQFLSILPEELQIWVQQHNPESGEEAVTLLEDLEREFDDPGQQVPASPQGPAVPWKDLTCLRASQESTDIHLQPLKTQLKSWKPCLSPKSDCENSETATKEGISEENESNLVWKQGSATGEKLRSPSQGGSFSQVIFTNKSLGKRDLYDEAERCLILTTDSIMCQKVPPEERPYRCDVCGHSFKQHSSLTQHQRIHTGEKPYKCNQCGKAFSLRSYLIIHQRIHSGEKAYECSECGKAFNQSSALIRHRKIHTGEKACKCNECGKAFSQSSYLIIHQRIHTGEKPYECNECGKTFSQSSKLIRHQRIHTGERPYECNECGKAFRQSSELITHQRIHSGEKPYECSECGKAFSLSSNLIRHQRIHSGEEPYQCNECGKTFKRSSALVQHQRIHSGDEAYICNECGKAFRHRSVLMRHQRVHTIK

SEQ ID NO: 854385 - protein, 209 aa, Homo sapiens; identical to SEQ ID NO: 854382

SEQ ID NO: 854386 - protein, 241 aa, Homo sapiens
CVRALPVFVACSSGWVAHFLAAPGLRGKKRLLTLLLKHRTSCTELFAKLFQPRMAVESGVISTLIPQDPPEQELILVKVEDNFSWDEKFKQNGSTQSCQELFRQQFRKFCYQETPGPREALSRLQELCYQWLMPELHTKEQILELLVLEQFLSILPEELQIWVQQHNPESGEEAVTLLEDLEREFDDPGQQVPASPQGPAVPWKDLTCLRASQESTDIHLQPLKTQLKSWKPCLSPKSDFS

SEQ ID NO: 854387 - protein, 347 aa, Homo sapiens
CVRALPVFVACSSGWVAHFLAAPGLRGKKRLLTLLLKHRTSCTELFAKLFQPRMAVESGVISTLIPQDPPEQELILVKVEDNFSWDEKFKQNGSTQSCQELFRQQFRKFCYQETPGPREALSRLQELCYQWLMPELHTKEQILELLVLEQFLSILPEELQIWVQQHNPESGEEAVTLLEDLEREFDDPGQQVPASPQGPAVPWKDLTCLRASQESTDIHLQPLKTQLKSWKPCLSPKSDCENSETATKEGISEEKSQGLPQEPSFRGISEQLSRPPKASSAIRWECVSPGSFPGDIIAAEATHSTISCFAINTLPATILPSKNVNRKCKYHLLPMTEETVVAGTQTQ

SEQ ID NO: 854388 - protein, 1912 aa, Homo sapiens
MASGLGSPSPCSAGSEEEDMDALLNNSLPPPHPENEEDPEEDLSETETPKLKKKKKPKKPRDPKIPKSKRQKKERMLLCRQLGDSSGEGPEFVEEEEEVALRSDSEGSDYTPGKKKKKKLGPKKEKKSKSKRKEEEEEEDDDDDSKEPKSSAQLLEDWGMEDIDHVFSEEDYRTLTNYKAFSQFVRPLIAAKNPKIAVSKMMMVLGAKWREFSTNNPFKGSSGASVAAAAAAAVAVVESMVTATEVAPPPPPVEVPIRKAKTKEGKGPNARRKPKGSPRVPDAKKPKPKKVAPLKIKLGGFGSKRKRSSSEDDDLDVESDFDDASINSYSVSDGSTSRSSRSRKKLRTTKKKKKGEEEVTAVDGYETDHQDYCEVCQQGGEIILCDTCPRAYHMVCLDPDMEKAPEGKWSCPHCEKEGIQWEAKEDNSEGEEILEEVGGDLEEEDDHHMEFCRVCKDGGELLCCDTCPSSYHIHCLNPPLPEIPNGEWLCPRCTCPALKGKVQKILIWKWGQPPSPTPVPRPPDADPNTPSPKPLEGRPERQFFVKWQGMSYWHCSWVSELQLELHCQVMFRNYQRKNDMDEPPSGDFGGDEEKSRKRKNKDPKFAEMEERFYRYGIKPEWMMIHRILNHSVDKKGHVHYLIKWRDLPYDQASWESEDVEIQDYDLFKQSYWNHRELMRGEEGRPGKKLKKVKLRKLERPPETPTVDPTVKYERQPEYLDATGGTLHPYQMEGLNWLRFSWAQGTDTILADEMGLGKTVQTAVFLYSLYKEGHSKGPFLVSAPLSTIINWEREFEMWAPDMYVVTYVGDKDSRAIIRENEFSFEDNAIRGGKKASRMKKEASVKFHVLLTSYELITIDMAILGSIDWACLIVDEAHRLKNNQSKFFRVLNGYSLQHKLLLTGTPLQNNLEELFHLLNFLTPERFHNLEGFLEEFADIAKEDQIKKLHDMLGPHMLRRLKADVFKNMPSKTELIVRVELSPMQKKYYKYILTRNFEALNARGGGNQVSLLNVVMDLKKCCNHPYLFPVAAMEAPKMPNGMYDGSALIRASGKLLLLQKMLKNLKEGGHRVLIFSQMTKMLDLLEDFLEHEGYKYERIDGGITGNMRQEAIDRFNAPGAQQFCFLLSTRAGGLGINLATADTVIIYDSDWNPHNDIQAFSRAHRIGQNKKVMIYRFVTRASVEERITQVAKKKMMLTHLVVRPGLGSKTGSMSKQELDDILKFGTEELFKDEATDGGGDNKEGEDSSVIHYDDKAIERLLDRNQDETEDTELQGMNEYLSSFKVAQYVVREEEMGEEEEVEREIIKQEESVDPDYWEKLLRHHYEQQQEDLARNLGKGKRIRKQVNYNDGSQEDRDWQDDQSDNQSDYSVASEEGDEDFDERSEAPRRPSRKGLRNDKDKPLPPLLARVGGNIEVLGFNARQRKAFLNAIMRYGMPPQDAFTTQWLVRDLRGKSEKEFKAYVSLFMRHLCEPGADGAETFADGVPREGLSRQHVLTRIGVMSLIRKKVQEFEHVNGRWSMPELAEVEENKKMSQPGSPSPKTPTPSTPGDTQPNTPAPVPPAEDGIKIEENSLKEEESIEGEKEVKSTAPETAIECTQAPAPASEDEKVVVEPPEGEEKVEKAEVKERTEEPMETEPKGAADVEKVEEKSAIDLTPIVVEDKEEKKEEEEKKEVMLQNGETPKDLNDEKQKKNIKQRFMFNIADGGFTELHSLWQNEERAATVTKKTYEIWHRRHDYWLLAGIINHGYARWQDIQNDPRYAILNEPFKGEMNRGNFLEIKNKFLARRFKLLEQALVIEEQLRRAAYLNMSEDPSHPSMALNTRFAEVECLAESHQHLSKESMAGNKPANAVLHKVLKQLEELLSDMKADVTRLPATIARIPPVAVRLQMSERNILSRLANRAPEPTPQQVAQQQ

SEQ ID NO: 854389 - protein, 246 aa, Homo sapiens
IKGDKKRQSEERAAQHSCTCPTCEDGIKIEENSLKEEESIEGEKEVKSTAPETAIECTQAPAPASEDEKVVVEPPEGEEKVEKAEVKERTEEPMETEPKGAADVEKVEEKSAIDLTPIVVEDKKEEEEKKEVMLQNGETPKDLNDEKQKKNIKQRFMFNNLQMVVLLELTVTFGSMTERAAKVNKEELHEIWTSVAGIDLNWVIARDSLNHGICRGGKTFRIEPDMPILNEAFKGEMTGGMLRDQM

SEQ ID NO: 854390 - protein, 146 aa, Homo sapiens
MLFNLLLQALFLIQGMFVSLFPIHLVGQLVSLLHLSHLEDGIKIEENSLKEEESIEGEKEVKSTAPETAIECTQAPAPASEDEKVVVEPPEGEEKVEKAEVKERTEEPMETEPKGKGIHIFFVCLFVLRQCSAAARLECCGAILAY

SEQ ID NO: 854391 - protein, 1899 aa, Homo sapiens
MASGLGSPSPCSAGSEEEDMDALLNNSLPPPHPENEEDPEEDLSETETPKLKKKKKPKKPRDPKIPKSKRQKKERMLLCRQLGDSSGEGPEFVEEEEEVALRSDSEGSDYTPGKKKKKKLGPKKEKKSKSKRKEEEEEEDDDDDSKEPKSSAQLLEDWGMEDIDHVFSEEDYRTLTNYKAFSQFVRPLIAAKNPKIAVSKMMMVLGAKWREFSTNNPFKGSSGASVAAAAAAAVAVVESMVTATEVAPPPPPVEVPIRKAKTKEGKGPNARRKPKGSPRVPDAKKPKPKKVAPLKIKLGGFGSKRKRSSSEDDDLDVESDFDDASINSYSVSDGSTSRSSRSRKKLRTTKKKKKDHQDYCEVCQQGGEIILCDTCPRAYHMVCLDPDMEKAPEGKWSCPHCEKEGIQWEAKEDNSEGEEILEEVGGDLEEEDDHHMEFCRVCKDGGELLCCDTCPSSYHIHCLNPPLPEIPNGEWLCPRCTCPALKGKVQKILIWKWGQPPSPTPVPRPPDADPNTPSPKPLEGRPERQFFVKWQGMSYWHCSWVSELQLELHCQVMFRNYQRKNDMDEPPSGDFGGDEEKSRKRKNKDPKFAEMEERFYRYGIKPEWMMIHRILNHSVDKKGHVHYLIKWRDLPYDQASWESEDVEIQDYDLFKQSYWNHRELMRGEEGRPGKKLKKVKLRKLERPPETPTVDPTVKYERQPEYLDATGGTLHPYQMEGLNWLRFSWAQGTDTILADEMGLGKTVQTAVFLYSLYKEGHSKGPFLVSAPLSTIINWEREFEMWAPDMYVVTYVGDKDSRAIIRENEFSFEDNAIRGGKKASRMKKEASVKFHVLLTSYELITIDMAILGSIDWACLIVDEAHRLKNNQSKFFRVLNGYSLQHKLLLTGTPLQNNLEELFHLLNFLTPERFHNLEGFLEEFADIAKEDQIKKLHDMLGPHMLRRLKADVFKNMPSKTELIVRVELSPMQKKYYKYILTRNFEALNARGGGNQVSLLNVVMDLKKCCNHPYLFPVAAMEAPKMPNGMYDGSALIRASGKLLLLQKMLKNLKEGGHRVLIFSQMTKMLDLLEDFLEHEGYKYERIDGGITGNMRQEAIDRFNAPGAQQFCFLLSTRAGGLGINLATADTVIIYDSDWNPHNDIQAFSRAHRIGQNKKVMIYRFVTRASVEERITQVAKKKMMLTHLVVRPGLGSKTGSMSKQELDDILKFGTEELFKDEATDGGGDNKEGEDSSVIHYDDKAIERLLDRNQDETEDTELQGMNEYLSSFKVAQYVVREEEMGEEEEVEREIIKQEESVDPDYWEKLLRHHYEQQQEDLARNLGKGKRIRKQVNYNDGSQEDRDWQDDQSDNQSDYSVASEEGDEDFDERSEAPRRPSRKGLRNDKDKPLPPLLARVGGNIEVLGFNARQRKAFLNAIMRYGMPPQDAFTTQWLVRDLRGKSEKEFKAYVSLFMRHLCEPGADGAETFADGVPREGLSRQHVLTRIGVMSLIRKKVQEFEHVNGRWSMPELAEVEENKKMSQPGSPSPKTPTPSTPGDTQPNTPAPVPPAEDGIKIEENSLKEEESIEGEKEVKSTAPETAIECTQAPAPASEDEKVVVEPPEGEEKVEKAEVKERTEEPMETEPKGAADVEKVEEKSAIDLTPIVVEDKEEKKEEEEKKEVMLQNGETPKDLNDEKQKKNIKQRFMFNIADGGFTELHSLWQNEERAATVTKKTYEIWHRRHDYWLLAGIINHGYARWQDIQNDPRYAILNEPFKGEMNRGNFLEIKNKFLARRFKLLEQALVIEEQLRRAAYLNMSEDPSHPSMALNTRFAEVECLAESHQHLSKESMAGNKPANAVLHKVLKQLEELLSDMKADVTRLPATIARIPPVAVRLQMSERNILSRLANRAPEPTPQQVAQQQ

SEQ ID NO: 854392 - protein, 1610 aa, Homo sapiens
MSFSSCQSEDDDLDVESDFDDASINSYSVSDGSTSRSSRSRKKLRTTKKKKKGEEEVTAVDGYETDHQDYCEVCQQGGEIILCDTCPRAYHMVCLDPDMEKAPEGKWSCPHCEKEGIQWEAKEDNSEGEEILEEVGGDLEEEDDHHMEFCRVCKDGGELLCCDTCPSSYHIHCLNPPLPEIPNGEWLCPRCTCPALKGKVQKILIWKWGQPPSPTPVPRPPDADPNTPSPKPLEGRPERQFFVKWQGMSYWHCSWVSELQLELHCQVMFRNYQRKNDMDEPPSGDFGGDEEKSRKRKNKDPKFAEMEERFYRYGIKPEWMMIHRILNHSVDKKGHVHYLIKWRDLPYDQASWESEDVEIQDYDLFKQSYWNHRELMRGEEGRPGKKLKKVKLRKLERPPETPTVDPTVKYERQPEYLDATGGTLHPYQMEGLNWLRFSWAQGTDTILADEMGLGKTVQTAVFLYSLYKEGHSKGPFLVSAPLSTIINWEREFEMWAPDMYVVTYVGDKDSRAIIRENEFSFEDNAIRGGKKASRMKKEASVKFHVLLTSYELITIDMAILGSIDWACLIVDEAHRLKNNQSKFFRVLNGYSLQHKLLLTGTPLQNNLEELFHLLNFLTPERFHNLEGFLEEFADIAKEDQIKKLHDMLGPHMLRRLKADVFKNMPSKTELIVRVELSPMQKKYYKYILTRNFEALNARGGGNQVSLLNVVMDLKKCCNHPYLFPVAAMEAPKMPNGMYDGSALIRASGKLLLLQKMLKNLKEGGHRVLIFSQMTKMLDLLEDFLEHEGYKYERIDGGITGNMRQEAIDRFNAPGAQQFCFLLSTRAGGLGINLATADTVIIYDSDWNPHNDIQAFSRAHRIGQNKKVMIYRFVTRASVEERITQVAKKKMMLTHLVVRPGLGSKTGSMSKQELDDILKFGTEELFKDEATDGGGDNKEGEDSSVIHYDDKAIERLLDRNQDETEDTELQGMNEYLSSFKVAQYVVREEEMGEEEEVEREIIKQEESVDPDYWEKLLRHHYEQQQEDLARNLGKGKRIRKQVNYNDGSQEDRDWQDDQSDNQSDYSVASEEGDEDFDERSEAPRRPSRKGLRNDKDKPLPPLLARVGGNIEVLGFNARQRKAFLNAIMRYGMPPQDAFTTQWLVRDLRGKSEKEFKAYVSLFMRHLCEPGADGAETFADGVPREGLSRQHVLTRIGVMSLIRKKVQEFEHVNGRWSMPELAEVEENKKMSQPGSPSPKTPTPSTPGDTQPNTPAPVPPAEDGIKIEENSLKEEESIEGEKEVKSTAPETAIECTQAPAPASEDEKVVVEPPEGEEKVEKAEVKERTEEPMETEPKGAADVEKVEEKSAIDLTPIVVEDKEEKKEEEEKKEVMLQNGETPKDLNDEKQKKNIKQRFMFNIADGGFTELHSLWQNEERAATVTKKTYEIWHRRHDYWLLAGIINHGYARWQDIQNDPRYAILNEPFKGEMNRGNFLEIKNKFLARRFKLLEQALVIEEQLRRAAYLNMSEDPSHPSMALNTRFAEVECLAESHQHLSKESMAGNKPANAVLHKVLKQLEELLSDMKADVTRLPATIARIPPVAVRLQMSERNILSRLANRAPEPTPQQVAQQQ

SEQ ID NO: 854393 - protein, 1566 aa, Homo sapiens
TARYEAGLGEEEVTAVDGYETDHQDYCEVCQQGGEIILCDTCPRAYHMVCLDPDMEKAPEGKWSCPHCEKEGIQWEAKEDNSEGEEILEEVGGDLEEEDDHHMEFCRVCKDGGELLCCDTCPSSYHIHCLNPPLPEIPNGEWLCPRCTCPALKGKVQKILIWKWGQPPSPTPVPRPPDADPNTPSPKPLEGRPERQFFVKWQGMSYWHCSWVSELQLELHCQVMFRNYQRKNDMDEPPSGDFGGDEEKSRKRKNKDPKFAEMEERFYRYGIKPEWMMIHRILNHSVDKKGHVHYLIKWRDLPYDQASWESEDVEIQDYDLFKQSYWNHRELMRGEEGRPGKKLKKVKLRKLERPPETPTVDPTVKYERQPEYLDATGGTLHPYQMEGLNWLRFSWAQGTDTILADEMGLGKTVQTAVFLYSLYKEGHSKGPFLVSAPLSTIINWEREFEMWAPDMYVVTYVGDKDSRAIIRENEFSFEDNAIRGGKKASRMKKEASVKFHVLLTSYELITIDMAILGSIDWACLIVDEAHRLKNNQSKFFRVLNGYSLQHKLLLTGTPLQNNLEELFHLLNFLTPERFHNLEGFLEEFADIAKEDQIKKLHDMLGPHMLRRLKADVFKNMPSKTELIVRVELSPMQKKYYKYILTRNFEALNARGGGNQVSLLNVVMDLKKCCNHPYLFPVAAMEAPKMPNGMYDGSALIRASGKLLLLQKMLKNLKEGGHRVLIFSQMTKMLDLLEDFLEHEGYKYERIDGGITGNMRQEAIDRFNAPGAQQFCFLLSTRAGGLGINLATADTVIIYDSDWNPHNDIQAFSRAHRIGQNKKVMIYRFVTRASVEERITQVAKKKMMLTHLVVRPGLGSKTGSMSKQELDDILKFGTEELFKDEATDGGGDNKEGEDSSVIHYDDKAIERLLDRNQDETEDTELQGMNEYLSSFKVAQYVVREEEMGEEEEVEREIIKQEESVDPDYWEKLLRHHYEQQQEDLARNLGKGKRIRKQVNYNDGSQEDRDWQDDQSDNQSDYSVASEEGDEDFDERSEAPRRPSRKGLRNDKDKPLPPLLARVGGNIEVLGFNARQRKAFLNAIMRYGMPPQDAFTTQWLVRDLRGKSEKEFKAYVSLFMRHLCEPGADGAETFADGVPREGLSRQHVLTRIGVMSLIRKKVQEFEHVNGRWSMPELAEVEENKKMSQPGSPSPKTPTPSTPGDTQPNTPAPVPPAEDGIKIEENSLKEEESIEGEKEVKSTAPETAIECTQAPAPASEDEKVVVEPPEGEEKVEKAEVKERTEEPMETEPKGAADVEKVEEKSAIDLTPIVVEDKEEKKEEEEKKEVMLQNGETPKDLNDEKQKKNIKQRFMFNIADGGFTELHSLWQNEERAATVTKKTYEIWHRRHDYWLLAGIINHGYARWQDIQNDPRYAILNEPFKGEMNRGNFLEIKNKFLARRFKLLEQALVIEEQLRRAAYLNMSEDPSHPSMALNTRFAEVECLAESHQHLSKESMAGNKPANAVLHKVLKQLEELLSDMKADVTRLPATIARIPPVAVRLQMSERNILSRLANRAPEPTPQQVAQQQ

SEQ ID NO: 854394 - protein, 1707 aa, Homo sapiens
MASGLGSPSPCSAGSEEEDMDALLNNSLPPPHPENEEDPEEDLSETETPKLKKKKKPKKPRDPKIPKSKRQKKERMLLCRQLGDSSGEGPEFVEEEEEVALRSDSEGSDYTPGKKKKKKLGPKKEKKSKSKRKEEEEEEDDDDDSKEPKSSAQLLEDWGMEDIDHVFSEEDYRTLTNYKAFSQFVRPLIAAKNPKIAVSKMMMVLGAKWREFSTNNPFKGSSGASVAAAAAAAVAVVESMVTATEVAPPPPPVEVPIRKAKTKEGKGPNARRKPKGSPRVPDAKKPKPKKVAPLKIKLGGFGSKRKRSSSEDDDLDVESDFDDASINSYSVSDGSTSRSSRSRKKLRTTKKKKKGEEEVTAVDGYETDHQDYCEVCQQGGEIILCDTCPRAYHMVCLDPDMEKAPEGKWSCPHCEKEGIQWEAKEDNSEGEEILEEVGGDLEEEDDHHMEFCRVCKDGGELLCCDTCPSSYHIHCLNPPLPEIPNGEWLCPRCTCPALKGKVQKILIWKWGQPPSPTPVPRPPDADPNTPSPKPLEGRPERQFFVKWQGMSYWHCSWVSELQLELHCQVMFRNYQRKNDMDEPPSGDFGGDEEKSRKRKNKDPKFAEMEERFYRYGIKPEWMMIHRILNHSVDKKGHVHYLIKWRDLPYDQASWESEDVEIQDYDLFKQSYWNHRELMRGEEGRPGKKLKKVKLRKLERPPETPTVDPTVKYERQPEYLDATGGTLHPYQMEGLNWLRFSWAQGTDTILADEMGLGKTVQTAVFLYSLYKEGHSKGPFLVSAPLSTIINWEREFEMWAPDMYVVTYVGDKDSRAIIRENEFSFEDNAIRGGKKASRMKKEASVKFHVLLTSYELITIDMAILGSIDWACLIVDEAHRLKNNQSKFFRVLNGYSLQHKLLLTGTPLQNNLEELFHLLNFLTPERFHNLEGFLEEFADIAKEDQIKKLHDMLGPHMLRRLKADVFKNMPSKTELIVRVELSPMQKKYYKYILTRNFEALNARGGGNQVSLLNVVMDLKKCCNHPYLFPVAAMEAPKMPNGMYDGSALIRASGKLLLLQKMLKNLKEGGHRVLIFSQMTKMLDLLEDFLEHEGYKYERIDGGITGNMRQEAIDRFNAPGAQQFCFLLSTRAGGLGINLATADTVIIYDSDWNPHNDIQAFSRAHRIGQNKKVMIYRFVTRASVEERITQVAKKKMMLTHLVVRPGLGSKTGSMSKQELDDILKFGTEELFKDEATDGGGDNKEGEDSSVIHYDDKAIERLLDRNQDETEDTELQGMNEYLSSFKVAQYVVREEEMGEEEEVEREIIKQEESVDPDYWEKLLRHHYEQQQEDLARNLGKGKRIRKQVNYNDGSQEDRDWQDDQSDNQSDYSVASEEGDEDFDERSEAPRRPSRKGLRNDKDKPLPPLLARVGGNIEVLGFNARQRKAFLNAIMRYGMPPQDAFTTQWLVRDLRGKSEKEFKAYVSLFMRHLCEPGADGAETFADGVPREGLSRQHVLTRIGVMSLIRKKVQEFEHVNGRWSMPELAEVEENKKMSQPGSPSPKTPTPSTPGDTQPNTPAPVPPAEDGIKIEENSLKEEESIEGEKEVKSTAPETAIECTQAPAPASEDEKVVVEPPEGEEKVEKAEVKERTEEPMETEPKGAADVEKVEEKSAIDLTPIVVEDKEEKKEEEEKKEVMLQNGETPKDLNDEKQKKNIKQRFMFNIADGGFTE

SEQ ID NO: 854395 - protein, 1912 aa, Homo sapiens
MASGLGSPSPCSAGSEEEDMDALLNNSLPPPHPENEEDPEEDLSETETPKLKKKKKPKKPRDPKIPKSKRQKKERMLLCRQLGDSSGEGPEFVEEEEEVALRSDSEGSDYTPGKKKKKKLGPKKEKKSKSKRKEEEEEEDDDDDSKEPKSSAQLLEDWGMEDIDHVFSEEDYRTLTNYKAFSQFVRPLIAAKNPKIAVSKMMMVLGAKWREFSTNNPFKGSSGASVAAAAAAAVAVVESMVTATEVAPPPPPVEVPIRKAKTKEGKGPNARRKPKGSPRVPDAKKPKPKKVAPLKIKLGGFGSKRKRSSSEDDDLDVESDFDDASINSYSVSDGSTSRSSRSRKKLRTTKKKKKGEEEVTAVDGYETDHQDYCEVCQQGGEIILCDTCPRAYHMVCLDPDMEKAPEGKWSCPHCEKEGIQWEAKEDNSEGEEILEEVGGDLEEEDDHHMEFCRVCKDGGELLCCDTCPSSYHIHCLNPPLPEIPNGEWLCPRCTCPALKGKVQKILIWKWGQPPSPTPVPRPPDADPNTPSPKPLEGRPERQFFVKWQGMSYWHCSWVSELQLELHCQVMFRNYQRKNDMDEPPSGDFGGDEEKSRKRKNKDPKFAEMEERFYRYGIKPEWMMIHRILNHSVDKKGHVHYLIKWRDLPYDQASWESEDVEIQDYDLFKQSYWNHRELMRGEEGRPGKKLKKVKLRKLERPPETPTVDPTVKYERQPEYLDATGGTLHPYQMEGLNWLRFSWAQGTDTILADEMGLGKTVQTAVFLYSLYKEGHSKGPFLVSAPLSTIINWEREFEMWAPDMYVVTYVGDKDSRAIIRENEFSFEDNAIRGGKKASRMKKEASVKFHVLLTSYELITIDMAILGSIDWACLIVDEAHRLKNNQSKFFRVLNGYSLQHKLLLTGTPLQNNLEELFHLLNFLTPERFHNLEGFLEEFADIAKEDQIKKLHDMLGPHMLRRLKADVFKNMPSKTELIVRVELSPMQKKYYKYILTRNFEALNARGGGNQVSLLNVVMDLKKCCNHPYLFPVAAMEAPKMPNGMYDGSALIRASGKLLLLQKMLKNLKEGGHRVLIFSQMTKMLDLLEDFLEHEGYKYERIDGGITGNMRQEAIDRFNAPGAQQFCFLLSTRAGGLGINLATADTVIIYDSDWNPHNDIQAFSRAHRIGQNKKVMIYRFVTRASVEERITQVAKKKMMLTHLVVRPGLGSKTGSMSKQELDDILKFGTEELFKDEATDGGGDNKEGEDSSVIHYDDKAIERLLDRNQDETEDTELQGMNEYLSSFKVAQYVVREEEMGEEEEVEREIIKQEESVDPDYWEKLLRHHYEQQQEDLARNLGKGKRIRKQVNYNDGSQEDRDWQDDQSDNQSDYSVASEEGDEDFDERSEAPRRPSRKGLRNDKDKPLPPLLARVGGNIEVLGFNARQRKAFLNAIMRYGMPPQDAFTTQWLVRDLRGKSEKEFKAYVSLFMRHLCEPGADGAETFADGVPREGLSRQHVLTRIGVMSLIRKKVQEFEHVNGRWSMPELAEVEENKKMSQPGSPSPKTPTPSTPGDTQAQHSCTCPTCEDGIKIEENSLKEEESIEGEKEVKSTAPETAIECTQAPAPASEDEKVVVEPPEGEEKVEKAEVKERTEEPMETEPKGAADVEKVEEKSAIDLTPIVVEDKEEKKEEEEKKEVMLQNGETPKDLNDEKQKKNIKQRFMFNIADGGFTELHSLWQNEERAATVTKKTYEIWHRRHDYWLLAGIINHGYARWQDIQNDPRYAILNEPFKGEMNRGNFLEIKNKFLARRFKLLEQALVIEEQLRRAAYLNMSEDPSHPSMALNTRFAEVECLAESHQHLSKESMAGNKPANAVLHKVLKQLEELLSDMKADVTRLPATIARIPPVAVRLQMSERNILSRLANRAPEPTPQQVAQQQ

SEQ ID NO: 854396 - protein, 1912 aa, Homo sapiens; identical to SEQ ID NO: 854388

SEQ ID NO: 854397 - protein, 706 aa, Homo sapiens
DNKEGEDSSVIHYDDKAIELFKDEATDGGGDNKEGEDSSVIHYDDKAIERLLDRNQDETEDTELQGMNEYLSSFKVAQYVVREEEMGEEEEVEREIIKQEESVDPDYWEKLLRHHYEQQQEDLARNLGKGKRIRKQVNYNDGSQEDRDWQDDQSDNQSDYSVASEEGDEDFDERSEAPRRPSRKGLRNDKDKPLPPLLARVGGNIEVLGFNARQRKAFLNAIMRYGMPPQDAFTTQWLVRDLRGKSEKEFKAYVSLFMRHLCEPGADGAETFADGVPREGLSRQHVLTRIGVMSLIRKKVQEFEHVNGRWSMPELAEVEENKKMSQPGSPSPKTPTPSTPGDTQPNTPAPVPPAEDGIKIEENSLKEEESIEGEKEVKSTAPETAIECTQAPAPASEDEKVVVEPPEGEEKVEKAEVKERTEEPMETEPKGAADVEKVEEKSAIDLTPIVVEDKEEKKEEEEKKEVMLQNGETPKDLNDEKQKKNIKQRFMFNIADGGFTELHSLWQNEERAATVTKKTYEIWHRRHDYWLLAGIINHGYARWQDIQNDPRYAILNEPFKGEMNRGNFLEIKNKFLARRFKLLEQALVIEEQLRRAAYLNMSEDPSHPSMALNTRFAEVECLAESHQHLSKESMAGNKPANAVLHKVLKQLEELLSDMKADVTRLPATIARIPPVAVRLQMSERNILSRLANRAPEPTPQQVAQQQ

SEQ ID NO: 854398 - protein, 1912 aa, Homo sapiens; identical to SEQ ID NO: 854388

SEQ ID NO: 854399 - protein, 1469 aa, Homo sapiens
MASGLGSPSPCSAGSEEEDMDALLNNSLPPPHPENEEDPEEDLSETETPKLKKKKKPKKPRDPKIPKSKRQKKERMLLCRQLGDSSGEGPEFVEEEEEVALRSDSEGSDYTPGKKKKKKLGPKKEKKSKSKRKEEEEEEDDDDDSKEPKSSAQLLEDWGMEDIDHVFSEEDYRTLTNYKAFSQFVRPLIAAKNPKIAVSKMMMVLGAKWREFSTNNPFKGSSGASVAAAAAAAVAVVESMVTATEVAPPPPPVEVPIRKAKTKEGKGPNARRKPKGSPRVPDAKKPKPKKVAPLKIKLGGFGSKRKRSSSEDDDLDVESDFDDASINSYSVSDGSTSRSSRSRKKLRTTKKKKKGEEEVTAVDGYETDHQDYCEVCQQGGEIILCDTCPRAYHMVCLDPDMEKAPEGKWSCPHCEKEGIQWEAKEDNSEGEEILEEVGGDLEEEDDHHMEFCRVCKDGGELLCCDTCPSSYHIHCLNPPLPEIPNGEWLCPRCTCPALKGKVQKILIWKWGQPPSPTPVPRPPDADPNTPSPKPLEGRPERQFFVKWQGMSYWHCSWVSELQLELHCQVMFRNYQRKNDMDEPPSGDFGGDEEKSRKRKNKDPKFAEMEERFYRYGIKPEWMMIHRILNHSVDKKGHVHYLIKWRDLPYDQASWESEDVEIQDYDLFKQSYWNHRELMRGEEGRPGKKLKKVKLRKLERPPETPTVDPTVKYERQPEYLDATGGTLHPYQMEGLNWLRFSWAQGTDTILADEMGLGKTVQTAVFLYSLYKEGHSKGPFLVSAPLSTIINWEREFEMWAPDMYVVTYVGDKDSRAIIRENEFSFEDNAIRGGKKASRMKKEASVKFHVLLTSYELITIDMAILGSIDWACLIVDEAHRLKNNQSKFFRVLNGYSLQHKLLLTGTPLQNNLEELFHLLNFLTPERFHNLEGFLEEFADIAKEDQIKKLHDMLGPHMLRRLKADVFKNMPSKTELIVRVELSPMQKKYYKYILTRNFEALNARGGGNQVSLLNVVMDLKKCCNHPYLFPVAAMEAPKMPNGMYDGSALIRASGKLLLLQKMLKNLKEGGHRVLIFSQMTKMLDLLEDFLEHEGYKYERIDGGITGNMRQEAIDRFNAPGAQQFCFLLSTRAGGLGINLATADTVIIYDSDWNPHNDIQAFSRAHRIGQNKKVMIYRFVTRASVEERTEEPMETEPKGAADVEKVEEKSAIDLTPIVVEDKEEKKEEEEKKEVMLQNGETPKDLNDEKQKKNIKQRFMFNIADGGFTELHSLWQNEERAATVTKKTYEIWHRRHDYWLLAGIINHGYARWQDIQNDPRYAILNEPFKGEMNRGNFLEIKNKFLARRFKLLEQALVIEEQLRRAAYLNMSEDPSHPSMALNTRFAEVECLAESHQHLSKESMAGNKPANAVLHKVLKQLEELLSDMKADVTRLPATIARIPPVAVRLQMSERNILSRLANRAPEPTPQQVAQQQ

SEQ ID NO: 854400 - protein, 1804 aa, Homo sapiens
MASGLGSPSPCSAGSEEEDMDALLNNSLPPPHPENEEDPEEDLSETETPKLKKKKKPKKPRDPKIPKSKRQKKERMLLCRQLGDSSGEGPEFVEEEEEVALRSDSEGSDYTPGKKKKKKLGPKKEKKSKSKRKEEEEEEDDDDDSKEPKSSAQLLEDWGMEDIDHVFSEEDYRTLTNYKAFSQFVRPLIAAKNPKIAVSKMMMVLGAKWREFSTNNPFKGSSGASVAAAAAAAVAVVESMVTATEVAPPPPPVEVPIRKAKTKEGKGPNARRKPKGSPRVPDAKKPKPKKVAPLKIKLGGFGSKRKRSSSEDDDLDVESDFDDASINSYSVSDGSTSRSSRSRKKLRTTKKKKKGEEEVTAVDGYETDHQDYCEVCQQGGEIILCDTCPRAYHMVCLDPDMEKAPEGKWSCPHCEKEGIQWEAKEDNSEGEEILEEVGGDLEEEDDHHMEFCRVCKDGGELLCCDTCPSSYHIHCLNPPLPEIPNGEWLCPRCTCPALKGKVQKILIWKWGQPPSPTPVPRPPDADPNTPSPKPLEGRPERQFFVKWQGMSYWHCSWVSELQLELHCQVMFRNYQRKNDMDEPPSGDFGGDEEKSRKRKNKDPKFAEMEERFYRYGIKPEWMMIHRILNHSVDKKGHVHYLIKWRDLPYDQASWESEDVEIQDYDLFKQSYWNHRELMRGEEGRPGKKLKKVKLRKLERPPETPTVDPTVKYERQPEYLDATGGTLHPYQMEGLNWLRFSWAQGTDTILADEMGLGKTVQTAVFLYSLYKEGHSKGPFLVSAPLSTIINWEREFEMWAPDMYVVTYVGDKDSRAIIRENEFSFEDNAIRGGKKASRMKKEASVKFHVLLTSYELITIDMAILGSIDWACLIVDEAHRLKNNQSKFFRVLNGYSLQHKLLLTGTPLQNNLEELFHLLNFLTPERFHNLEGFLEEFADIAKEDQIKKLHDMLGPHMLRRLKADVFKNMPSKTELIVRVELSPMQKKYYKYILTRNFEALNARGGGNQVSLLNVVMDLKKCCNHPYLFPVAAMEAPKMPNGMYDGSALIRASGKLLLLQKMLKNLKEGGHRVLIFSQMTKMLDLLEDFLEHEGYKYERIDGGITGNMRQEAIDRFNAPGAQQFCFLLSTRAGGLGINLATADTVIIYDSDWNPHNDIQAFSRAHRIGQNKKVMIYRFVTRASVEERITQVAKKKMMLTHLVVRPGLGSKTGSMSKQELDDILKFGTEELFKDEATDGGGDNKEGEDSSVIHYDDKAIERLLDRNQDETEDTELQGMNEYLSSFKVAQYVVREEEMGEEEEVEREIIKQEESVDPDYWEKLLRHHYEQQQEDLARNLGKGKRIRKQVNYNDGSQEDRDWQDDQSDNQSDYSVASEEGDEDFDERSEAPRRPSRKGLRNDKDKPLPPLLARVGGNIEVLGFNARQRKAFLNAIMRYGMPPQDAFTTQWLVRDLRGKSEKEFKAYVSLFMRHLCEPGADGAETFADGVPREGLSRQHVLTRIGVMSLIRKKVQEFEHVNGRWSMPELAEVEENKKMSQPGSPSPKTPTPSTPGDTQPNTPAPVPPAEDGIKIEENSLKEEESIEGEKEVKSTAPETAIECTQAPAPASEDEKVVVEPPEGEEKVEKAEVKERTEEPMETEPKGAADVEKVEEKSAIDLTPIVVEDKEEKKEEEEKKEVMLQNGETPKDLNDEKQKKNIKQRFMFNIADGGFTELHSLWQNEERAATVTKKTYEIWHRRHDYWLLAGIINHGYARWQDIQNDPRYAILNEPFKGEMNRGNFLEIKNKFLARRFKVSGWGGIYCLSDKLESA

SEQ ID NO: 854401 - protein, 485 aa, Homo sapiens
KKKYDQQDHHPRKTPTPSTPGDTQPNTPAPVPPAEDGIKIEENSLKQEETFADGVPREGLSRQHVLTRIGVMSLIRKKVQEFEHVNGRWSMPELAEVEENKKMSQPGSPSPKTPTPSTPGDTQPNTPAPVPPAEDGIKIEENSLKEEESIEGEKEVKSTAPETAIECTQAPAPASEDEKVVVEPPEGEEKVEKAEVKERTEEPMETEPKGAADVEKVEEKSAIDLTPIVVEDKEEKKEEEEKKEVMLQNGETPKDLNDEKQKKNIKQRFMFNIADGGFTELHSLWQNEERAATVTKKTYEIWHRRHDYWLLAGIINHGYARWQDIQNDPRYAILNEPFKGEMNRGNFLEIKNKFLARRFKLLEQALVIEEQLRRAAYLNMSEDPSHPSMALNTRFAEVECLAESHQHLSKESMAGNKPANAVLHKVLKQLEELLSDMKADVTRLPATIARIPPVAVRLQMSERNILSRLANRAPEPTPQQVAQQQ

SEQ ID NO: 854402 - protein, 1649 aa, Homo sapiens
MASGLGSPSPCSAGSEEEDMDALLNNSLPPPHPENEEDPEEDLSETETPKLKKKKKPKKPRDPKIPKSKRQKKERMLLCRQLGDSSGEGPEFVEEEEEVALRSDSEGSDYTPGKKKKKKLGPKKEKKSKSKRKEEEEEEDDDDDSKEPKSSAQLLEDWGMEDIDHVFSEEDYRTLTNYKAFSQFVRPLIAAKNPKIAVSKMMMVLGAKWREFSTNNPFKGSSGASVAAAAAAAVAVVESMVTATEVAPPPPPVEVPIRKAKTKEGKGPNARRKPKGSPRVPDAKKPKPKKVAPLKIKLGGFGSKRKRSSSEDDDLDVESDFDDASINSYSVSDGSTSRSSRSRKKLRTTKKKKKGEEEVTAVDGYETDHQDYCEVCQQGGEIILCDTCPRAYHMVCLDPDMEKAPEGKWSCPHCEKEGIQWEAKEDNSEGEEILEEVGGDLEEEDDHHMEFCRVCKDGGELLCCDTCPSSYHIHCLNPPLPEIPNGEWLCPRCTCPALKGKVQKILIWKWGQPPSPTPVPRPPDADPNTPSPKPLEGRPERQFFVKWQGMSYWHCSWVSELQLELHCQVMFRNYQRKNDMDEPPSGDFGGDEEKSRKRKNKDPKFAEMEERFYRYGIKPEWMMIHRILNHSVDKKGHVHYLIKWRDLPYDQASWESEDVEIQDYDLFKQSYWNHRELMRGEEGRPGKKLKKVKLRKLERPPETPTVDPTVKYERQPEYLDATGGTLHPYQMEGLNWLRFSWAQGTDTILADEMGLGKTVQTAVFLYSLYKEGHSKGPFLVSAPLSTIINWEREFEMWAPDMYVVTYVGDKDSRAIIRENEFSFEDNAIRGGKKASRMKKEASVKFHVLLTSYELITIDMAILGSIDWACLIVDEAHRLKNNQSKFFRVLNGYSLQHKLLLTGTPLQNNLEELFHLLNFLTPERFHNLEGFLEEFADIAKEDQIKKLHDMLGPHMLRRLKADVFKNMPSKTELIVRVELSPMQKKYYKYILTRNFEALNARGGGNQVSLLNVVMDLKKCCNHPYLFPVAAMEAPKMPNGMYDGSALIRASGKLLLLQKMLKNLKEGGHRVLIFSQMTKMLDLLEDFLEHEGYKYERIDGGITGNMRQEAIDRFNAPGAQQFCFLLSTRAGGLGINLATADTVIIYDSDWNPHNDIQAFSRAHRIGQNKKVMIYRFVTRASVEERITQVAKKKMMLTHLVVRPGLGSKTGSMSKQELDDILKFGTEELFKDEATDGGGDNKEGEDSSVIHYDDKAIERLLDRNQDETEDTELQGMNEYLSSFKVAQYVVREEEMGEEEEVEREIIKQEESVDPDYWEKLLRHHYEQQQEDLARNLGKGKRIRKQVNYNDGSQEDRDWQDDQSDNQSDYSVASEEGDEDFDERSEAPRRPSRKGLRNDKDKPLPPLLARVGGNIEVLGFNARQRKAFLNAIMRYGMPPQDAFTTQWLVRDLRGKSEKEFKAYVSLFMRHLCEPGADGAETFADGVPREGLSRQHVLTRIGVMSLIRKKVQEFEHVNGRWSMPELAEVEENKKMSQPGSPSPKTPTPSTPGDTQPNTPAPVPPAEDGIKIEENSLKEEESIEGEKEVKSTAPETAIECTQAPAPASEDEKVVVEPPEGEEKVEKAEVKERTEEPMETEPKGAADVEKVEEKSA

SEQ ID NO: 854403 - protein, 1534 aa, Homo sapiens
MASGLGSPSPCSAGSEEEDMDALLNNSLPPPHPENEEDPEEDLSETETPKLKKKKKPKKPRDPKIPKSKRQKKERMLLCRQLGDSSGEGPEFVEEEEEVALRSDSEGSDYTPGKKKKKKLGPKKEKKSKSKRKEEEEEEDDDDDSKEPKSSAQLLEDWGMEDIDHVFSEEDYRTLTNYKAFSQFVRPLIAAKNPKIAVSKMMMVLGAKWREFSTNNPFKGSSGASVAAAAAAAVAVVESMVTATEVAPPPPPVEVPIRKAKTKEGKGPNARRKPKGSPRVPDAKKPKPKKVAPLKIKLGGFGSKRKRSSSEDDDLDVESDFDDASINSYSVSDGSTSRSSRSRKKLRTTKKKKKGEEEVTAVDGYETDHQDYCEVCQQGGEIILCDTCPRAYHMVCLDPDMEKAPEGKWSCPHCEKEGIQWEAKEDNSEGEEILEEVGGDLEEEDDHHMEFCRVCKDGGELLCCDTCPSSYHIHCLNPPLPEIPNGEWLCPRCTCPALKGKVQKILIWKWGQPPSPTPVPRPPDADPNTPSPKPLEGRPERQFFVKWQGMSYWHCSWVSELQLELHCQVMFRNYQRKNDMDEPPSGDFGGDEEKSRKRKNKDPKFAEMEERFYRYGIKPEWMMIHRILNHSVDKKGHVHYLIKWRDLPYDQASWESEDVEIQDYDLFKQSYWNHRELMRGEEGRPGKKLKKVKLRKLERPPETPTVDPTVKYERQPEYLDATGGTLHPYQMEGLNWLRFSWAQGTDTILADEMGLGKTVQTAVFLYSLYKEGHSKGPFLVSAPLSTIINWEREFEMWAPDMYVVTYVGDKDSRAIIRENEFSFEDNAIRGGKKASRMKKEASVKFHVLLTSYELITIDMAILGSIDWACLIVDEAHRLKNNQSKFFRVLNGYSLQHKLLLTGTPLQNNLEELFHLLNFLTPERFHNLEGFLEEFADIAKEDQIKKLHDMLGPHMLRRLKADVFKNMPSKTELIVRVELSPMQKKYYKYILTRNFEALNARGGGNQVSLLNVVMDLKKCCNHPYLFPVAAMEAPKMPNGMYDGSALIRASGKLLLLQKMLKNLKEGGHRVLIFSQMTKMLDLLEDFLEHEGYKYERIDGGITGNMRQEAIDRFNAPGAQQFCFLLSTRAGGLGINLATADTVIIYDSDWNPHNDIQAFSRAHRIGQNKKVMIYRFVTRASVEERITQVAKKKMMLTHLVVRPGLGSKTGSMSKQELDDILKFGTEELFKDEATDGGGDNKEGEDSSVIHYDDKAIERLLDRNQDETEDTELQGMNEYLSSFKVAQYVVREEEMGEEEEVEREIIKQEESVDPDYWEKLLRHHYEQQQEDLARNLGKGKRIRKQVNYNDGSQEDRDWQDDQSDNQSDYSVASEEGDEDFDERSEAPRRPSRKGLRNDKDKPLPPLLARVGGNIEVLGFNARQRKAFLNAIMRYGMPPQDAFTTQWLVRDLRGKSEKEFKAYVSLFMRHLCEPGADGAETFADGVPREGLSRQHVLTRIGVMSLIRKKVQEFEHVNGRWSMPELAEVEENKKMSQQQ

SEQ ID NO: 854404 - protein, 1784 aa, Homo sapiens
MASGLGSPSPCSAGSEEEDMDALLNNSLPPPHPENEEDPEEDLSETETPKLKKKKKPKKPRDPKIPKSKRQKKERMLLCRQLGDSSGEGPEFVEEEEEVALRSDSEGSDYTPGKKKKKKLGPKKEKKSKSKRKEEEEEEDDDDDSKEPKSSAQLLEDWGMEDIDHVFSEEDYRTLTNYKAFSQFVRPLIAAKNPKIAVSKMMMVLGAKWREFSTNNPFKGSSGASVAAAAAAAVAVVESMVTATEVAPPPPPVEVPIRKAKTKEGKGPNARRKPKGSPRVPDAKKPKPKKVAPLKIKLGGFGSKRKRSSSEDDDLDVESDFDDASINSYSVSDGSTSRSSRSRKKLRTTKKKKKGEEEVTAVDGYETDHQDYCEVCQQGGEIILCDTCPRAYHMVCLDPDMEKAPEGKWSCPHCEKEGIQWEAKEDNSEGEEILEEVGGDLEEEDDHHMEFCRVCKDGGELLCCDTCPSSYHIHCLNPPLPEIPNGEWLCPRCTCPALKGKVQKILIWKWGQPPSPTPVPRPPDADPNTPSPKPLEGRPERQFFVKWQGMSYWHCSWVSELQLELHCQVMFRNYQRKNDMDEPPSGDFGGDEEKSRKRKNKDPKFAEMEERFYRYGIKPEWMMIHRILNHSVDKKGHVHYLIKWRDLPYDQASWESEDVEIQDYDLFKQSYWNHRELMRGEEGRPGKKLKKVKLRKLERPPETPTVDPTVKYERQPEYLDATGGTLHPYQMEGLNWLRFSWAQGTDTILADEMGLGKTVQTAVFLYSLYKEGHSKGPFLVSAPLSTIINWEREFEMWAPDMYVVTYVGDKDSRAIIRENEFSFEDNAIRGGKKASRMKKEASVKFHVLLTSYELITIDMAILGSIDWACLIVDEAHRLKNNQSKFFRVLNGYSLQHKLLLTGTPLQNNLEELFHLLNFLTPERFHNLEGFLEEFADIAKEDQIKKLHDMLGPHMLRRLKADVFKNMPSKTELIVRVELSPMQKKYYKYILTRNFEALNARGGGNQVSLLNVVMDLKKCCNHPYLFPVAAMEAPKMPNGMYDGSALIRASGKLLLLQKMLKNLKEGGHRVLIFSQMTKMLDLLEDFLEHEGYKYERIDGGITGNMRQEAIDRFNAPGAQQFCFLLSTRAGGLGINLATADTVIIYDSDWNPHNDIQAFSRAHRIGQNKKVMIYRFVTRASVEERITQVAKKKMMLTHLVVRPGLGSKTGSMSKQELDDILKFGTEELFKDEATDGGGDNKEGEDSSVIHYDDKAIERLLDRNQDETEDTELQGMNEYLSSFKVAQYVVREEEMGEEEEVEREIIKQEESVDPDYWEKLLRHHYEQQQEDLARNLGKGKRIRKQVNYNDGSQEDRDWQDDQSDNQSDYSVASEEGDEDFDERSEAPRRPSRKGLRNDKDKPLPPLLARVGGNIEVLGFNARQRKAFLNAIMRYGMPPQDAFTTQWLVRDLRGKSEKEFKAYVSLFMRHLCEPGADGAETFADGVPREGLSRQHVLTRIGVMSLIRKKVQEFEHVNGRWSMPELAEVEENKKMSQPGSPSPKTPTPSTPGDTQPNTPAPVPPAEDGIKIEENSLKEEESIEGEKEVKSTAPETAIECTQAPAPASEDEKVVVEPPEGEEKVEKAEVKQRNLWRQSPKVLLMYEKVEEKSAIDLTPIVVEDKEEKKEEEEKKEVMLQNGETPKDLNDEKQKKNIKQRFMFNNLQMVVLLELTVTFGSMTERAAKVNKEELHEIWTSVAGIDLNWVIARDSLNHGICRGGKTFRIEPDMPILNEAFKGEMTGGMLRDQM

SEQ ID NO: 854405 - protein, 282 aa, Homo sapiens [sequence omitted]

SEQ ID NO: 854406 - protein, 282 aa, Homo sapiens [sequence omitted]

SEQ ID NO: 854407 - protein, 1534 aa, Homo sapiens; identical to SEQ ID NO: 854403

SEQ ID NO: 854408 - protein, 1372 aa, Homo sapiens
MASGLGSPSPCSAGSEEEDMDALLNNSLPPPHPENEEDPEEDLSETETPKLKKKKKPKKPRDPKIPKSKRQKKERMLLCRQLGDSSGEGPEFVEEEEEVALRSDSEGSDYTPGKKKKKKLGPKKEKKSKSKRKEEEEEEDDDDDSKEPKSSAQLLEDWGMEDIDHVFSEEDYRTLTNYKAFSQFVRPLIAAKNPKIAVSKMMMVLGAKWREFSTNNPFKGSSGASVAAAAAAAVAVVESMVTATEVAPPPPPVEVPIRKAKTKEGKGPNARRKPKGSPRVPDAKKPKPKKVAPLKIKLGGFGSKRKRSSSEDDDLDVESDFDDASINSYSVSDGSTSRSSRSRKKLRTTKKKKKGEEEVTAVDGYETDHQDYCEVCQQGGEIILCDTCPRAYHMVCLDPDMEKAPEGKWSCPHCEKEGIQWEAKEDNSEGEEILEEVGGDLEEEDDHHMEFCRVCKDGGELLCCDTCPSSYHIHCLNPPLPEIPNGEWLCPRCTCPALKGKVQKILIWKWGQPPSPTPVPRPPDADPNTPSPKPLEGRPERQFFVKWQGMSYWHCSWVSELQLELHCQVMFRNYQRKNDMDEPPSGDFGGDEEKSRKRKNKDPKFAEMEERFYRYGIKPEWMMIHRILNHSVDKKGHVHYLIKWRDLPYDQASWESEDVEIQDYDLFKQSYWNHRELMRGEEGRPGKKLKKVKLRKLERPPETPTVDPTVKYERQPEYLDATGGTLHPYQMEGLNWLRFSWAQGTDTILADEMGLGKTVQTAVFLYSLYKEGHSKGPFLVSAPLSTIINWEREFEMWAPDMYVVTYVGDKDSRAIIRENEFSFEDNAIRGGKKASRMKKEASVKFHVLLTSYELITIDMAILGSIDWACLIVDEAHRLKNNQSKFFRVLNGYSLQHKLLLTGTPLQNNLEELFHLLNFLTPERFHNLEGFLEEFADIAKEDQIKKLHDMLGPHMLRRLKADVFKNMPSKTELIVRVELSPMQKKYYKYILTRNFEALNARGGGNQVSLLNVVMDLKKCCNHPYLFPVAAMEAPKMPNGMYDGSALIRASGKLLLLQKMLKNLKEGGHRVLIFSQMTKMLDLLEDFLEHEGYKYERIDGGITGNMRQEAIDRFNAPGAQQFCFLLSTRAGGLGINLATADTVIIYDSDWNPHNDIQAFSRAHRIGQNKKVMIYRFVTRASVEERITQVAKKKMMLTHLVVRPGLGSKTGSMSKQELDDILKFGTEELFKDEATDGGGDNKEGEDSSVIHYDDKAIERLLDRNQDETEDTELQGMNEYLSSFKVAQYVVREEEMGEEEEVEREIIKQEESVDPDYWEKLLRHHYEQQQEDLARNLGKGKRIRKQVNYNDGSQEDRGVCGRPRPPPMGRSTRAVG

SEQ ID NO: 854409 - protein, 1224 aa, Homo sapiens
MASGLGSPSPCSAGSEEEDMDALLNNSLPPPHPENEEDPEEDLSETETPKLKKKKKPKKPRDPKIPKSKRQKKERMLLCRQLGDSSGEGPEFVEEEEEVALRSDSEGSDYTPGKKKKKKLGPKKEKKSKSKRKEEEEEEDDDDDSKEPKSSAQLLEDWGMEDIDHVFSEEDYRTLTNYKAFSQFVRPLIAAKNPKIAVSKMMMVLGAKWREFSTNNPFKGSSGASVAAAAAAAVAVVESMVTATEVAPPPPPVEVPIRKAKTKEGKGPNARRKPKGSPRVPDAKKPKPKKVAPLKIKLGGFGSKRKRSSSEDDDLDVESDFDDASINSYSVSDGSTSRSSRSRKKLRTTKKKKKGEEEVTAVDGYETDHQDYCEVCQQGGEIILCDTCPRAYHMVCLDPDMEKAPEGKWSCPHCEKEGIQWEAKEDNSEGEEILEEVGGDLEEEDDHHMEFCRVCKDGGELLCCDTCPSSYHIHCLNPPLPEIPNGEWLCPRCTCPALKGKVQKILIWKWGQPPSPTPVPRPPDADPNTPSPKPLEGRPERQFFVKWQGMSYWHCSWVSELQLELHCQVMFRNYQRKNDMDEPPSGDFGGDEEKSRKRKNKDPKFAEMEERFYRYGIKPEWMMIHRILNHSVDKKGHVHYLIKWRDLPYDQASWESEDVEIQDYDLFKQSYWNHRELMRGEEGRPGKKLKKVKLRKLERPPETPTVDPTVKYERQPEYLDATGGTLHPYQMEGLNWLRFSWAQGTDTILADEMGLGKTVQTAVFLYSLYKEGHSKGPFLVSAPLSTIINWEREFEMWAPDMYVVTYVGDKDSRAIIRENEFSFEDNAIRGGKKASRMKKEASVKFHVLLTSYELITIDMAILGSIDWACLIVDEAHRLKNNQSKFFRVLNGYSLQHKLLLTGTPLQNNLEELFHLLNFLTPERFHNLEGFLEEFADIAKEDQIKKLHDMLGPHMLRRLKADVFKNMPSKTELIVRVELSPMQKKYYKYILTRNFEALNARGGGNQVSLLNVVMDLKKCCNHPYLFPVAAMEAPKMPNGMYDGSALIRASGKLLLLQKMLKNLKEGGHRVLIFSQMTKMLDLLEDFLEHEGYKYERIDGGITGNMRQEAIDRFNAPGAQQFCFLLSTRAGGLGINLATADTVIIYDSDWNPHNDIQAFSRAHRIGQNKKVMIYRFVTRASVEERITQVAKKKMMLTHLGWGRGAQTVMSNRVGIQWPGHPVTRGG

SEQ ID NO: 854410 - protein, 1120 aa, Homo sapiens
MASGLGSPSPCSAGSEEEDMDALLNNSLPPPHPENEEDPEEDLSETETPKLKKKKKPKKPRDPKIPKSKRQKKERMLLCRQLGDSSGEGPEFVEEEEEVALRSDSEGSDYTPGKKKKKKLGPKKEKKSKSKRKEEEEEEDDDDDSKEPKSSAQLLEDWGMEDIDHVFSEEDYRTLTNYKAFSQFVRPLIAAKNPKIAVSKMMMVLGAKWREFSTNNPFKGSSGASVAAAAAAAVAVVESMVTATEVAPPPPPVEVPIRKAKTKEGKGPNARRKPKGSPRVPDAKKPKPKKVAPLKIKLGGFGSKRKRSSSEDDDLDVESDFDDASINSYSVSDGSTSRSSRSRKKLRTTKKKKKGEEEVTAVDGYETDHQDYCEVCQQGGEIILCDTCPRAYHMVCLDPDMEKAPEGKWSCPHCEKEGIQWEAKEDNSEGEEILEEVGGDLEEEDDHHMEFCRVCKDGGELLCCDTCPSSYHIHCLNPPLPEIPNGEWLCPRCTCPALKGKVQKILIWKWGQPPSPTPVPRPPDADPNTPSPKPLEGRPERQFFVKWQGMSYWHCSWVSELQLELHCQVMFRNYQRKNDMDEPPSGDFGGDEEKSRKRKNKDPKFAEMEERFYRYGIKPEWMMIHRILNHSVDKKGHVHYLIKWRDLPYDQASWESEDVEIQDYDLFKQSYWNHRELMRGEEGRPGKKLKKVKLRKLERPPETPTVDPTVKYERQPEYLDATGGTLHPYQMEGLNWLRFSWAQGTDTILADEMGLGKTVQTAVFLYSLYKEGHSKGPFLVSAPLSTIINWEREFEMWAPDMYVVTYVGDKDSRAIIRENEFSFEDNAIRGGKKASRMKKEASVKFHVLLTSYELITIDMAILGSIDWACLIVDEAHRLKNNQSKFFRVLNGYSLQHKLLLTGTPLQNNLEELFHLLNFLTPERFHNLEGFLEEFADIAKEDQIKKLHDMLGPHMLRRLKADVFKNMPSKTELIVRVELSPMQKKYYKYILTRNFEALNARGGGNQVSLLNVVMDLKKCCNHPYLFPVAAMEAPKMPNGMYDGSALIRASGKLLLLQKMLKNLKEGGHRVLIFSQMTKMLDLLEDFLEHEGYKYERIDGGITGNMRQEAIDRFNGEREGVV

SEQ ID NO: 854411 - protein, 933 aa, Homo sapiens
MASGLGSPSPCSAGSEEEDMDALLNNSLPPPHPENEEDPEEDLSETETPKLKKKKKPKKPRDPKIPKSKRQKKERMLLCRQLGDSSGEGPEFVEEEEEVALRSDSEGSDYTPGKKKKKKLGPKKEKKSKSKRKEEEEEEDDDDDSKEPKSSAQLLEDWGMEDIDHVFSEEDYRTLTNYKAFSQFVRPLIAAKNPKIAVSKMMMVLGAKWREFSTNNPFKGSSGASVAAAAAAAVAVVESMVTATEVAPPPPPVEVPIRKAKTKEGKGPNARRKPKGSPRVPDAKKPKPKKVAPLKIKLGGFGSKRKRSSSEDDDLDVESDFDDASINSYSVSDGSTSRSSRSRKKLRTTKKKKKGEEEVTAVDGYETDHQDYCEVCQQGGEIILCDTCPRAYHMVCLDPDMEKAPEGKWSCPHCEKEGIQWEAKEDNSEGEEILEEVGGDLEEEDDHHMEFCRVCKDGGELLCCDTCPSSYHIHCLNPPLPEIPNGEWLCPRCTCPALKGKVQKILIWKWGQPPSPTPVPRPPDADPNTPSPKPLEGRPERQFFVKWQGMSYWHCSWVSELQLELHCQVMFRNYQRKNDMDEPPSGDFGGDEEKSRKRKNKDPKFAEMEERFYRYGIKPEWMMIHRILNHSVDKKGHVHYLIKWRDLPYDQASWESEDVEIQDYDLFKQSYWNHRELMRGEEGRPGKKLKKVKLRKLERPPETPTVDPTVKYERQPEYLDATGGTLHPYQMEGLNWLRFSWAQGTDTILADEMGLGKTVQTAVFLYSLYKEGHSKGPFLVSAPLSTIINWEREFEMWAPDMYVVTYVGDKDSRAIIRENEFSFEDNAIRGGKKASRMKKEASVKFHVLLTSYELITIDMAILGSIDWACLIVDEAHRLKNNQSKFFRVLNGYSLQHKLLLTGTPLQNNLEELFHLLNFLTPERFHNLEGFLEE

SEQ ID NO: 854412 - protein, 610 aa, Homo sapiens
MASGLGSPSPCSAGSEEEDMDALLNNSLPPPHPENEEDPEEDLSETETPKLKKKKKPKKPRDPKIPKSKRQKKERMLLCRQLGDSSGEGPEFVEEEEEVALRSDSEGSDYTPGKKKKKKLGPKKEKKSKSKRKEEEEEEDDDDDSKEPKSSAQLLEDWGMEDIDHVFSEEDYRTLTNYKAFSQFVRPLIAAKNPKIAVSKMMMVLGAKWREFSTNNPFKGSSGASVAAAAAAAVAVVESMVTATEVAPPPPPVEVPIRKAKTKEGKGPNARRKPKGSPRVPDAKKPKPKKVAPLKIKLGGFGSKRKRSSSEDDDLDVESDFDDASINSYSVSDGSTSRSSRSRKKLRTTKKKKKGEEEVTAVDGYETDHQDYCEVCQQGGEIILCDTCPRAYHMVCLDPDMEKAPEGKWSCPHCEKEGIQWEAKEDNSEGEEILEEVGGDLEEEDDHHMEFCRVCKDGGELLCCDTCPSSYHIHCLNPPLPEIPNGEWLCPRCTCPALKGKVQKILIWKWGQPPSPTPVPRPPDADPNTPSPKPLEGRPERQFFVKWQGMSYWHCSWVSELQLELHCQVMFRNYQRKNDMDEPPSGDFGGDEEKSRKRKNKDPKFAEMEG

SEQ ID NO: 854413 - protein, 34 aa, Homo sapiens
MLDLLEDFLEHEGYKYERIDGGITGNMRQEAIDR

SEQ ID NO: 854414 - protein, 266 aa, Homo sapiens
TARYEAGLGEEEVTAVDGYETDHQDYCEVCQQGGEIILCDTCPRAYHMVCLDPDMEKAPEGKWSCPHCEKEGIQWEAKEDNSEGEEILEEVGGDLEEEDDHHMEFCRVCKDGGELLCCDTCPSSYHIHCLNPPLPEIPNGEWLCPRCTCPALKGKVQKILIWKWGQPPSPTPVPRPPDADPNTPSPKPLEGRPERQFFVKWQGMSYWHCSWVSELQLELHCQVMFRNYQRKNDMDEPPSGDFGGDEEKSRKRRTGPIWERGTVMQG

SEQ ID NO: 854415 - protein, 1905 aa, Homo sapiens
MASGLGSPSPCSAGSEEEDMDALLNNSLPPPHPENEEDPEEDLSETETPKLKKKKKPKKPRDPKIPKSKRQKKELGDSSGEGPEFVEEEEEVALRSDSEGSDYTPGKKKKKKLGPKKEKKSKSKRKEEEEEEDDDDDSKEPKSSAQLLEDWGMEDIDHVFSEEDYRTLTNYKAFSQFVRPLIAAKNPKIAVSKMMMVLGAKWREFSTNNPFKGSSGASVAAAAAAAVAVVESMVTATEVAPPPPPVEVPIRKAKTKEGKGPNARRKPKGSPRVPDAKKPKPKKVAPLKIKLGGFGSKRKRSSSEDDDLDVESDFDDASINSYSVSDGSTSRSSRSRKKLRTTKKKKKGEEEVTAVDGYETDHQDYCEVCQQGGEIILCDTCPRAYHMVCLDPDMEKAPEGKWSCPHCEKEGIQWEAKEDNSEGEEILEEVGGDLEEEDDHHMEFCRVCKDGGELLCCDTCPSSYHIHCLNPPLPEIPNGEWLCPRCTCPALKGKVQKILIWKWGQPPSPTPVPRPPDADPNTPSPKPLEGRPERQFFVKWQGMSYWHCSWVSELQLELHCQVMFRNYQRKNDMDEPPSGDFGGDEEKSRKRKNKDPKFAEMEERFYRYGIKPEWMMIHRILNHSVDKKGHVHYLIKWRDLPYDQASWESEDVEIQDYDLFKQSYWNHRELMRGEEGRPGKKLKKVKLRKLERPPETPTVDPTVKYERQPEYLDATGGTLHPYQMEGLNWLRFSWAQGTDTILADEMGLGKTVQTAVFLYSLYKEGHSKGPFLVSAPLSTIINWEREFEMWAPDMYVVTYVGDKDSRAIIRENEFSFEDNAIRGGKKASRMKKEASVKFHVLLTSYELITIDMAILGSIDWACLIVDEAHRLKNNQSKFFRVLNGYSLQHKLLLTGTPLQNNLEELFHLLNFLTPERFHNLEGFLEEFADIAKEDQIKKLHDMLGPHMLRRLKADVFKNMPSKTELIVRVELSPMQKKYYKYILTRNFEALNARGGGNQVSLLNVVMDLKKCCNHPYLFPVAAMEAPKMPNGMYDGSALIRASGKLLLLQKMLKNLKEGGHRVLIFSQMTKMLDLLEDFLEHEGYKYERIDGGITGNMRQEAIDRFNAPGAQQFCFLLSTRAGGLGINLATADTVIIYDSDWNPHNDIQAFSRAHRIGQNKKVMIYRFVTRASVEERITQVAKKKMMLTHLVVRPGLGSKTGSMSKQELDDILKFGTEELFKDEATDGGGDNKEGEDSSVIHYDDKAIERLLDRNQDETEDTELQGMNEYLSSFKVAQYVVREEEMGEEEEVEREIIKQEESVDPDYWEKLLRHHYEQQQEDLARNLGKGKRIRKQVNYNDGSQEDRDWQDDQSDNQSDYSVASEEGDEDFDERSEAPRRPSRKGLRNDKDKPLPPLLARVGGNIEVLGFNARQRKAFLNAIMRYGMPPQDAFTTQWLVRDLRGKSEKEFKAYVSLFMRHLCEPGADGAETFADGVPREGLSRQHVLTRIGVMSLIRKKVQEFEHVNGRWSMPELAEVEENKKMSQPGSPSPKTPTPSTPGDTQPNTPAPVPPAEDGIKIEENSLKEEESIEGEKEVKSTAPETAIECTQAPAPASEDEKVVVEPPEGEEKVEKAEVKERTEEPMETEPKGAADVEKVEEKSAIDLTPIVVEDKEEKKEEEEKKEVMLQNGETPKDLNDEKQKKNIKQRFMFNIADGGFTELHSLWQNEERAATVTKKTYEIWHRRHDYWLLAGIINHGYARWQDIQNDPRYAILNEPFKGEMNRGNFLEIKNKFLARRFKLLEQALVIEEQLRRAAYLNMSEDPSHPSMALNTRFAEVECLAESHQHLSKESMAGNKPANAVLHKVLKQLEELLSDMKADVTRLPATIARIPPVAVRLQMSERNILSRLANRAPEPTPQQVAQQQ

SEQ ID NO: 854416 - protein, 1685 aa, Homo sapiens
WDFGGKFGNLNVGKQAEVEKILFSPSLVLWYIFGYILILGPNARRKPKGSPRVPDAKKPKPKKVAPLKIKLGGFGSKRKRSSSEDDDLDVESDFDDASINSYSVSDGSTSRSSRSRKKLRTTKKKKKGEEEVTAVDGYETDHQDYCEVCQQGGEIILCDTCPRAYHMVCLDPDMEKAPEGKWSCPHCEKEGIQWEAKEDNSEGEEILEEVGGDLEEEDDHHMEFCRVCKDGGELLCCDTCPSSYHIHCLNPPLPEIPNGEWLCPRCTCPALKGKVQKILIWKWGQPPSPTPVPRPPDADPNTPSPKPLEGRPERQFFVKWQGMSYWHCSWVSELQLELHCQVMFRNYQRKNDMDEPPSGDFGGDEEKSRKRKNKDPKFAEMEERFYRYGIKPEWMMIHRILNHSVDKKGHVHYLIKWRDLPYDQASWESEDVEIQDYDLFKQSYWNHRELMRGEEGRPGKKLKKVKLRKLERPPETPTVDPTVKYERQPEYLDATGGTLHPYQMEGLNWLRFSWAQGTDTILADEMGLGKTVQTAVFLYSLYKEGHSKGPFLVSAPLSTIINWEREFEMWAPDMYVVTYVGDKDSRAIIRENEFSFEDNAIRGGKKASRMKKEASVKFHVLLTSYELITIDMAILGSIDWACLIVDEAHRLKNNQSKFFRVLNGYSLQHKLLLTGTPLQNNLEELFHLLNFLTPERFHNLEGFLEEFADIAKEDQIKKLHDMLGPHMLRRLKADVFKNMPSKTELIVRVELSPMQKKYYKYILTRNFEALNARGGGNQVSLLNVVMDLKKCCNHPYLFPVAAMEAPKMPNGMYDGSALIRASGKLLLLQKMLKNLKEGGHRVLIFSQMTKMLDLLEDFLEHEGYKYERIDGGITGNMRQEAIDRFNAPGAQQFCFLLSTRAGGLGINLATADTVIIYDSDWNPHNDIQAFSRAHRIGQNKKVMIYRFVTRASVEERITQVAKKKMMLTHLVVRPGLGSKTGSMSKQELDDILKFGTEELFKDEATDGGGDNKEGEDSSVIHYDDKAIERLLDRNQDETEDTELQGMNEYLSSFKVAQYVVREEEMGEEEEVEREIIKQEESVDPDYWEKLLRHHYEQQQEDLARNLGKGKRIRKQVNYNDGSQEDRDWQDDQSDNQSDYSVASEEGDEDFDERSEAPRRPSRKGLRNDKDKPLPPLLARVGGNIEVLGFNARQRKAFLNAIMRYGMPPQDAFTTQWLVRDLRGKSEKEFKAYVSLFMRHLCEPGADGAETFADGVPREGLSRQHVLTRIGVMSLIRKKVQEFEHVNGRWSMPELAEVEENKKMSQPGSPSPKTPTPSTPGDTQPNTPAPVPPAEDGIKIEENSLKEEESIEGEKEVKSTAPETAIECTQAPAPASEDEKVVVEPPEGEEKVEKAEVKERTEEPMETEPKGAADVEKVEEKSAIDLTPIVVEDKEEKKEEEEKKEVMLQNGETPKDLNDEKQKKNIKQRFMFNIADGGFTELHSLWQNEERAATVTKKTYEIWHRRHDYWLLAGIINHGYARWQDIQNDPRYAILNEPFKGEMNRGNFLEIKNKFLARRFKLLEQALVIEEQLRRAAYLNMSEDPSHPSMALNTRFAEVECLAESHQHLSKESMAGNKPANAVLHKVLKQLEELLSDMKADVTRLPATIARIPPVAVRLQMSERNILSRLANRAPEPTPQQVAQQQ

SEQ ID NO: 854417 - protein, 1912 aa, Homo sapiens; identical to SEQ ID NO: 854388

SEQ ID NO: 854418 - protein, 1713 aa, Homo sapiens
MASGLGSPSPCSAGSEEEDMDALLNNSLPPPHPENEEDPEEDLSETETPKLKKKKKPKKPRDPKIPKSKRQKKERMLLCRQLGDSSGEGPEFVEEEEEVALRSDSEGSDYTPGKKKKKKLGPKKEKKSKSKRKEEEEEEDDDDDSKEPKSSAQLLEDWGMEDIDHVFSEEDYRTLTNYKAFSQFVRPLIAAKNPKIAVSKMMMVLGAKWREFSTNNPFKGSSGASVAAAAAAAVAVVESMVTATEVAPPPPPVEVPIRKAKTKEGKGPNARRKPKGSPRVPDAKKPKPKKVAPLKIKLGGFGSKRKRSSSEDDDLDVESDFDDASINSYSVSDGSTSRSSRSRKKLRTTKKKKKGEEEVTAVDGYETDHQDYCEVCQQGGEIILCDTCPRAYHMVCLDPDMEKAPEGKWSCPHCEKEGIQWEAKEDNSEGEEILEEVGGDLEEEDDHHMEFCRVCKDGGELLCCDTCPSSYHIHCLNPPLPEIPNGEWLCPRCTCPALKGKVQKILIWKWGQPPSPTPVPRPPDADPNTPSPKPLEGRPERQFFVKWQGMSYWHCSWVSELQLELHCQVMFRNYQRKNDMDEPPSGDFGGDEEKSRKRKNKDPKFAEMEERFYRYGIKPEWMMIHRILNHSVDKKGHVHYLIKWRDLPYDQASWESEDVEIQDYDLFKQSYWNHRELMRGEEGRPGKKLKKVKLRKLERPPETPTVDPTVKYERQPEYLDATGGTLHPYQMEGLNWLRFSWAQGTDTILADEMGLGKTVQTAVFLYSLYKEGHSKGPFLVSAPLSTIINWEREFEMWAPDMYVVTYVGDKDSRAIIRENEFSFEDNAIRGGKKASRMKKEASVKFHVLLTSYELITIDMAILGSIDWACLIVDEAHRLKNNQSKFFRVLNGYSLQHKLLLTGTPLQNNLEELFHLLNFLTPERFHNLEGFLEEFADIAKEDQIKKLHDMLGPHMLRRLKADVFKNMPSKTELIVRVELSPMQKKYYKYILTRNFEALNARGGGNQVSLLNVVMDLKKCCNHPYLFPVAAMEAPKMPNGMYDGSALIRASGKLLLLQKMLKNLKEGGHRVLIFSQMTKMLDLLEDFLEHEGYKYERIDGGITGNMRQEAIDRFNAPGAQQFCFLLSTRAGGLGINLATADTVIIYDSDWNPHNDIQAFSRAHRIGQNKKVMIYRFVTRASVEERITQVAKKKMMLTHLVVRPGLGSKTGSMSKQELDDILKFGTEELFKDEATDGGGDNKEGEDSSVIHYDDKAIERLLDRNQDETEDTELQGMNEYLSSFKVAQYVVREEEMGEEEEVEREIIKQEESVDPDYWEKLLRHHYEQQQEDLARNLGKGKRIRKQVNYNDGSQEDRDWQDDQSDNQSDYSVASEEGDEDFDERSEAPRRPSRKGLRNDKDKPLPPLLARVGGNIEVLGFNARQRKAFLNAIMRYGMPPQDAFTTQWLVRDLRGKSEKEFKAYVSLFMRHLCEPGADGAETFADGVPREGLSRQHVLTRIGVMSLIRKKVQEFEHVNGRWSMPELAEVEENKKMSQPGSPSPKTPTPSTPGDTQPNTPAPVPPAEDGIKIEENSLKEEESIEGEKEVKSTAPETAIECTQAPAPASEDEKVVVEPPEGEEKVEKAEVKERTEEPMETEPKGAADVEKVEEKSAIDLTPIVVEDKMRNRRKILNNVSCLTLQMVVLLSCTPFGRMKSGQPQLPRRLMRSGIDGMTTGC

SEQ ID NO: 854419 - protein, 1966 aa, Homo sapiens
MASGLGSPSPCSAGSEEEDMDALLNNSLPPPHPENEEDPEEDLSETETPKLKKKKKPKKPRDPKIPKSKRQKKERMLLCRQLGDSSGEGPEFVEEEEEVALRSDSEGSDYTPGKKKKKKLGPKKEKKSKSKRKEEEEEEDDDDDSKEPKSSAQLLEDWGMEDIDHVFSEEDYRTLTNYKAFSQFVRPLIAAKNPKIAVSKMMMVLGAKWREFSTNNPFKGSSGASVAAAAAAAVAVVESMVTATEVAPPPPPVEVPIRKAKTKEGKGPNARRKPKGSPRVPDAKKPKPKKVAPLKIKLGGFGSKRKRSSSEDDDLDVESDFDDASINSYSVSDGSTSRSSRSRKKLRTTKKKKKGEEEVTAVDGYETDHQDYCEVCQQGGEIILCDTCPRAYHMVCLDPDMEKAPEGKWSCPHCEKEGIQWEAKEDNSEGEEILEEVGGDLEEEDDHHMEFCRVCKDGGELLCCDTCPSSYHIHCLNPPLPEIPNGEWLCPRCTCPALKGKVQKILIWKWGQPPSPTPVPRPPDADPNTPSPKPLEGRPERQFFVKWQGMSYWHCSWVSELQLELHCQVMFRNYQRKNDMDEPPSGDFGGDEEKSRKRKNKDPKFAEMEERFYRYGIKPEWMMIHRILNHSVDKKGHVHYLIKWRDLPYDQASWESEDVEIQDYDLFKQSYWNHRELMRGEEGRPGKKLKKVKLRKLERPPETPTVDPTVKYERQPEYLDATGGTLHPYQMEGLNWLRFSWAQGTDTILADEMGLGKTVQTAVFLYSLYKEGHSKGPFLVSAPLSTIINWEREFEMWAPDMYVVTYVGDKDSRAIIRENEFSFEDNAIRGGKKASRMKKEASVKFHVLLTSYELITIDMAILGSIDWACLIVDEAHRLKNNQSKFFRVLNGYSLQHKLLLTGTPLQNNLEELFHLLNFLTPERFHNLEGFLEEFADIAKEDQIKKLHDMLGPHMLRRLKADVFKNMPSKTELIVRVELSPMQKKYYKYILTRNFEALNARGGGNQVSLLNVVMDLKKCCNHPYLFPVAAMEAPKMPNGMYDGSALIRASGKLLLLQKMLKNLKEGGHRVLIFSQMTKMLDLLEDFLEHEGYKYERIDGGITGNMRQEAIDRFNAPGAQQFCFLLSTRAGGLGINLATADTVIIYDSDWNPHNDIQAFSRAHRIGQNKKVMIYRFVTRASVEERITQVAKKKMMLTHLVVRPGLGSKTGSMSKQELDDILKFGTEELFKDEATDGGGDNKEGEDSSVIHYDDKAIERLLDRNQDETEDTELQGMNEYLSSFKVAQYVVREEEMGEEEEVEREIIKQEESVDPDYWEKLLRHHYEQQQEDLARNLGKGKRIRKQVNYNDGSQEDRDWQDDQSDNQSDYSVASEEGDEDFDERSEAPRRPSRKGLRNDKDKPLPPLLARVGGNIEVLGFNARQRKAFLNAIMRYGMPPQDAFTTQWLVRDLRGKSEKEFKAYVSLFMRHLCEPGADGAETFADGVPREGLSRQHVLTRIGVMSLIRKKVQEFEHVNGRWSMPELAEVEENKKMSQPGSPSPKTPTPSTPGDTQPNTPAPVPPAEDGIKIEENSLKEEESIEGEKEVKSTAPETAIECTQAPAPASEDEKVVVEPPEGEEKVEKAEVKERTEEPMETEPKGSSVLSFSPDPASEDEKVVVEPPEGEEKVEKGRGVRVEDTGEKSYGAQEPYRLLLMIGKGVRKKSSIIDLTPIVVEDKEEKKEEEEKKEVMLQNGETPKDLNDEKQKKNIKQRFMFNIADGGFTELHSLWQNEERAATVTKKTYEIWHRRHDYWLLAGIINHGYARWQDIQNDPRYAILNEPFKGEMNRGNFLEIKNKFLARRFKLLEQALVIEEQLRRAAYLNMSEDPSHPSMALNTRFAEVECLAESHQHLSKESMAGNKPANAVLHKVLKQLEELLSDMKADVTRLPATIARIPPVAVRLQMSERNILSRLANRAPEPTPQQVAQQQ

SEQ ID NO: 854420 - protein, 1953 aa, Homo sapiens
MASGLGSPSPCSAGSEEEDMDALLNNSLPPPHPENEEDPEEDLSETETPKLKKKKKPKKPRDPKIPKSKRQKKERMLLCRQLGDSSGEGPEFVEEEEEVALRSDSEGSDYTPGKKKKKKLGPKKEKKSKSKRKEEEEEEDDDDDSKEPKSSAQLLEDWGMEDIDHVFSEEDYRTLTNYKAFSQFVRPLIAAKNPKIAVSKMMMVLGAKWREFSTNNPFKGSSGASVAAAAAAAVAVVESMVTATEVAPPPPPVEVPIRKAKTKEGKGPNARRKPKGSPRVPDAKKPKPKKVAPLKIKLGGFGSKRKRSSSEDDDLDVESDFDDASINSYSVSDGSTSRSSRSRKKLRTTKKKKKGEEEVTAVDGYETDHQDYCEVCQQGGEIILCDTCPRAYHMVCLDPDMEKAPEGKWSCPHCEKEGIQWEAKEDNSEGEEILEEVGGDLEEEDDHHMEFCRVCKDGGELLCCDTCPSSYHIHCLNPPLPEIPNGEWLCPRCTCPALKGKVQKILIWKWGQPPSPTPVPRPPDADPNTPSPKPLEGRPERQFFVKWQGMSYWHCSWVSELQLELHCQVMFRNYQRKNDMDEPPSGDFGGDEEKSRKRKNKDPKFAEMEERFYRYGIKPEWMMIHRILNHSVDKKGHVHYLIKWRDLPYDQASWESEDVEIQDYDLFKQSYWNHRELMRGEEGRPGKKLKKVKLRKLERPPETPTVDPTVKYERQPEYLDATGGTLHPYQMEGLNWLRFSWAQGTDTILADEMGLGKTVQTAVFLYSLYKEGHSKGPFLVSAPLSTIINWEREFEMWAPDMYVVTYVGDKDSRAIIRENEFSFEDNAIRGGKKASRMKKEASVKFHVLLTSYELITIDMAILGSIDWACLIVDEAHRLKNNQSKFFRVLNGYSLQHKLLLTGTPLQNNLEELFHLLNFLTPERFHNLEGFLEEFADIAKEDQIKKLHDMLGPHMLRRLKADVFKNMPSKTELIVRVELSPMQKKYYKYILTRNFEALNARGGGNQVSLLNVVMDLKKCCNHPYLFPVAAMEAPKMPNGMYDGSALIRASGKLLLLQKMLKNLKEGGHRVLIFSQMTKMLDLLEDFLEHEGYKYERIDGGITGNMRQEAIDRFNAPGAQQFCFLLSTRAGGLGINLATADTVIIYDSDWNPHNDIQAFSRAHRIGQNKKVMIYRFVTRASVEERITQVAKKKMMLTHLVVRPGLGSKTGSMSKQELDDILKFGTEELFKDEATDGGGDNKEGEDSSVIHYDDKAIERLLDRNQDETEDTELQGMNEYLSSFKVAQYVVREEEMGEEEEVEREIIKQEESVDPDYWEKLLRHHYEQQQEDLARNLGKGKRIRKQVNYNDGSQEDRDWQDDQSDNQSDYSVASEEGDEDFDERSEAPRRPSRKGLRNDKDKPLPPLLARVGGNIEVLGFNARQRKAFLNAIMRYGMPPQDAFTTQWLVRDLRGKSEKEFKAYVSLFMRHLCEPGADGAETFADGVPREGLSRQHVLTRIGVMSLIRKKVQEFEHVNGRWSMPELAEVEENKKMSQPGSPSPKTPTPSTPGDTQPNTPAPVPPAEDGIKIEENSLKEEESIEGEKEVKSTAPETAIECTQAPAPASEDEKVVVEPPEGEEKVEKAEVKERTEEPMETEPKGAADVEKVEEKSAIDLTPIVVEDKEEKKEEEEKKEVMLQNGETPKDLNDEKQKKNIKQRFMFNIADGGFTELHSLWQNEERAATVTKKTYEIWHRRHDYWLLAGIINHGYARWQDIQNDPRYAILNEPFKGEMNRGNFLEIKNKFLARRFKLLEQALVIEEQLRRAAYLNMSEDPSHPSMALNTRFAEVECLAESHQHLSKESMAGNKPANAVLHKVLKQLEELLSDMKADVTRLPATIARIPPVAVRLQMSERNILSRLANRAPEPTPQQVAQQQEKRGPLSERLPYLASPRAATLALRQNQTGRREAPKRLEEQY

SEQ ID NO: 854421 - protein, 1850 aa, Homo sapiens
MASGLGSPSPCSAGSEEEDMDALLNNSLPPPHPENEEDPEEDLSETETPKLKKKKKPKKPRDPKIPKSKRQKKERMLLCRQLGDSSGEGPEFVEEEEEVALRSDSEGSDYTPGKKKKKKLGPKKEKKSKSKRKEEEEEEDDDDDSKEPKSSAQLLEDWGMEDIDHVFSEEDYRTLTNYKAFSQFVRPLIAAKNPKIAVSKMMMVLGAKWREFSTNNPFKGSSGASVAAAAAAAVAVVESMVTATEVAPPPPPVEVPIRKAKTKEGKGPNARRKPKGSPRVPDAKKPKPKKVAPLKIKLGGFGSKRKRSSSEDDDLDVESDFDDASINSYSVSDGSTSRSSRSRKKLRTTKKKKKGEEEVTAVDGYETDHQDYCEVCQQGGEIILCDTCPRAYHMVCLDPDMEKAPEGKWSCPHCEKEGIQWEAKEDNSEGEEILEEVGGDLEEEDDHHMEFCRVCKDGGELLCCDTCPSSYHIHCLNPPLPEIPNGEWLCPRCTCPALKGKVQKILIWKWGQPPSPTPVPRPPDADPNTPSPKPLEGRPERQFFVKWQGMSYWHCSWVSELQLELHCQVMFRNYQRKNDMDEPPSGDFGGDEEKSRKRKNKDPKFAEMEERFYRYGIKPEWMMIHRILNHSVDKKGHVHYLIKWRDLPYDQASWESEDVEIQDYDLFKQSYWNHRELMRGEEGRPGKKLKKVKLRKLERPPETPTVDPTVKYERQPEYLDATGGTLHPYQMEGLNWLRFSWAQGTDTILADEMGLGKTVQTAVFLYSLYKEGHSKGPFLVSAPLSTIINWEREFEMWAPDMYVVTYVGDKDSRAIIRENEFSFEDNAIRGGKKASRMKKEASVKFHVLLTSYELITIDMAILGSIDWACLIVDEAHRLKNNQSKFFRVLNGYSLQHKLLLTGTPLQNNLEELFHLLNFLTPERFHNLEGFLEEFADIAKEDQIKKLHDMLGPHMLRRLKADVFKNMPSKTELIVRVELSPMQKKYYKYILTRNFEALNARGGGNQVSLLNVVMDLKKCCNHPYLFPVAAMEAPKMPNGMYDGSALIRASGKLLLLQKMLKNLKEGGHRVLIFSQMTKMLDLLEDFLEHEGYKYERIDGGITGNMRQEAIDRFNAPGAQQFCFLLSTRAGGLGINLATADTVIIYDSDWNPHNDIQAFSRAHRIGQNKKVMIYRFVTRASVEERITQVAKKKMMLTHLVVRPGLGSKTGSMSKQELDDILKFGTEELFKDEATDGGGDNKEGEDSSVIHYDDKAIERLLDRNQDETEDTELQGMNEYLSSFKVAQYVVREEEMGEEEEVEREIIKQEESVDPDYWEKLLRHHYEQQQEDLARNLGKGKRIRKQVNYNDGSQEDRDWQDDQSDNQSDYSVASEEGDEDFDERSEAPRRPSRKGLRNDKDKPLPPLLARVGGNIEVLGFNARQRKAFLNAIMRYGMPPQDAFTTQWLVRDLRGKSEKEFKAYVSLFMRHLCEPGADGAETFADGVPREGLSRQHVLTRIGVMSLIRKKVQEFEHVNGRWSMPELAEVEENKKMSQPGSPSPKTPTPSTPGDTQPNTPAPVPPAEDGIKIEENSLKEEESIEGEKEVKSTAPETAIECTQAPAPASEDEKVVVEPPEGEEKVEKAEVKERTEEPMETEPKGAADVEKVEEKSAIDLTPIVVEDKEEKKEEEEKKEVMLQNGETPKDLNDEKQKKNIKQRFMFNIADGGFTELHSLWQNEERAATVTKKTYEIWHRRHDYWLLAGIINHGYARWQDIQNDPRYAILNEPFKGEMNRGNFLEIKNKFLARRFKLLEQALVIEEQLRRAAYLNMSEDPSHPSMALNTRFAEVECLAESLKDENLLCMKLMDSIQYQC

SEQ ID NO: 854422 - protein, 1757 aa, Homo sapiens
MASGLGSPSPCSAGSEEEDMDALLNNSLPPPHPENEEDPEEDLSETETPKLKKKKKPKKPRDPKIPKSKRQKKERMLLCRQLGDSSGEGPEFVEEEEEVALRSDSEGSDYTPGKKKKKKLGPKKEKKSKSKRKEEEEEEDDDDDSKEPKSSAQLLEDWGMEDIDHVFSEEDYRTLTNYKAFSQFVRPLIAAKNPKIAVSKMMMVLGAKWREFSTNNPFKGSSGASVAAAAAAAVAVVESMVTATEVAPPPPPVEVPIRKAKTKEGKGPNARRKPKGSPRVPDAKKPKPKKVAPLKIKLGGFGSKRKRSSSEDDDLDVESDFDDASINSYSVSDGSTSRSSRSRKKLRTTKKKKKGEEEVTAVDGYETDHQDYCEVCQQGGEIILCDTCPRAYHMVCLDPDMEKAPEGKWSCPHCEKEGIQWEAKEDNSEGEEILEEVGGDLEEEDDHHMEFCRVCKDGGELLCCDTCPSSYHIHCLNPPLPEIPNGEWLCPRCTCPALKGKVQKILIWKWGQPPSPTPVPRPPDADPNTPSPKPLEGRPERQFFVKWQGMSYWHCSWVSELQLELHCQVMFRNYQRKNDMDEPPSGDFGGDEEKSRKRKNKDPKFAEMEERFYRYGIKPEWMMIHRILNHSVDKKGHVHYLIKWRDLPYDQASWESEDVEIQDYDLFKQSYWNHRELMRGEEGRPGKKLKKVKLRKLERPPETPTVDPTVKYERQPEYLDATGGTLHPYQMEGLNWLRFSWAQGTDTILADEMGLGKTVQTAVFLYSLYKEGHSKGPFLVSAPLSTIINWEREFEMWAPDMYVVTYVGDKDSRAIIRENEFSFEDNAIRGGKKASRMKKEASVKFHVLLTSYELITIDMAILGSIDWACLIVDEAHRLKNNQSKFFRVLNGYSLQHKLLLTGTPLQNNLEELFHLLNFLTPERFHNLEGFLEEFADIAKEDQIKKLHDMLGPHMLRRLKADVFKNMPSKTELIVRVELSPMQKKYYKYILTRNFEALNARGGGNQVSLLNVVMDLKKCCNHPYLFPVAAMEAPKMPNGMYDGSALIRASGKLLLLQKMLKNLKEGGHRVLIFSQMTKMLDLLEDFLEHEGYKYERIDGGITGNMRQEAIDRFNAPGAQQFCFLLSTRAGGLGINLATADTVIIYDSDWNPHNDIQAFSRAHRIGQNKKVMIYRFVTRASVEERITQVAKKKMMLTHLVVRPGLGSKTGSMSKQELDDILKFGTEELFKDEATDGGGDNKEGEDSSVIHYDDKAIERLLDRNQDETEDTELQGMNEYLSSFKVAQYVVREEEMGEEEEVEREIIKQEESVDPDYWEKLLRHHYEQQQEDLARNLGKGKRIRKQVNYNDGSQEDRDWQDDQSDNQSDYSVASEEGDEDFDERSEAPRRPSRKGLRNDKDKPLPPLLARVGGNIEVLGFNARQRKAFLNAIMRYGMPPQDAFTTQWLVRDLRGKSEKEFKAYVSLFMRHLCEPGADGAETFADGVPREGLSRQHVLTRIGVMSLIRKKVQEFEHVNGRWSMPELAEVEENKKMSQPGSPSPKTPTPSTPGDTQPNTPAPVPPAEDGIKIEENSLKEEESIEGEKEVKSTAPETAIECTQAPAPASEDEKVVVEPPEGEEKVEKAEVKERTEEPMETEPKGAADVEKVEEKSAIDLTPIVVEDKEEKKEEEEKKEVMLQNGETPKDLNDEKQKKNIKQRFMFNIADGGFTELHSLWQNEERAATVTKKTYEIWHRRHDYWLLAGIINHGYARWQHPNSSSW

SEQ ID NO: 854423 - protein, 1608 aa, Homo sapiens
MASGLGSPSPCSAGSEEEDMDALLNNSLPPPHPENEEDPEEDLSETETPKLKKKKKPKKPRDPKIPKSKRQKKERMLLCRQLGDSSGEGPEFVEEEEEVALRSDSEGSDYTPGKKKKKKLGPKKEKKSKSKRKEEEEEEDDDDDSKEPKSSAQLLEDWGMEDIDHVFSEEDYRTLTNYKAFSQFVRPLIAAKNPKIAVSKMMMVLGAKWREFSTNNPFKGSSGASVAAAAAAAVAVVESMVTATEVAPPPPPVEVPIRKAKTKEGKGPNARRKPKGSPRVPDAKKPKPKKVAPLKIKLGGFGSKRKRSSSEDDDLDVESDFDDASINSYSVSDGSTSRSSRSRKKLRTTKKKKKGEEEVTAVDGYETDHQDYCEVCQQGGEIILCDTCPRAYHMVCLDPDMEKAPEGKWSCPHCEKEGIQWEAKEDNSEGEEILEEVGGDLEEEDDHHMEFCRVCKDGGELLCCDTCPSSYHIHCLNPPLPEIPNGEWLCPRCTCPALKGKVQKILIWKWGQPPSPTPVPRPPDADPNTPSPKPLEGRPERQFFVKWQGMSYWHCSWVSELQLELHCQVMFRNYQRKNDMDEPPSGDFGGDEEKSRKRKNKDPKFAEMEERFYRYGIKPEWMMIHRILNHSVDKKGHVHYLIKWRDLPYDQASWESEDVEIQDYDLFKQSYWNHRELMRGEEGRPGKKLKKVKLRKLERPPETPTVDPTVKYERQPEYLDATGGTLHPYQMEGLNWLRFSWAQGTDTILADEMGLGKTVQTAVFLYSLYKEGHSKGPFLVSAPLSTIINWEREFEMWAPDMYVVTYVGDKDSRAIIRENEFSFEDNAIRGGKKASRMKKEASVKFHVLLTSYELITIDMAILGSIDWACLIVDEAHRLKNNQSKFFRVLNGYSLQHKLLLTGTPLQNNLEELFHLLNFLTPERFHNLEGFLEEFADIAKEDQIKKLHDMLGPHMLRRLKADVFKNMPSKTELIVRVELSPMQKKYYKYILTRNFEALNARGGGNQVSLLNVVMDLKKCCNHPYLFPVAAMEAPKMPNGMYDGSALIRASGKLLLLQKMLKNLKEGGHRVLIFSQMTKMLDLLEDFLEHEGYKYERIDGGITGNMRQEAIDRFNAPGAQQFCFLLSTRAGGLGINLATADTVIIYDSDWNPHNDIQAFSRAHRIGQNKKVMIYRFVTRASVEERITQVAKKKMMLTHLVVRPGLGSKTGSMSKQELDDILKFGTEELFKDEATDGGGDNKEGEDSSVIHYDDKAIERLLDRNQDETEDTELQGMNEYLSSFKVAQYVVREEEMGEEEEVEREIIKQEESVDPDYWEKLLRHHYEQQQEDLARNLGKGKRIRKQVNYNDGSQEDRDWQDDQSDNQSDYSVASEEGDEDFDERSEAPRRPSRKGLRNDKDKPLPPLLARVGGNIEVLGFNARQRKAFLNAIMRYGMPPQDAFTTQWLVRDLRGKSEKEFKAYVSLFMRHLCEPGADGAETFADGVPREGLSRQHVLTRIGVMSLIRKKVQEFEHVNGRWSMPELAEVEENKKMSQPGSPSPKTPTPSTPGDTQPNTPAPVPPAEDGIKIEENSLKEEESIEGEKEVKSTAPETAIECTQAQLLPGLLPLFS

SEQ ID NO: 854424 - protein, 240 aa, Homo sapiens
MLQNGETPKDLNDEKQKKNIKQRFMFNIADGGFTELHSLWQNEERAATVTKKTYEIWHRRHDYWLLAGIINHGYARWQDIQNDPRYAILNEPFKGEMNRGNFLEIKNKFLARRFKLLEQALVIEEQLRRAAYLNMSEDPSHPSMALNTRFAEVECLAESHQHLSKESMAGNKPANAVLHKVLKQLEELLSDMKADVTRLPATIARIPPVAVRLQMSERNILSRLANRAPEPTPQQVAQQQ

SEQ ID NO: 854425 - protein, 1533 aa, Homo sapiens
MASGLGSPSPCSAGSEEEDMDALLNNSLPPPHPENEEDPEEDLSETETPKLKKKKKPKKPRDPKIPKSKRQKKERMLLCRQLGDSSGEGPEFVEEEEEVALRSDSEGSDYTPGKKKKKKLGPKKEKKSKSKRKEEEEEEDDDDDSKEPKSSAQLLEDWGMEDIDHVFSEEDYRTLTNYKAFSQFVRPLIAAKNPKIAVSKMMMVLGAKWREFSTNNPFKGSSGASVAAAAAAAVAVVESMVTATEVAPPPPPVEVPIRKAKTKEGKGPNARRKPKGSPRVPDAKKPKPKKVAPLKIKLGGFGSKRKRSSSEDDDLDVESDFDDASINSYSVSDGSTSRSSRSRKKLRTTKKKKKGEEEVTAVDGYETDHQDYCEVCQQGGEIILCDTCPRAYHMVCLDPDMEKAPEGKWSCPHCEKEGIQWEAKEDNSEGEEILEEVGGDLEEEDDHHMEFCRVCKDGGELLCCDTCPSSYHIHCLNPPLPEIPNGEWLCPRCTCPALKGKVQKILIWKWGQPPSPTPVPRPPDADPNTPSPKPLEGRPERQFFVKWQGMSYWHCSWVSELQLELHCQVMFRNYQRKNDMDEPPSGDFGGDEEKSRKRKNKDPKFAEMEERFYRYGIKPEWMMIHRILNHSVDKKGHVHYLIKWRDLPYDQASWESEDVEIQDYDLFKQSYWNHRELMRGEEGRPGKKLKKVKLRKLERPPETPTVDPTVKYERQPEYLDATGGTLHPYQMEGLNWLRFSWAQGTDTILADEMGLGKTVQTAVFLYSLYKEGHSKGPFLVSAPLSTIINWEREFEMWAPDMYVVTYVGDKDSRAIIRENEFSFEDNAIRGGKKASRMKKEASVKFHVLLTSYELITIDMAILGSIDWACLIVDEAHRLKNNQSKFFRVLNGYSLQHKLLLTGTPLQNNLEELFHLLNFLTPERFHNLEGFLEEFADIAKEDQIKKLHDMLGPHMLRRLKADVFKNMPSKTELIVRVELSPMQKKYYKYILTRNFEALNARGGGNQVSLLNVVMDLKKCCNHPYLFPVAAMEAPKMPNGMYDGSALIRASGKLLLLQKMLKNLKEGGHRVLIFSQMTKMLDLLEDFLEHEGYKYERIDGGITGNMRQEAIDRFNAPGAQQFCFLLSTRAGGLGINLATADTVIIYDSDWNPHNDIQAFSRAHRIGQNKKVMIYRFVTRASVEERITQVAKKKMMLTHLVVRPGLGSKTGSMSKQELDDILKFGTEELFKDEATDGGGDNKEGEDSSVIHYDDKAIERLLDRNQDETEDTELQGMNEYLSSFKVAQYVVREEEMGEEEEVEREIIKQEESVDPDYWEKLLRHHYEQQQEDLARNLGKGKRIRKQVNYNDGSQEDRDWQDDQSDNQSDYSVASEEGDEDFDERSEAPRRPSRKGLRNDKDKPLPPLLARVGGNIEVLGFNARQRKAFLNAIMRYGMPPQDAFTTQWLVRDLRGKSEKEFKAYVSLFMRHLCEPGADGAETFADGVPREGLSRQHVLTRIGVMSLIRKKVQEFEHVNGRWSMPELDCCGVSTLCVEK

SEQ ID NO: 854426 - protein, 1235 aa, Homo sapiens
MASGLGSPSPCSAGSEEEDMDALLNNSLPPPHPENEEDPEEDLSETETPKLKKKKKPKKPRDPKIPKSKRQKKERMLLCRQLGDSSGEGPEFVEEEEEVALRSDSEGSDYTPGKKKKKKLGPKKEKKSKSKRKEEEEEEDDDDDSKEPKSSAQLLEDWGMEDIDHVFSEEDYRTLTNYKAFSQFVRPLIAAKNPKIAVSKMMMVLGAKWREFSTNNPFKGSSGASVAAAAAAAVAVVESMVTATEVAPPPPPVEVPIRKAKTKEGKGPNARRKPKGSPRVPDAKKPKPKKVAPLKIKLGGFGSKRKRSSSEDDDLDVESDFDDASINSYSVSDGSTSRSSRSRKKLRTTKKKKKGEEEVTAVDGYETDHQDYCEVCQQGGEIILCDTCPRAYHMVCLDPDMEKAPEGKWSCPHCEKEGIQWEAKEDNSEGEEILEEVGGDLEEEDDHHMEFCRVCKDGGELLCCDTCPSSYHIHCLNPPLPEIPNGEWLCPRCTCPALKGKVQKILIWKWGQPPSPTPVPRPPDADPNTPSPKPLEGRPERQFFVKWQGMSYWHCSWVSELQLELHCQVMFRNYQRKNDMDEPPSGDFGGDEEKSRKRKNKDPKFAEMEERFYRYGIKPEWMMIHRILNHSVDKKGHVHYLIKWRDLPYDQASWESEDVEIQDYDLFKQSYWNHRELMRGEEGRPGKKLKKVKLRKLERPPETPTVDPTVKYERQPEYLDATGGTLHPYQMEGLNWLRFSWAQGTDTILADEMGLGKTVQTAVFLYSLYKEGHSKGPFLVSAPLSTIINWEREFEMWAPDMYVVTYVGDKDSRAIIRENEFSFEDNAIRGGKKASRMKKEASVKFHVLLTSYELITIDMAILGSIDWACLIVDEAHRLKNNQSKFFRVLNGYSLQHKLLLTGTPLQNNLEELFHLLNFLTPERFHNLEGFLEEFADIAKEDQIKKLHDMLGPHMLRRLKADVFKNMPSKTELIVRVELSPMQKKYYKYILTRNFEALNARGGGNQVSLLNVVMDLKKCCNHPYLFPVAAMEAPKMPNGMYDGSALIRASGKLLLLQKMLKNLKEGGHRVLIFSQMTKMLDLLEDFLEHEGYKYERIDGGITGNMRQEAIDRFNAPGAQQFCFLLSTRAGGLGINLATADTVIIYDSDWNPHNDIQAFSRAHRIGQNKKVMIYRFVTRASVEERITQVAKKKMMLTHLVVRPGLGSKTGSMSKQELDDILKFGTEELFKDEATDGS

SEQ ID NO: 854427 - protein, 1065 aa, Homo sapiens
MASGLGSPSPCSAGSEEEDMDALLNNSLPPPHPENEEDPEEDLSETETPKLKKKKKPKKPRDPKIPKSKRQKKERMLLCRQLGDSSGEGPEFVEEEEEVALRSDSEGSDYTPGKKKKKKLGPKKEKKSKSKRKEEEEEEDDDDDSKEPKSSAQLLEDWGMEDIDHVFSEEDYRTLTNYKAFSQFVRPLIAAKNPKIAVSKMMMVLGAKWREFSTNNPFKGSSGASVAAAAAAAVAVVESMVTATEVAPPPPPVEVPIRKAKTKEGKGPNARRKPKGSPRVPDAKKPKPKKVAPLKIKLGGFGSKRKRSSSEDDDLDVESDFDDASINSYSVSDGSTSRSSRSRKKLRTTKKKKKGEEEVTAVDGYETDHQDYCEVCQQGGEIILCDTCPRAYHMVCLDPDMEKAPEGKWSCPHCEKEGIQWEAKEDNSEGEEILEEVGGDLEEEDDHHMEFCRVCKDGGELLCCDTCPSSYHIHCLNPPLPEIPNGEWLCPRCTCPALKGKVQKILIWKWGQPPSPTPVPRPPDADPNTPSPKPLEGRPERQFFVKWQGMSYWHCSWVSELQLELHCQVMFRNYQRKNDMDEPPSGDFGGDEEKSRKRKNKDPKFAEMEERFYRYGIKPEWMMIHRILNHSVDKKGHVHYLIKWRDLPYDQASWESEDVEIQDYDLFKQSYWNHRELMRGEEGRPGKKLKKVKLRKLERPPETPTVDPTVKYERQPEYLDATGGTLHPYQMEGLNWLRFSWAQGTDTILADEMGLGKTVQTAVFLYSLYKEGHSKGPFLVSAPLSTIINWEREFEMWAPDMYVVTYVGDKDSRAIIRENEFSFEDNAIRGGKKASRMKKEASVKFHVLLTSYELITIDMAILGSIDWACLIVDEAHRLKNNQSKFFRVLNGYSLQHKLLLTGTPLQNNLEELFHLLNFLTPERFHNLEGFLEEFADIAKEDQIKKLHDMLGPHMLRRLKADVFKNMPSKTELIVRVELSPMQKKYYKYILTRNFEALNARGGGNQVSLLNVVMDLKKCCNHPYLFPVAAMEAPKMPNGMYDGSALIRASGKLLLLQKLLIVNGII

SEQ ID NO: 854428 - protein, 926 aa, Homo sapiens
MASGLGSPSPCSAGSEEEDMDALLNNSLPPPHPENEEDPEEDLSETETPKLKKKKKPKKPRDPKIPKSKRQKKERMLLCRQLGDSSGEGPEFVEEEEEVALRSDSEGSDYTPGKKKKKKLGPKKEKKSKSKRKEEEEEEDDDDDSKEPKSSAQLLEDWGMEDIDHVFSEEDYRTLTNYKAFSQFVRPLIAAKNPKIAVSKMMMVLGAKWREFSTNNPFKGSSGASVAAAAAAAVAVVESMVTATEVAPPPPPVEVPIRKAKTKEGKGPNARRKPKGSPRVPDAKKPKPKKVAPLKIKLGGFGSKRKRSSSEDDDLDVESDFDDASINSYSVSDGSTSRSSRSRKKLRTTKKKKKGEEEVTAVDGYETDHQDYCEVCQQGGEIILCDTCPRAYHMVCLDPDMEKAPEGKWSCPHCEKEGIQWEAKEDNSEGEEILEEVGGDLEEEDDHHMEFCRVCKDGGELLCCDTCPSSYHIHCLNPPLPEIPNGEWLCPRCTCPALKGKVQKILIWKWGQPPSPTPVPRPPDADPNTPSPKPLEGRPERQFFVKWQGMSYWHCSWVSELQLELHCQVMFRNYQRKNDMDEPPSGDFGGDEEKSRKRKNKDPKFAEMEERFYRYGIKPEWMMIHRILNHSVDKKGHVHYLIKWRDLPYDQASWESEDVEIQDYDLFKQSYWNHRELMRGEEGRPGKKLKKVKLRKLERPPETPTVDPTVKYERQPEYLDATGGTLHPYQMEGLNWLRFSWAQGTDTILADEMGLGKTVQTAVFLYSLYKEGHSKGPFLVSAPLSTIINWEREFEMWAPDMYVVTYVGDKDSRAIIRENEFSFEDNAIRGGKKASRMKKEASVKFHVLLTSYELITIDMAILGSIDWACLIVDEAHRLKNNQSKFFRVLNGYSLQHKLLLTGTPLQNNLEELFHLLNFLTPERFHN

SEQ ID NO: 854429 - protein, 361 aa, Homo sapiens
MASGLGSPSPCSAGSEEEDMDALLNNSLPPPHPENEEDPEEDLSETETPKLKKKKKPKKPRDPKIPKSKRQKKERMLLCRQLGDSSGEGPEFVEEEEEVALRSDSEGSDYTPGKKKKKKLGPKKEKKSKSKRKEEEEEEDDDDDSKEPKSSAQLLEDWGMEDIDHVFSEEDYRTLTNYKAFSQFVRPLIAAKNPKIAVSKMMMVLGAKWREFSTNNPFKGSSGASVAAAAAAAVAVVESMVTATEVAPPPPPVEVPIRKAKTKEGKGPNARRKPKGSPRVPDAKKPKPKKVAPLKIKLGGFGSKRKRSSSEDDDLDVESDFDDASINSYSVSDGSTSRSSRSRKKLRTTKKKKNVRYRADL

SEQ ID NO: 854430 - protein, 573 aa, Homo sapiens
MAAVKEPLEFHAKRPWRPEEAVEDPDEEDEDNTSEAENGFSLEEVLRLGGTKQDYLMLATSPSLPVLAAGITILLTDRNLNTTFFDPAGGGDPIYTNTYSDFSVTLKFIFFILPGFGIISHIVTYYSGKKEPFGYIGMVCAMISMWLPRVYRVSTPYITVGIDVDTPAYFTLRLHNQSLIPNGVKYLSCSATLHGALWNDPAEALSQDHLLPGEGRTGLFTTHLKPHTDSQVGQPCIRGCPTGLSTSYGQRRIIGFPSTASTTKYSSQSPTDTDDTQHEDGSERAGTRRKRAPRPPTTPEHSRQRERRRDKAGESTAKLSKRKDKRARQTARETGRGRREQASDRNAGTEQSNNTDAEETTAKQKKHDRREQRREQREESSQEGKKTHKTENQTGTDTENREQGTAQARKSGRLKQQDERAERHNKTENHEDIDGKQEARTRHSGEQPNQEKETASGEKETQDVDRDRETAHEAEVTEARTRGRGGEERKSRERRRGKRRRADDRNRKTNRHEKDTHTRDKLQDGSSSRRESSKRERALEKERNGNRGASEEVQEQAGGKEERREVDTTRTRR

SEQ ID NO: 854431 - protein, 1054 aa, Homo sapiens [sequence omitted]

SEQ ID NO: 854432 - protein, 1041 aa, Homo sapiens
MAAVKEPLEFHAKRPWRPEEAVEDPDEEDEDNTSEAENGFSLEEVLRLGGTKQDYLMLATLDENEEVIDGGKKGAIDDLQQGELEAFIQNLNLAKYTKASLIEEDEPAEKENSSKKEVKIPKINNKNTAESQRTSVNKVKNKNRPEPHSDENGSTTPKVKKDKQNIFEFFERQTLLLRPGGKWYDLEYSNEYSLKPQPQDVVSKYKTLAQKLYQHEINLFKSKTNSQKGASSTWMKAIVSSGTLGDRMAAMILLIQDDAVHTLQFVETLVNLVKKKGSKQQCLMALDTFKELLITDLLPDNRKLRIFSQRPFDKLEQLSSGNKDSRDRRLILWYFEHQLKHLVAEFVQVLETLSHDTLVTTKTRALTVAHELLCNKPEEEKALLVQVVNKLGDPQNRIATKASHLLETLLCKHPNMKGVVSGEVERLLFRSNISSKAQYYAICFLNQMALSHEESELANKLITVYFCFFRTCVKKKDVESKMLSALLTGVNRAYPYSQTGDDKVREQIDTLFKVLHIVNFNTSVQALMLLFQVMNSQQTISDRYYTALYRKMLDPGLMTCSKQAMFLNLVYKSLKADIVLRRVKAFVKRLLQVTCQQMPPFICGALYLVSEILKAKPGLRSQLDDHPESDDEENFIDANDDEDMEKFTDADKETEIVKKLETEETVPETDVETKKPEVASWVHFDNLKGGKQLNKYDPFSRNPLFCGAENTSLWELKKLSVHFHPSVALFAKTILQGNYIQYSGDPLQDFTLMRFLDRFVYRNPKPHKGKENTDSVVMQPKRKHFIKDIRHLPVNSKEFLAKEESQIPVDEVFFHRYYKKVAVKEKQKRDADEESIEDVDDEEFEELIDTFEDDNCFSSGKDDMDFAGNVKKRTKGAKDNTLDEDSEGSDDELGNLDDDEVSLGSMDDEEFAEVDEDGGTFMDVLDDESESVPELEVHSKVSTKKSKRKGTDDFDFAGSFQGPRKKKRNLNDSSLFVSAEEVRLMYCFNKLVSNSLDGRLNVMTGYTTEMQKVSSRKRNILKRRGLKPLKKLKNKGNELLM

SEQ ID NO: 854433 - protein, 997 aa, Homo sapiens
MAAVKEPLEFHAKRPWRPEEAVEDPDEEDEDNTSEAENGFSLEEVLRLGGTKQDYLMLATLDENEEVIDGGKKGAIDDLQQGELEAFIQNLNLAKYTKASLIEEDEPAEKENSSKKEVKIPKINNKNTAESQRTSVNKVKNKNRPEPHSDENGSTTPKVKKDKQNIFEFFERQTLLLRPGGKWYDLEYSNEYSLKPQPQDVVSKYKTLAQKLYQHEINLFKSKTNSQKGASSTWMKAIVSSGTLGDRMAAMILLIQDDAVHTLQFVETLVNLVKKKGSKQQCLMALDTFKELLITDLLPDNRKLRIFSQRPFDKLEQLSSGNKDSRDRRLILWYFEHQLKHLVAEFVQVLETLSHDTLVTTKTRALTVAHELLCNKPEEEKALLVQVVNKLGDPQNRIATKASHLLETLLCKHPNMKGVVSGEVERLLFRSNISSKAQYYAICFLNQMALSHEESELANKLITVYFCFFRTCVKKKDVESKMLSALLTGVNRAYPYSQTGDDKVREQIDTLFKVLHIVNFNTSVQALMLLFQVMNSQQTISDRYYTALYRKMLDPGLMTCSKQAMFLNLVYKSLKADIVLRRVKAFVKRLLQVTCQQMPPFICGALYLVSEILKAKPGLRSQLDDHPESDDEENFIDANDDEDMEKFTDADKETEIVKKLETEETVPETDVETKKPEVASWVHFDNLKGGKQLNKYDPFSRNPLFCGAENTSLWELKKLSVHFHPSVALFAKTILQGNYIQYSGDPLQDFTLMRFLDRFVYRNPKPHKGKENTDSVVMQPKRKHFIKDIRHLPVNSKEFLAKEESQIPVDEVFFHRYYKKVAVKEKQKRDADEESIEDVDDEEFEELIDTFEDDNCFSSGKDDMDFAGNVKKRTKGAKDNTLDEDSEGSDDELGNLDDDEVSLGSMDDEEFAEVDEDGGTFMDVLDDESESVPELEVHSKVSTKKSKRKGTDDFDFAGSFQGPRKKKRNLNDSSLFVSAEEVRLMYCFNKLAILHYF

SEQ ID NO: 854434 - protein, 798 aa, Homo sapiens
MAAVKEPLEFHAKRPWRPEEAVEDPDEEDEDNTSEAENGFSLEEVLRLGGTKQDYLMLATLDENEEVIDGGKKGAIDDLQQGELEAFIQNLNLAKYTKASLIEEDEPAEKENSSKKEVKIPKINNKNTAESQRTSVNKVKNKNRPEPHSDENGSTTPKVKKDKQNIFEFFERQTLLLRPGGKWYDLEYSNEYSLKPQPQDVVSKYKTLAQKLYQHEINLFKSKTNSQKGASSTWMKAIVSSGTLGDRMAAMILLIQDDAVHTLQFVETLVNLVKKKGSKQQCLMALDTFKELLITDLLPDNRKLRIFSQRPFDKLEQLSSGNKDSRDRRLILWYFEHQLKHLVAEFVQVLETLSHDTLVTTKTRALTVAHELLCNKPEEEKALLVQVVNKLGDPQNRIATKASHLLETLLCKHPNMKGVVSGEVERLLFRSNISSKAQYYAICFLNQMALSHEESELANKLITVYFCFFRTCVKKKDVESKMLSALLTGVNRAYPYSQTGDDKVREQIDTLFKVLHIVNFNTSVQALMLLFQVMNSQQTISDRYYTALYRKMLDPGLMTCSKQAMFLNLVYKSLKADIVLRRVKAFVKRLLQVTCQQMPPFICGALYLVSEILKAKPGLRSQLDDHPESDDEENFIDANDDEDMEKFTDADKETEIVKKLETEETVPETDVETKKPEVASWVHFDNLKGGKQLNKYDPFSRNPLFCGAENTSLWELKKLSVHFHPSVALFAKTILQGNYIQYSGDPLQDFTLMRFLDRFVYRNPKPHKGKENTDSVVMQPKRKHFIKDIRHLPGKYKP

SEQ ID NO: 854435 - protein, 193 aa, Homo sapiens
KFITVLRIRQKLTEYLSTTTLDEDSEGSDDELGNLDDDEVSLGSMDDEEFAEVDEDGGTFMDVLDDESESVPELEVHSKVSTKKSKRKGTDDFDFAGSFQGPRKKKRNLNDSSLFVSAEEFGHLLDENMGSKFDNIGMNAMANKDNASLKQLRWEAERDDWLHNRDAKSIIKKKKHFKKKRIKTTQKTKKQRK

SEQ ID NO: 854436 - protein, 1054 aa, Homo sapiens [sequence omitted]

SEQ ID NO: 854437 - protein, 1005 aa, Homo sapiens
MCSQDYLMLATLDENEEVIDGGKKGAIDDLQQGELEAFIQNLNLAKYTKASLIEEDEPAEKENSSKKEVKIPKINNKNTAESQRTSVNKVKNKNRPEPHSDENGSTTPKVKKDKQNIFEFFERQTLLLRPGGKWYDLEYSNEYSLKPQPQDVVSKYKTLAQKLYQHEINLFKSKTNSQKGASSTWMKAIVSSGTLGDRMAAMILLIQDDAVHTLQFVETLVNLVKKKGSKQQCLMALDTFKELLITDLLPDNRKLRIFSQRPFDKLEQLSSGNKDSRDRRLILWYFEHQLKHLVAEFVQVLETLSHDTLVTTKTRALTVAHELLCNKPEEEKALLVQVVNKLGDPQNRIATKASHLLETLLCKHPNMKGVVSGEVERLLFRSNISSKAQYYAICFLNQMALSHEESELANKLITVYFCFFRTCVKKKDVESKMLSALLTGVNRAYPYSQTGDDKVREQIDTLFKVLHIVNFNTSVQALMLLFQVMNSQQTISDRYYTALYRKMLDPGLMTCSKQAMFLNLVYKSLKADIVLRRVKAFVKRLLQVTCQQMPPFICGALYLVSEILKAKPGLRSQLDDHPESDDEENFIDANDDEDMEKFTDADKETEIVKKLETEETVPETDVETKKPEVASWVHFDNLKGGKQLNKYDPFSRNPLFCGAENTSLWELKKLSVHFHPSVALFAKTILQGNYIQYSGDPLQDFTLMRFLDRFVYRNPKPHKGKENTDSVVMQPKRKHFIKDIRHLPVNSKEFLAKEESQIPVDEVFFHRYYKKVAVKEKQKRDADEESIEDVDDEEFEELIDTFEDDNCFSSGKDDMDFAGNVKKRTKGAKDNTLDEDSEGSDDELGNLDDDEVSLGSMDDEEFAEVDEDGGTFMDVLDDESESVPELEVHSKVSTKKSKRKGTDDFDFAGSFQGPRKKKRNLNDSSLFVSAEEFGHLLDENMGSKFDNIGMNAMANKDNASLKQLRWEAERDDWLHNRDAKSIIKKKKHFKKKRIKTTQKTKKQRK

SEQ ID NO: 854438 - protein, 448 aa, Homo sapiens
SYARYMILRKSDNEDIARCCKMMQDKRCDMTCDCIDTTKRNETIVEPNCTERIQILYSDGINESIRGVASCDATYCTNLADLRGKQLNKYDPFSRNPLFCGAENTSLWELKKLSVHFHPSVALFAKTILQGNYIQYSGDPLQDFTLMRFLDRFVYRNPKPHKGKENTDSVVMQPKRKHFIKDIRHLPVNSKEFLAKEESQIPVDEVFFHRYYKKVAVKEKQKRDADEESIEDVDDEEFEELIDTFEDDNCFSSGKDDMDFAGNVKKRTKGAKDNTLDEDSEGSDDELGNLDDDEVSLGSMDDEEFAEVDEDGGTFMDVLDDESESVPELEVHSKVSTKKSKRKGTDDFDFAGSFQGPRKKKRNLNDSSLFVSAEEFGHLLDENMGSKFDNIGMNAMANKDNASLKQLRWEAERDDWLHNRDAKSIIKKKKHFKKKRIKTTQKTKKQRK

SEQ ID NO: 854439 - protein, 889 aa, Homo sapiens
MAAVKEPLEFHAKRPWRPEEAVEDPDEEDEDNTSEAENGFSLEEVLRLGGTKQDYLMLATLDENEEVIDGGKKGAIDDLQQGELEAFIQNLNLAKYTKASLIEEDEPAEKENSSKKEVKIPKINNKNTAESQRTSVNKVKNKNRPEPHSDENGSTTPKVKKDKQNIFEFFERQTLLLRPGGKWYDLEYSNEYSLKPQPQDVVSKYKTLAQKLYQHEINLFKSKTNSQKGASSTWMKAIVSSGTLGDRMAAMILLIQDDAVHTLQFVETLVNLVKKKGSKQQCLMALDTFKELLITDLLPDNRKLRIFSQRPFDKLEQLSSGNKDSRDRRLILWYFEHQLKHLVAEFVQVLETLSHDTLVTTKTRALTVAHELLCNKPEEEKALLVQVVNKLGDPQNRIATKASHLLETLLCKHPNMKGVVSGEVERLLFRSNISSKAQYYAICFLNQMALSHEESELANKLITVYFCFFRTCVKKKDVESKMLSALLTGVNRAYPYSQTGDDKVREQIDTLFKVLHIVNFNTSVQALMLLFQVMNSQQTISDRYYTALYRKMLDPGLMTCSKQAMFLNLVYKSLKADIVLRRVKAFVKRLLQVTCQQMPPFICGALYLVSEILKAKPGLRSQLDDHPESDDEENFIDANDDEDMEKFTDADKETEIVKKLETEETVPETDVETKKPEVASWVHFDNLKGGKQLNKYDPFSRNPLFCGAENTSLWELKKLSVHFHPSVALFAKTILQGNYIQYSGDPLQDFTLMRFLDRFVYRNPKPHKGKENTDSVVMQPKRKHFIKDIRHLPVNSKEFLAKEESQIPVDEVFFHRYYKKVAVKEKQKRDADEESIEDVDDEEFEELIDTFEDDNCFSSGKDDMDFAGFIVDGCGYILYRNNTYGSGLK

SEQ ID NO: 854440 - protein, 550 aa, Homo sapiens
MAAVKEPLEFHAKRPWRPEEAVEDPDEEDEDNTSEAENGFSLEEVLRLGGTKQDYLMLATLDENEEVIDGGKKGAIDDLQQGELEAFIQNLNLAKYTKASLIEEDEPAEKENSSKKEVKIPKINNKNTAESQRTSVNKVKNKNRPEPHSDENGSTTPKVKKDKQNIFEFFERQTLLLRPGGKWYDLEYSNEYSLKPQPQDVVSKYKTLAQKLYQHEINLFKSKTNSQKGASSTWMKAIVSSGTLGDRMAAMILLIQDDAVHTLQFVETLVNLVKKKGSKQQCLMALDTFKELLITDLLPDNRKLRIFSQRPFDKLEQLSSGNKDSRDRRLILWYFEHQLKHLVAEFVQVLETLSHDTLVTTKTRALTVAHELLCNKPEEEKALLVQVVNKLGDPQNRIATKASHLLETLLCKHPNMKGVVSGEVERLLFRSNISSKAQYYAICFLNQMALSHEESELANKLITVYFCFFRTCVKKKDVESKMLSALLTGVNRAYPYSQTGDDKVREQIDTLFKVLHIVNFNTSVQALMLLFQVMNSQQTISDRYYTALYR

SEQ ID NO: 854441 - protein, 177 aa, Homo sapiens
MANTAPQTPTGTYFSRKLRFWNLEFESQSFLYRQVGSVLGPSPGGGAEGGQAPVQSWLWVVGGSGSQVRRMTAVLVGHGRLWVTGTEETAVLVGHGRLWVTGGSGSQVRRMTAVLVAVGLGALAPAQVKTILESQDPLGKHQTRVAPAHGLFLKSVLYGNLGAASCTLQGPQFGSHG

SEQ ID NO: 854442 - protein, 303 aa, Homo sapiens
MSSAPASGSVRARYLVYFQYVGTDFNGVAAVRGTQRAVGVQNYLEEAAERLNSVEPVRFTISSRTDAGVHALSNAAHLDVQRRSGRPPFPPEVLAEALNTHLRHPAIRVLRAFRVPSDFHARHAATSRTYLYRLATGCHRRDELPVFERNLCWTLPADCLDMVAMQEAAQHLLGTHDFSAFQSAGSPVPSPVRTLRRVSVSPGQASPLVTPEESRKLRFWNLEFESQSFLYRQVRRMTAVLVAVGLGALAPAQVKTILESQDPLGKHQTRVAPAHGLFLKSVLYGNLGAASCTLQGPQFGSHG

SEQ ID NO: 854443 - protein, 368 aa, Homo sapiens
MSSAPASGSVRARYLVYFQYVGTDFNGVAAVRGTQRAVGVQNYLEEAAERLNSVEPVRFTISSRTDAGVHALSNAAHLDVQRRSGRPPFPPEVLAEALNTHLRHPAIRVLRAFRVPSDFHARHAATSRTYLYRLATGCHRRDELPVFERNLCWTLPAEKPPSTSSAHTTSAPSSPLAARCRAPCERCAGSPFPQAKPAPWSPPRRAGSCGSGTWSLRASLSCIDRYGSVLGPSPGGGAEGGQAPVQSWLWVVGGSGSQVRRMTAVLVGHGRLWVTGTEDEAVLVGHGRLWVTGGSGSQVRRMTAVLVAVGLGALAPAQVKTILESQDPLGKHQTRVAPAHGLFLKSVLYGNLGAASCTLQGPQFGSHG

SEQ ID NO: 854444 - protein, 306 aa, Homo sapiens
GEGSGPGLRRRRRPQGRAPPVTSARFCPSGVAAVRGTQRAVGVQNYLEEAAERLNSVEPVRFTISSRTDAGVHALSNAAHLDVQRRSGRPPFPPEVLAEALNTHLRHPAIRVLRAFRVPSDFHARHAATSRTYLYRLATGCHRRDELPVFERNLCWTLPADCLDMVAMQEAAQHLLGTHDFSAFQSAGSPVPSPVRTLRRVSVSPGQASPLVTPEESRKLRFWNLEFESQSFLYRQVRRMTAVLVAVGLGALAPAQVKTILESQDPLGKHQTRVAPAHGLFLKSVLYGNLGAASCTLQGPQFGSHG

SEQ ID NO: 854445 - protein, 303 aa, Homo sapiens; identical to SEQ ID NO: 854442

SEQ ID NO: 854446 - protein, 215 aa, Homo sapiens
MVAMQEAAQHLLGTHDFSAFQSAGSPVPSPVRTLRRVSVSPGQASPLVTPEESRKLRFWNLEFESQSFLYRQVGSVLGPSPGGGAEGGQAPVQSWLWVVGGSGSQVRRMTAVLVGHGRLWVTGTEDEAVLVGHGRLWVTGGSGSQVRRMTAVLVAVGLGALAPAQVKTILESQDPLGKHQTRVAPAHGLFLKSVLYGNLGAASCTLQGPQFGSHG

SEQ ID NO: 854447 - protein, 139 aa, Homo sapiens [sequence omitted]

SEQ ID NO: 854448 - protein, 504 aa, Homo sapiens
EFICRLLPREFPGEGSCSPSPEDKAWGSSSFPGSLHSPQASPIQGTRRRDAAMDDIFTQCREGNAVAVRLWLDNTENDLNQGDDHGFSPLHWACREGRSAVVEMLIMRGARINVMNRGDDTPLHLAASHGHRDIVQKLLQYKADINAVNEHGNVPLHYACFWGQDQVAEDLVANGALVSICNKYGEMPVDKAKAPLRELLRERAEKMGQNLNRIPYKDTFWKGTTRTRPRNGTLNKHSGIDFKQLNFLTKLNENHSGELWKGRWQGNDIVVKVLKVRDWSTRKSRDFNEECPRLRIFSHPNVLPVLGACQSPPAPHPTLITHWMPYGSLYNVLHEGTNFVVDQSQAVKFALDMARGMAFLHTLEPLIPRHALNSRSVMIDEDMTARISMADVKFSFQCPGRMYAPAWVAPEALQKKPEDTNRRSADMWSFAVLLWELVTREVPFADLSNMEIGMKVALEGLRPTIPPGISPHVCKLMKICMNEDPAKRPKFDMIVPILEKMQDK

SEQ ID NO: 854449 - protein, 509 aa, Homo sapiens
AGRGRRRAAGAAGREFPGEGSCSPSPEDKAWGSSSFPGSLHSPQASPIQGTRRRDAAMDDIFTQCREGNAVAVRLWLDNTENDLNQGDDHGFSPLHWACREGRSAVVEMLIMRGARINVMNRGDDTPLHLAASHGHRDIVQKLLQYKADINAVNEHGNVPLHYACFWGQDQVAEDLVANGALVSICNKYGEMPVDKAKAPLRELLRERAEKMGQNLNRIPYKDTFWKGTTRTRPRNGTLNKHSGIDFKQLNFLTKLNENHSGELWKGRWQGNDIVVKVLKVRDWSTRKSRDFNEECPRLRIFSHPNVLPVLGACQSPPAPHPTLITHWMPYGSLYNVLHEGTNFVVDQSQAVKFALDMARGMAFLHTLEPLIPRHALNSRSVMIDEDMTARISMADVKFSFQCPGRMYAPAWVAPEALQKKPEDTNRRSADMWSFAVLLWELVTREVPFADLSNMEIGMKVALEGLRPTIPPGISPHVCKLMKICMNEDPAKRPKFDMIVPILEKMQDK

SEQ ID NO: 854450 - protein, 401 aa, Homo sapiens
MLIMRGARINVMNRGDDTPLHLAASHGHRDIVQKLLQYKADINAVNEHGNVPLHYACFWGQDQVAEDLVANGALVSICNKYGEMPVDKAKAPLRELLRERAEKMGQNLNRIPYKDTFWKGTTRTRPRNGTLNKHSGIDFKQLNFLTKLNENHSGELWKGRWQGNDIVVKVLKVRDWSTRKSRDFNEECPRLRIFSHPNVLPVLGACQSPPAPHPTLITHWMPYGSLYNVLHEGTNFVVDQSQAVKFALDMARGMAFLHTLEPLIPRHALNSRSVMIDEDMTARISMADVKFSFQCPGRMYAPAWVAPEALQKKPEDTNRRSADMWSFAVLLWELVTREVPFADLSNMEIGMKVALEGLRPTIPPGISPHVCKLMKICMNEDPAKRPKFDMIVPILEKMQDK

SEQ ID NO: 854451 - protein, 358 aa, Homo sapiens
MVGSVTASEVAVALIIMAFSFQDDLVANGALVSICNKYGEMPVDKAKAPLRELLRERAEKMGQNLNRIPYKDTFWKGTTRTRPRNGTLNKHSGIDFKQLNFLTKLNENHSGELWKGRWQGNDIVVKVLKVRDWSTRKSRDFNEECPRLRIFSHPNVLPVLGACQSPPAPHPTLITHWMPYGSLYNVLHEGTNFVVDQSQAVKFALDMARGMAFLHTLEPLIPRHALNSRSVMIDEDMTARISMADVKFSFQCPGRMYAPAWVAPEALQKKPEDTNRRSADMWSFAVLLWELVTREVPFADLSNMEIGMKVALEGLRPTIPPGISPHVCKLMKICMNEDPAKRPKFDMIVPILEKMQDK

SEQ ID NO: 854452 - protein, 451 aa, Homo sapiens
IHLSTATTGVPRRRILQPESRGVREDPRPLSPLTSPESQSSGFPNPGDSAPGRCYGRHFHSVPGGQRSRRSPVAGQHGERPQPGLLQYKADINAVNEHGNVPLHYACFWGQDQVAEDLVANGALVSICNKYGEMPVDKAKAPLRELLRERAEKMGQNLNRIPYKDTFWKGTTRTRPRNGTLNKHSGIDFKQLNFLTKLNENHSGELWKGRWQGNDIVVKVLKVRDWSTRKSRDFNEECPRLRIFSHPNVLPVLGACQSPPAPHPTLITHWMPYGSLYNVLHEGTNFVVDQSQAVKFALDMARGMAFLHTLEPLIPRHALNSRSVMIDEDMTARISMADVKFSFQCPGRMYAPAWVAPEALQKKPEDTNRRSADMWSFAVLLWELVTREVPFADLSNMEIGMKVALEGLRPTIPPGISPHVCKLMKICMNEDPAKRPKFDMIVPILEKMQDK

SEQ ID NO: 854453 - protein, 389 aa, Homo sapiens
MVGSVTASEVAVALIIMAFSFQDDLVANGALVSICNKYGEMPVDKAKAPLRELLRGPSPHPLACVLSSLPTCLLPLYHSLGCFSSLERAEKMGQNLNRIPYKDTFWKGTTRTRPRNGTLNKHSGIDFKQLNFLTKLNENHSGELWKGRWQGNDIVVKVLKVRDWSTRKSRDFNEECPRLRIFSHPNVLPVLGACQSPPAPHPTLITHWMPYGSLYNVLHEGTNFVVDQSQAVKFALDMARGMAFLHTLEPLIPRHALNSRSVMIDEDMTARISMADVKFSFQCPGRMYAPAWVAPEALQKKPEDTNRRSADMWSFAVLLWELVTREVPFADLSNMEIGMKVALEGLRPTIPPGISPHVCKLMKICMNEDPAKRPKFDMIVPILEKMQDK

SEQ ID NO: 854454 - protein, 540 aa, Homo sapiens
AGRGRRRAAGAAGREFPGEGSCSPSPEDKAWGSSSFPGSLHSPQASPIQGTRRRDAAMDDIFTQCREGNAVAVRLWLDNTENDLNQGDDHGFSPLHWACREGRSAVVEMLIMRGARINVMNRGDDTPLHLAASHGHRDIVQKLLQYKADINAVNEHGNVPLHYACFWGQDQVAEDLVANGALVSICNKYGEMPVDKAKAPLRELLRGPSPHPLACVLSSLPTCLLPLYHSLGCFSSLERAEKMGQNLNRIPYKDTFWKGTTRTRPRNGTLNKHSGIDFKQLNFLTKLNENHSGELWKGRWQGNDIVVKVLKVRDWSTRKSRDFNEECPRLRIFSHPNVLPVLGACQSPPAPHPTLITHWMPYGSLYNVLHEGTNFVVDQSQAVKFALDMARGMAFLHTLEPLIPRHALNSRSVMIDEDMTARISMADVKFSFQCPGRMYAPAWVAPEALQKKPEDTNRRSADMWSFAVLLWELVTREVPFADLSNMEIGMKVALEGLRPTIPPGISPHVCKLMKICMNEDPAKRPKFDMIVPILEKMQDK

SEQ ID NO: 854455 - protein, 190 aa, Homo sapiens
MDDIFTQCREGNAVAVRLWLDNTENDLNQGDDHGFSPLHWACREGRSAVVEMLIMRGARINVMNRGDDTPLHLAASHGHRDIVQKLLQYKADINAVNEHGNVPLHYACFWGQDQVAEDLVANGALVSICNKYGEMPVDKAKAPLRELLRERAEKMGQNLNRIPYKDTFWKGTTRTRPLSHHCGKKGCKRK

SEQ ID NO: 854456 - protein, 343 aa, Homo sapiens
GGAGPAAGCGRGRTGVPRRRILQPESRPQASPIQGTRRRDAAMDDIFTQCREGNAVAVRLWLDNTENDLNQGDDHGFSPLHWACREGRSAVVEMLIMRGARINVMNRGDDTPLHLAASHGHRDIVQKLLQYKADINAVNEHGNVPLHYACFWGQDQVAEDLVANGALVSICNKYGEMPVDKAKAPLRELLRERAEKMGQNLNRIPYKDTFWKGTTRTRPRNGTLNKHSGIDFKQLNFLTKLNENHSGELWKGRWQGNDIVVKVLKVRDWSTRKSRDFNEECPRLRIFSHPNVLPVLGACQSPPAPHPTLITHWMPYGSLYNVLHEGTNFVVGSHCGATSWAAG

SEQ ID NO: 854457 - protein, 344 aa, Homo sapiens
AGRGRRRAAGAAGREFPGEGSCSPSPEDKAWGSSSFPGSLHSPQASPIQGTRRRDAAMDDIFTQCREGNAVAVRLWLDNTENDLNQGDDHGFSPLHWACREGRSAVVEMLIMRGARINVMNRGDDTPLHLAASHGHRDIVQKLLQYKADINAVNEHGNVPLHYACFWGQDQVAEDLVANGALVSICNKYGEMPVDKAKAPLRELLRERAEKMGQNLNRIPYKDTFWKGTTRTRPRNGTLNKHSGIDFKQLNFLTKLNENHSGELWKGRWQGNDIVVKVLKVRDWSTRKSRDFNEECPRLRISRSQCAPGWWLAAPPGLIYFSPGRLSPQFLSPFGAPGGVPGGP

SEQ ID NO: 854458 - protein, 91 aa, Homo sapiens
RGGAGGGLRARPDGSSPEKDPAARVPSSGFPNPGDSAPGRCYGRHFHSVPGGQRSRRSPVAGQHGERPQPGGRSWLLPLALGLPRGPLCCG

SEQ ID NO: 854459 - protein, 188 aa, Homo sapiens
GHSQGSSRSPELLHRPPLAGDAAQAPYPQHKHFSPVEDKAWGSSSFPGSLHSPQASPIQGTRRRDAAMDDIFTQCREGNAVAVRLWLDNTENDLNQGDDHGFSPLHWACREGRSAVVASPASSHGTTPAMGSIPFPHPYHCGPKRGGLRALSLATWCLPTWEGSAPPVTIKFIMKTGWCGDMGTDKYI

SEQ ID NO: 854460 - protein, 452 aa, Homo sapiens
MDDIFTQCREGNAVAVRLWLDNTENDLNQGDDHGFSPLHWACREGRSAVVEMLIMRGARINVMNRGDDTPLHLAASHGHRDIVQKLLQYKADINAVNEHGNVPLHYACFWGQDQVAEDLVANGALVSICNKYGEMPVDKAKAPLRELLRERAEKMGQNLNRIPYKDTFWKGTTRTRPRNGTLNKHSGIDFKQLNFLTKLNENHSGELWKGRWQGNDIVVKVLKVRDWSTRKSRDFNEECPRLRIFSHPNVLPVLGACQSPPAPHPTLITHWMPYGSLYNVLHEGTNFVVDQSQAVKFALDMARGMAFLHTLEPLIPRHALNSRSVMIDEDMTARISMADVKFSFQCPGRMYAPAWVAPEALQKKPEDTNRRSADMWSFAVLLWELVTREVPFADLSNMEIGMKVALEGLRPTIPPGISPHVCKLMKICMNEDPAKRPKFDMIVPILEKMQDK

SEQ ID NO: 854461 - protein, 519 aa, Homo sapiens
GHSQGSSRSPELLHRPPLAGDAAQAPYPQHKHFSPVEDKAWGSSSFPGSLHSPQASPIQGTRRRDAAMDDIFTQCREGNAVAVRLWLDNTENDLNQGDDHGFSPLHWACREGRSAVVEMLIMRGARINVMNRGDDTPLHLAASHGHRDIVQKLLQYKADINAVNEHGNVPLHYACFWGQDQVAEDLVANGALVSICNKYGEMPVDKAKAPLRELLRERAEKMGQNLNRIPYKDTFWKGTTRTRPRNGTLNKHSGIDFKQLNFLTKLNENHSGELWKGRWQGNDIVVKVLKVRDWSTRKSRDFNEECPRLRIFSHPNVLPVLGACQSPPAPHPTLITHWMPYGSLYNVLHEGTNFVVDQSQAVKFALDMARGMAFLHTLEPLIPRHALNSRSVMIDEDMTARISMADVKFSFQCPGRMYAPAWVAPEALQKKPEDTNRRSADMWSFAVLLWELVTREVPFADLSNMEIGMKVALEGLRPTIPPGISPHVCKLMKICMNEDPAKRPKFDMIVPILEKMQDK

SEQ ID NO: 854462 - protein, 318 aa, Homo sapiens
MPVDKAKAPLRELLRERAEKMGQNLNRIPYKDTFWKGTTRTRPRNGTLNKHSGIDFKQLNFLTKLNENHSGELWKGRWQGNDIVVKVLKVRDWSTRKSRDFNEECPRLRIFSHPNVLPVLGACQSPPAPHPTLITHWMPYGSLYNVLHEGTNFVVDQSQAVKFALDMARGMAFLHTLEPLIPRHALNSRSVMIDEDMTARISMADVKFSFQCPGRMYAPAWVAPEALQKKPEDTNRRSADMWSFAVLLWELVTREVPFADLSNMEIGMKVALEGLRPTIPPGISPHVCKLMKICMNEDPAKRPKFDMIVPILEKMQDK

SEQ ID NO: 854463 - protein, 420 aa, Homo sapiens
  misc_feature (5)..(6): Xaa can be any naturally occurring amino acid
  misc_feature (44)..(44): Xaa can be any naturally occurring amino acid
PVGPXXLLYNITVSMTGCQMQGGVIPTVHYIDRAPRMINISTTXERPSRQAQWLLQYKADINAVNEHGNVPLHYACFWGQDQVAEDLVANGALVSICNKYGEMPVDKAKAPLRELLRERAEKMGQNLNRIPYKDTFWKGTTRTRPRNGTLNKHSGIDFKQLNFLTKLNENHSGELWKGRWQGNDIVVKVLKVRDWSTRKSRDFNEECPRLRIFSHPNVLPVLGACQSPPAPHPTLITHWMPYGSLYNVLHEGTNFVVDQSQAVKFALDMARGMAFLHTLEPLIPRHALNSRSVMIDEDMTARISMADVKFSFQCPGRMYAPAWVAPEALQKKPEDTNRRSADMWSFAVLLWELVTREVPFADLSNMEIGMKVALEGLRPTIPPGISPHVCKLMKICMNEDPAKRPKFDMIVPILEKMQDK

SEQ ID NO: 854464 - protein, 525 aa, Homo sapiens
GGAGPAAGCGRGRTGVPRRRILQPESRPQASPIQGTRRRDAAMDDIFTQCREGNAVAVRLWLDNTENDLNQGDDHGFSPLHWACREGRSAVVEMLIMRGARINVMNRGDDTPLHLAASHGHRDIVQKLLQYKADINAVNEHGNVPLHYACFWGQDQVAEDLVANGALVSICNKYGEMPVDKAKAPLRELLRGPSPHPLACVLSSLPTCLLPLYHSLGCFSSLERAEKMGQNLNRIPYKDTFWKGTTRTRPRNGTLNKHSGIDFKQLNFLTKLNENHSGELWKGRWQGNDIVVKVLKVRDWSTRKSRDFNEECPRLRIFSHPNVLPVLGACQSPPAPHPTLITHWMPYGSLYNVLHEGTNFVVDQSQAVKFALDMARGMAFLHTLEPLIPRHALNSRSVMIDEDMTARISMADVKFSFQCPGRMYAPAWVAPEALQKKPEDTNRRSADMWSFAVLLWELVTREVPFADLSNMEIGMKVALEGLRPTIPPGISPHVCKLMKICMNEDPAKRPKFDMIVPILEKMQDK

SEQ ID NO: 854465 - protein, 289 aa, Homo sapiens
GGAGPAAGCGRGRTGVPRRRILQPESRPQASPIQGTRRRDAAMDDIFTQCREGNAVAVRLWLDNTENDLNQGDDHGFSPLHWACREGRSAVVEMLIMRGARINVMNRGDDTPLHLAASHGHRDIVQKLLQYKADINAVNEHGNVPLHYACFWGQDQVAEDLVANGALVSICNKYGEMPVDKAKAPLRELLRERAEKMGQNLNRIPYKDTFWKGTTRTRPRNGTLNKHSGIDFKQLNFLTKLNENHSGELWKGRWQGNDIVVKVLKVRDWSPCSSLYSRSTRPANLVVVV

SEQ ID NO: 854466 - protein, 161 aa, Homo sapiens
GGAGPAAGCGRGRTGVPRRRILQPESRPQASPIQGTRRRDAAMDDIFTQCREGNAVAVRLWLDNTENDLNQGDDHGFSPLHWACREGRSAVVEMLIMRGARINVMNRGDDTPLHLAASHGHRDIVQKLLQYKADINAVNEHGNVPLHYACFWGQDQVAEDK

SEQ ID NO: 854467 - protein, 62 aa, Homo sapiens
LQKKPEDTNRRSADMWSFAVLLWELVTREVPFADLSNMEIGMKVRAQQHTFVLREWLVMVKI

SEQ ID NO: 854468 - protein, 489 aa, Homo sapiens
PSRTPPRGPAPPASRSRGPTASGAGAPAAGQAGLTSTSAVRARPVSPARQSQDPAASLSLHLSLPPAPGAGCARWRRRGPQAAMAAGAGAGSAPRWLRALSEPLSAAQLRRLEEHRYSAAGVSLLEPPLQLYWTWLLQWIPLWMAPNSITLLGLAVNVVTTLVLISYCPTATEEAPYWTYLLCALGLFIYQSLDAIDGKQARRTNSCSPLGELFDHGCDSLSTVFMAVGASIAARLGTYPDWFFFCSFIGMFVFYCAHWQTYVSGMLRFGKVDVTEIQIALVIVFVLSAFGGATMWDYTIPILEIKLKILPVLGFLGGVIFSCSNYFHVILHGGVGKNGSTIAGTSVLSPGLHIGLIIILAIMIYKKSATDVFEKHPCLYILMFGCVFAKVSQKLVVAHMTKSELYLQDTVFLGPGLLFLDQYFNNFIDEYVVLWMAMVISSFDMVIYFSALCLQISRHLHLNIFKTACHQAPEQVQVLSSKSHQNNMD

SEQ ID NO: 854469 - protein, 481 aa, Homo sapiens
PSRTPPRGPAPPASRSRGPTASGAGAPAAGQAGLTSTSAVRARPVSPARQSQDPAASLSLHLSLPPAPGAGCARWRRRGPQAAMAAGAGAGSAPRWLRALSEPLSAAQLRRLEEHRYSAAGVSLLEPPLQLYWTWLLQWIPLWMAPNSITLLGLAVNVVTTLVLISYCPTATEEAPYWTYLLCALGLFIYQSLDAIDGKQARRTNSCSPLGELFDHGCDSLSTVFMAVGASIAARLGTYPDWFFFCSFIGMFVFYCAHWQTYVSGMLRFGKVDVTEIQIALVIVFVLSAFGGATMWDYTIPILEIKLKILPVLGFLGGVIFSCSNYFHVILHGGVGKNGSTIAGTSVLSPGLHIGLIIILAIMIYKKSATDVFEKHPCLYILMFGCVFAKVSQKLVVAHMTKSELYLQDTVFLGPGLLFLDQYFNNFIDEYVVLWMAMVISSFDMVIYFSALCLQISRHLHLNIFKTACHQAPEQVHKHID

SEQ ID NO: 854470 - protein, 489 aa, Homo sapiens; identical to SEQ ID NO: 854468

SEQ ID NO: 854471 - protein, 486 aa, Homo sapiens
AGRGAPPTILGVCRVPRVIYEQRAGLDASRHRPSRGAQRAEIHSAATSQDPAASLSLHLSLPPAPGAGCARWRRRGPQAAMAAGAGAGSAPRWLRALSEPLSAAQLRRLEEHRYSAAGVSLLEPPLQLYWTWLLQWIPLWMAPNSITLLGLAVNVVTTLVLISYCPTATEEAPYWTYLLCALGLFIYQSLDAIDGKQARRTNSCSPLGELFDHGCDSLSTVFMAVGASIAARLGTYPDWFFFCSFIGMFVFYCAHWQTYVSGMLRFGKVDVTEIQIALVIVFVLSAFGGATMWDYTIPILEIKLKILPVLGFLGGVIFSCSNYFHVILHGGVGKNGSTIAGTSVLSPGLHIGLIIILAIMIYKKSATDVFEKHPCLYILMFGCVFAKVSQKLVVAHMTKSELYLQDTVFLGPGLLFLDQYFNNFIDEYVVLWMAMVISSFDMVIYFSALCLQISRHLHLNIFKTACHQAPEQVQVLSSKSHQNNMD

SEQ ID NO: 854472 - protein, 486 aa, Homo sapiens
PSRTPPRGPAPPASRSRGPTASGAGAPAAGQAGLTSTSAVRARPVSPARQSQDPAASLSLHLSLPPAPGAGCARWRRRGPQAAMAAGAGAGSAPRWLRALSEPLSAAQLRRLEEHRYSAAGVSLLEPPLQLYWTWLLQWIPLWMAPNSITLLGLAVNVVTTLVLISYCPTATEEAPYWTYLLCALGLFIYQSLDAIDGKQARRTNSCSPLGELFDHGCDSLSTVFMAVGASIAARLGTYPDWFFFCSFIGMFVFYCAHWQTYVSGMLRFGKVDVTEIQIALVIVFVLSAFGGATMWDYTIPILEIKLKILPVLGFLGGVIFSCSNYFHVILHGGVGKNGSTIAGTSVLSPGLHIGLIIILAIMIYKKSATDVFEKHPCLYILMFGCVFAKVSQKLVVAHMTKSELYLQDTVFLGPGLLFLDQYFNNFIDEYVVLWMAMVISSFDMVIYFSALCLQISRHLHLLLLFWLEFAHTTVSRVKPEHDIGI

SEQ ID NO: 854473 - protein, 301 aa, Homo sapiens
PSRTPPRGPAPPASRSRGPTASGAGAPAAGQAGLTSTSAVRARPVSPARQSQDPAASLSLHLSLPPAPGAGCARWRRRGPQAAMAAGAGAGSAPRWLRALSEPLSAAQLRRLEEHRYSAAGVSLLEPPLQLYWTWLLQWIPLWMAPNSITLLGLAVNVVTTLVLISYCPTATEEAPYWTYLLCALGLFIYQSLDAIDGKQARRTNSCSPLGELFDHGCDSLSTVFMAVGASIAARLGTYPDWFFFCSFIGMFVFYCAHWQTYVSGMLRFGKVDVTEIQIALVIVFVLSAFGGATMWDYTFS

SEQ ID NO: 854474 - protein, 489 aa, Homo sapiens; identical to SEQ ID NO: 854468

SEQ ID NO: 854475 - protein, 481 aa, Homo sapiens; identical to SEQ ID NO: 854469

SEQ ID NO: 854476 - protein, 481 aa, Homo sapiens; identical to SEQ ID NO: 854469

SEQ ID NO: 854477 - protein, 481 aa, Homo sapiens; identical to SEQ ID NO: 854469

SEQ ID NO: 854478 - protein, 489 aa, Homo sapiens; identical to SEQ ID NO: 854468

SEQ ID NO: 854479 - protein, 452 aa, Homo sapiens
HLPPPPPPLTPPPHSHHPPPTLSLHLSLPPPPPTPSLPPPPPPLTPPSPHPPPPPPPRAPSPPSTNPSPPRLPPLHQHRYSAAGVSLLEPPLQLYWTWLLQWIPLWMAPNSITLLGLAVNVVTTLVLISYCPTATEEAPYWTYLLCALGLFIYQSLDAIDGKQARRTNSCSPLGELFDHGCDSLSTVFMAVGASIAARLGTYPDWFFFCSFIGMFVFYCAHWQTYVSGMLRFGKVDVTEIQIALVIVFVLSAFGGATMWDYTIPILEIKLKILPVLGFLGGVIFSCSNYFHVILHGGVGKNGSTIAGTSVLSPGLHIGLIIILAIMIYKKSATDVFEKHPCLYILMFGCVFAKVSQKLVVAHMTKSELYLQDTVFLGPGLLFLDQYFNNFIDEYVVLWMAMVISSFDMVIYFSALCLQISRHLHLNIFKTACHQAPEQVQVLSSKSHQNNMD

SEQ ID NO: 854480 - protein, 301 aa, Homo sapiens; identical to SEQ ID NO: 854473

SEQ ID NO: 854481 - protein, 146 aa, Homo sapiens
MLEGRQTPASTLEQDATDYRLRSLRKLLAQPREGLLAPFSKRNSTASFPGRTSHIPVQQPEKRKQKPSPEPSQDSPHSDKWPPGHPVKNLPQMRGPRPRPAGDSPRKTQWLNQVESYIAEQRRGDRMRPQAPGRGWHGEEEVVAAA

SEQ ID NO: 854482 - protein, 143 aa, Homo sapiens
AGTICWVPQVLCTCRACDAVYLTQSSQTHERCSIIPFMQMKKLGLIEVEYLAQGHTVSDRTWIQPQSGAPWCVTRMIILCLVCLVWKGRGREIYQAWWHVPVVPDTQEAEAGGSPEPGEVESAVSRDHATTLQPGPQSESLSP

SEQ ID NO: 854483 - protein, 72 aa, Homo sapiens
PLYVGGVGVRRGEKQRAVVPRPRLRLVTRWASRVIKGGAETSVCQFRTPDSGAPLGKGLGVSFVKGPKAPPP

SEQ ID NO: 854484 - protein, 88 aa, Homo sapiens
GWRVAGSLSSALAPLRPPPTAPPWHWLAPGEAEAPSFLRRFPPHSRRPSASRWEVSVARASAPQRMWQPRAMALAVRVVYCIFSSRRS

SEQ ID NO: 854485 - protein, 83 aa, Homo sapiens
GWRVAGSLSSALAPLRPPPTAPPWHWLAPGEAEAPSFLRRFPPHSRRPSASRWEVSVARASAPQRMWQPRAMALAVRVVYCGA

SEQ ID NO: 854486 - protein, 83 aa, Homo sapiens; identical to SEQ ID NO: 854485

SEQ ID NO: 854487 - protein, 83 aa, Homo sapiens; identical to SEQ ID NO: 854485

SEQ ID NO: 854488 - protein, 72 aa, Homo sapiens; identical to SEQ ID NO: 854483

SEQ ID NO: 854489 - protein, 83 aa, Homo sapiens; identical to SEQ ID NO: 854485

SEQ ID NO: 854490 - protein, 72 aa, Homo sapiens; identical to SEQ ID NO: 854483

SEQ ID NO: 854491 - protein, 72 aa, Homo sapiens; identical to SEQ ID NO: 854483

SEQ ID NO: 854492 - protein, 72 aa, Homo sapiens; identical to SEQ ID NO: 854483

SEQ ID NO: 854493 - protein, 83 aa, Homo sapiens; identical to SEQ ID NO: 854485

SEQ ID NO: 854494 - protein, 72 aa, Homo sapiens; identical to SEQ ID NO: 854483

SEQ ID NO: 854495 - protein, 102 aa, Homo sapiens
RGAGRPGSMSVPSGGAGAVLRAPACAPRAGLGLFQDAHVRTETPDRGSSRLERAPPAWGGLSTSRFRPTEGVGGARPGDLRVKELGQDLTNARETARGFVRL

SEQ ID NO: 854496 - protein, 483 aa, Homo sapiens
MSGHKCSYPWDLQDRYAQDKSVVNKMQQKYWETKQAFIKATGKKEDEHVVASDADLDAKLELFHSIQRTCLDLSKAIVLYQKRICFLSQEENELGKFLRSQGFQDKTRAGKMMQATGKALCFSSQQRLALRNPLCRFHQEVETFRHRAISDTWLTVNRMEQCRTEYRGALLWMKDVSQELDPDLYKQMEKFRKVQTQVRLAKKNFDKLKMDVCQKVDLLGASRCNLLSHMLATYQTTLLHFWEKTSHTMAAIHESFKGYQPYEFTTLKSLQDPMKKLVEKEEKKKINQQESTDAAVQEPSQLISLEEENQRKESSSFKTEDGKSILSALDKGSTHTACSGPIDELLDMKSEEGACLGPVAGTPEPEGADKDDLLLLSEIFNASSLEEGEFSKEWAAVFGDGQVKEPVPTMALGEPDPKAQTGSGFLPSQLLDQNMKDLQASLQEPAKAASDLTAWFSLFADLDPLSNPDAVGKTDKEHELLNA

SEQ ID NO: 854497 - protein, 257 aa, Homo sapiens
MSGHKCSYPWDLQDRYAQDKSVVNKMQQKYWETKQAFIKATGKKEDEHVVASDADLDAKLELFHSIQRTCLDLSKAIVLYQKRICFLSQEENELGKFLRSQGFQDKTRAGKMMQATGKALCFSSQQRLALRNPLCRFHQEVETFRHRAISDTWLTVNRMEQCRTEYRGALLWMKDVSQELDPDLYKQMEKFRKVQTQVRLAKKNFDKLKMDVCQKVDLLGASRCNLLSHMLATYQLAWDQWQGPRNLKVLTKMTCCC

SEQ ID NO: 854498 - protein, 341 aa, Homo sapiens
MSGHKCSYPWDLQDRYAQDKSVVNKMQQKYWETKQAFIKATGKKEDEHVVASDADLDAKLELFHSIQRTCLDLSKAIVLYQKRICFLSQEENELGKFLRSQGFQDKTRAGKMMQATGKALCFSSQQRLALRNPLCRFHQEVETFRHRAISDTWLTVNRMEQCRTEYRGALLWMKDVSQELDPDLYKQMEKFRKVQTQVRLAKKNFDKLKMDVCQKVDLLGASRCNLLSHMLATYQTTLLHFWEKTSHTMAAIHESFKGYQPYEFTTLKVWKLEGPLENLEKSKVLFISQAKSIAESIIIPGLRMLKRELCPQQSLFLSFFLFFYCIRIQYNENLLQSKSAN

SEQ ID NO: 854499 - protein, 149 aa, Homo sapiens
MGENGIGGTSRIQGTVQSETSTVMDLELSLPLDEGMDDLLLLSEIFNASSLEEGEFSKEWAAVFGDGQVKEPVPTMALGEPDPKAQTGSGFLPSQLLDQNMKDLQASLQEPAKAASDLTAWFSLFADLDPLSNPDAVGKTDKEHELLNA

SEQ ID NO: 854500 - protein, 483 aa, Homo sapiens; identical to SEQ ID NO: 854496

SEQ ID NO: 854501 - protein, 409 aa, Homo sapiens
MSRCAPAWATEVLSQEENELGKFLRSQGFQDKTRAGKMMQATGKALCFSSQQRLALRNPLCRFHQEVETFRHRAISDTWLTVNRMEQCRTEYRGALLWMKDVSQELDPDLYKQMEKFRKVQTQVRLAKKNFDKLKMDVCQKVDLLGASRCNLLSHMLATYQTTLLHFWEKTSHTMAAIHESFKGYQPYEFTTLKSLQDPMKKLVEKEEKKKINQQESTDAAVQEPSQLISLEEENQRKESSSFKTEDGKSILSALDKGSTHTACSGPIDELLDMKSEEGACLGPVAGTPEPEGADKDDLLLLSEIFNASSLEEGEFSKEWAAVFGDGQVKEPVPTMALGEPDPKAQTGSGFLPSQLLDQNMKDLQASLQEPAKAASDLTAWFSLFADLDPLSNPDAVGKTDKEHELLNA

SEQ ID NO: 854502 - protein, 364 aa, Homo sapiens
MEHLLHSRLALRNPLCRFHQEVETFRHRAISDTWLTVNRMEQCRTEYRGALLWMKDVSQELDPDLYKQMEKFRKVQTQVRLAKKNFDKLKMDVCQKVDLLGASRCNLLSHMLATYQTTLLHFWEKTSHTMAAIHESFKGYQPYEFTTLKSLQDPMKKLVEKEEKKKINQQESTDAAVQEPSQLISLEEENQRKESSSFKTEDGKSILSALDKGSTHTACSGPIDELLDMKSEEGACLGPVAGTPEPEGADKDDLLLLSEIFNASSLEEGEFSKEWAAVFGDGQVKEPVPTMALGEPDPKAQTGSGFLPSQLLDQNMKDLQASLQEPAKAASDLTAWFSLFADLDPLSNPDAVGKTDKEHELLNA

SEQ ID NO: 854503 - protein, 235 aa, Homo sapiens [sequence omitted]

SEQ ID NO: 854504 - protein, 483 aa, Homo sapiens; identical to SEQ ID NO: 854496

SEQ ID NO: 854505 - protein, 238 aa, Homo sapiens [sequence omitted]

SEQ ID NO: 854506 - protein, 319 aa, Homo sapiens
MSGHKCSYPWDLQDRYAQDKSVVNKMQQKYWETKQAFIKATGKKEDEHVVASDADLDAKLELFHSIQRTCLDLSKAIVLYQKRICFLSQEENELGKFLRSQGFQDKTRAGKMMQATGKALCFSSQQRLALRNPLCRFHQEVETFRHRAISDTWLTVNRMEQCRTEYRGALLWMKDVSQELDPDLYKQMEKFRKLQNTSAPCKKNFDKALNDIGIWVCPNTGILCGGRSEECNLLSPMKELPDTLVPFGSNSPPMGGSPERFKGLTPWIHFKKLKPNNFLANEATTSQEVNGRRPPNIEKDPGPYTERECERQQGAPENT

SEQ ID NO: 854507 - protein, 512 aa, Homo sapiens
GGGAPGGLQEAAGDARQPGRSGTPEEEENMSGHKCSYPWDLQDRYAQDKSVVNKMQQKYWETKQAFIKATGKKEDEHVVASDADLDAKLELFHSIQRTCLDLSKAIVLYQKRICFLSQEENELGKFLRSQGFQDKTRAGKMMQATGKALCFSSQQRLALRNPLCRFHQEVETFRHRAISDTWLTVNRMEQCRTEYRGALLWMKDVSQELDPDLYKQMEKFRKVQTQVRLAKKNFDKLKMDVCQKVDLLGASRCNLLSHMLATYQTTLLHFWEKTSHTMAAIHESFKGYQPYEFTTLKSLQDPMKKLVEKEEKKKINQQESTDAAVQEPSQLISLEEENQRKESSSFKTEDGKSILSALDKGSTHTACSGPIDELLDMKSEEGACLGPVAGTPEPEGADKDDLLLLSEIFNASSLEEGEFSKEWAAVFGDGQVKEPVPTMALGEPDPKAQTGSGFLPSQLLDQNMKDLQASLQEPAKAASDLTAWFSLFADLDPLSNPDAVGKTDKEHELLNA

SEQ ID NO: 854508 - protein, 409 aa, Homo sapiens; identical to SEQ ID NO: 854501

SEQ ID NO: 854509 - protein, 483 aa, Homo sapiens; identical to SEQ ID NO: 854496

SEQ ID NO: 854510 - protein, 483 aa, Homo sapiens; identical to SEQ ID NO: 854496

SEQ ID NO: 854511 - protein, 371 aa, Homo sapiens [sequence omitted]

SEQ ID NO: 854512 - protein, 421 aa, Homo sapiens
MSGHKCSYPWDLQDRYAQDKSVVNKMQQKYWETKQAFIKATGKKEDEHVVASDADLDAKLELFHSIQRTCLDLSKAIVLYQKRICFLSQEENELGKFLRSQGFQDKTRAGKMMQATGKALCFSSQQRLALRNPLCRFHQEVETFRHRAISDTWLTVNRMEQCRTEYRGALLWMKDVSQELDPDLYKQMEKFRKVQTQVRLAKKNFDKLKMDVCQKVDLLGASRCNLLSHMLATYQTTLLHFWEKTSHTMAAIHESFKGYQPYEFTTLKSLQDPMKKLVEKEEKKKINQQESTDAAVQEPSQLISLEEENQRKESSSFKTEDGKSILSALDKGSTHTACSGPIDELLDMKSEEGACLGPVAGTPEPEGADKDDLLLLSEIFNASSLEEGEFSKEWAAVFGDGQVKEPTPRPRQAQVSFLRSF

SEQ ID NO: 854513 - protein, 355 aa, Homo sapiens
MSGHKCSYPWDLQDRYAQDKSVVNKMQQKYWETKQAFIKATGKKEDEHVVASDADLDAKLELFHSIQRTCLDLSKAIVLYQKRICFLSQEENELGKFLRSQGFQDKTRAGKMMQATGKALCFSSQQRLALRNPLCRFHQEVETFRHRAISDTWLTVNRMEQCRTEYRGALLWMKDVSQELDPDLYKQMEKFRKVQTQVRLAKKNFDKLKMDVCQKVDLLGASRCNLLSHMLATYQTTLLHFWEKTSHTMAAIHESFKGYQPYEFTTLKSLQDPMKKLVEKEEKKKINQQESTDATSRMRENFCNLSICKGLISRICKVLKLIYEEQNSPIKKWEKDLNRHFSIEDIDATISMKKA

SEQ ID NO: 854514 - protein, 238 aa, Homo sapiens [sequence omitted]

SEQ ID NO: 854515 - protein, 431 aa, Homo sapiens
MQKATYYDNAAAALFGGYSSYPGSNGFGFDVPPQPPFQAATHLEGDYQRSACSLQSLGNAAPHAKSKELNGSCMRPGLAPETLSAPPGSPPPSAAPTSATSNSSNGGGPSKSGPPKCGPGTNSTLTKQIFPWMKESRQTSKLKNNSPGTAEGCGGGGGGGGGGGSGGSGGGGGGGGGGDKSPPGSAASKRARTAYTSAQLVELEKEFHFNRYLCRPRRVEMANLLNLSERQIKIWFQNRRMKYKKDQKAKGLASSSGGPSPAGSPPQPMQSTAGFMNALHSMTPSYESPSPPAFGKAHQNAYALPSNYQPPLKGCGAPQKYPPTPAPEYEPHVLQANGGAYGTPTMQGSPVYVGGGGYADPLPPPAGPSLYGLNHLSHHPSGNLDYNGAPPMAPSQHHGPCEPHPTYTDLSSHHAPPPQGRIQEAPKLTHL

SEQ ID NO: 854516 - protein, 431 aa, Homo sapiens; identical to SEQ ID NO: 854515

SEQ ID NO: 854517 - protein, 167 aa, Homo sapiens
MVIDGEGDAAQVERFVHLPGVQEWVGGTTQSILYLAHTCWYWSWLAFPCATRRSCTVLSSQLTSAKMSGFSSELLCEATRMEVISASVLILEVEKWSESSVVKWPYTKVGDIQNRGEIGLSAPLGGREAVGVGGEMALCECGRPADWRWNWPQCLSWRWRSGQSPWW

SEQ ID NO: 854518 - protein, 167 aa, Homo sapiens; identical to SEQ ID NO: 854517

SEQ ID NO: 854519 - protein, 167 aa, Homo sapiens; identical to SEQ ID NO: 854517

SEQ ID NO: 854520 - protein, 113 aa, Homo sapiens
MDEDVLHPEEPHHRLLLRFTDDTFDPELAATIGTNLRLFYDVCKLSYPQEAAVGREQEEAVPTVERRKLEVPPAWSAHVFFLNTRQTVTVFPDRTGIGRTPYRKHPCCGRFHF

SEQ ID NO: 854521 - protein, 167 aa, Homo sapiens; identical to SEQ ID NO: 854517

SEQ ID NO: 854522 - protein, 438 aa, Homo sapiens
MLARVTRKMLRHAKCFQRLAIFGSVRALHKDNRTATPQNFSNYESMKQDFKLGIPEYFNFAKDVLDQWTDKEKAGKKPSNPAFWWINRNGEEMRWSFEELGSLSRKFANILSEACSLQRGDRVILILPRVPEWWLANVACLRTGTVLIPGTTQLTQKDILYRLQSSKANCIITNDVLAPAVDAVASKCENLHSKLIVSENSREGWGNLKELMKHASDSHTCVKTKHNEIMAIFFTSGTSGYPKMTAHTHSSFGLGLSVNGRFWLDLTPSDVMWNTSDTGWAKSAWSSVFSPWIQGACVFTHHLPRFEPTSILQTLSKYPITVFCSAPTVYRMLVQNDITSYKFKSLKHCVSAGEPITPDVTEKWRNKTGLDIYEGYGQTETVLICGNFKGMKIKPGSMGKPSPAFDVKVCTSPSRRMFNNPICTLPTYRLPPYKLSLL

SEQ ID NO: 854523 - protein, 89 aa, Homo sapiens
GGPPPGIDLFFPPPPGIFEWMVVKAFVVLNPDYKSHDQEQLIKEIQEHVKKTTAPYKYPRKVEFIQELPKTISGKTKRNELRKKEWKTI

SEQ ID NO: 854524 - protein, 528 aa, Homo sapiens
MLARVTRKMLRHAKCFQRLAIFGSVRALHKDNRTATPQNFSNYESMKQDFKLGIPEYFNFAKDVLDQWTDKEKAGKKPSNPAFWWINRNGEEMRWSFEELGSLSRKFANILSEACSLQRGDRVILILPRVPEWWLANVACLRTGTVLIPGTTQLTQKDILYRLQSSKANCIITNDVLAPAVDAVASKCENLHSKLIVSENSREGWGNLKELMKHASDSHTCVKTKHNEIMAIFFTSGTSGYPKMTAHTHSSFGLGLSVNGRFWLDLTPSDVMWNTSDTGWAKSAWSSVFSPWIQGACVFTHHLPRFEPTSILQTLSKYPITVFCSAPTVYRMLVQNDITSYKFKSLKHCVSAGEPITPDVTEKWRNKTGLDIYEGYGQTETVLICGNFKGMKIKPGSMGKPSPAFDVKIVDVNGNVLPPGQEGDIGIQVLPNRPFGLFTHYVDNPSKTASTLRGNFYITGDRGYMDKDGYFWFVARADDVILSSGYRIGPFEVENALNEHPSVAESAVVSSPDPIRGEGSKGFCRSKS

SEQ ID NO: 854525 - protein, 178 aa, Homo sapiens
RVSACLTFCSAVSSLLLAVAVCASRCGMYVLAPFDFFGSVSASALCLVYVLLVFCRFVRAMCVVGPAHSCAPGVRALCFCWCVFVVRALVVASPVCFFVVYGLSPLVFLFVRFSSFPPCLPLSWASCSSLVLFARLCFSSFASGVSAFVCCRCAVVVCVVLFCCIVCSVSPPARGLTF

SEQ ID NO: 854526 - protein, 215 aa, Homo sapiens
PSTPITWEITKVLEALGQEPRMKTQYSYKFKSLKHCVSAGEPITPDVTEKWRNKTGLDIYEGYGQTETVLICGNFKGMKIKPGSMGKPSPAFDVKIVDVNGNVLPPGQEGDIGIQVLPNRPFGLFTHYVDNPSKTASTLRGNFYITGDRGYMDKDGYFWFVARADDVILSSGYRIGPFEVENALNEHPSVAESAVVSSPDPIRGEGSKGFCRSKS

SEQ ID NO: 854527 - protein, 90 aa, Homo sapiens
  misc_feature (9)..(10): Xaa can be any naturally occurring amino acid
  misc_feature (16)..(18): Xaa can be any naturally occurring amino acid
APEGPPQAXXVFSLLXXXVRMEVVKAFVVLNPDYKSHDQEQLIKEIQEHVKKTTAPYKYPRKVEFIQELPKTISGKTKRNELRKKEWKTI

SEQ ID NO: 854528 - protein, 528 aa, Homo sapiens; identical to SEQ ID NO: 854524

SEQ ID NO: 854529 - protein, 452 aa, Homo sapiens
MLARVTRKMLRHAKCFQRLAIFGSVRALHKDNRTATPQNFSNYESMKQDFKLGIPEYFNFAKDVLDQWTDKEKAGKKPSNPAFWWINRNGEEMRWSFEELGSLSRKFANILSEACSLQRGDRVILILPRVPEWWLANVACLRTGTVLIPGTTQLTQKDILYRLQSSKANCIITNDVLAPAVDAVASKCENLHSKLIVSENSREGWGNLKELMKHASDSHTCVKTKHNEIMAIFFTSGTSGYPKMTAHTHSSFGLGLSVNGRFWLDLTPSDVMWNTSDTGWAKSAWSSVFSPWIQGACVFTHHLPRFEPTSILQTLSKYPITVFCSAPTVYRMLVQNDITSYKFKSLKHCVSAGEPITPDVTEKWRNKTGLDIYEGYGQTETVLICGNFKGMKIKPGSMGKPSPAFDVKIVDVNGNVLPPGQEGDIGIQVLPNRPFGLFTHYVGSKGFCRSKS

SEQ ID NO: 854530 - protein, 241 aa, Homo sapiens
MMTYEWYLPKMAKHLPGVNFPGNRWNPVEGILPSGMVTFNLYHFLEVNKQKETFVCIGIHEGDPTWKKNYSLWPWGSCDKLVPLEIVFNPEEWIKLTKSIYNWTEEYGRFDPSSWESVANEEMWQARMKTPFFIFNLAETAHMPSKVKAQLYAQAYDLYKEIVYLQKEHPVNWHKNYAIACERMLRLQARDADPEVLLSETIRHFRLYSQKAPNDPQQADILGALKHLRKELQSLRNRKNV

SEQ ID NO: 854531 - protein, 114 aa, Homo sapiens [sequence omitted]

SEQ ID NO: 854532 - protein, 708 aa, Homo sapiens
DPEAAVAAAQAALVSRLGSSVSHRVLGLAVSFSLGRHWPMSPHGDGRGQAQGRAVRVGLRRSGGIRGGVAVFAAVAAVFTFTLPPSVPGGDSGELITAAHELGVAHPPGYPLFTLVAKLAITLFPFGSIAYRVNLLCGLFGAVAASLLFFTVFRLSGSSAGGILAAGVFSFSRLTWQWSIAAEVFSLNNLFVGLLMALTVHFEEAATAKERSKVAKIGAFCCGLSLCNQHTIILYVLCIIPWILFQLLKKKELSLGSLLKLSLYFSAGLLPYVHLPISSYLNHARWTWGDQTTLQGFLTHFLREEYGTFSLAKSEIGSSMSEILAFSSNKYEDRTLIQHPSPCSLCKYMFSNKVERFWMQSNAVVAVLAGIGLAAVVSETNRVLNSNGLQCLEWLSATLFVVYQIYSNYSVCDQRTNYVIDKFAKNLLTSMPHDAIILLRGDLPGNSLRYMHYCEGLRPDISLVDQEMMTYEWYLPKMAKHLPGVNFPGNRWNPVEGILPSGMVTFNLYHFLEVNKQKETFVCIGIHEGDPTWKKNYSLWPWGSCDKLVPLEIVFNPEEWIKLTKSIYNWTEEYGRFDPSSWESVANEEMWQARMKTPFFIFNLAETAHMPSKVKAQLYAQAYDLYKEIVYLQKEHPVNWHKNYAIACERMLRLQARDADPEVLLSETIRHFRLYSQKAPNDPQQADILGALKHLRKELQSLRNRKNV

SEQ ID NO: 854533 - protein, 746 aa, Homo sapiens
DPEAAVAAAQAALVSRLGSSVSHRVLGLAVSFSLGRHWPMSPHGDGRGQAQGRAVRVGLRRSGGIRGGVAVFAAVAAVFTFTLPPSVPGGDSGELITAAHELGVAHPPGYPLFTLVAKLAITLFPFGSIAYRVNLLCGLFGAVAASLLFFTVFRLSGSSAGGILAAGVFSFSRLTWQWSIAAEVFSLNNLFVGLLMALTVHFEEAATAKERSKVAKIGAFCCGLSLCNQHTIILYVLCIIPWILFQLLKKKELSLGSLLKLSLYFSAGLLPYVHLPISSYLNHARWTWGDQTTLQGFLTHFLREEYGTFSLAKSEIGSSMSEILLSQVTNMRTELSFNIQALAVCANICLATKDRQNPSLVWLFTGMFCIYSLFFAWRANLDISKPLFMGVVERFWMQSNAVVAVLAGIGLAAVVSETNRVLNSNGLQCLEWLSATLFVVYQIYSNYSVCDQRTNYVIDKFAKNLLTSMPHDAIILLRGDLPGNSLRYMHYCEGLRPDISLVDQEMMTYEWYLPKMAKHLPGVNFPGNRWNPVEGILPSGMVTFNLYHFLEVNKQKETFVCIGIHEGDPTWKKNYSLWPWGSCDKLVPLEIVFNPEEWIKLTKSIYNWTEEYGRFDPSSWESVANEEMWQARMKTPFFIFNLAETAHMPSKVKAQLYAQAYDLYKEIVYLQKEHPVNWHKNYAIACERMLRLQARDADPEVLLSETIRHFRLYSQKAPNDPQQADILGALKHLRKELQSLRNRKNV

SEQ ID NO: 854534 - protein, 363 aa, Homo sapiens
DPEAAVAAAQAALVSRLGSSVSHRVLGLAVSFSLGRHWPMSPHGDGRGQAQGRAVRVGLRRSGGIRGGVAVFAAVAAVFTFTLPPSVPGGDSGELITAAHELGVAHPPGYPLFTLVAKLAITLFPFGSIAYRVNLLCGLFGAVAASLLFFTVFRLSGSSAGGILAAGVFSFSRLTWQWSIAAEVFSLNNLFVGLLMALTVHFEEAATAKERSKVAKIGAFCCGLSLCNQHTIILYVLCIIPWILFQLLKKKELSLGSLLKLSLYFSAGLLPYVHLPISSYLNHARWTWGDQTTLQGFLTHFLREEYGTFSLAKSEIGSSMSEILLSQVTNMRTELSFNIQALAVCANICLATKWNDSGCRAMQ

SEQ ID NO: 854535 - protein, 976 aa, Homo sapiens
MNAGPGCEPCTKRPRWGAATTSPAASDARSFPSRQRRVLDPKDAHVQFRVPPSSPACVPGQAGQHRGSATSLVFKQKTITSWMDTKGIKTAESESLDSKENNNTRIESMMSSVQKDNFYQHNVEKLENVSQLSLDKSLTEKSTQYLNQHQTAAMCKWQNEGKHTEQLLESEPQTVTLVPEQFSNANIDRSPQNDDHSDTDSEENRDNQQFLTTVKLANAKQTTEDEHAREAKSHQKCSKSCHPGEDCASCQQDEIDVVPKSPLSDVGSEDVGTGSKNDNKLIRQESCLGNSPPFEKESEPESPMDVDNSKNSCQDSEADEETSPGFDEQEDGSSSQTANKPSRFQARDADIEFRKRYSTKGGEVRLHFQFEGGESRTGMNDLNAKLPGNISSLNVECRNSKQHGKKDSKITDHFMRLPKAEDRRKEQWETKHQRTERKIPKYVPPHLSPDKKWLGTPIEEMRRMPQCGIRLPLLRPSANHTVTIWVDLLRAGEVPKPFPTHYKDLWDNKHVKMPCSEQNLYPVEDENGERTAGSRWELIQTALLNKFTRPQNLKDAILKYNVAYSKKWDFTALIDFWDKVLEEAEAQHLYQSILPDMVKIALCLPNICTQPIPLLKQKMNHSITMSQEQIASLLANAFFCTFPRRNAKMKSEYSSYPDINFNRLFEGRSSRKPEKLKTLFCYFRRVTEKKPTGLVTFTRQSLEDFPEWERCEKPLTRLHVTYEGTIEENGQGMLQVDFANRFVGGGVTSAGLVQEEIRFLINPELIISRLFTEVLDHNECLIITGTEQYSEYTGYAETYRWSRSHEDGSERDDWQRRCTEIVAIDALHFRRYLDQFVPEKMRRELNKAYCGFLRPGVSSENLSAVATGNWGCGAFGGDARLKALIQILAAAAAERDVVYFTFGDSELMRDIYSMHIFLTERKLTVGDVYKLLLRYYNEECRNCSTPGPDIKLYPFIYHAVESCAETADHSGQRTGT

SEQ ID NO: 854536 - protein, 106 aa, Homo sapiens
MNAGPGCEPCTKRPRWGAATTSPAASDARSFPSRQRRVLDPKDAHVQFRVPPSSPACVPGQAGQHRGSATSLGTWENKNLCPSPRPEPSGLRDSSHSFLVLCASSL

SEQ ID NO: 854537 - protein, 135 aa, Homo sapiens
RFPLSATLPLCGNVRPGSWKRLTAAFRWWESERIPNQTCTKRPRWGAATTSPAASDARSFPSRQRRVLDPKDAHVQFRVPPSSPACVPGQAGQHRGSATSLGTWENKNLCPSPRPEPSGLRDSSHSFLVLCASSL

SEQ ID NO: 854538 - protein, 894 aa, Homo sapiens
MDTKGIKTAESESLDSKENNNTRIESMMSSVQKDNFYQHNVEKLENVSQLSLDKSLTEKSTQYLNQHQTAAMCKWQNEGKHTEQLLESEPQTVTLVPEQFSNANIDRSPQNDDHSDTDSEENRDNQQFLTTVKLANAKQTTEDEHAREAKSHQKCSKSCHPGEDCASCQQDEIDVVPKSPLSDVGSEDVGTGSKNDNKLIRQESCLGNSPPFEKESEPESPMDVDNSKNSCQDSEADEETSPGFDEQEDGSSSQTANKPSRFQARDADIEFRKRYSTKGGEVRLHFQFEGGESRTGMNDLNAKLPGNISSLNVECRNSKQHGKKDSKITDHFMRLPKAEDRRKEQWETKHQRTERKIPKYVPPHLSPDKKWLGTPIEEMRRMPQCGIRLPLLRPSANHTVTIWVDLLRAGEVPKPFPTHYKDLWDNKHVKMPCSEQNLYPVEDENGERTAGSRWELIQTALLNKFTRPQNLKDAILKYNVAYSKKWDFTALIDFWDKVLEEAEAQHLYQSILPDMVKIALCLPNICTQPIPLLKQKMNHSITMSQEQIASLLANAFFCTFPRRNAKMKSEYSSYPDINFNRLFEGRSSRKPEKLKTLFCYFRRVTEKKPTGLVTFTRQSLEDFPEWERCEKPLTRLHVTYEGTIEENGQGMLQVDFANRFVGGGVTSAGLVQEEIRFLINPELIISRLFTEVLDHNECLIITGTEQYSEYTGYAETYRWSRSHEDGSERDDWQRRCTEIVAIDALHFRRYLDQFVPEKMRRELNKAYCGFLRPGVSSENLSAVATGNWGCGAFGGDARLKALIQILAAAAAERDVVYFTFGDSELMRDIYSMHIFLTERKLTVGDVYKLLLRYYNEECRNCSTPGPDIKLYPFIYHAVESCAETADHSGQRTGT

SEQ ID NO: 854539 - protein, 575 aa, Homo sapiens
RAEFGTRNRRRIEAGGVPVEEGRQASVYGLTWEAGGSAIAEAGSGREGMVQAGAEKDAQSISLRKEQWETKHQRTERKIPKYVPPHLSPDKKWLGTPIEEMRRMPQCGIRLPLLRPSANHTVTIWNGERTAGSRWELIQTALLNKFTRPQNLKDAILKYNVAYSKKWDFTALIDFWDKVLEEAEAQHLYQSILPDMVKIALCLPNICTQPIPLLKQKMNHSITMSQEQIASLLANAFFCTFPRRNAKMKSEYSSYPDINFNRLFEGRSSRKPEKLKTLFCYFRRVTEKKPTGLVTFTRQSLEDFPEWERCEKPLTRLHVTYEGTIEENGQGMLQVDFANRFVGGGVTSAGLVQEEIRFLINPELIISRLFTEVLDHNECLIITGTEQYSEYTGYAETYRWSRSHEDGSERDDWQRRCTEIVAIDALHFRRYLDQFVPEKMRRELNKAYCGFLRPGVSSENLSAVATGNWGCGAFGGDARLKALIQILAAAAAERDVVYFTFGDSELMRDIYSMHIFLTERKLTVGDVYKLLLRYYNEECRNCSTPGPDIKLYPFIYHAVESCAETADHSGQRTGT

SEQ ID NO: 854540 - protein, 264 aa, Homo sapiens
MNAGPGCEPCTKRPRWGAATTSPAASDARSFPSRQRRVLDPKDAHVQFRVPPSSPACVPGQAGQHRGSATSLGTEQYSEYTGYAETYRWSRSHEDGSERDDWQRRCTEIVAIDALHFRRYLDQFVPEKMRRELNKAYCGFLRPGVSSENLSAVATGNWGCGAFGGDARLKALIQILAAAAAERDVVYFTFGDSELMRDIYSMHIFLTERKLTVGDVYKLLLRYYNEECRNCSTPGPDIKLYPFIYHAVESCAETADHSGQRTGT

SEQ ID NO: 854541 - protein, 108 aa, Homo sapiens
GKCHDIAVSFLFASALIQILAAAAAERDVVYFTFGDSELMRDIYSMHIFLTERKLTVGDVYKLLLRYYNEECRNCSTPGPDIKLYPFIYHAVESCAETADHSGQRTGT

SEQ ID NO: 854542 - protein, 159 aa, Homo sapiens
MNAGPGCEPCTKRPRWGAATTSPAASDARSFPSRQRRVLDPKDAHVQFRVPPSSPACVPGQAGQHRGSATSLAVSLEFDQQQGSVCPSESEIYEAGAGDRMAGAPMGAAVQPAEVTVEVGEGPPRCTTFVTGRMPEALEYNLSANPEASTIFQRNSQTD

SEQ ID NO: 854543 - protein, 264 aa, Homo sapiens; identical to SEQ ID NO: 854540

SEQ ID NO: 854544 - protein, 976 aa, Homo sapiens; identical to SEQ ID NO: 854535

SEQ ID NO: 854545 - protein, 935 aa, Homo sapiens
MNAGPGCEPCTKRPRWGAATTSPAASDARSFPSRQRRVLDPKDAHVQFRVPPSSPACVPGQAGQHRGSATSLVFKQKTITSWMDTKGIKTAESESLDSKENNNTRIESMMSSVQKDNFYQHNVEKLENVSQLSLDKSLTEKSTQYLNQHQTAAMCKWQNEGKHTEQLLESEPQTVTLVPEQFSNANIDRSPQNDDHSDTDSEENRDNQQFLTTVKLANAKQTTEDEHAREAKSHQKCSKSCHPGEDCASCQQDEIDVVPKSPLSDVGSEDVGTGSKNDNKLIRQESCLGNSPPFEKESEPESPMDVDNSKNSCQDSEADEETSPGFDEQEDGSSSQTANKPSRFQARDADIEFRKRYSTKGGEVRLHFQFEGGESRTGMNDLNAKLPGNISSLNVECRNSKQHGKKDSKITDHFMRLPKAEDRRKEQWETKHQRTERKIPKYVPPHLSPDKKWLGTPIEEMRRMPQCGIRLPLLRPSANHTVTIWNGERTAGSRWELIQTALLNKFTRPQNLKDAILKYNVAYSKKWDFTALIDFWDKVLEEAEAQHLYQSILPDMVKIALCLPNICTQPIPLLKQKMNHSITMSQEQIASLLANAFFCTFPRRNAKMKSEYSSYPDINFNRLFEGRSSRKPEKLKTLFCYFRRVTEKKPTGLVTFTRQSLEDFPEWERCEKPLTRLHVTYEGTIEENGQGMLQVDFANRFVGGGVTSAGLVQEEIRFLINPELIISRLFTEVLDHNECLIITGTEQYSEYTGYAETYRWSRSHEDGSERDDWQRRCTEIVAIDALHFRRYLDQFVPEKMRRELNKAYCGFLRPGVSSENLSAVATGNWGCGAFGGDARLKALIQILAAAAAERDVVYFTFGDSELMRDIYSMHIFLTERKLTVGDVYKLLLRYYNEECRNCSTPGPDIKLYPFIYHAVESCAETADHSGQRTGT

SEQ ID NO: 854546 - protein, 258 aa, Homo sapiens
MISTNRDSLTYFFTFFMPFCLFSCLIALAGETFSTVLNRSYSCHVMKGGMFLPSSVKLIVTDCLFQGTEQYSEYTGYAETYRWSRSHEDGSERDDWQRRCTEIVAIDALHFRRYLDQFVPEKMRRELNKAYCGFLRPGVSSENLSAVATGNWGCGAFGGDARLKALIQILAAAAAERDVVYFTFGDSELMRDIYSMHIFLTERKLTVGDVYKLLLRYYNEECRNCSTPGPDIKLYPFIYHAVESCAETADHSGQRTGT

SEQ ID NO: 854547 - protein, 163 aa, Homo sapiens
MNAGPGCEPCTKRPRWGAATTSPAASDARSFPSRQRRVLDPKDAHVQFRVPPSSPACVPGQAGQHRGSATSLVFKQKTITSWMDTKGIKTAESESLDSKENNNTRIESMMSSVQKDNFYQHNVEKLENVSQLSLDKSLTEKSTQYLNQHQTAAMCKWQNEGKQ

SEQ ID NO: 854548 - protein, 465 aa, Homo sapiens
MVSSQKLEKPIEMGSSEPLPIADGDRRRKKKRRGRATDSLPGKFEDMYKLTSELLGEGAYAKVQGAVSLQNGKEYAVKIIEKQAGHSRSRVFREVETLYQCQGNKNILELIEFFEDDTRFYLVFEKLQGGSILAHIQKQKHFNEREASRVVRDVAAALDFLHTKDKVSLCHLGWSAMAPSGLTAAPTSLGSSDPPTSASQVAGTTGIAHRDLKPENILCESPEKVSPVKICDFDLGSGMKLNNSCTPITTPELTTPCGSAEYMAPEVVEVFTDQATFYDKRCDLWSLGVVLYIMLSGYPPFVGHCGADCGWDRGEVCRVCQNKLFESIQEGKYEFPDKDWAHISSEAKDLISKLLVRDAKQRLSAAQVLQHPWVQGQAPEKGLPTPQVLQRNSSTMDLTLFAAEAIALNRQLSQHEENELAEEPEALADGLCSMKLSPPCKSRLARRRALAQAGRGEDRSPPTAL

SEQ ID NO: 854549 - protein, 292 aa, Homo sapiens
MVSSQKLEKPIEMGSSEPLPIADGDRRRKKKRRGRATDSLPGKFEDMYKLTSELLGEGAYAKVQGAVSLQNGKEYAVKIIEKQAGHSRSRVFREVETLYQCQGNKNILELIEFFEDDTRFYLVFEKLQGGSILAHIQKQKHFNEREASRVVRDVAAALDFLHTKGIAHRDLKPENILCESPEKVSPVKICDFDLGSGMKLNNSCTPITTPELTTPCGSAEYMAPEVVEVFTDQATFYDKRCDLWSLGVVLYIMLSGYPPFVGHCGADCGWDRGEVCRVCQEQQHNGPDALRS

SEQ ID NO: 854550 - protein, 492 aa, Homo sapiens
MVSSQKLEKPIEMGSSEPLPIADGDRRRKKKRRGRATDSLPGKFEDMYKLTSELLGEGAYAKVQGAVSLQNGKEYAVKIIEKQAGHSRSRVFREVETLYQCQGNKNILELIEFFEDDTRFYLVFEKLQGGSILAHIQKQKHFNEREASRVVRDVAAALDFLHTKGIAHRDLKPENILCESPEKVLWADLECYSLYLPRKPPLLSGWIVSSSVGLRHQLELIVLDMGECYTYCVMFLPILVLSSLLIISVIDVSPVKICDFDLGSGMKLNNSCTPITTPELTTPCGSAEYMAPEVVEVFTDQATFYDKRCDLWSLGVVLYIMLSGYPPFVGHCGADCGWDRGEVCRVCQNKLFESIQEGKYEFPDKDWAHISSEAKDLISKLLVRDAKQRLSAAQVLQHPWVQGQAPEKGLPTPQVLQRNSSTMDLTLFAAEAIALNRQLSQHEENELAEEPEALADGLCSMKLSPPCKSRLARRRALAQAGRGEDRSPPTAL

SEQ ID NO: 854551 - protein, 476 aa, Homo sapiens
MTPLASPCVTREAKHVSFTSPIFLHFFLPSFRNNSPSSISKESLNHLSLLAYPLSLKSMQNIPEMGSSEPLPIADGDRRRKKKRRGRATDSLPGKFEDMYKLTSELLGEGAYAKVQGAVSLQNGKEYAVKIIEKQAGHSRSRVFREVETLYQCQGNKNILELIEFFEDDTRFYLVFEKLQGGSILAHIQKQKHFNEREASRVVRDVAAALDFLHTKGIAHRDLKPENILCESPEKVSPVKICDFDLGSGMKLNNSCTPITTPELTTPCGSAEYMAPEVVEVFTDQATFYDKRCDLWSLGVVLYIMLSGYPPFVGHCGADCGWDRGEVCRVCQNKLFESIQEGKYEFPDKDWAHISSEAKDLISKLLVRDAKQRLSAAQVLQHPWVQGQAPEKGLPTPQVLQRNSSTMDLTLFAAEAIALNRQLSQHEENELAEEPEALADGLCSMKLSPPCKSRLARRRALAQAGRGEDRSPPTAL

SEQ ID NO: 854552 - protein, 456 aa, Homo sapiens
MAANETSVSYMYKLTSELLGEGAYAKVQGAVSLQNGKEYAVKIIEKQAGHSRSRVFREVETLYQCQGNKNILELIEFFEDDTRFYLVFEKLQGGSILAHIQKQKHFNEREASRVVRDVAAALDFLHTKGIAHRDLKPENILCESPEKVLWADLECYSLYLPRKPPLLSGWIVSSSVGLRHQLELIVLDMGECYTYCVMFLPILVLSSLLIISVIDVSPVKICDFDLGSGMKLNNSCTPITTPELTTPCGSAEYMAPEVVEVFTDQATFYDKRCDLWSLGVVLYIMLSGYPPFVGHCGADCGWDRGEVCRVCQNKLFESIQEGKYEFPDKDWAHISSEAKDLISKLLVRDAKQRLSAAQVLQHPWVQGQAPEKGLPTPQVLQRNSSTMDLTLFAAEAIALNRQLSQHEENELAEEPEALADGLCSMKLSPPCKSRLARRRALAQAGRGEDRSPPTAL

SEQ ID NO: 854553 - protein, 227 aa, Homo sapiens
MLLCPLCSPGSILAHIQKQKHFNEREASRVVRDVAAALDFLHTKGIAHRDLKPENILCESPEKVSPVKICDFDLGSGMKLNNSCTPITTPELTTPCGSAEYMAPEVVEVFTDQATFYDKRCDLWSLGVVLYIMLSGYPPFVGHCGADCGWDRGEVCRVCQNKLFESIQEGKYEFPDKDWAHISSEAKDLISKLLVRDAKQRLSAAQVLQHPWVQGEQQHNGPDALRS

SEQ ID NO: 854554 - protein, 133 aa, Homo sapiens
MVSSQKLEKPIEMGSSEPLPIADGDRRRKKKRRGRATDSLPGKFEDMYKLTSELLGEGAYAKVQGAVSLQNGKEYAVKIIEKQAGHSRSRVFREVETLYQCQGNKNILELIEFFEDDTRFYLVFEKLQGGTYR

SEQ ID NO: 854555 - protein, 174 aa, Homo sapiens
LLSDSGPPPGSSTASSAFSEERSAGRGARDRSPAGASEGFHVRGRWRTEDCHLRTKAIETLRVAGRHQLPDRSFISFGISSLQMVSSQKLEKPIEMGSSEPLPIADGDRRRKKKRRGRATDSLPGKFEDMYKLTSELLGEGAYAKVQGAVSLQNGKEYAVKVSVSAECQALLCK

SEQ ID NO: 854556 - protein, 424 aa, Homo sapiens
MVSSQKLEKPIEMGSSEPLPIADGDRRRKKKRRGRATDSLPGKFEDMYKLTSELLGEGAYAKVQGAVSLQNGKEYAVKIIEKQAGHSRSRVFREVETLYQCQGNKNILELIEFFEDDTRFYLVFEKLQGGSILAHIQKQKHFNEREASRVVRDVAAALDFLHTKGIAHRDLKPENILCESPEKVSPVKICDFDLGSGMKLNNSCTPITTPELTTPCGSAEYMAPEVVEVFTDQATFYDKRCDLWSLGVVLYIMLSGYPPFVGHCGADCGWDRGEVCRVCQNKLFESIQEGKYEFPDKDWAHISSEAKDLISKLLVRDAKQRLSAAQVLQHPWVQGQAPEKGLPTPQVLQRNSSTMDLTLFAAEAIALNRQLSQHEENELAEEPEALADGLCSMKLSPPCKSRLARRRALAQAGRGEDRSPPTAL

SEQ ID NO: 854557 - protein, 347 aa, Homo sapiens
MVSSQKLEKPIEMGSSEPLPIADGDRRRKKKRRGRATDSLPGKFEDMYKLTSELLGEGAYAKVQGAVSLQNGKEYAVKIIEKQAGHSRSRVFREVETLYQCQGNKNILELIEFFEDDTRFYLVFEKLQGGSILAHIQKQKHFNEREASRVVRDVAAALDFLHTKGIAHRDLKPENILCESPEKVSPVKICDFDLGSGMKLNNSCTPITTPELTTPCGSAEYMAPEVVEVFTDQATFYDKRCDLWSLGVVLYIMLSGYPPFVGHCGADCGWDRGEVCRVCQNKLFESIQEGKYEFPDKDWAHISSEAKDLISKLLVRDAKQRLSAAQVLQHPWVQGEQQHNGPDALRS

SEQ ID NO: 854558 - protein, 466 aa, Homo sapiens
MVSSQKLEKPIEMGSSEPLPIADGDRRRKKKRRGRATDSLPGKFEDMYKLTSELLGEGAYAKVQGAVSLQNGKEYAVKIIEKQAGHSRSRVFREVETLYQCQGNKNILELIEFFEDDTRFYLVFEKLQGGSILAHIQKQKHFNEREASRVVRDVAAALDFLHTKGIAHRDLKPENILCESPEKVLWADLECYSLYLPRKPPLLSGWIVSSSVGLRHQLELIVLDIVSPVKICDFDLGSGMKLNNSCTPITTPELTTPCGSAEYMAPEVVEVFTDQATFYDKRCDLWSLGVVLYIMLSGYPPFVGHCGADCGWDRGEVCRVCQNKLFESIQEGKYEFPDKDWAHISSEAKDLISKLLVRDAKQRLSAAQVLQHPWVQGQAPEKGLPTPQVLQRNSSTMDLTLFAAEAIALNRQLSQHEENELAEEPEALADGLCSMKLSPPCKSRLARRRALAQAGRGEDRSPPTAL

SEQ ID NO: 854559 - protein, 492 aa, Homo sapiens; identical to SEQ ID NO: 854550

SEQ ID NO: 854560 - protein, 259 aa, Homo sapiens [sequence omitted]

SEQ ID NO: 854561 - protein, 174 aa, Homo sapiens; identical to SEQ ID NO: 854555

SEQ ID NO: 854562 - protein, 757 aa, Homo sapiens
MSENSSDSDSSCGWTVISHEGSDIEMLNSVTPTDSCEPAPECSSLEQEELQALQIEQGESSQNGTVLMEETAYPALEETSSTIEAEEQKIPEDSIYIGTASDDSDIVTLEPPKLEEIGNQEVVIVEEAQSSEDFNMGSSSSSQYTFCQPETVFSSQPSDDESSSDETSNQPSPAFRRRRARKKTVSASESEDRLVAEQETEPSKELSKRQFSSGLNKCVILALVIAISMGFGHFYGTIQIQKRQQLVRKIHEDELNDMKDYLSQCQQEQESFIDYKSLKENLARCWTLTEAEKMSFETQKTNLATENQYLRVSLEKEEKALSSLQEELNKLREQIRILEDKGTSTELVKENQKLKQHLEEEKQKKHSFLSQRETLLTEAKMLKRELERERLVTTALRGELQQLSGSQLHGKSDSPNVYTEKKEIAILRERLTELERKLTFEQQRSDLWERLYVEAKDQNGKQGTDGKKKGGRGSHRAKNKSKETFLGSVKETFDAMKNSTKEFVRHHKEKIKQAKEAVKENLKKFSDSVKSTFRHFKDTTKNIFDEKGNKRFGATKEAAEKPRTVFSDYLHPQYKAPTENHHNRGPTMQNDGRKEKPVHFKEFRKNTNSKKCSPGHDCRENSHSFRKACSGVFDCAQQESMSLFNTVVNPIRMDEFRQIIQRYMLKELDTFCHWNELDQFINKFFLNGVFIHDQKLFTDFVNDVKDYLRNMKEYEVDNDGVFEKLDEYIYRHFFGHTFSPPYGPRSVYIKPCHYSSL

SEQ ID NO: 854563 - protein, 757 aa, Homo sapiens; identical to SEQ ID NO: 854562

SEQ ID NO: 854564 - protein, 757 aa, Homo sapiens; identical to SEQ ID NO: 854562

SEQ ID NO: 854565 - protein, 757 aa, Homo sapiens; identical to SEQ ID NO: 854562

SEQ ID NO: 854566 - protein, 613 aa, Homo sapiens
MSTFFLIVFSSQPSDDESSSDETSNQPSPAFRRRRARKKTVSASESEDRLVAEQETEPSKELSKRQFSSGLNKCVILALVIAISMGFGHFYGTIQIQKRQQLVRKIHEDELNDMKDYLSQCQQEQESFIDYKSLKENLARCWTLTEAEKMSFETQKTNLATENQYLRVSLEKEEKALSSLQEELNKLREQIRILEDKGTSTELVKENQKLKQHLEEEKQKKHSFLSQRETLLTEAKMLKRELERERLVTTALRGELQQLSGSQLHGKSDSPNVYTEKKEIAILRERLTELERKLTFEQQRSDLWERLYVEAKDQNGKQGTDGKKKGGRGSHRAKNKSKETFLGSVKETFDAMKNSTKEFVRHHKEKIKQAKEAVKENLKKFSDSVKSTFRHFKDTTKNIFDEKGNKRFGATKEAAEKPRTVFSDYLHPQYKAPTENHHNRGPTMQNDGRKEKPVHFKEFRKNTNSKKCSPGHDCRENSHSFRKACSGVFDCAQQESMSLFNTVVNPIRMDEFRQIIQRYMLKELDTFCHWNELDQFINKFFLNGVFIHDQKLFTDFVNDVKDYLRNMKEYEVDNDGVFEKLDEYIYRHFFGHTFSPPYGPRSVYIKPCHYSSL

SEQ ID NO: 854567 - protein, 554 aa, Homo sapiens
FPNRTPFPIGMGHRNGQIPVVIAISMGFGHFYGTIQIQKRQQLVRKIHEDELNDMKDYLSQCQQEQESFIDYKSLKENLARCWTLTEAEKMSFETQKTNLATENQYLRVSLEKEEKALSSLQEELNKLREQIRILEDKGTSTELVKENQKLKQHLEEEKQKKHSFLSQRETLLTEAKMLKRELERERLVTTALRGELQQLSGSQLHGKSDSPNVYTEKKEIAILRERLTELERKLTFEQQRSDLWERLYVEAKDQNGKQGTDGKKKGGRGSHRAKNKSKETFLGSVKETFDAMKNSTKEFVRHHKEKIKQAKEAVKENLKKFSDSVKSTFRHFKDTTKNIFDEKGNKRFGATKEAAEKPRTVFSDYLHPQYKAPTENHHNRGPTMQNDGRKEKPVHFKEFRKNTNSKKCSPGHDCRENSHSFRKACSGVFDCAQQESMSLFNTVVNPIRMDEFRQIIQRYMLKELDTFCHWNELDQFINKFFLNGVFIHDQKLFTDFVNDVKDYLRNMKEYEVDNDGVFEKLDEYIYRHFFGHTFSPPYGPRSVYIKPCHYSSL

SEQ ID NO: 854568 - protein, 424 aa, Homo sapiens
MSENSSDSDSSCGWTVISHEGSDIEMLNSVTPTDSCEPAPECSSLEQEELQALQIEQGESSQNGTVLMEETAYPALEETSSTIEAEEQKIPEDSIYIGTASDDSDIVTLEPPKLEEIGNQEVVIVEEAQSSEDFNMGSSSSSQYTFCQPETVFSSQPSDDESSSDETSNQPSPAFRRRRARKKTVSASESEDRLVAEQETEPSKELSKRQFSSGLNKCVILALVIAISMGFGHFYGTIQIQKRQQLVRKIHEDELNDMKDYLSQCQQEQESFIDYKSLKENLARCWTLTEAEKMSFETQKTNLATENQYLRKLFTDFVNDVKDYLRNMKEYEVDNDGVFEKLDEYIYRHFFGHTFSPPYGPSRPDKKQRMVNIENSRHRKQEQKHLQPQPYKREGKWHKYGRTNGRQMANLEIELGQLPFDPQY

SEQ ID NO: 854569 - protein, 69 aa, Homo sapiens
DGDSSGGERLESAAEQRPKRVQHRKQEQKHLQPQPYKREGKWHKYGRTNGRQMANLEIELGQLPFDPQY

SEQ ID NO: 854570 - protein, 152 aa, Homo sapiens
MSENSSDSDSSCGWTVISHEGSDIEMLNSVTPTDSCEPAPECSSLEQEELQALQIEQGESSQNGTVLMEETAYPALEETSSTIEAEEQKIPEDSIYIGTASDDSDIVTLEPPKLEEIGNQEVVIVEEAQSSEDFNMGSSSSSQYTFCQPETG

SEQ ID NO: 854571 - protein, 175 aa, Homo sapiens
MAQCLWKKLLIQLWRKPAQQLSDIVTLEPPKLEEIGNQEVVIVEEAQSSEDFNMGSSSSSQYTFCQPETVFSSQPSDDESSSDETSNQPSPAFRRRRARKKTVSASESEDRLVAEQETEPSKELSKRQFSSGLNKCVILALVIAISMGFGHFYGTIQIQKRHSQSKADRGSSSTP

SEQ ID NO: 854572 - protein, 79 aa, Homo sapiens
PLSVRECTAPEARADPGASGPVVLQPPNPECYTELRAKGGRADGLGHPSSFTGQALRCLSVWTDENPYGKMLCASPCRV

SEQ ID NO: 854573 - protein, 757 aa, Homo sapiens; identical to SEQ ID NO: 854562

SEQ ID NO: 854574 - protein, 477 aa, Homo sapiens
MSENSSDSDSSCGWTVISHEGSDIEMLNSVTPTDSCEPAPECSSLEQEELQALQIEQGESSQNGTVLMEETAYPALEETSSTIEAEEQKIPEDSIYIGTASDDSDIVTLEPPKLEEIGNQEVVIVEEAQSSEDFNMGSSSSSQYTFCQPETVFSSQPSDDESSSDETSNQPSPAFRRRRARKKTVSASESEDRLVAEQETEPSKELSKRQFSSGLNKCVILALVIAISMGFGHFYGTIQIQKRQQLVRKIHEDELNDMKDYLSQCQQEQESFIDYKSLKENLARCWTLTEAEKMSFETQKTNLATENQYLRVSLEKEEKALSSLQEELNKLREQIRILEDKGTSTELVKENQKLKQHLEEEKQKKHSFLSQRETLLTEAKMLKRELERERLVTTALRGELQQLSGSQLHGKSDSPNVYTEKKEIAILRERLTELERKLTFEQQRSDLWERLYVEAKDQNGKQGTDGKKKGGRGSHRA

SEQ ID NO: 854575 - protein, 675 aa, Homo sapiens
MAQCLWKKLLIQLWRKPAQQLSDIVTLEPPKLEEIGNQEVVIVEEAQSSEDFNMGSSSSSQYTFCQPETVFSSQPSDDESSSDETSNQPSPAFRRRRARKKTVSASESEDRLVAEQETEPSKELSKRQFSSGLNKCVILALVIAISMGFGHFYGTIQIQKRQQLVRKIHEDELNDMKDYLSQCQQEQESFIDYKSLKENLARCWTLTEAEKMSFETQKTNLATENQYLRVSLEKEEKALSSLQEELNKLREQIRILEDKGTSTELVKENQKLKQHLEEEKQKKHSFLSQRETLLTEAKMLKRELERERLVTTALRGELQQLSGSQLHGKSDSPNVYTEKKEIAILRERLTELERKLTFEQQRSDLWERLYVEAKDQNGKQGTDGKKKGGRGSHRAKNKSKETFLGSVKETFDAMKNSTKEFVRHHKEKIKQAKEAVKENLKKFSDSVKSTFRHFKDTTKNIFDEKGNKRFGATKEAAEKPRTVFSDYLHPQYKAPTENHHNRGPTMQNDGRKEKPVHFKEFRKNTNSKKCSPGHDCRENSHSFRKACSGVFDCAQQESMSLFNTVVNPIRMDEFRQIIQRYMLKELDTFCHWNELDQFINKFFLNGVFIHDQKLFTDFVNDVKDYLRNMKEYEVDNDGVFEKLDEYIYRHFFGHTFSPPYGPRSVYIKPCHYSSL

SEQ ID NO: 854576 - protein, 807 aa, Homo sapiens
MSENSSDSDSSCGWTVISHEGSDIEMLNSVTPTDSCEPAPECSSLEQEELQALQIEQGESSQNGTVLMEETAYPALEETSSTIEAEEQKIPEDSIYIGTASDDSDIVTLEPPKLEEIGNQEVVIVEEAQSSEDFNMGSSSSSQYTFCQPETVFSSQPSDDESSSDETSNQPSPAFRRRRARKKTVSASESEDRLVAEQETEPSKELSKRQFSSGLNKCVILALVIAISMGFGHFYGTIQIQKRQQLVRKIHEDELNDMKDYLSQCQQEQESFIDYKSLKENLARCWTLTEAEKMSFETQKTNLATENQYLRVSLEKEEKALSSLQEELNKLREQIRILEDKGTSTELVKENQKLKQHLEEEKQKKHSFLSQRETLLTEAKMLKRELERERLVTTALRGELQQLSGSQLHGKSDSPNVYTEKKEIAILRERLTELERKLTFEQQRSDLWERLYVEAKDQNGKQGTDGKKKGGRGSHRAKNKSKETFLGSVKETFDAMKNSTKEFVRHHKEKIKQAKEAVKENLKKFSDSVKSTFRHFKDTTKNIFDEKGNKRFGATKEAAEKPRTVFSDYLHPQYKAPTENHHNRGPTMQNDGRKEKPVHFKEFRKNTNSKKCSPGHDCRENSHSFRKACSGVFDCAQQESMSLFNTVVNPIRMDEFRQIIQRYMLKELDTFCHWNELDQFINKFFLNGVFIHDQKLFTDFVNDVKDYLRNMKEYEVDNDGVFEKLDEYIYRHFFGHTFSPPYGPSRPDKKQRMVNIENSRHRKQEQKHLQPQPYKREGKWHKYGRTNGRQMANLEIELGQLPFDPQY

SEQ ID NO: 854577 - protein, 807 aa, Homo sapiens; identical to SEQ ID NO: 854576

SEQ ID NO: 854578 - protein, 757 aa, Homo sapiens; identical to SEQ ID NO: 854562

SEQ ID NO: 854579 - protein, 257 aa, Homo sapiens
MSENSSDSDSSCGWTVISHEGSDIEMLNSVTPTDSCEPAPECSSLEQEELQALQIEQGESSQNGTVLMEETAYPALEETSSTIEAEEQKIPEDSIYIGTASDDSDIVTLEPPKLEEIGNQEVVIVEEAQSSEDFNMGSSSSSQYTFCQPETVFSSQPSDDESSSDETSNQPSPAFRRRRARKKTVSASESEDRLVAEQETEPSKELSKRQFSSGLNKCVILALVIAISMGFGHFYGTIQIQKRHSQSKADRGSSSTP

SEQ ID NO: 854580 - protein, 77 aa, Homo sapiens
  misc_feature (1)..(1): Xaa can be any naturally occurring amino acid
  misc_feature (5)..(5): Xaa can be any naturally occurring amino acid
  misc_feature (23)..(23): Xaa can be any naturally occurring amino acid
  misc_feature (25)..(25): Xaa can be any naturally occurring amino acid
XPGNXFDLDSEFNPDSLMGNLAXRXQEFGTRVFPRRHNGAHECPGRCSQEYQQCRKERQTPGCLLGRAPKSSSGFSL

SEQ ID NO: 854581 - protein, 103 aa, Homo sapiens
MSHRARDKPIRPLPRHTYFTADSAPKIDRCTYLKEERRGRDSDIIYSSVVYSTMDLLADDLSSVEKRTTTRREADGKHNIGMKHDNPPTQQELNYLTATWNRT

SEQ ID NO: 854582 - protein, 103 aa, Homo sapiens
KLRLVRGLGVSFRAHPSAIGAILQSKGSVSVSCEEAGPHLGRGSWPCRFLDRHRGEPWLGAPDCALRGSRSVGCRPQRGREPEPSTAQLGGSSGSGRSVWISL

SEQ ID NO: 854583 - protein, 106 aa, Homo sapiens
PLSSFRGRCLQALRMVQRLTYRRRLSYNTASNKTRLSRTPGNRIVYLYTKKVGKAPKSACGVCPVPPTLLFPPSFRAATMVRMNVLADALKSINNAEKRGKRQGAY

SEQ ID NO: 854584 - protein, 106 aa, Homo sapiens; identical to SEQ ID NO: 854583

SEQ ID NO: 854585 - protein, 106 aa, Homo sapiens; identical to SEQ ID NO: 854583

SEQ ID NO: 854586 - protein, 106 aa, Homo sapiens; identical to SEQ ID NO: 854583

SEQ ID NO: 854587 - protein, 106 aa, Homo sapiens; identical to SEQ ID NO: 854583

SEQ ID NO: 854588 - protein, 106 aa, Homo sapiens; identical to SEQ ID NO: 854583

SEQ ID NO: 854589 - protein, 182 aa, Homo sapiens
MSRCGRRGGPTEGDNVEPRAAISGVTQEEKLGGSETRWMGDSSPNYKKHPAAGQHQRAGSSGTNLPKDEGHSPEGATTTAGDSYNNRRGSTQQRRRDNYTKDITPPERGEPPTHDATQGNAHPTKPPGEHETHTEARRASSQRAPKRHEDHPGNNRPAAKQNTTHPQAAGNHPTHATTGKSR

SEQ ID NO: 854590 - protein, 106 aa, Homo sapiens; identical to SEQ ID NO: 854583

SEQ ID NO: 854591 - protein, 106 aa, Homo sapiens; identical to SEQ ID NO: 854583

SEQ ID NO: 854592 - protein, 130 aa, Homo sapiens
MVRMNVLADALKSINNAEKRGKRQVLIRPCSKVIVRFLTVMMKHGYIGEFEIIDDHRAGKIVVNLTGRLNKCGVISPRSDVQLKDLEKWQNNLLPSRQFGFIVLTTSAGIMDHEEARRKHTGGKILGFFF

SEQ ID NO: 854593 - protein, 130 aa, Homo sapiens; identical to SEQ ID NO: 854592

SEQ ID NO: 854594 - protein, 106 aa, Homo sapiens; identical to SEQ ID NO: 854583

SEQ ID NO: 854595 - protein, 77 aa, Homo sapiens; identical to SEQ ID NO: 854580
  misc_feature (1)..(1): Xaa can be any naturally occurring amino acid
  misc_feature (5)..(5): Xaa can be any naturally occurring amino acid
  misc_feature (23)..(23): Xaa can be any naturally occurring amino acid
  misc_feature (25)..(25): Xaa can be any naturally occurring amino acid

SEQ ID NO: 854596 - protein, 139 aa, Homo sapiens
MGGQWRHGGRVRVAENDPGREDGRRAALCWPAGPGEDGIRMDWGEAWAVKAFKASPEGKPPREMSKPSVRELRGTRRDRGTGDPEGGGNPIAPQGGPGDAKNKMDISGQNALEEAGRPRGKQGQRECTLAGHKGATRVG

SEQ ID NO: 854597 - protein, 106 aa, Homo sapiens; identical to SEQ ID NO: 854583

SEQ ID NO: 854598 - protein, 106 aa, Homo sapiens; identical to SEQ ID NO: 854583

SEQ ID NO: 854599 - protein, 106 aa, Homo sapiens; identical to SEQ ID NO: 854583

SEQ ID NO: 854600 - protein, 106 aa, Homo sapiens; identical to SEQ ID NO: 854583

SEQ ID NO: 854601 - protein, 106 aa, Homo sapiens; identical to SEQ ID NO: 854583

SEQ ID NO: 854602 - protein, 166 aa, Homo sapiens
MRINSKNHNGSLTTQRGTPQNEKARTLQHVATTSPHSHNGDPDAGNNRESPEAPTNRPHTGHPPTLAQAGNEPPTRGKKTTTTKQQTNHQQGNTSQAPPTPRTQSGNTRTASPQSPERHATPAPASTRHASQQHDTTSPATTHAPTPPHPKRTRKRRTHHERHRTK

SEQ ID NO: 854603 - protein, 106 aa, Homo sapiens; identical to SEQ ID NO: 854583

SEQ ID NO: 854604 - protein, 106 aa, Homo sapiens; identical to SEQ ID NO: 854583

SEQ ID NO: 854605 - protein, 106 aa, Homo sapiens; identical to SEQ ID NO: 854583

SEQ ID NO: 854606 - protein, 106 aa, Homo sapiens; identical to SEQ ID NO: 854583

SEQ ID NO: 854607 - protein, 106 aa, Homo sapiens; identical to SEQ ID NO: 854583

SEQ ID NO: 854608 - protein, 130 aa, Homo sapiens; identical to SEQ ID NO: 854592

SEQ ID NO: 854609 - protein, 130 aa, Homo sapiens; identical to SEQ ID NO: 854592

SEQ ID NO: 854610 - protein, 667 aa, Homo sapiens
RQWRARAAEKMSPTPPLFSLPEARTRFTKSTREALNNKNIKPLLSTFSQVPGSENEKKCTLDQAFRGILEEEIINHSSCENVLAIISLAIGGVTEGICTASTPFVLLGDVLDCLPLDQCDTIFTFVEKNVATWKSNTFYSAGKNYLLRMCNDLLRRLSKSQNTVFCGRIQLFLARLFPLSEKSGLNLQSQFNLENVTVFNTNEQESTLGQKHTEDREEGMDVEEGEMGDEEAPTTCSIPIDYNLYRKFWSLQDYFRNPVQCYEKISWKTFLKYSEEVLAVFKSYKLDDTQASRKKMEELKTGGEHVYFAKFLTSEKLMDLQLSDSNFRRHILLQYLILFQYLKGQVKFKSSNYVLTDEQSLWIEDTTKSVYQLLSENPPDGERFSKMVEHILNTEENWNSWKNEGCPSFVKERTSDTKPTRIIRKRTAPEDFLGKGPTKKILMGNEELTRLWNLCPDNMEACKSETREHMPTLEEFFEEAIEQADPENMVENEYKAVNNSNYGWRALRLLARRSPHFFQPTNQQFKSLPEYLENMVIKLAKELPPPSEEIKTGEDEDEEDNDALLKENESPDVRRDKPVTGEQIEVFANKLGEQWKILAPYLEMKDSEIRQIECDSEDMKMRAKQLLVAWQDQEGVHATPENLINALNKSGLSDLAESLTNDNETNS

SEQ ID NO: 854611 - protein, 667 aa, Homo sapiens; identical to SEQ ID NO: 854610

SEQ ID NO: 854612 - protein, 667 aa, Homo sapiens; identical to SEQ ID NO: 854610

SEQ ID NO: 854613 - protein, 674 aa, Homo sapiens
RQWRARAAEKMSPTPPLFSLPEARTRFTKSTREALNNKNIKPLLSTFSQVPGSENEKKCTLDQAFRGILEEEIINHSSCENVLAIISLAIGGVTEGICTASTPFVLLGDVLDCLPLDQCDTIFTFVEKNVATWKSNTFYSAGKNYLLRMCNDLLRRLSKSQNTVFCGRIQLFLARLFPLSEKSGLNLQSQFNLENVTVFNTNEQESTLGQKHTEDREEGMDVEEGEMGDEEAPTTCSIPIDYNLYRKFWSLQDYFRNPVQCYEKISWKTFLKYSEEVLAVFKSYKLDDTQASRKKMEELKTGGEHVYFAKFLTSEKLMDLQLSDSNFRRHILLQYLILFQYLKGQVKFKSSNYVLTDEQSLWIEDTTKSVYQLLSENPPDGERFSKMVEHILNTEENWNSWKNEGCPSFVKESVCFVHHRTSDTKPTRIIRKRTAPEDFLGKGPTKKILMGNEELTRLWNLCPDNMEACKSETREHMPTLEEFFEEAIEQADPENMVENEYKAVNNSNYGWRALRLLARRSPHFFQPTNQQFKSLPEYLENMVIKLAKELPPPSEEIKTGEDEDEEDNDALLKENESPDVRRDKPVTGEQIEVFANKLGEQWKILAPYLEMKDSEIRQIECDSEDMKMRAKQLLVAWQDQEGVHATPENLINALNKSGLSDLAESLTNDNETNS

SEQ ID NO: 854614 - protein, 650 aa, Homo sapiens
RQWRARAAEKMSPTPPLFSLPEARTRFTKSTREALNNKNIKPLLSTFSQVPGSENEKKCTLDQAFRGILEEEIINHSSCENVLAIISLAIGGVTEGICTASTPFVLLGDVLDCLPLDQCDTIFTFVEKNVATWKSNTFYSAGKNYLLRMCNDLLRRLSKSQNTVFCGRIQLFLARLFPLSEKSGLNLQSQFNLENVTVFNTNEQESTLGQKHTEDREEGMDVEEGEMGDEEAPTTCSIPIDYNLYRKFWSLQDYFRNPVQCYEKISWKTFLKYSEEVLAVFKSYKLDDTQASRKKMEELKTGGEHVYFAKFLTSEKLMDLQLSDSNFRRHILLQYLILFQYLKGQVKFKSSNYVLTDEQSLWIEDTTKSVYQHILNTEENWNSWKNEGCPSFVKERTSDTKPTRIIRKRTAPEDFLGKGPTKKILMGNEELTRLWNLCPDNMEACKSETREHMPTLEEFFEEAIEQADPENMVENEYKAVNNSNYGWRALRLLARRSPHFFQPTNQQFKSLPEYLENMVIKLAKELPPPSEEIKTGEDEDEEDNDALLKENESPDVRRDKPVTGEQIEVFANKLGEQWKILAPYLEMKDSEIRQIECDSEDMKMRAKQLLVAWQDQEGVHATPENLINALNKSGLSDLAESLTNDNETNS

SEQ ID NO: 854615 - protein, 519 aa, Homo sapiens
MCNDLLRRLSKSQNTVFCGRIQLFLARLFPLSEKSGLNLQSQFNLENVTVFNTNEQESTLGQKHTEDREEGMDVEEGEMGDEEAPTTCSIPIDYNLYRKFWSLQDYFRNPVQCYEKISWKTFLKYSEEVLAVFKSYKLDDTQASRKKMEELKTGGEHVYFAKFLTSEKLMDLQLSDSNFRRHILLQYLILFQYLKGQVKFKSSNYVLTDEQSLWIEDTTKSVYQLLSENPPDGERFSKMVEHILNTEENWNSWKNEGCPSFVKERTSDTKPTRIIRKRTAPEDFLGKGPTKKILMGNEELTRLWNLCPDNMEACKSETREHMPTLEEFFEEAIEQADPENMVENEYKAVNNSNYGWRALRLLARRSPHFFQPTNQQFKSLPEYLENMVIKLAKELPPPSEEIKTGEDEDEEDNDALLKENESPDVRRDKPVTGEQIEVFANKLGEQWKILAPYLEMKDSEIRQIECDSEDMKMRAKQLLVAWQDQEGVHATPENLINALNKSGLSDLAESLTNDNETNS

SEQ ID NO: 854616 - protein, 667 aa, Homo sapiens; identical to SEQ ID NO: 854610

SEQ ID NO: 854617 - protein, 350 aa, Homo sapiens
MDLQLSDSNFRRHILLQYLILFQYLKGQVKFKSSNYVLTDEQSLWIEDTTKSVYQLLSENPPDGERFSKMVEHILNTEENWNSWKNEGCPSFVKERTSDTKPTRIIRKRTAPEDFLGKGPTKKILMGNEELTRLWNLCPDNMEACKSETREHMPTLEEFFEEAIEQADPENMVENEYKAVNNSNYGWRALRLLARRSPHFFQPTNQQFKSLPEYLENMVIKLAKELPPPSEEIKTGEDEDEEDNDALLKENESPDVRRDKPVTGEQIEVFANKLGEQWKILAPYLEMKDSEIRQIECDSEDMKMRAKQLLVAWQDQEGVHATPENLINALNKSGLSDLAESLTNDNETNS

SEQ ID NO: 854618 - protein, 281 aa, Homo sapiens [sequence omitted]

SEQ ID NO: 854619 - protein, 281 aa, Homo sapiens [sequence omitted]

SEQ ID NO: 854620 - protein, 212 aa, Homo sapiens
MPSSLVIFVPLREHMPTLEEFFEEAIEQADPENMVENEYKAVNNSNYGWRALRLLARRSPHFFQPTNQQFKSLPEYLENMVIKLAKELPPPSEEIKTGEDEDEEDNDALLKENESPDVRRDKPVTGEQIEVFANKLGEQWKILAPYLEMKDSEIRQIECDSEDMKMRAKQLLVAWQDQEGVHATPENLINALNKSGLSDLAESLTNDNETNS

SEQ ID NO: 854621 - protein, 495 aa, Homo sapiens
RQWRARAAEKMSPTPPLFSLPEARTRFTKSTREALNNKNIKPLLSTFSQVPGSENEKKCTLDQAFRGILEEEIINHSSCENVLAIISLAIGGVTEGICTASTPFVLLGDVLDCLPLDQCDTIFTFVEKNVATWKSNTFYSAGKNYLLRMCNDLLRRLSKSQNTVFCGRIQLFLARLFPLSEKSGLNLQSQFNLENVTVFNTNEQESTLGQKHTEDREEGMDVEEGEMGDEEAPTTCSIPIDYNLYRKFWSLQDYFRNPVQCYEKISWKTFLKYSEEVLAVFKSYKLDDTQASRKKMEELKTGGEHVYFAKFLTSEKLMDLQLSDSNFRRHILLQYLILFQYLKGQVKFKSSNYVLTDEQSLWIEDTTKSVYQLLSENPPDGERFSKMVEHILNTEENWNSWKNEGCPSFVKERTSDTKPTRIIRKRTAPEDFLGKGPTKKILMGNEELTRLWNLCPDNMEACKSETREHMPTLEEFFEEAIEQADPENMVENEYK

SEQ ID NO: 854622 - protein, 495 aa, Homo sapiens; identical to SEQ ID NO: 854621

SEQ ID NO: 854623 - protein, 317 aa, Homo sapiens
RQWRARAAEKMSPTPPLFSLPEARTRFTKSTREALNNKNIKPLLSTFSQVPGSENEKKCTLDQAFRGILEEEIINHSSCENVLAIISLAIGGVTEGICTASTPFVLLGDVLDCLPLDQCDTIFTFVEKNVATWKSNTFYSAGKNYLLRMCNDLLRRLSKSQNTVFCGRIQLFLARLFPLSEKSGLNLQSQFNLENVTVFNTNEQESTLGQKHTEDREEGMDVEEGEMGDEEAPTTCSIPIDYNLYRKFWSLQDYFRNPVQCYEKISWKTFLKYSEEVLAVFKSYKLDDTQASRKKMEELKTGGEHVYFAKFLTSEKV

SEQ ID NO: 854624 - protein, 106 aa, Homo sapiens
RQWRARAAEKMSPTPPLFSLPEARTRFTKSTREALNNKNIKPLLSTFSQVPGSENEKKCTLDQAFRGILEEEIINHSSCENVLAIISLAIGGVTEGKYGSVLFCLK

SEQ ID NO: 854625 - protein, 667 aa, Homo sapiens; identical to SEQ ID NO: 854610

SEQ ID NO: 854626 - protein, 387 aa, Homo sapiens
RQWRARAAEKMSPTPPLFSLPEARTRFTKSTREALNNKNIKPLLSTFSQVPGSENEKKCTLDQAFRGILEEEIINHSSCENVLAIISLAIGGVTEGICTASTPFVLLGDVLDCLPLDQCDTIFTFVEKNVATWKSNTFYSAGKNYLLRMCNDLLRRLSKSQNTVFCGRIQLFLARLFPLSEKSGLNLQSQFNLENVTVFNTNEQESTLGQKHTEDREEGMDVEEGEMGDEEAPTTCSIPIDYNLYRKFWSLQDYFRNPVQCYEKISWKTFLKYSEEVLAVFKSYKLDDTQASRKKMEELKTGGEHVYFAKFLTSEKLMDLQLSDSNFRRHILLQYLILFQYLKGQVKFKSSNYVLTDEQSLWIEDTTKSVYQVSSTRNKPMIEKMEI

SEQ ID NO: 854627 - protein, 519 aa, Homo sapiens; identical to SEQ ID NO: 854615

SEQ ID NO: 854628 - protein, 350 aa, Homo sapiens; identical to SEQ ID NO: 854617

SEQ ID NO: 854629 - protein, 281 aa, Homo sapiens [sequence omitted]

SEQ ID NO: 854630 - protein, 233 aa, Homo sapiens
RRTRGSPRLYHEELTRLWNLCPDNMEACKSETREHMPTLEEFFEEAIEQADPENMVENEYKAVNNSNYGWRALRLLARRSPHFFQPTNQQFKSLPEYLENMVIKLAKELPPPSEEIKTGEDEDEEDNDALLKENESPDVRRDKPVTGEQIEVFANKLGEQWKILAPYLEMKDSEIRQIECDSEDMKMRAKQLLVAWQDQEGVHATPENLINALNKSGLSDLAESLTNDNETNS

SEQ ID NO: 854631 - protein, 153 aa, Homo sapiens
MNSLLILPGNQELLSSHLHVFTVTLNLPVISESVISKIGEDEDEEDNDALLKENESPDVRRDKPVTGEQIEVFANKLGEQWKILAPYLEMKDSEIRQIECDSEDMKMRAKQLLVAWQDQEGVHATPENLINALNKSGLSDLAESLTNDNETNS

SEQ ID NO: 854632 - protein, 563 aa, Homo sapiens
RQWRARAAEKMSPTPPLFSLPEARTRFTKSTREALNNKNIKPLLSTFSQVPGSENEKKCTLDQAFRGILEEEIINHSSCENVLAIISLAIGGVTEGICTASTPFVLLGDVLDCLPLDQCDTIFTFVEKNVATWKSNTFYSAGKNYLLRMCNDLLRRLSKSQNTVFCGRIQLFLARLFPLSEKSGLNLQSQFNLENVTVFNTNEQESTLGQKHTEDREEGMDVEEGEMGDEEAPTTCSIPIDYNLYRKFWSLQDYFRNPVQCYEKISWKTFLKYSEEVLAVFKSYKLDDTQASRKKMEELKTGGEHVYFAKFLTSEKLMDLQLSDSNFRRHILLQYLILFQYLKGQVKFKSSNYVLTDEQSLWIEDTTKSVYQLLSENPPDGERFSKMVEHILNTEENWNSWKNEGCPSFVKESVCFVHHRTSDTKPTRIIRKRTAPEDFLGKGPTKKILMGNEELTRLWNLCPDNMEACKSETREHMPTLEEFFEEAIEQADPENMVENEYKAVNNSNYGWRALRLLARRSPHFFQPTNQQFKSLPEYLENMVIKLAKELPVSTIDQLFIPFS

SEQ ID NO: 854633 - protein, 994 aa, Homo sapiens
LRAYAGWSPRPAAAAMSVLGEYERHCDSINSDFGSESGGCGDSSPGPSASQGPRAGGGAAEQEELHYIPIRVLGRGAFGEATLYRRTEDDSLVVWKEVDLTRLSEKERRDALNEIVILALLQHDNIIAYYNHFMDNTTLLIELEYCNGGNLYDKILRQKDKLFEEEMVVWYLFQIVSAVSCIHKAGILHRDIKTLNIFLTKANLIKLGDYGLAKKLNSEYSMAETLVGTPYYMSPELCQGVKYNFKSDIWAVGCVIFELLTLKRTFDATNPLNLCVKIVQGIRAMEVDSSQYSLELIQMVHSCLDQDPEQRPTADELLDRPLLRKRRREMEEKVTLLNAPTKRPRSSTVTEAPIAVVTSRTSEVYVWGGGKSTPQKLDVIKSGCSARQVCAGNTHFAVVTVEKELYTWVNMQGGTKLHGQLGHGDKASYRQPKHVEKLQGKAIRQVSCGDDFTVCVTDEGQLYAFGSDYYGCMGVDKVAGPEVLEPMQLNFFLSNPVEQVSCGDNHVVVLTRNKEVYSWGCGEYGRLGLDSEEDYYTPQKVDVPKALIIVAVQCGCDGTFLLTQSGKVLACGLNEFNKLGLNQCMSGIINHEAYHEVPYTTSFTLAKQLSFYKIRTIAPGKTHTAAIDERGRLLTFGCNKCGQLGVGNYKKRLGINLLGGPLGGKQVIRVSCGDEFTIAATDDNHIFAWGNGGNGRLAMTPTERPHGSDICTSWPRPIFGSLHHVPDLSCRGWHTILIVEKVLNSKTIRSNSSGLSIGTVFQSSSPGGGGGGGGGEEEDSQQESETPDPSGGFRGTMEADRGMEGLISPTEAMGNSNGASSSCPGWLRKELENAEFIPMPDSPSPLSAAFSESEKDTLPYEELQGLKVASEAPLEHKPQVEASSPRLNPAVTCAGKGTPLTPPACACSSLQVEVERLQGLVLKCLAEQQKLQQENLQIFTQLQKLNKKLEGGQQVGMHSKGTQTAKEEMEMDPKPDLDSDSWCLLGTDSCRPSL

SEQ ID NO: 854634 - protein, 828 aa, Homo sapiens
MVVWYLFQIVSAVSCIHKAGILHRDIKTLNIFLTKANLIKLGDYGLAKKLNSEYSMAETLVGTPYYMSPELCQGVKYNFKSDIWAVGCVIFELLTLKRTFDATNPLNLCVKIVQGIRAMEVDSSQYSLELIQMVHSCLDQDPEQRPTADELLDRPLLRKRRREMEEKVTLLNAPTKRPRSSTVTEAPIAVVTSRTSEVYVWGGGKSTPQKLDVIKSGCSARQVCAGNTHFAVVTVEKELYTWVNMQGGTKLHGQLGHGDKASYRQPKHVEKLQGKAIRQVSCGDDFTVCVTDEGQLYAFGSDYYGCMGVDKVAGPEVLEPMQLNFFLSNPVEQVSCGDNHVVVLTRNKEVYSWGCGEYGRLGLDSEEDYYTPQKVDVPKALIIVAVQCGCDGTFLLTQSGKVLACGLNEFNKLGLNQCMSGIINHEAYHEVPYTTSFTLAKQLSFYKIRTIAPGKTHTAAIDERGRLLTFGCNKCGQLGVGNYKKRLGINLLGGPLGGKQVIRVSCGDEFTIAATDDNHIFAWGNGGNGRLAMTPTERPHGSDICTSWPRPIFGSLHHVPDLSCRGWHTILIVEKVLNSKTIRSNSSGLSIGTVFQSSSPGGGGGGGGGEEEDSQQESETPDPSGGFRGTMEADRGMEGLISPTEAMGNSNGASSSCPGWLRKELENAEFIPMPDSPSPLSAAFSESEKDTLPYEELQGLKVASEAPLEHKPQVEASSPRLNPAVTCAGKGTPLTPPACACSSLQVEVERLQGLVLKCLAEQQKLQQENLQIFTQLQKLNKKLEGGQQVGMHSKGTQTAKEEMEMDPKPDLDSDSWCLLGTDSCRPSL

SEQ ID NO: 854635 - protein, 994 aa, Homo sapiens; identical to SEQ ID NO: 854633

SEQ ID NO: 854636 - protein, 285 aa, Homo sapiens
HELVPSTARQVRDMMQRSKNRPRMATILIVEKVLNSKTIRSNSSGLSIGTVFQSSSPGGGGGGGGGEEEDSQQESETPDPSGGFRGTMEADRGMEGLISPTEAMGNSNGASSSCPGWLRKELENAEFIPMPDSPSPLSAAFSESEKDTLPYEELQGLKVASEAPLEHKPQVEASSPRLNPAVTCAGKGTPLTPPACACSSLQVEVERLQGLVLKCLAEQQKLQQENLQIFTQLQKLNKKLEGGQQVGMHSKGTQTAKEEMEMDPKPDLDSDSWCLLGTDSCRPSL

SEQ ID NO: 854637 - protein, 751 aa, Homo sapiens
LRAYAGWSPRPAAAAMSVLGEYERHCDSINSDFGSESGGCGDSSPGPSASQGPRAGGGAAEQEELHYIPIRVLGRGAFGEATLYRRTEDDSLVVWKEVDLTRLSEKERRDALNEIVILALLQHDNIIAYYNHFMDNTTLLIELEYCNGGNLYDKILRQKDKLFEEEMVVWYLFQIVSAVSCIHKAGILHRDIKTLNIFLTKANLIKLGDYGLAKKLNSEYSMAETLVGTPYYMSPELCQGVKYNFKSDIWAVGCVIFELLTLKRTFDATNPLNLCVKIVQGIRAMEVDSSQYSLELIQMVHSCLDQDPEQRPTADELLDRPLLRKRRREMEEKVTLLNAPTKRPRSSTVTEAPIAVVTSRTSEVYVWGGGKSTPQKLDVIKSGCSARQVCAGNTHFAVVTVEKELYTWVNMQGGTKLHGQLGHGDKASYRQPKHVEKLQGKAIRQVSCGDDFTVCVTDEGQLYAFGSDYYGCMGVDKVAGPEVLEPMQLNFFLSNPVEQVSCGDNHVVVLTRNKEVYSWGCGEYGRLGLDSEEDYYTPQKVDVPKALIIVAVQCGCDGTFLLTQSGKVLACGLNEFNKLGLNQCMSGIINHEAYHEVPYTTSFTLAKQLSFYKIRTIAPGKTHTAAIDERGRLLTFGCNKCGQLGVGNYKKRLGINLLGGPLGGKQVIRVSCGDEFTIAATDDNHIFAWGNGGNGRLAMTPTERPHGSDICTSWPRPIFGSLHHVPDLSCRGWHTILIVGKSFICLGLGWL

SEQ ID NO: 854638 - protein, 540 aa, Homo sapiens
LRAYAGWSPRPAAAAMSVLGEYERHCDSINSDFGSESGGCGDSSPGPSASQGPRAGGGAAEQEELHYIPIRVLGRGAFGEATLYRRTEDDSLVVWKEVDLTRLSEKERRDALNEIVILALLQHDNIIAYYNHFMDNTTLLIELEYCNGGNLYDKILRQKDKLFEEEMVVWYLFQIVSAVSCIHKAGILHRDIKTLNIFLTKANLIKLGDYGLAKKLNSEYSMAETLVGTPYYMSPELCQGVKYNFKSDIWAVGCVIFELLTLKRTFDATNPLNLCVKIVQGIRAMEVDSSQYSLELIQMVHSCLDQDPEQRPTADELLDRPLLRKRRREMEEKVTLLNAPTKRPRSSTVTEAPIAVVTSRTSEVYVWGGGKSTPQKLDVIKSGCSARQVCAGNTHFAVVTVEKELYTWVNMQGGTKLHGQLGHGDKASYRQPKHVEKLQGKAIRQVSCGDDFTVCVTDEGQLYAFGSDYYGCMGVDKVAGPEVLEPMQLNFFLSNPVEQVSCGDNHVVVLTRNKEVYSWGCGEYGRGSLVSVHFFTGIQP

SEQ ID NO: 854639 - protein, 150 aa, Homo sapiens
LRAYAGWSPRPAAAAMSVLGEYERHCDSINSDFGSESGGCGDSSPGPSASQGPRAGGGAAEQEELHYIPIRVLGRGAFGEATLYRRTEVAALGAGRPVWRCRVAPSPSFSAPLSQRRELSALGAHGVYVLGSSPLFPLTGTRNWLDHWFD

SEQ ID NO: 854640 - protein, 828 aa, Homo sapiens; identical to SEQ ID NO: 854634

SEQ ID NO: 854641 - protein, 846 aa, Homo sapiens
LRAYAGWSPRPAAAAMSVLGEYERHCDSINSDFGSESGGCGDSSPGPSASQGPRAGGGAAEQEELHYIPIRVLGRGAFGEATLYRRTEDDSLVVWKEVDLTRLSEKERRDALNEIVILALLQHDNIIAYYNHFMDNTTLLIELEYCNGGNLYDKILRQKDKLFEEEMVVWYLFQIVSAVSCIHKAGILHRDIKTLNIFLTKANLIKLGDYGLAKKLNSEYSMAETLVGTPYYMSPELCQGVKYNFKSDIWAVGCVIFELLTLKRTFDATNPLNLCVKIVQGIRAMEVDSSQYSLELIQMVHSCLDQDPEQRPTADELLDRPLLRKRRREMEEKVTLLNAPTKRPRSSTVTEAPIAVVTSRTSEVYVWGGGKSTPQKLDVIKSGCSARQVCAGNTHFAVVTVEKELYTWVNMQGGTKLHGQLGHGDKASYRQPKHVEKLQGKAIRQVSCGDDFTVCVTDEGQLYAFGSDYYGCMGVDKVAGPEVLEPMQLNFFLSNPVEQVSCGDNHVVVLTRNKEVYSWGCGEYGRLGLDSEEEYNHIFAWGNGGNGRLAMTPTERPHGSDICTSWPRPIFGSLHHVPDLSCRGWHTILIVEKVLNSKTIRSNSSGLSIGTVFQSSSPGGGGGGGGGEEEDSQQESETPDPSGGFRGTMEADRGMEGLISPTEAMGNSNGASSSCPGWLRKELENAEFIPMPDSPSPLSAAFSESEKDTLPYEELQGLKVASEAPLEHKPQVEASSPRLNPAVTCAGKGTPLTPPACACSSLQVEVERLQGLVLKCLAEQQKLQQENLQIFTQLQKLNKKLEGGQQVGMHSKGTQTAKEEMEMDPKPDLDSDSWCLLGTDSCRPSL

SEQ ID NO: 854642 - protein, 994 aa, Homo sapiens; identical to SEQ ID NO: 854633

SEQ ID NO: 854643 - protein, 994 aa, Homo sapiens; identical to SEQ ID NO: 854633

SEQ ID NO: 854644 - protein, 689 aa, Homo sapiens
LRAYAGWSPRPAAAAMSVLGEYERHCDSINSDFGSESGGCGDSSPGPSASQGPRAGGGAAEQEELHYIPIRVLGRGAFGEATLYRRTEDDSLVVWKEVDLTRLSEKERRDALNEIVILALLQHDNIIAYYNHFMDNTTLLIELEYCNGGNLYDKILRQKDKLFEEEMVVWYLFQIVSAVSCIHKAGILHRDIKTLNIFLTKANLIKLGDYGLAKKLNSEYSMAETLVGTPYYMSPELCQGVKYNFKSDIWAVGCVIFELLTLKRTFDATNPLNLCVKIVQGIRAMEVDSSQYSLELIQMVHSCLDQDPEQRPTADELLDRPLLRKRRREMEEKVTLLNAPTKRPRSSTVTEAPIAVVTSRTSEVYVWGGGKSTPQKLDVIKSGCSARQVCAGNTHFAVVTVEKELYTWVNMQGGTKLHGQLGHGDKASYRQPKHVEKLQGKAIRQVSCGDDFTVCVTDEGQLYAFGSDYYGCMGVDKVAGPEVLEPMQLNFFLSNPVEQVSCGDNHVVVLTRNKEVYSWGCGEYGRLGLDSEEDYYTPQKVDVPKALIIVAVQCGCDGTFLLTQSGKVLACGLNEFNKLGLNQCMSGIINHEAYHEVPYTTSFTLAKQLSFYKIRTIAPGKTHTAAIDERGRLLTFGCNKCGQLGVGNYKKRLGINLLGGPLGGKQVIRVSCSNGKLITSSAEFSSSSS

SEQ ID NO: 854645 - protein, 870 aa, Homo sapiens
MGNRGMEELIPLVNKLQDAFSSIGQSCHLDLPQIAVVGGQSAGKSSVLENFVGRDFLPRGSGIVTRRPLILQLIFSKTEHAEFLHCKSKKFTDFDEVRQEIEAETDRVTGTNKGISPVPINLRVYSPHVLNLTLIDLPGITKVPVGDQPPDIEYQIKDMILQFISRESSLILAVTPANMDLANSDALKLAKEVDPQGLRTIGVITKLDLMDEGTDARDVLENKLLPLRRGYIGVVNRSQKDIEGKKDIRAALAAERKFFLSHPAYRHMADRMGTPHLQKTLNQQLTNHIRESLPALRSKLQSQLLSLEKEVEEYKNFRPDDPTRKTKALLQMVQQFGVDFEKRIEGSGDQVDTLELSGGARINRIFHERFPFELVKMEFDEKDLRREISYAIKNIHGVRTGLFTPDLAFEAIVKKQVVKLKEPCLKCVDLVIQELINTVRQCTSKLSSYPRLREETERIVTTYIREREGRTKDQILLLIDIEQSYINTNHEDFIGFANAQQRSTQLNKKRAIPNQGEILVIRRGWLTINNISLMKGGSKEYWFVLTAESLSWYKDEEEKEKKYMLPLDNLKIRDVEKGFMSNKHVFAIFNTEQRNVYKDLRQIELACDSQEDVDSWKASFLRAGVYPEKDQAENEDGAQENTFSMDPQLERQVETIRNLVDSYVAIINKSIRDLMPKTIMHLMINNTKAFIHHELLAYLYSSADQSSLMEESADQAQRRDDMLRMYHALKEALNIIGDISTSTVSTPVPPPVDDTWLQSASSHSPTPQRRPVSSIHPPGRPPAVRGPTPGPPLIPVPVGAAASFSAPPIPSRPGPQSVFANSDLFPAPPQIPSRPVRIPPGIPPGVPSRRPPAAPSRPTIIRPAEPSLLD

SEQ ID NO: 854646 - protein, 119 aa, Homo sapiens [sequence omitted]

SEQ ID NO: 854647 - protein, 1076 aa, Homo sapiens
MGNRGMEELIPLVNKLQDAFSSIGQSCHLDLPQIAVVGGQSAGKSSVLENFVGRDFLPRGSGIVTRRPLILQLIFSKTEHAEFLHCKSKKFTDFDEVRQEIEAETDRVTGTNKGISPVPINLRVYSPHVLNLTLIDLPGITKVPVGDQPPDIEYQIKDMILQFISRESSLILAVTPANMDLANSDALKLAKEVDPQGLRTIGVITKLDLMDEGTDARDVLENKLLPLRRGYIGVVNRSQKDIEGKKDIRAALAAERKFFLSHPAYRHMADRMGTPHLQKTLNQQLTNHIRESLPALRSKLQSQLLSLEKEVEEYKNFRPDDPTRKTKALLQMVQQFGVDFEKRIEGSGDQVDTLELSGGARINRIFHERFPFELVKMEFDEKDLRREISYAIKNIHGVRQVPRGESPLFLPLRGATPQLIGSPTPLSPQSLGLKRALGWFSVAASPSLRVSKGTEGGCVLVLRPLQASGLSAAPDQIGLSSCPVGWCEPHAKLRMLTADLPGEGRGGTESGFWEASMSPHHGFLVSLLGPLLILTKVVAPGVCPSIAVGSSGHPEGFRAVDSGIRPHTGHNLHSLLGTRPGPMKLLTMLCFSLTYLPCPRVWTVSTGLFTPDLAFEAIVKKQVVKLKEPCLKCVDLVIQELINTVRQCTSKLSSYPRLREETERIVTTYIREREGRTKDQILLLIDIEQSYINTNHEDFIGFANAQQRSTQLNKKRAIPNQGEILVIRRGWLTINNISLMKGGSKEYWFVLTAESLSWYKDEEEKEKKYMLPLDNLKIRDVEKGFMSNKHVFAIFNTEQRNVYKDLRQIELACDSQEDVDSWKASFLRAGVYPEKDQAENEDGAQENTFSMDPQLERQVETIRNLVDSYVAIINKSIRDLMPKTIMHLMINNTKAFIHHELLAYLYSSADQSSLMEESADQAQRRDDMLRMYHALKEALNIIGDISTSTVSTPVPPPVDDTWLQSASSHSPTPQRRPVSSIHPPGRPPAVRGPTPGPPLIPVPVGAAASFSAPPIPSRPGPQSVFANSDLFPAPPQIPSRPVRIPPGIPPGVPSRRPPAAPSRPTIIRPAEPSLLD

SEQ ID NO: 854648 - protein, 870 aa, Homo sapiens; identical to SEQ ID NO: 854645

SEQ ID NO: 854649 - protein, 533 aa, Homo sapiens
KLWLGTRLGVIGRVDTLELSGGARINRIFHERFPFELVKMEFDEKDLRREISYAIKNIHGVRTGLFTPDLAFEAIVKKQVVKLKEPCLKCVDLVIQELINTVRQCTSKLSSYPRLREETERIVTTYIREREGRTKDQILLLIDIEQSYINTNHEDFIGFANAQQRSTQLNKKRAIPNQGEILVIRRGWLTINNISLMKGGSKEYWFVLTAESLSWYKDEEEKEKKYMLPLDNLKIRDVEKGFMSNKHVFAIFNTEQRNVYKDLRQIELACDSQEDVDSWKASFLRAGVYPEKDQAENEDGAQENTFSMDPQLERQVETIRNLVDSYVAIINKSIRDLMPKTIMHLMINNTKAFIHHELLAYLYSSADQSSLMEESADQAQRRDDMLRMYHALKEALNIIGDISTSTVSTPVPPPVDDTWLQSASSHSPTPQRRPVSSIHPPGRPPAVRGPTPGPPLIPVPVGAAASFSAPPIPSRPGPQSVFANSDLFPAPPQIPSRPVRIPPGIPPGVPSRRPPAAPSRPTIIRPAEPSLLD

SEQ ID NO: 854650 - protein, 870 aa, Homo sapiens; identical to SEQ ID NO: 854645

SEQ ID NO: 854651 - protein, 870 aa, Homo sapiens; identical to SEQ ID NO: 854645

SEQ ID NO: 854652 - protein, 929 aa, Homo sapiens
MGNRGMEELIPLVNKLQDAFSSIGQSCHLDLPQIAVVGGQSAGKSSVLENFVGRDFLPRGSGIVTRRPLILQLIFSKTEHAEFLHCKSKKFTDFDEVRQEIEAETDRVTGTNKGISPVPINLRVYSPHVLNLTLIDLPGITKVPVGDQPPDIEYQIKDMILQFISRESSLILAVTPANMDLANSDALKLAKEVDPQGLRTIGVITKLDLMDEGTDARDVLENKLLPLRRGYIGVVNRSQKDIEGKKDIRAALAAERKFFLSHPAYRHMADRMGTPHLQKTLNQQLTNHIRESLPALRSKLQSQLLSLEKEVEEYKNFRPDDPTRKTKALLQMVQQFGVDFEKRIEGSGDQVDTLELSGGARINRIFHERFPFELVKMEFDEKDLRREISYAIKNIHGVRTGLFTPDLAFEAIVKKQVVKLKEPCLKCVDLVIQELINTVRQCTSKLSSYPRLREETERIVTTYIREREGRTKDQILLLIDIEQSYINTNHEDFIGFANAQQRSTQLNKKRAIPNQGEILVIRRGWLTINNISLMKGGSKEYWFVLTAESLSWYKDEEEKEKKYMLPLDNLKIRDVEKGFMSNKHVFAIFNTEQRNVYKDLRQIELACDSQEDVDSWKASFLRAGVYPEKDQAENEDGAQENTFSMDPQLERQVETIRNLVDSYVAIINKSIRDLMPKTIMHLMINNTKAFIHHELLAYLYSSADQSSLMEESADQAQRRDDMLRMYHALKEALNIIGDISTSTVSTPVPPPVDDTWLQSASSHSPTPQRRPVSSIHPPGRPPAVRGPTPGPPLIPVPVGAAASFSAPPIPSRPGPQSVFANSDLFPAPPQIPSRPVRIPPGIPPGVPRKTPLAGAQLGPNELSRPSRANPLLDYGPRGAWLCLSARGAFNGTPVGPQGTLSRWRLGGPFAPAPLLLGDPRGSPKVGGKA

SEQ ID NO: 854653 - protein, 609 aa, Homo sapiens
LGRAWFKSDEGARPHLQKTLNQQLTNHIRESLPALRSKLQSQLLSLEKEVEEYKNFRPDDPTRKTKALLQMVQQFGVDFEKRIEGSGDQVDTLELSGGARINRIFHERFPFELVKMEFDEKDLRREISYAIKNIHGVRTGLFTPDMAFEAIVKKQIVKLKEPSLKCVDLVVSELATVIKKCAEKLSSYPRLREETERIVTTYIREREGRTKDQILLLIDIEQSYINTNHEDFIGFANAQQRSTQLNKKRAIPNQGEILVIRRGWLTINNISLMKGGSKEYWFVLTAESLSWYKDEEEKEKKYMLPLDNLKIRDVEKGFMSNKHVFAIFNTEQRNVYKDLRQIELACDSQEDVDSWKASFLRAGVYPEKDQAENEDGAQENTFSMDPQLERQVETIRNLVDSYVAIINKSIRDLMPKTIMHLMINNTKAFIHHELLAYLYSSADQSSLMEESADQAQRRDDMLRMYHALKEALNIIGDISTSTVSTPVPPPVDDTWLQSASSHSPTPQRRPVSSIHPPGRPPAVRGPTPGPPLIPVPVGAAASFSAPPIPSRPGPQSVFANSDLFPAPPQIPSRPVRIPPGIPPGVPSRRPPAAPSRPTIIRPAEPSLLD

SEQ ID NO: 854654 - protein, 599 aa, Homo sapiens
SSCSRVSQCTESQLTNHIRESLPALRSKLQSQLLSLEKEVEEYKNFRPDDPTRKTKALLQMVQQFGVDFEKRIEGSGDQVDTLELSGGARINRIFHERFPFELVKMEFDEKDLRREISYAIKNIHGVRTGLFTPDMAFEAIVKKQIVKLKEPSLKCVDLVVSELATVIKKCAEKLSSYPRLREETERIVTTYIREREGRTKDQILLLIDIEQSYINTNHEDFIGFANAQQRSTQLNKKRAIPNQGEILVIRRGWLTINNISLMKGGSKEYWFVLTAESLSWYKDEEEKEKKYMLPLDNLKIRDVEKGFMSNKHVFAIFNTEQRNVYKDLRQIELACDSQEDVDSWKASFLRAGVYPEKDQAENEDGAQENTFSMDPQLERQVETIRNLVDSYVAIINKSIRDLMPKTIMHLMINNTKAFIHHELLAYLYSSADQSSLMEESADQAQRRDDMLRMYHALKEALNIIGDISTSTVSTPVPPPVDDTWLQSASSHSPTPQRRPVSSIHPPGRPPAVRGPTPGPPLIPVPVGAAASFSAPPIPSRPGPQSVFANSDLFPAPPQIPSRPVRIPPGIPPGVPSRRPPAAPSRPTIIRPAEPSLLD

SEQ ID NO: 854655 - protein, 464 aa, Homo sapiens
MAFEAIVKKQIVKLKEPSLKCVDLVVSELATVIKKCAEKLSSYPRLREETERIVTTYIREREGRTKDQILLLIDIEQSYINTNHEDFIGFANAQQRSTQLNKKRAIPNQGEILVIRRGWLTINNISLMKGGSKEYWFVLTAESLSWYKDEEEKEKKYMLPLDNLKIRDVEKGFMSNKHVFAIFNTEQRNVYKDLRQIELACDSQEDVDSWKASFLRAGVYPEKDQAENEDGAQENTFSMDPQLERQVETIRNLVDSYVAIINKSIRDLMPKTIMHLMINNTKAFIHHELLAYLYSSADQSSLMEESADQAQRRDDMLRMYHALKEALNIIGDISTSTVSTPVPPPVDDTWLQSASSHSPTPQRRPVSSIHPPGRPPAVRGPTPGPPLIPVPVGAAASFSAPPIPSRPGPQSVFANSDLFPAPPQIPSRPVRIPPGIPPGVPSRRPPAAPSRPTIIRPAEPSLLD

SEQ ID NO: 854656 - protein, 818 aa, Homo sapiens
MGNRGMEELIPLVNKLQDAFSSIGQSCHLDLPQIAVVGGQSAGKSSVLENFVGRDFLPRGSGIVTRRPLILQLIFSKTEHAEFLHCKSKKFTDFDEVRQEIEAETDRVTGTNKGISPVPINLRVYSPHVLNLTLIDLPGITKVPVGDQPPDIEYQIKDMILQFISRESSLILAVTPANMDLANSDALKLAKEVDPQGLRTIGVITKLDLMDEGTDARDVLENKLLPLRRGYIGVVNRSQKDIEGKKDIRAALAAERKFFLSHPAYRHMADRMGTPHLQKTLNQQLTNHIRESLPALRSKLQSQLLSLEKEVEEYKNFRPDDPTRKTKALLQMVQQFGVDFEKRIEGSGDQVDTLELSGGARINRIFHERFPFELVKMEFDEKDLRREISYAIKNIHGVRTGLFTPDLAFEAIVKKQVVKLKEPCLKCVDLVIQELINTVRQCTSKLSSYPRLREETERIVTTYIREREGRTKDQILLLIDIEQSYINTNHEDFIGFANAQQRSTQLNKKRAIPNQGEILVIRRGWLTINNISLMKGGSKEYWFVLTAESLSWYKDEEEKEKKYMLPLDNLKIRDVEKGFMSNKHVFAIFNTEQRNVYKDLRQIELACDSQEDVDSWKASFLRAGVYPEKDQAENEDGAQENTFSMDPQLERQVETIRNLVDSYVAIINKSIRDLMPKTIMHLMINNTKAFIHHELLAYLYSSADQSSLMEESADQAQRRDDMLRMYHALKEALNIIGDISTSTVSTPVPPPVDDTWLQSASSHRPTPQRRHGVQPYTRPGTASRKTRGTQITGAPTMITKSTEGGESKTDTDLRKTQQ

SEQ ID NO: 854657 - protein, 494 aa, Homo sapiens
AALLLLYNSRRRRSIKTPDLGDSGPACDWHIGLRGCALLSQALLPMRVWGVRRQPLFSCLGSLLVPTPSLLARPGNALAAAPLARLGLVLTVTPALPQILLLIDIEQSYINTNHEDFIGFANAQQRSTQLNKKRAIPNQGEILVIRRGWLTINNISLMKGGSKEYWFVLTAESLSWYKDEEEKEKKYMLPLDNLKIRDVEKGFMSNKHVFAIFNTEQRNVYKDLRQIELACDSQEDVDSWKASFLRAGVYPEKDQAENEDGAQENTFSMDPQLERQVETIRNLVDSYVAIINKSIRDLMPKTIMHLMINNTKAFIHHELLAYLYSSADQSSLMEESADQAQRRDDMLRMYHALKEALNIIGDISTSTVSTPVPPPVDDTWLQSASSHSPTPQRRPVSSIHPPGRPPAVRGPTPGPPLIPVPVGAAASFSAPPIPSRPGPQSVFANSDLFPAPPQIPSRPVRIPPGIPPGVPSRRPPAAPSRPTIIRPAEPSLLD

SEQ ID NO: 854658 - protein, 659 aa, Homo sapiens
GLGLHGGCGGGSGSGGGGGGGGGGGGGGGGSGGGLGPGAAAAAAGPGAGSKMAAAAAAVGPGAGGAGSAVPGGAGPCATVSVFPGARLLTIGDANGEIQRHAEQQALRLEVRAGPDSAGIALYSHEDVCVFKCSVSRETECSRVGKQSFIITLGCNSVLIQFATPNDFCSFYNILKTCRGHTLERSVFSERTEESSAVQYFQFYGYLSQQQNMMQDYVRTGTYQRAILQNHTDFKDKIVLDVGCGSGILSFFAAQAGARKIYAVEASTMAQHAEVLVKSNNLTDRIVVIPGKVEEVSLPEQVDIIISEPMGYMLFNERMLESYLHAKKYLKPSGNMFPTIGDVHLAPFTDEQLYMEQFTKANFWYQPSFHGVDLSALRGAAVDEYFRQPVVDTFDIRILMAKSVKYTVNFLEAKEGDLHRIEIPFKFHMLHSGLVHGLAFWFDVAFIGSIMTVWLSTAPTEPLTHWYQVRCLFQSPLFAKAGDTLSGTCLLIANKRQSYDISIVAQVDQTGSKSSNLLDLKNPFFRYTGTTPSPPPGSHYTSPSENMWNTGSTYNLSSGMAVAGMPTAYDLSSVIASGSSVGHNNLIPLANTGIVNHTHSRMGSIMSTGIVQGSSGAQGSGGGSTSAHYAVNSQFTMGGPAISMASPMSIPTNTMHYGS

SEQ ID NO: 854659 - protein, 477 aa, Homo sapiens
MLPLEPYLTQTSAVPQMSHFMCHSPTHKPQGLLPWAPFHQASVSLYPISPWPSESVCPPTCPGGASCWFPAGNAWDRVELGFLGFGAGGVSIAVPGFPLSCGQGCCAGGWLGHGARFPAKLRAFPQVIRRGWLTINNISLMKGGSKEYWFVLTAESLSWYKDEEEKEKKYMLPLDNLKIRDVEKGFMSNKHVFAIFNTEQRNVYKDLRQIELACDSQEDVDSWKASFLRAGVYPEKDQAENEDGAQENTFSMDPQLERQVETIRNLVDSYVAIINKSIRDLMPKTIMHLMINNTKAFIHHELLAYLYSSADQSSLMEESADQAQRRDDMLRMYHALKEALNIIGDISTSTVSTPVPPPVDDTWLQSASSHSPTPQRRPVSSIHPPGRPPAVRGPTPGPPLIPVPVGAAASFSAPPIPSRPGPQSVFANSDLFPAPPQIPSRPVRIPPGIPPGVPSRRPPAAPSRPTIIRPAEPSLLD

SEQ ID NO: 854660 - protein, 359 aa, Homo sapiens
PDLGCSDLVIRRGWLTINNISLMKGGSKEYWFVLTAESLSWYKDEEEKEKKYMLPLDNLKIRDVEKGFMSNKHVFAIFNTEQRNVYKDLRQIELACDSQEDVDSWKASFLRAGVYPEKDQAENEDGAQENTFSMDPQLERQVETIRNLVDSYVAIINKSIRDLMPKTIMHLMINNTKAFIHHELLAYLYSSADQSSLMEESADQAQRRDDMLRMYHALKEALNIIGDISTSTVSTPVPPPVDDTWLQSASSHSPTPQRRPVSSIHPPGRPPAVRGPTPGPPLIPVPVGAAASFSAPPIPSRPGPQSVFANSDLFPAPPQIPSRPVRIPPGIPPGVPSRRPPAAPSRPTIIRPAEPSLLD

SEQ ID NO: 854661 - protein, 659 aa, Homo sapiens; identical to SEQ ID NO: 854658

SEQ ID NO: 854662 - protein, 670 aa, Homo sapiens
GLGLHGGCGGGSGSGGGGGGGGGGGGGGGGSGGGLGPGAAAAAAGPGAGSKMAAAAAAVGPGAGGAGSAVPGGAGPCATVSVFPGARLLTIGDANGEIQRHAEQQALRLEVRAGPDSAGIALYSHEDVCVFKCSVSRETECSRVGKQSFIITLGCNSVLIQFATPNDFCSFYNILKTCRGHTLERSVFSERTEESSAVQYFQFYGYLSQQQNMMQDYVRTGTYQRAILQNHTDFKDKIVLDVGCGSGILSFFAAQAGARKIYAVEASTMAQHAEVLVKSNNLTDRIVVIPGKVEEVSLPEQVDIIISEPMGYMLFNERMLESYLHAKKYLKPSGNMFPTIGDVHLAPFTDEQLYMEQFTKANFWYQPSFHGVDLSALRGAAVDEYFRQPVVDTFDIRILMAKSVKYTVNFLEAKEGDLHRIEIPFKFHMLHSGLVHGLAFWFDVAFIGSIMTVWLSTAPTEPLTHWYQVRCLFQSPLFAKAGDTLSGTCLLIANKRQSYDISIVAQVDQTGSKSSNLLDLKNPFFRYTGTTPSPPPGSHYTSPSENMWNTGSTYNLSSGMAVAGEQGPPQCPANPGGRPRRRPGPSASSPDVSLLDTGMPTAYDLSSVIASGSSVGHNNLIPLGSSGAQGSGGGSTSAHYAVNSQFTMGGPAISMASPMSIPTNTMHYGS

SEQ ID NO: 854663 - protein, 636 aa, Homo sapiens
GLGLHGGCGGGSGSGGGGGGGGGGGGGGGGSGGGLGPGAAAAAAGPGAGSKMAAAAAAVGPGAGGAGSAVPGGAGPCATVSVFPGARLLTIGDANGEIQRHAEQQALRLEVRAGPDSAGIALYSHEDVCVFKCSVSRETECSRVGKQSFIITLGCNSVLIQFATPNDFCSFYNILKTCRGHTLERSVFSERTEESSAVQYFQFYGYLSQQQNMMQDYVRTGTYQRAILQNHTDFKDKIVLDVGCGSGILSFFAAQAGARKIYAVEASTMAQHAEVLVKSNNLTDRIVVIPGKVEEVSLPEQVDIIISEPMGYMLFNERMLESYLHAKKYLKPSGNMFPTIGDVHLAPFTDEQLYMEQFTKANFWYQPSFHGVDLSALRGAAVDEYFRQPVVDTFDIRILMAKSVKYTVNFLEAKEGDLHRIEIPFKFHMLHSGLVHGLAFWFDVAFIGSIMTVWLSTAPTEPLTHWYQVRCLFQSPLFAKAGDTLSGTCLLIANKRQSYDISIVAQVDQTGSKSSNLLDLKNPFFRYTGTTPSPPPGSHYTSPSENMWNTGSTYNLSSGMAVAGMPTAYDLSSVIASGSSVGHNNLIPLGSSGAQGSGGGSTSAHYAVNSQFTMGGPAISMASPMSIPTNTMHYGS

SEQ ID NO: 854664 - protein, 636 aa, Homo sapiens; identical to SEQ ID NO: 854663

SEQ ID NO: 854665 - protein, 740 aa, Homo sapiens
MGNRGMEELIPLVNKLQDAFSSIGQSCHLDLPQIAVVGGQSAGKSSVLENFVGRDFLPRGSGIVTRRPLILQLIFSKTEHAEFLHCKSKKFTDFDEVRQEIEAETDRVTGTNKGISPVPINLRVYSPHVLNLTLIDLPGITKVPVGDQPPDIEYQIKDMILQFISRESSLILAVTPANMDLANSDALKLAKEVDPQGLRTIGVITKLDLMDEGTDARDVLENKLLPLRRGYIGVVNRSQKDIEGKKDIRAALAAERKFFLSHPAYRHMADRMGTPHLQKTLNQQLTNHIRESLPALRSKLQSQLLSLEKEVEEYKNFRPDDPTRKTKALLQMVQQFGVDFEKRIEGSGDQVDTLELSGGARINRIFHERFPFELVKMEFDEKDLRREISYAIKNIHGVRTGLFTPDLAFEAIVKKQVVKLKEPCLKCVDLVIQELINTVRQCTSKLSSYPRLREETERIVTTYIREREGRTKDQILLLIDIEQSYINTNHEDFIGFANAQQRSTQLNKKRAIPNQGEILVIRRGWLTINNISLMKGGSKEYWFVLTAESLSWYKDEEEKEKKYMLPLDNLKIRDVEKGFMSNKHVFAIFNTEQRNVYKDLRQIELACDSQEDVDSWKASFLRAGVYPEKDQAENEDGAQENTFSMDPQLERQVETIRNLVDSYVAIINKSIRDLMPKTIMHLMINNTKAFSKDPSGIYQWPATCQARAGARSAAMRPGRLPHPYPVAAAYLCISGMCVHQ

SEQ ID NO: 854666 - protein, 636 aa, Homo sapiens; identical to SEQ ID NO: 854663

SEQ ID NO: 854667 - protein, 659 aa, Homo sapiens; identical to SEQ ID NO: 854658

SEQ ID NO: 854668 - protein, 346 aa, Homo sapiens
MGNRGMEELIPLVNKLQDAFSSIGQSCHLDLPQIAVVGGQSAGKSSVLENFVGRDFLPRGSGIVTRRPLILQLIFSKTEHAEFLHCKSKKFTDFDEVRQEIEAETDRVTGTNKGISPVPINLRVYSPHVLNLTLIDLPGITKVPVGDQPPDIEYQIKDMILQFISRESSLILAVTPANMDLANSDALKLAKEVDPQGLRTIGVITKLDLMDEGTDARDVLENKLLPLRRGYIGVVNRSQKDIEGKKDIRAALAAERKFFLSHPAYRHMADRMGTPHLQKTLNQQLTNHIRESLPALRSKLQSQLLSLEKEVEEYKNFRPDDPTRKTKALLHKVFLGWESPCRAGLL

SEQ ID NO: 854669 - protein, 428 aa, Homo sapiens [sequence omitted]

SEQ ID NO: 854670 - protein, 499 aa, Homo sapiens
MGNRGMEELIPLVNKLQDAFSSIGQSCHLDLPQIAVVGGQSAGKSSVLENFVGRDFLPRGSGIVTRRPLILQLIFSKTEHAEFLHCKSKKFTDFDEVRQEIEAETDRVTGTNKGISPVPINLRVYSPHVLNLTLIDLPGITKVPVGDQPPDIEYQIKDMILQFISRESSLILAVTPANMDLANSDALKLAKEVDPQGLRTIGVITKLDLMDEGTDARDVLENKLLPLRRGYIGVVNRSQKDIEGKKDIRAALAAERKFFLSHPAYRHMADRMGTPHLQKTLNQQLTNHIRESLPALRSKLQSQLLSLEKEVEEYKNFRPDDPTRKTKALLQMVQQFGVDFEKRIEGSGDQVDTLELSGGARINRIFHERFPFELVKMEFDEKDLRREISYAIKNIHGVRTGLFTPDMAFEAIVKKQIVKLKEPSLKCVDLVVSELATVIKKCAEKLSSYPRLREETERIVTTYIREREGRTKDQILLLGIGKPDEVLWFVLMYGLLNVD

SEQ ID NO: 854671 - protein, 346 aa, Homo sapiens; identical to SEQ ID NO: 854668

SEQ ID NO: 854672 - protein, 363 aa, Homo sapiens
MGNRGMEELIPLVNKLQDAFSSIGQSCHLDLPQIAVVGGQSAGKSSVLENFVGRDFLPRGSGIVTRRPLILQLIFSKTEHAEFLHCKSKKFTDFDEVRQEIEAETDRVTGTNKGISPVPINLRVYSPHVLNLTLIDLPGITKVPVGDQPPDIEYQIKDMILQFISRESSLILAVTPANMDLANSDALKLAKEVDPQGLRTIGVITKLDLMDEGTDARDVLENKLLPLRRGYIGVVNRSQKDIEGKKDIRAALAAERKFFLSHPAYRHMADRMGTPHLQKTLNQQLTNHIRESLPALRSKLQSQLLSLEKEVEEYKNFRPDDPTRKTKALLQMVQQFGVDFEKRRPHPLLAQFDHCKCLHSVFY

SEQ ID NO: 854673 - protein, 210 aa, Homo sapiens
MGNRGMEELIPLVNKLQDAFSSIGQSCHLDLPQIAVVGGQSAGKSSVLENFVGRDFLPRGSGIVTRRPLILQLIFSKTEHAEFLHCKSKKFTDFDEVRQEIEAETDRVTGTNKGISPVPINLRVYSPHVLNLTLIDLPGITKVPVGDQPPDIEYQIKDMILQFISRESSLILAVTPANMDLANSDALKLAKEVDPQGNPEPRAVPSSRCL

SEQ ID NO: 854674 - protein, 74 aa, Homo sapiens [sequence omitted]

SEQ ID NO: 854675 - protein, 146 aa, Homo sapiens
MRPFMTPQPPLHTDVNNNKRATRTRKGYTHVPNTTHTIQLEEKSRNTPPHPMPKQTEHKNNTHIVGDAKKKQTQPSNAAKTVTRYALMQLTKNYNRDGENLKDKHETPTKKETNRRQNHNPQQDFASVPPTKPTHKHHIDPQHKIT

SEQ ID NO: 854676 - protein, 867 aa, Homo sapiens
MGNRGMEELIPLVNKLQDAFSSIGQSCHLDLPQIAVVGGQSAGKSSVLENFVGRDFLPRGSGIVTRRPLILQLIFSKTEHAEFLHCKSKKFTDFDEVRQEIEAETDRVTGTNKGISPVPINLRVYSPHVLNLTLIDLPGITKVPVGDQPPDIEYQIKDMILQFISRESSLILAVTPANMDLANSDALKLAKEVDPQGLRTIGVITKLDLMDEGTDARDVLENKLLPLRRGYIGVVNRSQKDIEGKKDIRAALAAERKFFLSHPAYRHMADRMGTPHLQKTLNQQLTNHIRESLPALRSKLQSQLLSLEKEVEEYKNFRPDDPTRKTKALLQMVQQFGVDFEKRIEGSGDQVDTLELSGGARINRIFHERFPFELVKMEFDEKDLRREISYAMKNTTTGLFTPDLAFEAIVKKQVVKLKEPCLKCVDLVIQELINTVRQCTSKLSSYPRLREETERIVTTYIREREGRTKDQILLLIDIEQSYINTNHEDFIGFANAQQRSTQLNKKRAIPNQGEILVIRRGWLTINNISLMKGGSKEYWFVLTAESLSWYKDEEEKEKKYMLPLDNLKIRDVEKGFMSNKHVFAIFNTEQRNVYKDLRQIELACDSQEDVDSWKASFLRAGVYPEKDQAENEDGAQENTFSMDPQLERQVETIRNLVDSYVAIINKSIRDLMPKTIMHLMINNTKAFIHHELLAYLYSSADQSSLMEESADQAQRRDDMLRMYHALKEALNIIGDISTSTVSTPVPPPVDDTWLQSASSHSPTPQRRPVSSIHPPGRPPAVRGPTPGPPLIPVPVGAAASFSAPPIPSRPGPQSVFANSDLFPAPPQIPSRPVRIPPGIPPGVPSRRPPAAPSRPTIIRPAEPSLLD

SEQ ID NO: 854677 - protein, 870 aa, Homo sapiens
MGNRGMEELIPLVNKLQDAFSSIGQSCHLDLPQIAVVGGQSAGKSSVLENFVGRDFLPRGSGIVTRRPLILQLIFSKTEHAEFLHCKSKKFTDFDEVRQEIEAETDRVTGTNKGISPVPINLRVYSPHVLNLTLIDLPGITKVPVGDQPPDIEYQIKDMILQFISRESSLILAVTPANMDLANSDALKLAKEVDPQGLRTIGVITKLDLMDEGTDARDVLENKLLPLRRGYIGVVNRSQKDIEGKKDIRAALAAERKFFLSHPAYRHMADRMGTPHLQKTLNQQLTNHIRESLPALRSKLQSQLLSLEKEVEEYKNFRPDDPTRKTKALLQMVQQFGVDFEKRIEGSGDQVDTLELSGGARINRIFHERFPFELVKMEFDEKDLRREISYAIKNIHGVRTGLFTPDMAFEAIVKKQIVKLKEPSLKCVDLVVSELATVIKKCAEKLSSYPRLREETERIVTTYIREREGRTKDQILLLIDIEQSYINTNHEDFIGFANAQQRSTQLNKKRAIPNQGEILVIRRGWLTINNISLMKGGSKEYWFVLTAESLSWYKDEEEKEKKYMLPLDNLKIRDVEKGFMSNKHVFAIFNTEQRNVYKDLRQIELACDSQEDVDSWKASFLRAGVYPEKDQAENEDGAQENTFSMDPQLERQVETIRNLVDSYVAIINKSIRDLMPKTIMHLMINNTKAFIHHELLAYLYSSADQSSLMEESADQAQRRDDMLRMYHALKEALNIIGDISTSTVSTPVPPPVDDTWLQSASSHSPTPQRRPVSSIHPPGRPPAVRGPTPGPPLIPVPVGAAASFSAPPIPSRPGPQSVFANSDLFPAPPQIPSRPVRIPPGIPPGVPSRRPPAAPSRPTIIRPAEPSLLD

SEQ ID NO: 854678 - protein, 726 aa, Homo sapiens
MSDVRVSGVIVRGQIKDMILQFISRESSLILAVTPANMDLANSDALKLAKEVDPQGLRTIGVITKLDLMDEGTDARDVLENKLLPLRRGYIGVVNRSQKDIEGKKDIRAALAAERKFFLSHPAYRHMADRMGTPHLQKTLNQQLTNHIRESLPALRSKLQSQLLSLEKEVEEYKNFRPDDPTRKTKALLQMVQQFGVDFEKRIEGSGDQVDTLELSGGARINRIFHERFPFELVKMEFDEKDLRREISYAMKNIQTGLFTPDLAFEAIVKKQVVKLKEPCLKCVDLVIQELINTVRQCTSKLSSYPRLREETERIVTTYIREREGRTKDQILLLIDIEQSYINTNHEDFIGFANAQQRSTQLNKKRAIPNQGEILVIRRGWLTINNISLMKGGSKEYWFVLTAESLSWYKDEEEKEKKYMLPLDNLKIRDVEKGFMSNKHVFAIFNTEQRNVYKDLRQIELACDSQEDVDSWKASFLRAGVYPEKDQAENEDGAQENTFSMDPQLERQVETIRNLVDSYVAIINKSIRDLMPKTIMHLMINNTKAFIHHELLAYLYSSADQSSLMEESADQAQRRDDMLRMYHALKEALNIIGDISTSTVSTPVPPPVDDTWLQSASSHSPTPQRRPVSSIHPPGRPPAVRGPTPGPPLIPVPVGAAASFSAPPIPSRPGPQSVFANSDLFPAPPQIPSRPVRIPPGIPPGVPSRRPPAAPSRPTIIRPAEPSLLD

SEQ ID NO: 854679 - protein, 458 aa, Homo sapiens
WYGSEYGIKEPSLKCVDLVVSELATVIKKCAEKLSSYPRLREETERIVTTYIREREGRTKDQILLLIDIEQSYINTNHEDFIGFANAQQRSTQLNKKRAIPNQGEILVIRRGWLTINNISLMKGGSKEYWFVLTAESLSWYKDEEEKEKKYMLPLDNLKIRDVEKGFMSNKHVFAIFNTEQRNVYKDLRQIELACDSQEDVDSWKASFLRAGVYPEKDQAENEDGAQENTFSMDPQLERQVETIRNLVDSYVAIINKSIRDLMPKTIMHLMINNTKAFIHHELLAYLYSSADQSSLMEESADQAQRRDDMLRMYHALKEALNIIGDISTSTVSTPVPPPVDDTWLQSASSHSPTPQRRPVSSIHPPGRPPAVRGPTPGPPLIPVPVGAAASFSAPPIPSRPGPQSVFANSDLFPAPPQIPSRPVRIPPGIPPGVPSRRPPAAPSRPTIIRPAEPSLLD

SEQ ID NO: 854680 - protein, 434 aa, Homo sapiens [sequence omitted]

SEQ ID NO: 854681 - protein, 659 aa, Homo sapiens; identical to SEQ ID NO: 854658

SEQ ID NO: 854682 - protein, 504 aa, Homo sapiens
AALLLLYNSRRRRSIKTPDLGDSGPACDWHIGLRGCALLSQALLPMRVWGVRRQPLFSCLGSLLVPTPSLLARPGNALAAAPLARLGLVLTVTPALPQILLLIDIEQSYINTNHEDFIGFANCYYTEQLVTCAQQRSTQLNKKRAIPNQGEILVIRRGWLTINNISLMKGGSKEYWFVLTAESLSWYKDEEEKEKKYMLPLDNLKIRDVEKGFMSNKHVFAIFNTEQRNVYKDLRQIELACDSQEDVDSWKASFLRAGVYPEKDQAENEDGAQENTFSMDPQLERQVETIRNLVDSYVAIINKSIRDLMPKTIMHLMINNTKAFIHHELLAYLYSSADQSSLMEESADQAQRRDDMLRMYHALKEALNIIGDISTSTVSTPVPPPVDDTWLQSASSHSPTPQRRPVSSIHPPGRPPAVRGPTPGPPLIPVPVGAAASFSAPPIPSRPGPQSVFANSDLFPAPPQIPSRPVRIPPGIPPGVPSRRPPAAPSRPTIIRPAEPSLLD

SEQ ID NO: 854683 - protein, 659 aa, Homo sapiens; identical to SEQ ID NO: 854658

SEQ ID NO: 854684 - protein, 636 aa, Homo sapiens; identical to SEQ ID NO: 854663

SEQ ID NO: 854685 - protein, 326 aa, Homo sapiens
KLWLGTRLGVIGREKEKKYMLPLDNLKIRDVEKGFMSNKHVFAIFNTEQRNVYKDLRQIELACDSQEDVDSWKASFLRAGVYPEKDQAENEDGAQENTFSMDPQLERQVETIRNLVDSYVAIINKSIRDLMPKTIMHLMINNTKAFIHHELLAYLYSSADQSSLMEESADQAQRRDDMLRMYHALKEALNIIGDISTSTVSTPVPPPVDDTWLQSASSHSPTPQRRPVSSIHPPGRPPAVRGPTPGPPLIPVPVGAAASFSAPPIPSRPGPQSVFANSDLFPAPPQIPSRPVRIPPGIPPGVPSRRPPAAPSRPTIIRPAEPSLLD

SEQ ID NO: 854686 - protein, 255 aa, Homo sapiens
MPRHTCGLSQDTFDIRILMAKSVKYTVNFLEAKEGDLHRIEIPFKFHMLHSGLVHGLAFWFDVAFIGSIMTVWLSTAPTEPLTHWYQVRCLFQSPLFAKAGDTLSGTCLLIANKRQSYDISIVAQVDQTGSKSSNLLDLKNPFFRYTGTTPSPPPGSHYTSPSENMWNTGSTYNLSSGMAVAGMPTAYDLSSVIASGSSVGHNNLIPLGSSGAQGSGGGSTSAHYAVNSQFTMGGPAISMASPMSIPTNTMHYGS

SEQ ID NO: 854687 - protein, 208 aa, Homo sapiens [sequence omitted]

SEQ ID NO: 854688 - protein, 263 aa, Homo sapiens
MARYEAGCNRPRDFLEVKEGDLHRIEIPFKFHMLHSGLVHGLAFWFDVAFIGSIMTVWLSTAPTEPLTHWYQVRCLFQSPLFAKAGDTLSGTCLLIANKRQSYDISIVAQVDQTGSKSSNLLDLKNPFFRYTGTTPSPPPGSHYTSPSENMWNTGSTYNLSSGMAVAGMPTAYDLSSVIASGSSVGHNNLIPLANTGIVNHTHSRMGSIMSTGIVQGSSGAQGSGGGSTSAHYAVNSQFTMGGPAISMASPMSIPTNTMHYGS

SEQ ID NO: 854689 - protein, 577 aa, Homo sapiens
GLGLHGGCGGGSGSGGGGGGGGGGGGGGGGSGGGLGPGAAAAAAGPGAGSKMAAAAAAVGPGAGGAGSAVPGGAGPCATVSVFPGARLLTIGDANGEIQRHAEQQALRLEVRAGPDSAGIALYSHEDVCVFKCSVSRETECSRVGKQSFIITLGCNSVLIQFATPNDFCSFYNILKTCRGHTLERSVFSERTEESSAVQYFQFYGYLSQQQNMMQDYVRTGTYQRAILQNHTDFKDKIVLDVGCGSGILSFFAAQAGARKIYAVEASTMAQHAEVLVKSNNLTDRIVVIPGKVEEVSLPEQVDIIISEPMGYMLFNERMLESYLHAKKYLKPSGNMFPTIGDVHLAPFTDEQLYMEQFTKANFWYQPSFHGVDLSALRGAAVDEYFRQPVVDTFDIRILMAKSVKYTVNFLEAKEGDLHRIEIPFKFHMLHSGLVHGLAFWFDVAFIGSIMTVWLSTAPTEPLTHWYQVRCLFQSPLFAKAGDTLSGTCLLIANKRQSYDISIVAQVDQTGSKSSNLLDLKNPFFRYTGTTPSPPPGSHYTFPTTVTAFPSLPCPGRDLAGTSPSKKRKKEKERKNK

SEQ ID NO: 854690 - protein, 117 aa, Homo sapiens
MLGPGSQWAALASSLTLAPVQGRPLCLAGHRTAQRGPGAPGRGRWGVALWGMESQGGRGGTRTLDTILNEGSSLGGTLPRSSWAGKAHVGQAFYKCGHQGRLHPQALLGCRGISTSH

SEQ ID NO: 854691 - protein, 525 aa, Homo sapiens [sequence omitted]

SEQ ID NO: 854692 - protein, 363 aa, Homo sapiens
MGNRGMEELIPLVNKLQDAFSSIGQSCHLDLPQIAVVGGQSAGKSSVLENFVGRDFLPRGSGIVTRRPLILQLIFSKTEHAEFLHCKSKKFTDFDEVRQEIEAETDRVTGTNKGISPVPINLRVYSPHVLNLTLIDLPGITKVPVGDQPPDIEYQIKDMILQFISRESSLILAVTPANMDLANSDALKLAKEVDPQGLRTIGVITKLDLMDEGTDARDVLENKLLPLRRGYIGVVNRSQKDIEGKKDIRAALAAERKFFLSHPAYRHMADRMGTPHLQKTLNQQLTNHIRESLPALRSKLQSQLLSLEKEVEEYKNFRPDDPTRKTKALLHPPPGSPRVAGLGLCGWWWRGVLGASQLPPMPP

SEQ ID NO: 854693 - protein, 401 aa, Homo sapiens
GLGLHGGCGGGSGSGGGGGGGGGGGGGGGGSGGGLGPGAAAAAAGPGAGSKMAAAAAAVGPGAGGAGSAVPGGAGPCATVSVFPGARLLTIGDANGEIQRHAEQQALRLEVRAGPDSAGIALYSHEDVCVFKCSVSRETECSRVGKQSFIITLGCNSVLIQFATPNDFCSFYNILKTCRGHTLERSVFSERTEESSAVQYFQFYGYLSQQQNMMQDYVRTGTYQRAILQNHTDFKDKIVLDVGCGSGILSFFAAQAGARKIYAVEASTMAQHAEVLVKSNNLTDRIVVIPGKVEEVSLPEQVDIIISEPMGYMLFNERMLESYLHAKKYLKPSGNMFPTIGDVHLAPFTDEQLYMEQFTKANFWYQPSFHGVDLSALRGAAVDEYFRQPVVVSRASRVLLQ

SEQ ID NO: 854694 - protein, 145 aa, Homo sapiens
LGKRDGGAHRPHSSALSSQLELTGGQEQGVGSVGPLISHSPPPSAFSTCVVHVASRATRTPPMRPLCLFPQLSSYPRLREETERIVTTYIREREGRTKDQILLLIDIEQSYINTNHEDFIGFAKVGTFRDWLVGRHQSSLSDPRR

SEQ ID NO: 854695 - protein, 441 aa, Homo sapiens [sequence omitted]

SEQ ID NO: 854696 - protein, 441 aa, Homo sapiens [sequence omitted]

SEQ ID NO: 854697 - protein, 846 aa, Homo sapiens
MKRDGGRLSEADIRGFVAAVVNGSAQGAQIGAMLMAIRLRGMDLEETSVLTQALAQSGQQLEWPEAWRQQLVDKHSTGGVGDKVSLVLAPALAACGCKVPMISGRGLGHTGGTLDKLESIPGFNVIQSPEQMQVLLDQAGCCIVGQSEQLVPADGILYAARDVTATVDSLPLITASILSKKLVEGLSALVVDVKFGGAAVFPNQEQARELAKTLVGVGASLGLRVAAALTAMDKPLGRCVGHALEVEEALLCMDGAGPPDLRDLVTTLGGALLWLSGHAGTQAQGAARVAAALDDGSALGRFERMLAAQGVDPGLARALCSGSPAERRQLLPRAREQEELLAPADGERRGSPRPSASAIPFPSRGPAPSRARAFQPLSPQAPWSWSGRCRWRWCCTSSGPGAAALGSRSAWGWAQSCWSTWVRGCAVGPPGSACTGTAPRSAARRAAPCRRRSYSPTARHSPPPRPSQSSFCRRSNKAPLPRNLVSAWAGAEGSRAAEAGAVSMNSDPRRAPPSAHALRACQRLRPCAHAQLRGRLRPACERVAPAFPEPAGQSPGSWRSALPLVLGPLTRGPAARSIRSMLLLTRSPTAWHRLSQLKPPVLPGTLGGQALHLRSWLLSRQGPAETGGQGQPQGPGLRTRLLITGLFGAGLGGAWLALRAEKERLQQQKRTEALRQAAVGQGDFHLLDHRGRARCKADFRGQWVLMYFGFTHCPDICPDELEKLVQVVRQLEAEPGLPPVQPVFITVDPERDDVEAMARYVQDFHPRLLGLTGSTKQVAQASHSYRVYYNAGPKDEDQDYIVDHSIAIYLLNPDGLFTDYYGRSRSAEQISDSVRRHMAAFRSVLS

SEQ ID NO: 854698 - protein, 493 aa, Homo sapiens
MKRDGGRLSEADIRGFVAAVVNGSAQGAQIGAWGGLGVPDPDWEVSPRDFGSLGVRRCPTTSTGPRVPHRCGLHPHAYPHIPGAMLMAIRLRGMDLEETSVLTQALAQSGQQLEWPEAWRQQLVDKHSTGGVGDKVSLVLAPALAACGCKVPMISGRGLGHTGGTLDKLESIPGFNVIQSPEQMQVLLDQAGCCIVGQSEQLVPADGILYAARDVTATVDSLPLITASILSKKLVEGLSALVVDVKFGGAAVFPNQEQARELAKTLVGVGASLGLRVAAALTAMDKPLGRCVGHALEVEEALLCMDGAGPPDLRDLVTTLGGALLWLSGHAGTQAQGAARVAAALDDGSALGRFERMLAAQGVDPGLARALCSGSPAERRQLLPRAREQEELLAPADGTVELVRALPLALVLHELGAGRSRAGEPLRLGVGAELLVDVGQRLRRGTPWLRVHRDGPALSGPQSRALQEALVLSDRAPFAAPSPFAELVLPPQQ

SEQ ID NO: 854699 - protein, 152 aa, Homo sapiens
MKRDGGRLSEADIRGFVAAVVNGSAQGAQIGAMLMAIRLRGMDLEETSVLTQALAQSGQQLEWPEAWRQQLVDKHSTGGVGDKVSLVLAPALAACGCKVPMISGRGLGHTGGTLDKLESIPGFNVIQSPEQVRGATDQSLIQVDDGDPGQNH

SEQ ID NO: 854700 - protein, 152 aa, Homo sapiens; identical to SEQ ID NO: 854699

SEQ ID NO: 854701 - protein, 441 aa, Homo sapiens [sequence omitted]

SEQ ID NO: 854702 - protein, 456 aa, Homo sapiens
MKRDGGRLSEADIRGFVAAVVNGSAQGAQIGAMLMAIRLRGMDLEETSVLTQALAQSGQQLEWPEAWRQQLVDKHSTGGVGDKVSLVLAPALAACGCKVPMISGRGLGHTGGTLDKLESIPGFNVIQSPEQMQVLLDQAGCCIVGQSEQLVPADGILYAARDVTATVDSLPLITAPGFSIVSNLLCLPQASILSKKLVEGLSALVVDVKFGGAAVFPNQEQARELAKTLVGVGASLGLRVAAALTAMDKPLGRCVGHALEVEEALLCMDGAGPPDLRDLVTTLGGALLWLSGHAGTQAQGAARVAAALDDGSALGRFERMLAAQGVDPGLARALCSGSPAERRQLLPRAREQEELLAPADGTVELVRALPLALVLHELGAGRSRAGEPLRLGVGAELLVDVGQRLRRGTPWLRVHRDGPALSGPQSRALQEALVLSDRAPFAAPSPFAELVLPPQQ

SEQ ID NO: 854703 - protein, 401 aa, Homo sapiens
MKRDGGRLSEADIRGFVAAVVNGSAQGAQIGAMLMAIRLRGMDLEETSVLTQALAQSGQQLEWPEAWRQQLVDKHSTGGVGDKVSLVLAPALAACGCKVPMISGRGLGHTGGTLDKLESIPGFNVIQSPEQMQVLLDQAGCCIVGQSEQLVPADGILYAARDVTATVDSLPLITVGVGASLGLRVAAALTAMDKPLGRCVGHALEVEEALLCMDGAGPPDLRDLVTTLGGALLWLSGHAGTQAQGAARVAAALDDGSALGRFERMLAAQGVDPGLARALCSGSPAERRQLLPRAREQEELLAPADGTVELVRALPLALVLHELGAGRSRAGEPLRLGVGAELLVDVGQRLRRGTPWLRVHRDGPALSGPQSRALQEALVLSDRAPFAAPSPFAELVLPPQQ

SEQ ID NO: 854704 - protein, 467 aa, Homo sapiens
MAPWSWSGRCRWRWCCTSSGPGAAALGSRSAWGWAQSCWSTWVRGCAVGPPGSACTGTAPRSAARRAAPCRRRSYSPTARHSPPPRPSQSSFCRRSNKAPLPRNLVSAWAGAEGSRAAEAGAVSMNRDPRRAPPSAHALRACQRLRPCAHAQLRGRLRPACERVAPAFPEPAGQSPGSWRSALPLVLGPLTRGPAARSIRSMLLLTRSPTAWHRLSQLKPPVLPGTLGGQALHLRSWLLSRQGPAETGGQGQPQGPGLRTRLLITGLFGAGLGGAWLALRAEKERLQQQKRTEALRQAAVGQGDFHLLDHRGRARCKADFRGQWVLMYFGFTHCPDICPDELEKLVQVVRQLEAEPGLPPVQPVFITVDPERDDVEAMARYVQDFHPRLLGLTGSTKQVAQASHSYRVYYNAGPKDEDQDYIVDHSIAIYLLNPDGLFTDYYGRSRSAEQISDSVRRHMAAFRSVLS

SEQ ID NO: 854705 - protein, 476 aa, Homo sapiens
MKRDGGRLSEADIRGFVAAVVNGSAQGAQIGAMLMAIRLRGMDLEETSVLTQALAQSGQQLEWPEAWRQQLVDKHSTGGVGDKVSLVLAPALAACGCKVPMISGRGLGHTGGTLDKLESIPGFNVIQSPEQMQVLLDQAGCCIVGQSEQLVPADGILYAARDVTATVDSLPLITASILSKKLVEGLSALVVDVKFGGAAVFPNQEQARELAKTLVGVGASLGLRVAAALTAMDKPLGRCVGHALEVEEALLCMDGAGPPDLRDLVTTLGGALLWLSGHAGTQAQGAARVAAALDDGSALGRFERMLAAQGVDPGLARALCSGSPAERRQLLPRAREQEELLAPADGTVELVRALPLALVLHELGAGRSRAGEPLRLGVGAELLVDVGQRLRREHQIHAAADSEPHSLAQALSAQASGPPWDPGRPGPASEVLAFVKAGPCRDRWAGPAPGPWASNPAADHRPVRGWTRWGLAGPEG

SEQ ID NO: 854706 - protein, 441 aa, Homo sapiens [sequence omitted]

SEQ ID NO: 854707 - protein, 441 aa, Homo sapiens [sequence omitted]

SEQ ID NO: 854708 - protein, 467 aa, Homo sapiens
MAPWSWSGRCRWRWCCTSSGPGAAALGSRSAWGWAQSCWSTWVRGCAVGPPGSACTGTAPRSAARRAAPCRRRSYSPTARHSPPPRPSQSSFCRRSNKAPLPRNLVSAWAGAEGSRAAEAGAVSMNSDPRRAPPSAHALRACQRLRPCAHAQLRGRLRPACERVAPAFPEPAGQSPGSWRSALPLVLGPLTRGPAARSIRSMLLLTRSPTAWHRLSQLKPPVLPGTLGGQALHLRSWLLSRQGPAETGGQGQPQGPGLRTRLLITGLFGAGLGGAWLALRAEKERLQQQKRTEALRQAAVGQGDFHLLDHRGRARCKADFRGQWVLMYFGFTHCPDICPDELEKLVQVVRQLEAEPGLPPVQPVFITVDPERDDVEAMARYVQDFHPRLLGLTGSTKQVAQASHSYRVYYNAGPKDEDQDYIVDHSIAIYLLNPDGLFTDYYGRSRSAEQISDSVRRHMAAFRSVLS

SEQ ID NO: 854709 - protein, 467 aa, Homo sapiens; identical to SEQ ID NO: 854708

SEQ ID NO: 854710 - protein, 394 aa, Homo sapiens
MKRDGGRLSEADIRGFVAAVVNGSAQGAQIGAMLMAIRLRGMDLEETSVLTQALAQSGQQLEWPEAWRQQLVDKHSTGGVGDKVSLVLAPALAACGCKVPMISGRGLGHTGGTLDKLESIPGFNVIQSPEQMQVLLDQAGCCIVGQSEQLVPADGILYAARDVTATVDSLPLITASILSKKLVEGLSALVVDVKFGGAAVFPNQEQARELAKTLVGVGASLGLRVAAALTAMDKPLGRCVGHALEVEEALLCMDGAGPPDLRDLVTTLGGALLWLSGHAGTQAQGAARVAAALDDGSALGRFERMLAAQGVDPGLARALCSGSPAERRQLLPRAREQEELLAPADGTPWLRVHRDGPALSGPQSRALQEALVLSDRAPFAAPSPFAELVLPPQQ

SEQ ID NO: 854711 - protein, 152 aa, Homo sapiens; identical to SEQ ID NO: 854699

SEQ ID NO: 854712 - protein, 211 aa, Homo sapiens
  misc_feature (100)..(100): Xaa can be any naturally occurring amino acid
  misc_feature (118)..(118): Xaa can be any naturally occurring amino acid
  misc_feature (121)..(121): Xaa can be any naturally occurring amino acid
  misc_feature (135)..(136): Xaa can be any naturally occurring amino acid
  misc_feature (150)..(150): Xaa can be any naturally occurring amino acid
  misc_feature (177)..(177): Xaa can be any naturally occurring amino acid
  misc_feature (210)..(210): Xaa can be any naturally occurring amino acid
MISNVLRLGVYVLGYIASHRYVGPEGSLGQPQTDIGGTKANSNKGGLLVVEQRVHAMGSPLQPLHLVLVHCCAWQRGAPNRYTRARVCPVCAPSWDVQPXANYRPCEAHNFSRAQFPXLLXLPMKSATKGNGVAXXWHGRVNHNRRVSWXGESDERSTKLERKPCALTVRRTATSLXYCHANGALLDHATPVGHKALANLQSTGLQIPPXY

SEQ ID NO: 854713 - protein, 109 aa, Homo sapiens
MGLGAGPGQTLTRMLPGYALHDPSRPRAPAFTFGARFPTQQTTCGPGPGHLVPARMTVRGTDGAPAYSIYGRPRRSAPFLTPGPGQDPRAPGHPNAELPPGRPTWEPPT

SEQ ID NO: 854714 - protein, 441 aa, Homo sapiens [sequence omitted]

SEQ ID NO: 854715 - protein, 441 aa, Homo sapiens [sequence omitted]

SEQ ID NO: 854716 - protein, 179 aa, Homo sapiens
MAWGGATAGAVSQLRTQRGGARASGEAGTPALRRVRTSRPHRGREGDSREPQTPETHAGRDRPGITPADGPGPRRPGSSACPGAPGDWPGRGVQGFPGAATAELRPPGGPTRLPSWGAAAPPPAVDRCARTLNPTVPTRGRGRVPGLGSGASGRGQRPKQARSDGSLDDPGNRGPTRAW

SEQ ID NO: 854717 - protein, 441 aa, Homo sapiens [sequence omitted]

SEQ ID NO: 854718 - protein, 152 aa, Homo sapiens; identical to SEQ ID NO: 854699

SEQ ID NO: 854719 - protein, 228 aa, Homo sapiens
MAWGGATAGAVSQLRTQRGGARASGEAGTPALRRVRTSRPHRGREGDSREPQTPETHAGRDRPGITPADGPGPRRPGSSACPGAPGDWPGRGVQGFPGAATAELRPPGGPTRLPSWGAAAPPPAVDRCARTLNPTVPTRGRGRVPGLGSGASGRGQRPKQVRAGLKSRGGEAGGRHGRGRHRHGTEGRTPERHGKGVGTGARGSDTDAGRPQTPDVSGIPAGPERWQP

SEQ ID NO: 854720 - protein, 409 aa, Homo sapiens
MLMAIRLRGMDLEETSVLTQALAQSGQQLEWPEAWRQQLVDKHSTGGVGDKVSLVLAPALAACGCKVPMISGRGLGHTGGTLDKLESIPGFNVIQSPEQMQVLLDQAGCCIVGQSEQLVPADGILYAARDVTATVDSLPLITASILSKKLVEGLSALVVDVKFGGAAVFPNQEQARELAKTLVGVGASLGLRVAAALTAMDKPLGRCVGHALEVEEALLCMDGAGPPDLRDLVTTLGGALLWLSGHAGTQAQGAARVAAALDDGSALGRFERMLAAQGVDPGLARALCSGSPAERRQLLPRAREQEELLAPADGTVELVRALPLALVLHELGAGRSRAGEPLRLGVGAELLVDVGQRLRRGTPWLRVHRDGPALSGPQSRALQEALVLSDRAPFAAPSPFAELVLPPQQ

SEQ ID NO: 854721 - protein, 310 aa, Homo sapiens [sequence omitted]

SEQ ID NO: 854722 - protein, 429 aa, Homo sapiens
MKRDGGRLSEADIRGFVAAVVNGSAQGAQIGAMLMAIRLRGMDLEETSVLTQALAQSGQQLEWPEAWRQQLVDKHSTGGVGDKVSLVLAPALAACGCKVPMISGRGLGHTGGTLDKLESIPGFNVIQSPEQMQVLLDQAGCCIVGQSEQLVPADGILYAARDVTATVDSLPLITASILSKKLVEGLSALVVDVKFGGAAVFPNQEQARELAKTLVGVGASLGLRVAAALTAMDKPLGRCVGHALEVEEALLCMDGAGPPDLRDLVTTLGGALLWLSGHAGTQAQGAARVAAALDDGSALGRFERMLAAQGVDPGLARALCSGSPAERRQLLPRAREQEELLAPADEHQIHAAADSEPHSLAQALSAQASGPPWDPGRPGPASEVLAFVKAGPCRDRWAGPAPGPWASNPAADHRPVRGWTRWGLAGPEG

SEQ ID NO: 854723 - protein, 441 aa, Homo sapiens [sequence omitted]

SEQ ID NO: 854724 - protein, 363 aa, Homo sapiens
MKRDGGRLSEADIRGFVAAVVNGSAQGAQIGAMLMAIRLRGMDLEETSVLTQALAQSGQQLEWPEAWRQQLVDKHSTGGVGDKVSLVLAPALAACGCKVPMISGRGLGHTGGTLDKLESIPGFNVIQSPEQMQVLLDQAGCCIVGQSEQLVPADGILYAARDVTATVDSLPLITASILSKKLVEGLSALVVDVKFGGAAVFPNQEQARELAKTLVGVGASLGLRVAAALTAMDKPLGRCVGHALEVEEALLCMDGAGPPDLRDLVTTLGGALLWLSGHAGTQAQGAARVAAALDDGSALGRFERMLAAQGVDPGLARALCSGSPAERRQLLPRAREQEELLAPADGERRGSPRPSASAIPFPS

SEQ ID NO: 854725 - protein, 298 aa, Homo sapiens
MQVLLDQAGCCIVGQSEQLVPADGILYAARDVTATVDSLPLITASILSKKLVEGLSALVVDVKFGGAAVFPNQEQARELAKTLVGVGASLGLRVAAALTAMDKPLGRCVGHALEVEEALLCMDGAGPPDLRDLVTTLGGALLWLSGHAGTQAQGAARVAAALDDGSALGRFERMLAAQGVDPGLARALCSGSPAERRQLLPRAREQEELLAPADEHQIHAAADSEPHSLAQALSAQASGPPWDPGRPGPASEVLAFVKAGPCRDRWAGPAPGPWASNPAADHRPVRGWTRWGLAGPEG

SEQ ID NO: 854726 - protein, 144 aa, Homo sapiens
MKRDGGRLSEADIRGFVAAVVNGSAQGAQIGAMLMAIRLRGMDLEETSVLTQALAQSGQQLEWPEAWRQQLVDKHSTGGVGDKVSLVLAPALAACGCKVRNHLLSRREPIPHMQQPVHPQAAPNLKPGPKPPRPYQGFSPPCSP

SEQ ID NO: 854727 - protein, 278 aa, Homo sapiens
TQTPCPLAWERGSRSEDISVPGQKPPTCSSFSGMDVGPSSLPHLGLKLLLLLLLLPLRGQANTGCYGIPGMPGLPGAPGKDGYDGLPGPKGEPGIPAIPGIRGPKGQKGEPGLPGHPGKNGPMGPPGMPGVPGPMGIPGEPGEEGRYKQKFQSVFTVTRQTHQPPAPNSLIRFNAVLTNPQGDYDTSTGKFTCKVPGLYYFVYHASHTANLCVLLYRSGVKVVTFCGHTSKTNQVNSGGVLLRLQVGEEVWLAVNDYYDMVGIQGSDSVFSGFLLFPD

SEQ ID NO: 854728 - protein, 278 aa, Homo sapiens; identical to SEQ ID NO: 854727

SEQ ID NO: 854729 - protein, 245 aa, Homo sapiens
MDVGPSSLPHLGLKLLLLLLLLPLRGQANTGCYGIPGMPGLPGAPGKDGYDGLPGPKGEPGIPAIPGIRGPKGQKGEPGLPGHPGKNGPMGPPGMPGVPGPMGIPGEPGEEGRYKQKFQSVFTVTRQTHQPPAPNSLIRFNAVLTNPQGDYDTSTGKFTCKVPGLYYFVYHASHTANLCVLLYRSGVKVVTFCGHTSKTNQVNSGGVLLRLQVGEEVWLAVNDYYDMVGIQGSDSVFSGFLLFPD

SEQ ID NO: 854730 - protein, 278 aa, Homo sapiens; identical to SEQ ID NO: 854727

SEQ ID NO: 854731 - protein, 213 aa, Homo sapiens
LRHRVLLPGRGEADLRTSLCQARNRPPAGIPAIPGIRGPKGQKGEPGLPGHPGKNGPMGPPGMPGVPGPMGIPGEPGEEGRYKQKFQSVFTVTRQTHQPPAPNSLIRFNAVLTNPQGDYDTSTGKFTCKVPGLYYFVYHASHTANLCVLLYRSGVKVVTFCGHTSKTNQVNSGGVLLRLQVGEEVWLAVNDYYDMVGIQGSDSVFSGFLLFPD

SEQ ID NO: 854732 - protein, 245 aa, Homo sapiens
TQTPCPLAWERGSRSEDISVPGQKPPTCSSFSGMDVGPSSLPHLGLKLLLLLLLLPLRGQANTGCYGIPGMPGLPGAPGKDGYDGLPGPKGEPGIPAIPGIRGPKGQKGEPGLPGHPGKNGPMGPPGMPGVPGPMGIPGEPGEEGRYKQKFQSVFTVTRQTHQPPAPNSLIRFNAVLTNPQGDYDTSTGKFTCKVPGLYYFVYHASHTANLCVLLYRSGVGCSRGVGCSQRRWMQSSEAYACQGE

SEQ ID NO: 854733 - protein, 245 aa, Homo sapiens; identical to SEQ ID NO: 854729

SEQ ID NO: 854734 - protein, 347 aa, Homo sapiens
TQTPCPLAWERGSRSEDISVPGQKPPTCSSFSGMDVGPSSLPHLGLKLLLLLLLLPLRGQANTGCYGIPGMPGLPGAPGKDGYDGLPGPKGEPGIPAIPGIRGPKGQKGEPGLPGHPGKNGPMGPPGMPGVPGPMGIPGEPGEEGRYKQKFQSVFTVTRQTHQPPAPNSLIRFNAVLTNPQGDYDTSTGKFTCKVPGLYYFVYHASHTANLCVLLYRSGVKVVTFCGHTSKTNQVNSGGVLLRLQVGEEVWLAVNDYYDGLPGPKGEPGIPAIPGIRGPKGQKGEPGLPGHPGKNGPMDPLGCQGCPAPWASLESQVRRADTSRNSSQCSRSLGRPTSSPAPNSLIR

SEQ ID NO: 854735 - protein, 136 aa, Homo sapiens
FDGDSLISSQLEKDKKQLEKENKRLRQQAEIKDTTLEENNVKIGNLEKENKTLSKEIGIYKESCVRLKELEKENKELVKRATIDIKTLVTLREDLVSEKLKTQQMNNDLEKLTHELEKIGLNKERLLHDEQSTDDR

SEQ ID NO: 854736 - protein, 1816 aa, Homo sapiens
MENEIFTPLLEQFMTSPLVTWVKTFGPLAAGNGTNLDEYVALVDGVFLNQVMLQINPKLESQRVNKKVNNDASLRMHNLSILVRQIKFYYQETLQQLIMMSLPNVLIIGKNPFSEQGTEEVKKLLLLLLGCAVQCQKKEEFIERIQGLDFDTKAAVAAHIQEVTHNQENVFDLQWMEVTDMSQEDIEPLLKNMALHLKRLIDERDEHSETIIELSEERDGLHFLPHASSSAQSPCGSPGMKRTESRQHLSVELADAKAKIRRLRQELEEKTEQLLDCKQELEQMEIELKRLQQENMNLLSDARSARMYRDELDALREKAVRVDKLESEVSRYKERLHDIEFYKARVEELKEDNQVLLETKTMLEDQLEGTRARSDKLHELEKENLQLKAKLHDMEMERDMDRKKIEELMEENMTLEMAQKQSMDESLHLGWELEQISRTSELSEAPQKSLGHEVNELTSSRLLKLEMENQSLTKTVEELRTTVDSVEGNASKILKMEKENQRLSKKVEILENEIVQEKQSLQNCQNLSKDLMKEKAQLEKTIETLRENSERQIKILEQENEHLNQTVSSLRQRSQISAEARVKDIEKENKILHESIKETSSKLSKIEFEKRQIKKELEHYKEKGERAEELENELHHLEKENELLQKKITNLKITCEKIEALEQENSELERENRKLKKTLDSFKNLTFQLESLEKENSQLDEENLELRRNVESLKCASMKMAQLQLENKELESEKEQLKKGLELLKASFKKTERLEVSYQGLDIENQRLQKTLENSNKKIQQLESELQDLEMENQTLQKNLEELKISSKRLEQLEKENKSLEQETSQLEKDKKQLEKENKRLRQQAEIKDTTLEENNVKIGNLEKENKTLSKEIGIYKESCVRLKELEKENKELVKRATIDIKTLVTLREDLVSEKLKTQQMNNDLEKLTHELEKIGLNKERLLHDEQSTDDSRYKLLESKLESTLKKSLEIKEEKIAALEARLEESTNYNQQLRQELKTNATLQAEKQALKTQLKQLETQNNNLQAQILALQRQTVSLQEQNTTLQTQNAKLQVENSTLNSQSTSLMNQNAQLLIQQSSLENENESVIKEREDLKSLYDSLIKDHEKLELLHERQASEYESLISKHGTLKSAHKNLEVEHRDLEDRYNQLLKQKGQLEDLEKMLKVEQEKMLLENKNHETVAAEYKKLCGENDRLNHTYSQLLKETEVLQTDHKNLKSLLNNSKLEQTRLEAEFSKLKEQYQQLDITSTKLNNQCELLSQLKGNLEEENRHLLDQIQTLMLQNRTLLEQNMESKDLFHVEQRQYIDKLNELRRQKEKLEEKIMDQYKFYDPSPPRRRGNWITLKMRKLIKSKKDINRERQKSLTLTPTRSDSSEGFLQLPHQDSQDSSSVGSNSLEDGQTLGTKKSSMVALKRLPFLRNRPKDKDKMKACYRRSMSMNDLVQSMVLAGQWTGSTENLEVPDDISTGKRRKELGAMAFSTTAINFSTVNSSAGFRSKQLVNNKDTTSFEDISPQGVSDDSSTGSRVHASRPASLDSGRTSTSNSNNNASLHEVKAGAVNNQSRPQSHSSGEFSLLHDHEAWSSSGSSPIQYLKRQTRSSPVLQHKISETLESRHHKIKTGSPGSEVVTLQQFLEESNKLTSVQIKSSSQENLLDEVMKSLSVSSDFLGKDKPVSCGLARSVSGKTPGDFYDRRTTKPEFLRPGPRKTEDTYFISSAGKPTPGTQGKIKLVKESSLSRQSKDSNPYATLPRASSVISTAEGTTRRTSIHDFLTKDSRLPISVDSPPAAADSNTTAASNVDKVQESRNSKSRSREQQSS

SEQ ID NO: 854737 - protein, 1702 aa, Homo sapiens
MENEIFTPLLEQFMTSPLVTWVKTFGPLAAGNGTNLDEYVALVDGVFLNQVMLQINPKLESQRVNKKVNNDASLRMHNLSILVRQIKFYYQETLQQLIMMSLPNVLIIGKNPFSEQGTEEVKKLLLLLLGCAVQCQKKEEFIERIQGLDFDTKAAVAAHIQEVTHNQENVFDLQWMEVTDMSQEDIEPLLKNMALHLKRLIDERDEHSETIIELSEERDGLHFLPHASSSAQSPCGSPGMKRTESRQHLSVELADAKAKIRRLRQELEEKTEQLLDCKQELEQMEIELKRLQQENMNLLSDARSARMYRDELDALREKAVRVDKLESEVSRYKERLHDIEFYKARVEELKEDNQVLLETKTMLEDQLEGTRARSDKLHELEKENLQLKAKLHDMEMERDMDRKKIEELMEENMTLEMAQKQSMDESLHLGWELEQISRTSELSEAPQKSLGHEVNELTSSRLLKLEMENQSLTKTVEELRTTVDSVEGNASKILKMEKENQRLSKKVEILENEIVQEKQSLQNCQNLSKDLMKEKAQLEKTIETLRENSERQIKILEQENEHLNQTVSSLRQRSQISAEARVKDIEKENKILHESIKETSSKLSKIEFEKRQIKKELEHYKEKGERAEELENELHHLEKENELLQKKITNLKITCEKIEALEQENSELERENRKLKKTLDSFKNLTFQLESLEKENSQLDEENLELRRNVESLKCASMKMAQLQLENKELESEKEQLKKGLELLKASFKKTERLEVSYQGLDIENQRLQKTLENSNKKIQQLESELQDLEMENQTLQKNLEELKISSKRLEQLEKENKSLEQETSQLEKDKKQLEKENKRLRQQAEIKDTTLEENNVKIGNLEKENKTLSKEIGIYKESCVRLKELEKENKELVKRATIDIKTLVTLREDLVSEKLKTQQMNNDLEKLTHELEKIGLNKERLLHDEQSTDDSRYKLLESKLESTLKKSLEIKEEKIAALEARLEESTNYNQQLRQELKTNATLQAEKQALKTQLKQLETQNNNLQAQILALQRQTVSLQEQNTTLQTQNAKLQVENSTLNSQSTSLMNQNAQLLIQQSSLENENESVIKEREDLKSLYDSLIKDHEKLELLHERQASEYESLISKHGTLKSAHKNLEVEHRDLEDRYNQLLKQKGQLEDLEKMLKVEQEKMLLENKNHETVAAEYKKLCGENDRLNHTYSQLLKETEVLQTDHKNLKSLLNNSKLEQTRLEAEFSKLKEQYQQLDITSTKLNNQCELLSQLKGNLEEENRHLLDQIQTLMLQNRTLLEQNMESKDLFHVEQRQYIDKLNELRRQKEKLEEKIMDQYKFYDPSPPRRRGNWITLKMRKLIKSKKDINRERQKSLTLTPTRSDSSEGFLQLPHQDSQDSSSVGSNSLEDGQTLGTKKSSTMNDLVQSMVLAGQWTGSTENLEVPDDISTGKRRKELGAMAFSTTAINFSTVNSSAGFRSKQLVNNKDTTSFEDISPQGVSDDSSTGSRVHASRPASLDSGRTSTSNSNNNASLHEVKAGAVNNQSRPQSHSSGEFSLLHDHEAWSSSGSSPIQYLKRQTRSSPVLQHKISETLESRHHKIKTGSPGSEVVTLQQFLEESNKLTSVQIKSSSQENLLDEVMKSLSVSSDFLGKDKPVSCGLARSVSGKTPGDFYDRRTTKPEFLRPGPRKTEDTYFISSAGKPTPGTQGKIKSED

SEQ ID NO: 854738 - protein, 1395 aa, Homo sapiens
MEMERDMDRKKIEELMEENMTLEMAQKQSMDESLHLGWELEQISRTSELSEAPQKSLGHEVNELTSSRLLKLEMENQSLTKTVEELRTTVDSVEGNASKILKMEKENQRLSKKVEILENEIVQEKQSLQNCQNLSKDLMKEKAQLEKTIETLRENSERQIKILEQENEHLNQTVSSLRQRSQISAEARVKDIEKENKILHESIKETSSKLSKIEFEKRQIKKELEHYKEKGERAEELENELHHLEKENELLQKKITNLKITCEKIEALEQENSELERENRKLKKTLDSFKNLTFQLESLEKENSQLDEENLELRRNVESLKCASMKMAQLQLENKELESEKEQLKKGLELLKASFKKTERLEVSYQGLDIENQRLQKTLENSNKKIQQLESELQDLEMENQTLQKNLEELKISSKRLEQLEKENKSLEQETSQLEKDKKQLEKENKRLRQQAEIKDTTLEENNVKIGNLEKENKTLSKEIGIYKESCVRLKELEKENKELVKRATIDIKTLVTLREDLVSEKLKTQQMNNDLEKLTHELEKIGLNKERLLHDEQSTDDSRYKLLESKLESTLKKSLEIKEEKIAALEARLEESTNYNQQLRQELKTNATLQAEKQALKTQLKQLETQNNNLQAQILALQRQTVSLQEQNTTLQTQNAKLQVENSTLNSQSTSLMNQNAQLLIQQSSLENENESVIKEREDLKSLYDSLIKDHEKLELLHERQASEYESLISKHGTLKSAHKNLEVEHRDLEDRYNQLLKQKGQLEDLEKMLKVEQEKMLLENKNHETVAAEYKKLCGENDRLNHTYSQLLKETEVLQTDHKNLKSLLNNSKLEQTRLEAEFSKLKEQYQQLDITSTKLNNQCELLSQLKGNLEEENRHLLDQIQTLMLQNRTLLEQNMESKDLFHVEQRQYIDKLNELRRQKEKLEEKIMDQYKFYDPSPPRRRGNWITLKMRKLIKSKKDINRERQKSLTLTPTRSDSSEGFLQLPHQDSQDSSSVGSNSLEDGQTLGTKKSSTMNDLVQSMVLAGQWTGSTENLEVPDDISTGKRRKELGAMAFSTTAINFSTVNSSAGFRSKQLVNNKDTTSFEDISPQGVSDDSSTGSRVHASRPASLDSGRTSTSNSNNNASLHEVKAGAVNNQSRPQSHSSGEFSLLHDHEAWSSSGSSPIQYLKRQTRSSPVLQHKISETLESRHHKIKTGSPGSEVVTLQQFLEESNKLTSVQIKSSSQENLLDEVMKSLSVSSDFLGKDKPVSCGLARSVSGKTPGDFYDRRTTKPEFLRPGPRKTEDTYFISSAGKPTPGTQGKIKLVKESSLSRQSKDSNPYATLPRASSVISTAEGTTRRTSIHDFLTKDSRLPISVDSPPAAADSNTTAASNVDKVQESRNSKSRSREQQSS

SEQ ID NO: 854739 - protein, 1798 aa, Homo sapiens
MENEIFTPLLEQFMTSPLVTWVKTFGPLAAGNGTNLDEYVALVDGVFLNQVMLQINPKLESQRVNKKVNNDASLRMHNLSILVRQIKFYYQETLQQLIMMSLPNVLIIGKNPFSEQGTEEVKKLLLLLLGCAVQCQKKEEFIERIQGLDFDTKAAVAAHIQEVTHNQENVFDLQWMEVTDMSQEDIEPLLKNMALHLKRLIDERDEHSETIIELSEERDGLHFLPHASSSAQSPCGSPGMKRTESRQHLSVELADAKAKIRRLRQELEEKTEQLLDCKQELEQMEIELKRLQQENMNLLSDARSARMYRDELDALREKAVRVDKLESEVSRYKERLHDIEFYKARVEELKEDNQVLLETKTMLEDQLEGTRARSDKLHELEKENLQLKAKLHDMEMERDMDRKKIEELMEENMTLEMAQKQSMDESLHLGWELEQISRTSELSEAPQKSLGHEVNELTSSRLLKLEMENQSLTKTVEELRTTVDSVEGNASKILKMEKENQRLSKKVEILENEIVQEKQSLQNCQNLSKDLMKEKAQLEKTIETLRENSERQIKILEQENEHLNQTVSSLRQRSQISAEARVKDIEKENKILHESIKETSSKLSKIEFEKRQIKKELEHYKEKGERAEELENELHHLEKENELLQKKITNLKITCEKIEALEQENSELERENRKLKKTLDSFKNLTFQLESLEKENSQLDEENLELRRNVESLKCASMKMAQLQLENKELESEKEQLKKGLELLKASFKKTERLEVSYQGLDIENQRLQKTLENSNKKIQQLESELQDLEMENQTLQKNLEELKISSKRLEQLEKENKSLEQETSQLEKDKKQLEKENKRLRQQAEIKDTTLEENNVKIGNLEKENKTLSKEIGIYKESCVRLKELEKENKELVKRATIDIKTLVTLREDLVSEKLKTQQMNNDLEKLTHELEKIGLNKERLLHDEQSTDDSRYKLLESKLESTLKKSLEIKEEKIAALEARLEESTNYNQQLRQELKTNATLQAEKQALKTQLKQLETQNNNLQAQILALQRQTVSLQEQNTTLQTQNAKLQVENSTLNSQSTSLMNQNAQLLIQQSSLENENESVIKEREDLKSLYDSLIKDHEKLELLHERQASEYESLISKHGTLKSAHKNLEVEHRDLEDRYNQLLKQKGQLEDLEKMLKVEQEKMLLENKNHETVAAEYKKLCGENDRLNHTYSQLLKETEVLQTDHKNLKSLLNNSKLEQTRLEAEFSKLKEQYQQLDITSTKLNNQCELLSQLKGNLEEENRHLLDQIQTLMLQNRTLLEQNMESKDLFHVEQRQYIDKLNELRRQKEKLEEKIMDQYKFYDPSPPRRRGNWITLKMRKLIKSKKDINRERQKSLTLTPTRSDSSEGFLQLPHQDSQDSSSVGSNSLEDGQTLGTKKSSMVALKRLPFLRNRPKDKDKMKACYRRSMSMNDLVQSMVLAGQWTGSTENLEVPDDISTGKRSNSSAGFRSKQLVNNKDTTSFEDISPQGVSDDSSTGSRVHASRPASLDSGRTSTSNSNNNASLHEVKAGAVNNQSRPQSHSSGEFSLLHDHEAWSSSGSSPIQYLKRQTRSSPVLQHKISETLESRHHKIKTGSPGSEVVTLQQFLEESNKLTSVQIKSSSQENLLDEVMKSLSVSSDFLGKDKPVSCGLARSVSGKTPGDFYDRRTTKPEFLRPGPRKTEDTYFISSAGKPTPGTQGKIKLVKESSLSRQSKDSNPYATLPRASSVISTAEGTTRRTSIHDFLTKDSRLPISVDSPPAAADSNTTAASNVDKVQESRNSKSRSREQQSS

SEQ ID NO: 854740 - protein, 846 aa, Homo sapiens
MNYITLYLDSRYKLLESKLESTLKKSLEIKEEKIAALEARLEESTNYNQQLRQELKTNATLQAEKQALKTQLKQLETQNNNLQAQILALQRQTVSLQEQNTTLQTQNAKLQVENSTLNSQSTSLMNQNAQLLIQQSSLENENESVIKEREDLKSLYDSLIKDHEKLELLHERQASEYESLISKHGTLKSAHKNLEVEHRDLEDRYNQLLKQKGQLEDLEKMLKVEQEKMLLENKNHETVAAEYKKLCGENDRLNHTYSQLLKETEVLQTDHKNLKSLLNNSKLEQTRLEAEFSKLKEQYQQLDITSTKLNNQCELLSQLKGNLEEENRHLLDQIQTLMLQNRTLLEQNMESKDLFHVEQRQYIDKLNELRRQKEKLEEKIMDQYKFYDPSPPRRRGNWITLKMRKLIKSKKDINRERQKSLTLTPTRSDSSEGFLQLPHQDSQDSSSVGSNSLEDGQTLGTKKSSTMNDLVQSMVLAGQWTGSTENLEVPDDISTGKRRKELGAMAFSTTAINFSTVNSSAGFRSKQLVNNKDTTSFEDISPQGVSDDSSTGSRVHASRPASLDSGRTSTSNSNNNASLHEVKAGAVNNQSRPQSHSSGEFSLLHDHEAWSSSGSSPIQYLKRQTRSSPVLQHKISETLESRHHKIKTGSPGSEVVTLQQFLEESNKLTSVQIKSSSQENLLDEVMKSLSVSSDFLGKDKPVSCGLARSVSGKTPGDFYDRRTTKPEFLRPGPRKTEDTYFISSAGKPTPGTQGKIKLVKESSLSRQSKDSNPYATLPRASSVISTAEGTTRRTSIHDFLTKDSRLPISVDSPPAAADSNTTAASNVDKVQESRNSKSRSREQQSS

SEQ ID NO: 854741 - protein, 1269 aa, Homo sapiens
MENEIFTPLLEQFMTSPLVTWVKTFGPLAAGNGTNLDEYVALVDGVFLNQVMLQINPKLESQRVNKKVNNDASLRMHNLSILVRQIKFYYQETLQQLIMMSLPNVLIIGKNPFSEQGTEEVKKLLLLLLGCAVQCQKKEEFIERIQGLDFDTKAAVAAHIQEVTHNQENVFDLQWMEVTDMSQEDIEPLLKNMALHLKRLIDERDEHSETIIELSEERDGLHFLPHASSSAQSPCGSPGMKRTESRQHLSVELADAKAKIRRLRQELEEKTEQLLDCKQELEQMEIELKRLQQENMNLLSDARSARMYRDELDALREKAVRVDKLESEVSRYKERLHDIEFYKARVEELKEDNQVLLETKTMLEDQLEGTRARSDKLHELEKENLQLKAKLHDMEMERDMDRKKIEELMEENMTLEMAQKQSMDESLHLGWELEQISRTSELSEAPQKSLGHEVNELTSSRLLKLEMENQSLTKTVEELRTTVDSVEGNASKILKMEKENQRLSKKVEILENEIVQEKQSLQNCQNLSKDLMKEKAQLEKTIETLRENSERQIKILEQENEHLNQTVSSLRQRSQISAEARVKDIEKENKILHESIKETSSKLSKIEFEKRQIKKELEHYKEKGERAEELENELHHLEKENELLQKKITNLKITCEKIEALEQENSELERENRKLKKTLDSFKNLTFQLESLEKENSQLDEENLELRRNVESLKCASMKMAQLQLENKELESEKEQLKKGLELLKASFKKTERLEVSYQGLDIENQRLQKTLENSNKKIQQLESELQDLEMENQTLQKNLEELKISSKRLEQLEKENKSLEQETSQLEKDKKQLEKENKRLRQQAEIKDTTLEENNVKIGNLEKENKTLSKEIGIYKESCVRLKELEKENKELVKRATIDIKTLVTLREDLVSEKLKTQQMNNDLEKLTHELEKIGLNKERLLHDEQSTDDSRYKLLESKLESTLKKSLEIKEEKIAALEARLEESTNYNQQLRQELKTNATLQAEKQALKTQLKQLETQNNNLQAQILALQRQTVSLQEQNTTLQTQNAKLQVENSTLNSQSTSLMNQNAQLLIQQSSLENENESVIKEREDLKSLYDSLIKDHEKLELLHERQASEYESLISKHGTLKSAHKNLEVEHRDLEDRYNQLLKQKGQLEDLEKMLKVEQEKMLLENKNHETVAAEYKKLCGENDRLNHTYSQLLKETEVLQTDHKNLKSLLNNSKLEQTRLEAEFSKLKEQYQQLDITSTKLNNQCEQGSESLSGSPQAT

SEQ ID NO: 854742 - protein, 847 aa, Homo sapiens
MENEIFTPLLEQFMTSPLVTWVKTFGPLAAGNGTNLDEYVALVDGVFLNQVMLQINPKLESQRVNKKVNNDASLRMHNLSILVRQIKFYYQETLQQLIMMSLPNVLIIGKNPFSEQGTEEVKKLLLLLLGCAVQCQKKEEFIERIQGLDFDTKAAVAAHIQEVTHNQENVFDLQWMEVTDMSQEDIEPLLKNMALHLKRLIDERDEHSETIIELSEERDGLHFLPHASSSAQSPCGSPGMKRTESRQHLSVELADAKAKIRRLRQELEEKTEQLLDCKQELEQMEIELKRLQQENMNLLSDARSARMYRDELDALREKAVRVDKLESEVSRYKERLHDIEFYKARVEELKEDNQVLLETKTMLEDQLEGTRARSDKLHELEKENLQLKAKLHDMEMERDMDRKKIEELMEENMTLEMAQKQSMDESLHLGWELEQISRTSELSEAPQKSLGHEVNELTSSRLLKLEMENQSLTKTVEELRTTVDSVEGNASKILKMEKENQRLSKKVEILENEIVQEKQSLQNCQNLSKDLMKEKAQLEKTIETLRENSERQIKILEQENEHLNQTVSSLRQRSQISAEARVKDIEKENKILHESIKETSSKLSKIEFEKRQIKKELEHYKEKGERAEELENELHHLEKENELLQKKITNLKITCEKIEALEQENSELERENRKLKKTLDSFKNLTFQLESLEKENSQLDEENLELRRNVESLKCASMKMAQLQLENKELESEKEQLKKGLELLKASFKKTERLEVSYQGLDIENQRLQKTLENSNKKIQQLESELQDLEMENQTLQKNLEELENELHHLEKENELLQKKITNLKITCEKIEALEQENSELERENRK

SEQ ID NO: 854743 - protein, 267 aa, Homo sapiens
MENEIFTPLLEQFMTSPLVTWVKTFGPLAAGNGTNLDEYVALVDGVFLNQVMLQINPKLESQRVNKKVNNDASLRMHNLSILVRQIKFYYQETLQQLIMMSLPNVLIIGKNPFSEQGTEEVKKLLLLLLGCAVQCQKKEEFIERIQGLDFDTKAAVAAHIQEVTHNQENVFDLQWMEVTDMSQEDIEPLLKNMALHLKRLIDERDEHSETIIELSEERDGLHFLPHASSSAQSPCGSPGMKRTESRQHLSVELADAKAKIRRLRQEL

SEQ ID NO: 854744 - protein, 1788 aa, Homo sapiens
MENEIFTPLLEQFMTSPLVTWVKTFGPLAAGNGTNLDEYVALVDGVFLNQVMLQINPKLESQRVNKKVNNDASLRMHNLSILVRQIKFYYQETLQQLIMMSLPNVLIIGKNPFSEQGTEEVKKLLLLLLGCAVQCQKKEEFIERIQGLDFDTKAAVAAHIQEVTHNQENVFDLQWMEVTDMSQEDIEPLLKNMALHLKRLIDERDEHSETIIELSEERDGLHFLPHASSSAQSPCGSPGMKRTESRQHLSVELADAKAKIRRLRQELEEKTEQLLDCKQELEQMEIELKRLQQENMNLLSDARSARMYRDELDALREKAVRVDKLESEVSRYKERLHDIEFYKARVEELKEDNQVLLETKTMLEDQLEGTRARSDKLHELEKENLQLKAKLHDMEMERDMDRKKIEELMEENMTLEMAQKQSMDESLHLGWELEQISRTSELSEAPQKSLGHEVNELTSSRLLKLEMENQSLTKTVEELRTTVDSVEGNASKILKMEKENQRLSKKVEILENEIVQEKQSLQNCQNLSKDLMKEKAQLEKTIETLRENSERQIKILEQENEHLNQTVSSLRQRSQISAEARVKDIEKENKILHESIKETSSKLSKIEFEKRQIKKELEHYKEKGERAEELENELHHLEKENELLQKKITNLKITCEKIEALEQENSELERENRKLKKTLDSFKNLTFQLESLEKENSQLDEENLELRRNVESLKCASMKMAQLQLENKELESEKEQLKKGLELLKASFKKTERLEVSYQGLDIENQRLQKTLENSNKKIQQLESELQDLEMENQTLQKNLEELKISSKRLEQLEKENKSLEQETSQLEKDKKQLEKENKRLRQQAEIKDTTLEENNVKIGNLEKENKTLSKEIGIYKESCVRLKELEKENKELVKRATIDIKTLVTLREDLVSEKLKTQQMNNDLEKLTHELEKIGLNKERLLHDEQSTDDSRYKLLESKLESTLKKSLEIKEEKIAALEARLEESTNYNQQLRQELKTNATLQAEKQALKTQLKQLETQNNNLQAQILALQRQTVSLQEQNTTLQTQNAKLQVENSTLNSQSTSLMNQNAQLLIQQSSLENENESVIKEREDLKSLYDSLIKDHEKLELLHERQASEYESLISKHGTLKSAHKNLEVEHRDLEDRYNQLLKQKGQLEDLEKMLKVEQEKMLLENKNHETVAAEYKKLCGENDRLNHTYSQLLKETEVLQTDHKNLKSLLNNSKLEQTRLEAEFSKLKEQYQQLDITSTKLNNQCELLSQLKGNLEEENRHLLDQIQTLMLQNRTLLEQNMESKDLFHVEQRQYIDKLNELRRQKEKLEEKIMDQYKFYDPSPPRRRGNWITLKMRKLIKSKKDINRERQKSLTLTPTRSDSSEGFLQLPHQDSQDSSSVGSNSLEDGQTLGTKKSSTMNDLVQSMVLAGQWTGSTENLEVPDDISTGKRRKELGAMAFSTTAINFSTVNSSAGFRSKQLVNNKDTTSFEDISPQGVSDDSSTGSRVHASRPASLDSGRTSTSNSNNNASLHEVKAGAVNNQSRPQSHSSGEFSLLHDHEAWSSSGSSPIQYLKRQTRSSPVLQHKISETLESRHHKIKTGSPGSEVVTLQQFLEESNKLTSVQIKSSSQENLLDEVMKSLSVSSDFLGKDKPVSCGLARSVSGKTPGDFYDRRTTKPEFLRPGPRKTEDTYFISSAGKPTPGTQGKIKLVKESSLSRQSKDSNPYATLPRASSVISTAEGTTRRTSIHDFLTKDSRLPISVDSPPAAADSNTTAASNVDKVQESRNSKSRSREQQSS

SEQ ID NO: 854745 - protein, 1798 aa, Homo sapiens; identical to SEQ ID NO: 854739

SEQ ID NO: 854746 - protein, 1798 aa, Homo sapiens; identical to SEQ ID NO: 854739

SEQ ID NO: 854747 - protein, 1798 aa, Homo sapiens; identical to SEQ ID NO: 854739

SEQ ID NO: 854748 - protein, 1954 aa, Homo sapiens
MENEIFTPLLEQFMTSPLVTWVKTFGPLAAGNGTNLDEYVALVDGVFLNQVMLQINPKLESQRVNKKVNNDASLRMHNLSILVRQIKFYYQETLQQLIMMSLPNVLIIGKNPFSEQGTEEVKKLLLLLLGCAVQCQKKEEFIERIQGLDFDTKAAVAAHIQEVTHNQENVFDLQWMEVTDMSQEDIEPLLKNMALHLKRLIDERDEHSETIIELSEERDGLHFLPHASSSAQSPCGSPGMKRTESRQHLSVELADAKAKIRRLRQELEEKTEQLLDCKQELEQMEIELKRLQQENMNLLSDARSARMYRDELDALREKAVRVDKLESEVSRYKERLHDIEFYKARVEELKEDNQVLLETKTMLEDQLEGTRARSDKLHELEKENLQLKAKLHDMEMERDMDRKKIEELMEENMTLEMAQKQSMDESLHLGWELEQISRTSELSEAPQKSLGHEVNELTSSRLLKLEMENQSLTKTVEELRTTVDSVEGNASKILKMEKENQRLSKKVEILENEIVQEKQSLQNCQNLSKDLMKEKAQLEKTIETLRENSERQIKILEQENEHLNQTVSSLRQRSQISAEARVKDIEKENKILHESIKETSSKLSKIEFEKRQIKKELEHYKEKGERAEELENELHHLEKENELLQKKITNLKITCEKIEALEQENSELERENRKLKKTLDSFKNLTFQLESLEKENSQLDEENLELRRNVESLKCASMKMAQLQLENKELESEKEQLKKGLELLKASFKKTERLEVSYQGLDIENQRLQKTLENSNKKIQQLESELQDLEMENQTLQKNLEELKISSKRLEQLEKENKSLEQETSQLEKDKKQLEKENKRLRQQAEIKDTTLEENNVKIGNLEKENKTLSKEIGIYKESCVRLKELEKENKELVKRATIDIKTLVTLREDLVSEKLKTQQMNNDLEKLTHELEKIGLNKERLLHDEQSTDDSRYKLLESKLESTLKKSLEIKEEKIAALEARLEESTNYNQQLRQELKTNATLQAEKQALKTQLKQLETQNNNLQAQILALQRQTVSLQEQNTTLQTQNAKLQVENSTLNSQSTSLMNQNAQLLIQQSSLENENESVIKEREDLKSLYDSLIKDHEKLELLHERQASEYESLISKHGTLKSAHKNLEVEHRDLEDRYNQLLKQKGQLEDLEKMLKVEQEKMLLENKNHETVAAEYKKLCGENDRLNHTYSQLLKETEVLQTDHKNLKSLLNNSKLEQTRLEAEFSKLKEQYQQLDITSTKLNNQCELLSQLKGNLEEENRHLLDQIQTLMLQNRTLLEQNMESKDLFHVEQRQYIDKLNELRRQKEKLEEKIMDQYKFYDPSPPRRRGNWITLKMRKLIKSKKDINRERQKSLTLTPTRSDSSEGFLQLPHQDSQDSSSVGSNSLEDGQTLGTKKSSMVALKRLPFLRNRPKDKDKMKACYRRSMSMNDLVQSMVLAGQWTGSTENLEVPDDISTGKRSNSSAGFRSKQLVNNKDTTSFEDISPQGVSDDSSTGSRVHASRPASLDSGRTSTSNSNNNASLHEVKAGAVNNQSRPQSHSSGEFSLLHDHEAWSSSGSSPIQYLKRQTRSSPVLQHKISETLESRHHKIKTGSPGSEVVTLQQFLEESNKLTSVQIKSSSQENLLDEVMKSLSVSSDFLGKDKPVSCGLARSVSGKTPGDFYDRRTTKPEFLRPGPRKTEDTYFISSAGKPTPGTQGKIKLVKESSLSRQSKDSNPYATLPRASSVISTAEGTTRRTSIHDFLTKDSRLPISVDSPPAAADSNTTAASSEYHLHQWSSHILDIPTHTIGSCAQNDLAIDMPEPLYAQARNSRTGRSHFLNQTFATIRMPSDAFGMLAKDSIGPFTVAHSSQPFLSLNTELVSNISGLPPRPVIRITDQASASLDKPAQKENEQFSDHQNPSNSNLQFSINSNNLVTSACLYPDDTEAALLVSEDNQTVWYEYGCI

SEQ ID NO: 854749 - protein, 1798 aa, Homo sapiens; identical to SEQ ID NO: 854739

SEQ ID NO: 854750 - protein, 161 aa, Homo sapiens
MKSLSVSSDFLGKDKPVSCGLARSVSGKTPGDFYDRRTTKPEFLRPGPRKTEDTYFISSAGKPTPGTQGKIKLVKESSLSRQSKDSNPYATLPRASSVISTAEGTTRRTSIHDFLTKDSRLPISVDSPPAAADSNTTAASNVDKVQESRNSKSRSREQQSS

SEQ ID NO: 854751 - protein, 610 aa, Homo sapiens
MENEIFTPLLEQFMTSPLVTWVKTFGPLAAGNGTNLDEYVALVDGVFLNQVMLQINPKLESQRVNKKVNNDASLRMHNLSILVRQIKFYYQETLQQLIMMSLPNVLIIGKNPFSEQGTEEVKKLLLLLLGCAVQCQKKEEFIERIQGLDFDTKAAVAAHIQEVTHNQENVFDLQWMEVTDMSQEDIEPLLKNMALHLKRLIDERDEHSETIIELSEERDGLHFLPHASSSAQSPCGSPGMKRTESRQHLSVELADAKAKIRRLRQELEEKTEQLLDCKQELEQMEIELKRLQQENMNLLSDARSARMYRDELDALREKAVRVDKLESEVSRYKERLHDIEFYKARVEELKEDNQVLLETKTMLEDQLEGTRARSDKLHELEKENLQLKAKLHDMEMERDMDRKKIEELMEENMTLEMAQKQSMDESLHLGWELEQISRTSELSEAPQKSLGHEVNELTSSRLLKLEMENQSLTKTVEELRTTVDSVEGNASKILKMEKENQRLSKKVEILENEIVQEKQSLQNCQNLSKDLMKEKAQLEKTIETLRENSERQIKILEQENEHLNQTVSSLRQRSQISAEARVKDIEKENKILHESIKETSSKLSKIEFEK

SEQ ID NO: 854752 - protein, 186 aa, Homo sapiens
PTLGGDLSASAPGPPLTQVSTPQPGRVLQPEGPFPHVPQQPGTRTQPRSHPAANDPSAAMSAAGARGLRATYHRLLDKVELMLPEKLRPLYNHPAGPRTVFFWAPIMKWGLVCAGLADMARPAEKLSTAQSAVLMATGFIWSRYSLVIIPKNWSLFAVNFFVGAAGASQLFRIWRYNQELKAKAHK

SEQ ID NO: 854753 - protein, 93 aa, Homo sapiens
ANHGGQLGLRKRAASRAQRRLGEVIILAPVAMAPPSLLPGAGGGPGAGSRQPPPPQPSRGAGRSFSVHSGQGKPREGYSRREADASRRGRKSD

SEQ ID NO: 854754 - protein, 127 aa, Homo sapiens [sequence omitted]

SEQ ID NO: 854755 - protein, 127 aa, Homo sapiens [sequence omitted]

SEQ ID NO: 854756 - protein, 127 aa, Homo sapiens [sequence omitted]

SEQ ID NO: 854757 - protein, 95 aa, Homo sapiens
MSAAGARGLRATYHRLLDKVELMLPEKLRPLYNHPAGPRTVFFWAPIMKWGLVCAGLADMARPAEKLSTAQSAVLMATGSFVKILTCIFRDPLGT

SEQ ID NO: 854758 - protein, 127 aa, Homo sapiens [sequence omitted]

SEQ ID NO: 854759 - protein, 164 aa, Homo sapiens
PTLGGDLSASAPGPPLTQPGTRTQPRSHPAANDPSAAMSAAGARGLRATYHRLLDKVELMLPEKLRPLYNHPAGPRTVFFWAPIMKWGLVCAGLADMARPAEKLSTAQSAVLMATGFIWSRYSLVIIPKNWSLFAVNFFVGAAGASQLFRIWRYNQELKAKAHK

SEQ ID NO: 854760 - protein, 127 aa, Homo sapiens [sequence omitted]

SEQ ID NO: 854761 - protein, 127 aa, Homo sapiens [sequence omitted]

SEQ ID NO: 854762 - protein, 127 aa, Homo sapiens [sequence omitted]

SEQ ID NO: 854763 - protein, 535 aa, Homo sapiens
MAALLAAAAVRARILQVSSKVKSSPTWYSASSFSSSVPTVKLFIGGKFVESKSDKWIDIHNPATNEVIGRVPQATKAEMDAAIASCKRAFPAWADTSVLSRQQVLLRYQQLIKENLKEIAKLITLEQGKTLADAEGDVFRGLQVVEHACSVTSLMMGETMPSITKDMDLYSYRLPLGVCAGIAPFNFPAMIPLWMFPMAMVCGNTFLMKPSERVPGATMLLAKLLQDSGAPDGTLNIIHGQHEAVNFICDHPDIKAISFVGSNKAGEYIFERGSRHGKRVQANMGAKNHGVVMPDANKENTLNQLVGAAFGAAGQRCMALSTAVLVGEAKKWLPELVEHAKNLRVNAGDQPGADLGPLITPQAKERVCNLIDSGTKEGASILLDGRKIKVKGYENGNFVGPTIISNVKPNMTCYKEEIFGPVLVVLETETLDEAIQIVNNNPYGNGTAIFTTNGATARKYAHLVDVGQVGVNVPIPVPLPMFSFTGSRSSFRGDTNFYGKQGIQFYTQLKTITSQWKEEDATLSSPAVVMPTMGR

SEQ ID NO: 854764 - protein, 535 aa, Homo sapiens; identical to SEQ ID NO: 854763

SEQ ID NO: 854765 - protein, 535 aa, Homo sapiens; identical to SEQ ID NO: 854763

SEQ ID NO: 854766 - protein, 535 aa, Homo sapiens; identical to SEQ ID NO: 854763

SEQ ID NO: 854767 - protein, 252 aa, Homo sapiens
MGAKNHGVVMPDANKENTLNQLVGAAFGAAGQRCMALSTAVLVGEAKKWLPELVEHAKNLRVNAGDQPGADLGPLITPQAKERVCNLIDSGTKEGASILLDGRKIKVKGYENGNFVGPTIISNVKPNMTCYKEEIFGPVLVVLETETLDEAIQIVNNNPYGNGTAIFTTNGATARKYAHLVDVGQVGVNVPIPVPLPMFSFTGSRSSFRGDTNFYGKQGIQFYTQLKTITSQWKEEDATLSSPAVVMPTMGR

SEQ ID NO: 854768 - protein, 415 aa, Homo sapiens
MAALLAAAAVRARILQVSSKVKSSPTWYSASSFSSSVPTVKLFIGGKFVESKSDKWIDIHNPATNEVIGRVPQATKAEMDAAIASCKRAFPAWADTSVLSRQQVLLRYQQLIKENLKEIAKLITLEQGKTLADAEGDVFRGLQVVEHACSVTSLMMGETMPSITKDMDLYSYRLPLGVCAGIAPFNFPAMIPLWMFPMAMVCGNTFLMKPSERVPGATMLLAKLLQDSGAPDGTLNIIHGQHEAVNFICDHPDIKAISFVGSNKAGEYIFERGSRHGKRVQANMGAKNHGVVMPDANKENTLNQLVGAAFGAAGQRCMALSTAVLVGEAKKWLPELVEHAKNLRVNAGDQPGADLGPLITPQAKERVCNLIDSGTKEGASILLDGRKIKVKVTGMSHHTQPDANNFLRKLFQKLF

SEQ ID NO: 854769 - protein, 535 aa, Homo sapiens; identical to SEQ ID NO: 854763

SEQ ID NO: 854770 - protein, 535 aa, Homo sapiens; identical to SEQ ID NO: 854763

SEQ ID NO: 854771 - protein, 535 aa, Homo sapiens; identical to SEQ ID NO: 854763

SEQ ID NO: 854772 - protein, 415 aa, Homo sapiens
MAALLAAAAVRARILQVSSKVKSSPTWYSASSFSSSVPTVKLFIGGKFVESKSDKWIDIHNPATNEVIGRVPQATKAEMDAAIASCKRAFPAWADTSVLSRQQVLLRYQQLIKENLKEIAKLITLEQGKTLADAEGDVFRGLQVVEHACSVTSLMMGETMPSITKDMDLYSYRLPLGVCAGIAPFNFPAMIPLWMFPMAMVCGNTFLMKPSERVPGATMLLAKLLQDSGAPDGTLNIIHGQHEAVNFICDHPDIKAISFVGSNKAGEYIFERGSRHGKRVQANMGAKNHGVVMPDANKENTLNQLVGAAFGAAGQRCMALSTAVLVGEAKKWLPELVEHAKNLRVNAGDQPGADLGPLITPQAKERVCNLIDSGTKEGASILLDGRKIKVKAKYDLLQRGDFWSSSCGSGDRNIG

SEQ ID NO: 854773 - protein, 146 aa, Homo sapiens
MAALLAAAAVRARILQVSSKVKSSPTWYSASSFSSSVPTVKLFIGGKFVESKSDKWIDIHNPATNEVIGRVPQATKAEMDAAIASCKRAFPAWADTSVLSRQQVLLRYQQLIKENLCQCSHSPALDPPSGETPISMANRASNSTLS

SEQ ID NO: 854774 - protein, 165 aa, Homo sapiens
MAQRLLLRRFLASVISRKPSQGQWPPLTSRALQTPQCSPGGLTVTPNPARTIYTTRISLTTFNIQDGPDFQDRVVNSETPVVVDFHAQWCGPCKILGPRLEKMVAKQHGKVVMAKVDIDDHTDLAIEYERQLVPTWLAMTDVARASKVPPIGSGSSPALLDSPLA

SEQ ID NO: 854775 - protein, 166 aa, Homo sapiens
MAQRLLLRRFLASVISRKPSQGQWPPLTSRALQTPQCSPGGLTVTPNPARTIYTTRISLTTFNIQDGPDFQDRVVNSETPVVVDFHAQWCGPCKILGPRLEKMVAKQHGKVVMAKVDIDDHTDLAIEYEVSAVPTVLAMKNGDVVDKFVGIKDEDQLEAFLKKLIG

SEQ ID NO: 854776 - protein, 166 aa, Homo sapiens; identical to SEQ ID NO: 854775

SEQ ID NO: 854777 - protein, 166 aa, Homo sapiens; identical to SEQ ID NO: 854775

SEQ ID NO: 854778 - protein, 166 aa, Homo sapiens; identical to SEQ ID NO: 854775

SEQ ID NO: 854779 - protein, 205 aa, Homo sapiens
MAQRLLLRRFLASVISRKPSQGQWPPLTSRALQTPQCSPGGLTVTPNPARTIYTTRISLTTFNIQDGPDFQDRVVNSETPVVVDFHAQWCGPCKILGPRLEKMVAKQHGKVVMAKVDIDDHTDLAIEYEAVVSVTQAGVQWHNHSSLKPQSPRLKRSSCLSLPSMGVQVSAVPTVLAMKNGDVVDKFVGIKDEDQLEAFLKKLIG

SEQ ID NO: 854780 - protein, 1312 aa, Homo sapiens
MRSAAAAPRSPAVATESRRFAAARWPGWRSLQRPARRSGRGGGGAAPGPYPSAAPPPPGPGPPPSRQSSPPSASDCFGSNGNGGGAFRPGSRRLLGLGGPPRPFVVVLLPLASPGAPPAAPTRASPLGARASPPRSGVSLARPAPGCPRPACEPVYGPLTMSLKPQQQQQQQQQQQQQQQQQQQQQQPPPAAANVRKPGGSGLLASPAAAPSPSSSSVSSSSATAPSSVVAATSGGGRPGLGRGRNSNKGLPQSTISFDGIYANMRMVHILTSVVGSKCEVQVKNGGIYEGVFKTYSPKCDLVLDAAHEKSTESSSGPKREEIMESILFKCSDFVVVQFKDMDSSYAKRDAFTDSAISAKVNGEHKEKDLEPWDAGELTANEELEALENDVSNGWDPNDMFRYNEENYGVVSTYDSSLSSYTVPLERDNSEEFLKREARANQLAEEIESSAQYKARVALENDDRSEEEKYTAVQRNSSEREGHSINTRENKYIPPGQRNREVISWGSGRQNSPRMGQPGSGSMPSRSTSHTSDFNPNSGSDQRVVNGGVPWPSPCPSPSSRPPSRYQSGPNSLPPRAATPTRPPSRPPSRPSRPPSHPSAHGSPAPVSTMPKRMSSEGPPRMSPKAQRHPRNHRVSAGRGSISSGLEFVSHNPPSEAATPPVARTSPSGGTWSSVVSGVPRLSPKTHRPRSPRQNSIGNTPSGPVLASPQAGIIPTEAVAMPIPAASPTPASPASNRAVTPSSEAKDSRLQDQRQNSPAGNKENIKPNETSPSFSKAENKGISPVVSEHRKQIDDLKKFKNDFRLQPSSTSESMDQLLNKNREGEKSRDLIKDKIEPSAKDSFIENSSSNCTSGSSKPNSPSISPSILSNTEHKRGPEVTSQGVQTSSPACKQEKDDKEEKKDAAEQVRKSTLNPNAKEFNPRSFSQPKPSTTPTSPRPQAQPSPSMVGHQQPTPVYTQPVCFAPNMMYPVPVSPGVQPLYPIPMTPMPVNQAKTYRAVPNMPQQRQDQHHQSAMMHPASAAGPPIAATPPAYSTQYVAYSPQQFPNQPLVQHVPHYQSQHPHVYSPVIQGNARMMAPPTHAQPGLVSSSATQYGAHEQTHAMYACPKLPYNKETSPSFYFAISTGSLAQQYAHPNATLHPHTPHPQPSATPTGQQQSQHGGSHPAPSPVQHHQHQAAQALHLASPQQQSAIYHAGLAPTPPSMTPASNTQSPQNSFPAAQQTVFTIHPSHVQPAYTNPPHMAHVPQAHVQSGMVPSHPTAHAPMMLMTTQPPGGPQAALAQSALQPIPVSTTAHFPYMTHPSVQAHHQQQL

SEQ ID NO: 854781 - protein, 207 aa, Homo sapiens
MNLGRQNCSEPTSHHCTAAWATARPMSLKPQQQQQQQQQQQQQQQQQQQQQQPPPAAANVRKPGGSGLLASPAAAPSPSSSSVSSSSATAPSSVVAATSGGGRPGLGRWVSAPQPPPLRARRPLPRGPRRRPRPVTRRATRGGLGAGSAGETRSGLSPEARPVGAPGSSGIVRPVQPPAASPPPPPAVKMEGAGGLPSPRVLGGVLG

SEQ ID NO: 854782 - protein, 134 aa, Homo sapiens
MTPASNTQSPQNSFPAAQQTVFTIHPSHVQPAYTNPPHMAHVPQAHVQSGMVPSHPTAHAPMMLMTTQPPGGPQAALAQSALQPIPVSTTAHLRTSKTRPGVCTGGTVTISSASGPEASGSRVCVCSDGIQDLA

SEQ ID NO: 854783 - protein, 117 aa, Homo sapiens
GVSLLLPKLECNGVMSVHCNLHLPGSSYSPSPLSLVAVITGACHHAQLIFVFLVETGFRRVGQAGLELLTSGDPPASASQNAGITSVSHRARLHFSQFQIQGGKEFLIKVLLSDLLS

SEQ ID NO: 854784 - protein, 971 aa, Homo sapiens
MESILFKCSDFVVVQFKDMDSSYAKRDAFTDSAISAKVNGEHKEKDLEPWDAGELTANEELEALENDVSNGWDPNDMFRYNEENYGVVSTYDSSLSSYTVPLERDNSEEFLKREARANQLAEEIESSAQYKARVALENDDRSEEEKYTAVQRNSSEREGHSINTRENKYIPPGQRNREVISWGSGRQNSPRMGQPGSGSMPSRSTSHTSDFNPNSGSDQRVVNGGVPWPSPCPSPSSRPPSRYQSGPNSLPPRAATPTRPPSRPPSRPSRPPSHPSAHGSPAPVSTMPKRMSSEGPPRMSPKAQRHPRNHRVSAGRGSISSGLEFVSHNPPSEAATPPVARTSPSGGTWSSVVSGVPRLSPKTHRPRSPRQNSIGNTPSGPVLASPQAGIIPTEAVAMPIPAASPTPASPASNRAVTPSSEAKDSRLQDQRQNSPAGNKENIKPNETSPSFSKAENKGISPVVSEHRKQIDDLKKFKNDFRLQPSSTSESMDQLLNKNREGEKSRDLIKDKIEPSAKDSFIENSSSNCTSGSSKPNSPSISPSILSNTEHKRGPEVTSQGVQTSSPACKQEKDDKEEKKDAAEQVRKSTLNPNAKEFNPRSFSQPKPSTTPTSPRPQAQPSPSMVGHQQPTPVYTQPVCFAPNMMYPVPVSPGVQPLYPIPMTPMPVNQAKTYRAVPNMPQQRQDQHHQSAMMHPASAAGPPIAATPPAYSTQYVAYSPQQFPNQPLVQHVPHYQSQHPHVYSPVIQGNARMMAPPTHAQPGLVSSSATQYGAHEQTHAMYVSTGSLAQQYAHPNATLHPHTPHPQPSATPTGQQQSQHGGSHPAPSPVQHHQHQAAQALHLASPQQQSAIYHAGLAPTPPSMTPASNTQSPQNSFPAAQQTVFTIHPSHVQPAYTNPPHMAHVPQAHVQSGMVPSHPTAHAPMMLMTTQPPGGPQAALAQSALQPIPVSTTAHFPYMTHPSVQAHHQQQL

SEQ ID NO: 854785 - protein, 1306 aa, Homo sapiens
MRSAAAAPRSPAVATESRRFAAARWPGWRSLQRPARRSGRGGGGAAPGPYPSAAPPPPGPGPPPSRQSSPPSASDCFGSNGNGGGAFRPGSRRLLGLGGPPRPFVVVLLPLASPGAPPAAPTRASPLGARASPPRSGVSLARPAPGCPRPACEPVYGPLTMSLKPQQQQQQQQQQQQQQQQQQQQQQPPPAAANVRKPGGSGLLASPAAAPSPSSSSVSSSSATAPSSVVAATSGGGRPGLGRGRNSNKGLPQSTISFDGIYANMRMVHILTSVVGSKCEVQVKNGGIYEGVFKTYSPKCDLVLDAAHEKSTESSSGPKREEIMESILFKCSDFVVVQFKDMDSSYAKRDAFTDSAISAKVNGEHKEKDLEPWDAGELTANEELEALENDVSNGWDPNDMFRYNEENYGVVSTYDSSLSSYTVPLERDNSEEFLKREARANQLAEEIESSAQYKARVALENDDRSEEEKYTAVQRNSSEREGHSINTRENKYIPPGQRNREVISWGSGRQNSPRMGQPGSGSMPSRSTSHTSDFNPNSGSDQRVVNGGVPWPSPCPSPSSRPPSRYQSGPNSLPPRAATPTRPPSRPPSRPSRPPSHPSAHGSPAPVSTMPKRMSSEGPPRMSPKAQRHPRNHRVSAGRGSISSGLEFVSHNPPSEAATPPVARTSPSGGTWSSVVSGVPRLSPKTHRPRSPRQNSIGNTPSGPVLASPQAGIIPTEAVAMPIPAASPTPASPASNRAVTPSSEAKDSRLQDQRQNSPAGNKENIKPNETSPSFSKAENKGISPVVSEHRKQIDDLKKFKNDFRLQPSSTSESMDQLLNKNREGEKSRDLIKDKIEPSAKDSFIENSSSNCTSGSSKPNSPSISPSILSNTEHKRGPEVTSQGVQTSSPACKQEKDDKEEKKDAAEQVRKSTLNPNAKEFNPRSFSQPKPSTTPTSPRPQAQPSPSMVGHQQPTPVYTQPVCFAPNMMYPVPVSPGVQPLYPIPMTPMPVNQAKTYRAELNTSELELLRYVPNMPQQRQDQHHQSAMMHPASAAGPPIAATPPAYSTQYVAYSPQQFPNQPLVQHVPHYQSQHPHVYSPVIQGNARMMAPPTHAQPGLVSSSATQYGAHEQTHAMYVSTGSLAQQYAHPNATLHPHTPHPQPSATPTGQQQSQHGGSHPAPSPVQHHQHQAAQALHLASPQQQSAIYHAGLAPTPPSMTPASNTQSPQNSFPAAQQTVFTIHPSHVQPAYTNPPHMAHVPQAHVQSGMVPSHPTAHAPMMLMTTQPPGGPQAALAQSALQPIPVSTTAHFPYMTHPSVQAHHQQQL

SEQ ID NO: 854786 - protein, 574 aa, Homo sapiens
MPIPAASPTPASPASNRAVTPSSEAKDSRLQDQRQNSPAGNKENIKPNETSPSFSKAENKGISPVVSEHRKQIDDLKKFKNDFRLQPSSTSESMDQLLNKNREGEKSRDLIKDKIEPSAKDSFIENSSSNCTSGSSKPNSPSISPSILSNTEHKRGPEVTSQGVQTSSPACKQEKDDKEEKKDAAEQVRKSTLNPNAKEFNPRSFSQPKPSTTPTSPRPQAQPSPSMVGHQQPTPVYTQPVCFAPNMMYPVPVSPGVQPLYPIPMTPMPVNQAKTYRAVPNMPQQRQDQHHQSAMMHPASAAGPPIAATPPAYSTQYVAYSPQQFPNQPLVQHVPHYQSQHPHVYSPVIQGNARMMAPPTHAQPGLVSSSATQYGAHEQTHAMYVSTGSLAQQYAHPNATLHPHTPHPQPSATPTGQQQSQHGGSHPAPSPVQHHQHQAAQALHLASPQQQSAIYHAGLAPTPPSMTPASNTQSPQNSFPAAQQTVFTIHPSHVQPAYTNPPHMAHVPQAHVQSGMVPSHPTAHAPMMLMTTQPPGGPQAALAQSALQPIPVSTTAHFPYMTHPSVQAHHQQQL

SEQ ID NO: 854787 - protein, 1228 aa, Homo sapiens
MRSAAAAPRSPAVATESRRFAAARWPGWRSLQRPARRSGRGGGGAAPGPYPSAAPPPPGPGPPPSRQSSPPSASDCFGSNGNGGGAFRPGSRRLLGLGGPPRPFVVVLLPLASPGAPPAAPTRASPLGARASPPRSGVSLARPAPGCPRPACEPVYGPLTMSLKPQQQQQQQQQQQQQQQQQQQQQQPPPAAANVRKPGGSGLLASPAAAPSPSSSSVSSSSATAPSSVVAATSGGGRPGLGRGRNSNKGLPQSTISFDGIYANMRMVHILTSVVGSKCEVQVKNGGIYEGVFKTYSPKCDLVLDAAHEKSTESSSGPKREEIMESILFKCSDFVVVQFKDMDSSYAKRDAFTDSAISAKVNGEHKEKDLEPWDAGELTANEELEALENDVSNGWDPNDMFRYNEENYGVVSTYDSSLSSYTVPLERDNSEEFLKREARANQLAEEIESSAQYKARVALENDDRSEEEKYTAVQRNSSEREGHSINTRENKYIPPGQRNREVISWGSGRQNSPRMGQPGSGSMPSRSTSHTSDFNPNSGSDQRVVNGGVPWPSPCPSPSSRPPSRYQSGPNSLPPRAATPTRPPSRPPSRPSRPPSHPSAHGSPAPVSTMPKRMSSEGPPRMSPKAQRHPRNHRVSAGRGSISSGLEFVSHNPPSEAATPPVARTSPSGGTWSSVVSGAKDSRLQDQRQNSPAGNKENIKPNETSPSFSKAENKGISPVVSEHRKQIDDLKKFKNDFRLQPSSTSESMDQLLNKNREGEKSRDLIKDKIEPSAKDSFIENSSSNCTSGSSKPNSPSISPSILSNTEHKRGPEVTSQGVQTSSPACKQEKDDKEEKKDAAEQVRKSTLNPNAKEFNPRSFSQPKPSTTPTSPRPQAQPSPSMVGHQQPTPVYTQPVCFAPNMMYPVPVSPGVQPLYPIPMTPMPVNQAKTYRAVPNMPQQRQDQHHQSAMMHPASAAGPPIAATPPAYSTQYVAYSPQQFPNQPLVQHVPHYQSQHPHVYSPVIQGNARMMAPPTHAQPGLVSSSATQYGAHEQTHAMYVSTGSLAQQYAHPNATLHPHTPHPQPSATPTGQQQSQHGGSHPAPSPVQHHQHQAAQALHLASPQQQSAIYHAGLAPTPPSMTPASNTQSPQNSFPAAQQTVFTIHPSHVQPAYTNPPHMAHVPQAHVQSGMVPSHPTAHAPMMLMTTQPPGGPQAALAQSALQPIPVSTTAHFPYMTHPSVQAHHQQQL

SEQ ID NO: 854788 - protein, 1338 aa, Homo sapiens
MRSAAAAPRSPAVATESRRFAAARWPGWRSLQRPARRSGRGGGGAAPGPYPSAAPPPPGPGPPPSRQSSPPSASDCFGSNGNGGGAFRPGSRRLLGLGGPPRPFVVVLLPLASPGAPPAAPTRASPLGARASPPRSGVSLARPAPGCPRPACEPVYGPLTMSLKPQQQQQQQQQQQQQQQQQQQQQQPPPAAANVRKPGGSGLLASPAAAPSPSSSSVSSSSATAPSSVVAATSGGGRPGLGRGRNSNKGLPQSTISFDGIYANMRMVHILTSVVGSKCEVQVKNGGIYEGVFKTYSPKCDLVLDAAHEKSTESSSGPKREEIMESILFKCSDFVVVQFKDMDSSYAKRDAFTDSAISAKVNGEHKEKDLEPWDAGELTANEELEALENDVSNGWDPNDMFRYNEENYGVVSTYDSSLSSYTVPLERDNSEEFLKREARANQLAEEIESSAQYKARVALENDDRSEEEKYTAVQRNSSEREGHSINTRENKYIPPGQRNREVISWGSGRQNSPRMGQPGSGSMPSRSTSHTSDFNPNSGSDQRVVNGGVPWPSPCPSPSSRPPSRYQSGPNSLPPRAATPTRPPSRPPSRPSRPPSHPSAHGSPAPVSTMPKRMSSEGPPRMSPKAQRHPRNHRVSAGRGSISSGLEFVSHNPPSEAATPPVARTSPSGGTWSSVVSGVPRLSPKTHRPRSPRQNSIGNTPSGPVLASPQAGIIPTEAVAMPIPAASPTPASPASNRAVTPSSEAKDSRLQDQRQNSPAGNKENIKPNETSPSFSKAENKGISPVVSEHRKQIDDLKKFKNDFRLQPSSTSESMDQLLNKNREGEKSRDLIKDKIEPSAKDSFIENSSSNCTSGSSKPNSPSISPSILSNTEHKRGPEVTSQGVQTSSPACKQEKDDKEEKKDAAEQVRKSTLNPNAKEFNPRSFSQPKPSTTPTSPRPQAQPSPSMVGHQQPTPVYTQPVCFAPNMMYPVPVSPGVQPLYPIPMTPMPVNQAKTYRAVPNMPQQRQDQHHQSAMMHPASAAGPPIAATPPAYSTQYVAYSPQQFPNQPLVQHVPHYQSQHPHVYSPVIQGNARMMAPPTHAQPGLVSSSATQYGAHEQTHAMYACPKLPYNKETSPSFYFAISTGSLAQQYAHPNATLHPHTPHPQPSATPTGQQQSQHGGSHPAPSPVQHHQHQAAQALHLASPQQQSAIYHAGLAPTPPSMTPASNTQSPQNSFPAAQQTVFTIHPSHVQPAYTNPPHMAHVPQAHVQSGMVPSHPTAHAPMMLMTTQPPGGPQAALAQSALQPIPVSTTAHFPYMTHPSGEACVCRGRRGTPKHSARTGGMAGRASASSPAFEN

SEQ ID NO: 854789 - protein, 348 aa, Homo sapiens
MVGHQQPTPVYTQPVCFAPNMMYPVPVSPGVQPLYPIPMTPMPVNQAKTYRAVPNMPQQRQDQHHQSAMMHPASAAGPPIAATPPAYSTQYVAYSPQQFPNQPLVQHVPHYQSQHPHVYSPVIQGNARMMAPPTHAQPGLVSSSATQYGAHEQTHAMYVSTGSLAQQYAHPNATLHPHTPHPQPSATPTGQQQSQHGGSHPAPSPVQHHQHQAAQALHLASPQQQSAIYHAGLAPTPPSMTPASNTQSPQNSFPAAQQTVFTIHPSHVQPAYTNPPHMAHVPQAHVQSGMVPSHPTAHAPMMLMTTQPPGGPQAALAQSALQPIPVSTTAHFPYMTHPSVQAHHQQQL

SEQ ID NO: 854790 - protein, 302 aa, Homo sapiens
SAFFSAVPNMPQQRQDQHHQSAMMHPASAAGPPIAATPPAYSTQYVAYSPQQFPNQPLVQHVPHYQSQHPHVYSPVIQGNARMMAPPTHAQPGLVSSSATQYGAHEQTHAMYVSTGSLAQQYAHPNATLHPHTPHPQPSATPTGQQQSQHGGSHPAPSPVQHHQHQAAQALHLASPQQQSAIYHAGLAPTPPSMTPASNTQSPQNSFPAAQQTVFTIHPSHVQPAYTNPPHMAHVPQAHVQSGMVPSHPTAHAPMMLMTTQPPGGPQAALAQSALQPIPVSTTAHFPYMTHPSVQAHHQQQL

SEQ ID NO: 854791 - protein, 293 aa, Homo sapiens
MPQQRQDQHHQSAMMHPASAAGPPIAATPPAYSTQYVAYSPQQFPNQPLVQHVPHYQSQHPHVYSPVIQGNARMMAPPTHAQPGLVSSSATQYGAHEQTHAMYVSTGSLAQQYAHPNATLHPHTPHPQPSATPTGQQQSQHGGSHPAPSPVQHHQHQAAQALHLASPQQQSAIYHAGLAPTPPSMTPASNTQSPQNSFPAAQQTVFTIHPSHVQPAYTNPPHMAHVPQAHVQSGMVPSHPTAHAPMMLMTTQPPGGPQAALAQSALQPIPVSTTAHFPYMTHPSVQAHHQQQL

SEQ ID NO: 854792 - protein, 1002 aa, Homo sapiens
MRSAAAAPRSPAVATESRRFAAARWPGWRSLQRPARRSGRGGGGAAPGPYPSAAPPPPGPGPPPSRQSSPPSASDCFGSNGNGGGAFRPGSRRLLGLGGPPRPFVVVLLPLASPGAPPAAPTRASPLGARASPPRSGVSLARPAPGCPRPACEPVYGPLTMSLKPQQQQQQQQQQQQQQQQQQQQQQPPPAAANVRKPGGSGLLASPAAAPSPSSSSVSSSSATAPSSVVAATSGGGRPGLGRGRNSNKGLPQSTISFDGIYANMRMVHILTSVVGSKCEVQVKNGGIYEGVFKTYSPKCDLVLDAAHEKSTESSSGPKREEIMESILFKCSDFVVVQFKDMDSSYAKRDAFTDSAISAKVNGEHKEKDLEPWDAGELTANEELEALENDVSNGWDPNDMFRYNEENYGVVSTYDSSLSSYTVPLERDNSEEFLKREARANQLAEEIESSAQYKARVALENDDRSEEEKYTAVQRNSSEREGHSINTRENKYIPPGQRNREVISWGSGRQNSPRMGQPGSGSMPSRSTSHTSDFNPNSGSDQRVVNGGVPWPSPCPSPSSRPPSRYQSGPNSLPPRAATPTRPPSRPPSRPSRPPSHPSAHGSPAPVSTMPKRMSSEGPPRMSPKAQRHPRNHRVSAGRGSISSGLEFVSHNPPSEAATPPVARTSPSGGTWSSVVSGVPRLSPKTHRPRSPRQNSIGNTPSGPVLASPQAGIIPTEAVAMPIPAASPTPASPASNRAVTPSSEAKDSRLQDQRQNSPAGNKENIKPNETSPSFSKAENKGISPVVSEHRKQIDDLKKFKNDFRLQPSSTSESMDQLLNKNREGEKSRDLIKDKIEPSAKDSFIENSSSNCTSGSSKPNSPSISPSILSNTEHKRGPEVTSQGVQTSSPACKQEKDDKEEKKDAAEQVRKSTLNPNAKEFNPRSFSQPKPSTTPTSPRPQAQPSPSMVGHQQPTPVYTQPVCFAPNMMYPVPVSPGVQPLYPIPMTPMPVNQAKTYRAELNT

SEQ ID NO: 854793 - protein, 1116 aa, Homo sapiens
MRSAAAAPRSPAVATESRRFAAARWPGWRSLQRPARRSGRGGGGAAPGPYPSAAPPPPGPGPPPSRQSSPPSASDCFGSNGNGGGAFRPGSRRLLGLGGPPRPFVVVLLPLASPGAPPAAPTRASPLGARASPPRSGVSLARPAPGCPRPACEPVYGPLTMSLKPQQQQQQQQQQQQQQQQQQQQQQPPPAAANVRKPGGSGLLASPAAAPSPSSSSVSSSSATAPSSVVAATSGGGRPGLGRGRNSNKGLPQSTISFDGIYANMRMVHILTSVVGSKCEVQVKNGGIYEGVFKTYSPKCDLVLDAAHEKSTESSSGPKREEIMESILFKCSDFVVVQFKDMDSSYAKRDAFTDSAISAKVNGEHKEKDLEPWDAGELTANEELEALENDVSNGWDPNDMFRYNEENYGVVSTYDSSLSSYTVPLERDNSEEFLKREARANQLAEEIESSAQYKARVALENDDRSEEEKYTAVQRNSSEREGHSINTRENKYIPPGQRNREVISWGSGRQNSPRMGQPGSGSMPSRSTSHTSDFNPNSGSDQRVVNGGVPWPSPCPSPSSRPPSRYQSGPNSLPPRAATPTRPPSRPPSRPSRPPSHPSAHGSPAPVSTMPKRMSSEGPPRMSPKAQRHPRNHRVSAGRGSISSGLEFVSHNPPSEAATPPVARTSPSGGTWSSVVSGVPRLSPKTHRPRSPRQNSIGNTPSGPVLASPQAGIIPTEAVAMPIPAASPTPASPASNRAVTPSSEAKDSRLQDQRQNSPAGNKENIKPNETSPSFSKAENKGISPVVSEHRKQIDDLKKFKNDFRLQPSSTSESMDQLLNKNREGEKSRDLIKDKIEPSAKDSFIENSSSNCTSGSSKPNSPSISPSILSNTEHKRGPEVTSQGVQTSSPACKQEKDDKEEKKDAAEQVRKSTLNPNAKEFNPRSFSQPKPSTTPTSPRPQAQPSPSMVGHQQPTPVYTQPVCFAPNMMYPVPVSPGVQPLYPIPMTPMPVNQAKTYRAVPNMPQQRQDQHHQSAMMHPASAAGPPIAATPPAYSTQYVAYSPQQFPNQPLVQHVPHYQSQHPHVYSPVIQGNARMMAPPTHAQPGLVSSSATQYGAHEQTHAMYGRKHFVCLFQCV

SEQ ID NO: 854794 - protein, 680 aa, Homo sapiens
MRSAAAAPRSPAVATESRRFAAARWPGWRSLQRPARRSGRGGGGAAPGPYPSAAPPPPGPGPPPSRQSSPPSASDCFGSNGNGGGAFRPGSRRLLGLGGPPRPFVVVLLPLASPGAPPAAPTRASPLGARASPPRSGVSLARPAPGCPRPACEPVYGPLTMSLKPQQQQQQQQQQQQQQQQQQQQQQPPPAAANVRKPGGSGLLASPAAAPSPSSSSVSSSSATAPSSVVAATSGGGRPGLGRGRNSNKGLPQSTISFDGIYANMRMVHILTSVVGSKCEVQVKNGGIYEGVFKTYSPKCDLVLDAAHEKSTESSSGPKREEIMESILFKCSDFVVVQFKDMDSSYAKRDAFTDSAISAKVNGEHKEKDLEPWDAGELTANEELEALENDVSNGWDPNDMFRYNEENYGVVSTYDSSLSSYTVPLERDNSEEFLKREARANQLAEEIESSAQYKARVALENDDRSEEEKYTAVQRNSSEREGHSINTRENKYIPPGQRNREVISWGSGRQNSPRMGQPGSGSMPSRSTSHTSDFNPNSGSDQRVVNGGVPWPSPCPSPSSRPPSRYQSGPNSLPPRAATPTRPPSRPPSRPSRPPSHPSAHGSPAPVSTMPKRMSSEGPPRMSPKAQRHPRNHRVSAGRGSISSGLEFVSHNPPSEAATPPVARTSPSGGTWSSVVSGGR

SEQ ID NO: 854795 - protein, 342 aa, Homo sapiens
MRSAAAAPRSPAVATESRRFAAARWPGWRSLQRPARRSGRGGGGAAPGPYPSAAPPPPGPGPPPSRQSSPPSASDCFGSNGNGGGAFRPGSRRLLGLGGPPRPFVVVLLPLASPGAPPAAPTRASPLGARASPPRSGVSLARPAPGCPRPACEPVYGPLTMSLKPQQQQQQQQQQQQQQQQQQQQQQPPPAAANVRKPGGSGLLASPAAAPSPSSSSVSSSSATAPSSVVAATSGGGRPGLGRWVSAPQPPPLRARRPLPRGPRRRPRPVTRRATRGGLGAGSAGETRSGLSPEARPVGAPGSSGIVRPVQPPAASPPPPPAVKMEGAGGLPSPRVLGGVLG

SEQ ID NO: 854796 - protein, 994 aa, Homo sapiens
MRSAAAAPRSPAVATESRRFAAARWPGWRSLQRPARRSGRGGGGAAPGPYPSAAPPPPGPGPPPSRQSSPPSASDCFGSNGNGGGAFRPGSRRLLGLGGPPRPFVVVLLPLASPGAPPAAPTRASPLGARASPPRSGVSLARPAPGCPRPACEPVYGPLTMSLKPQQQQQQQQQQQQQQQQQQQQQQPPPAAANVRKPGGSGLLASPAAAPSPSSSSVSSSSATAPSSVVAATSGGGRPGLGRGRNSNKGLPQSTISFDGIYANMRMVHILTSVVGSKCEVQVKNGGIYEGVFKTYSPKCDLVLDAAHEKSTESSSGPKREEIMESILFKCSDFVVVQFKDMDSSYAKRDAFTDSAISAKVNGEHKEKDLEPWDAGELTANEELEALENDVSNGWDPNDMFRYNEENYGVVSTYDSSLSSYTVPLERDNSEEFLKREARANQLAEEIESSAQYKARVALENDDRSEEEKYTAVQRNSSEREGHSINTRENKYIPPGQRNREVISWGSGRQNSPRMGQPGSGSMPSRSTSHTSDFNPNSGSDQRVVNGGVPWPSPCPSPSSRPPSRYQSGPNSLPPRAATPTRPPSRPPSRPSRPPSHPSAHGSPAPVSTMPKRMSSEGPPRMSPKAQRHPRNHRVSAGRGSISSGLEFVSHNPPSEAATPPVARTSPSGGTWSSVVSGVPRLSPKTHRPRSPRQNSIGNTPSGPVLASPQAGIIPTEAVAMPIPAASPTPASPASNRAVTPSSEAKDSRLQDQRQNSPAGNKENIKPNETSPSFSKAENKGISPVVSEHRKQIDDLKKFKNDFRLQPSSTSESMDQLLNKNREGEKSRDLIKDKIEPSAKDSFIENSSSNCTSGSSKPNSPSISPSILSNTEHKRGPEVTSQGVQTSSPACKQEKDDKEEKKDAAEQVRKSTLNPNAKEFNPRSFSQPKPSTTPTSPRPQAQPSPSMVGHQQPTPVYTQPVCFAPNMMYPVPVSPGVQYQICPNSGKTSIIRVP

SEQ ID NO: 854797 - protein, 247 aa, Homo sapiens
MLLLSAPKPSTTPTSPRPQAQPSPSMVGHQQPTPVYTQPVCFAPNMMYPVPVSPGVQPLYPIPMTPMPVNQAKTYRAVPNMPQQRQDQHHQSAMMHPASAAGPPIAATPPAYSTQYVAYSPQQFPNQPLVQHVPHYQSQHPHVYSPVIQGNARMMAPPTHAQPGLVSSSATQYGAHEQTHAMYVETGFRRVGQAGLELLTSGDPPASASQNAGITSVSHRARLHFSQFQIQGGKEFLIKVLLSDLLS

SEQ ID NO: 854798 - protein, 1294 aa, Homo sapiens
MRSAAAAPRSPAVATESRRFAAARWPGWRSLQRPARRSGRGGGGAAPGPYPSAAPPPPGPGPPPSRQSSPPSASDCFGSNGNGGGAFRPGSRRLLGLGGPPRPFVVVLLPLASPGAPPAAPTRASPLGARASPPRSGVSLARPAPGCPRPACEPVYGPLTMSLKPQQQQQQQQQQQQQQQQQQQQQQPPPAAANVRKPGGSGLLASPAAAPSPSSSSVSSSSATAPSSVVAATSGGGRPGLGRGRNSNKGLPQSTISFDGIYANMRMVHILTSVVGSKCEVQVKNGGIYEGVFKTYSPKCDLVLDAAHEKSTESSSGPKREEIMESILFKCSDFVVVQFKDMDSSYAKRDAFTDSAISAKVNGEHKEKDLEPWDAGELTANEELEALENDVSNGWDPNDMFRYNEENYGVVSTYDSSLSSYTVPLERDNSEEFLKREARANQLAEEIESSAQYKARVALENDDRSEEEKYTAVQRNSSEREGHSINTRENKYIPPGQRNREVISWGSGRQNSPRMGQPGSGSMPSRSTSHTSDFNPNSGSDQRVVNGGVPWPSPCPSPSSRPPSRYQSGPNSLPPRAATPTRPPSRPPSRPSRPPSHPSAHGSPAPVSTMPKRMSSEGPPRMSPKAQRHPRNHRVSAGRGSISSGLEFVSHNPPSEAATPPVARTSPSGGTWSSVVSGVPRLSPKTHRPRSPRQNSIGNTPSGPVLASPQAGIIPTEAVAMPIPAASPTPASPASNRAVTPSSEAKDSRLQDQRQNSPAGNKENIKPNETSPSFSKAENKGISPVVSEHRKQIDDLKKFKNDFRLQPSSTSESMDQLLNKNREGEKSRDLIKDKIEPSAKDSFIENSSSNCTSGSSKPNSPSISPSILSNTEHKRGPEVTSQGVQTSSPACKQEKDDKEEKKDAAEQVRKSTLNPNAKEFNPRSFSQPKPSTTPTSPRPQAQPSPSMVGHQQPTPVYTQPVCFAPNMMYPVPVSPGVQPLYPIPMTPMPVNQAKTYRAVPNMPQQRQDQHHQSAMMHPASAAGPPIAATPPAYSTQYVAYSPQQFPNQPLVQHVPHYQSQHPHVYSPVIQGNARMMAPPTHAQPGLVSSSATQYGAHEQTHAMYVSTGSLAQQYAHPNATLHPHTPHPQPSATPTGQQQSQHGGSHPAPSPVQHHQHQAAQALHLASPQQQSAIYHAGLAPTPPSMTPASNTQSPQNSFPAAQQTVFTIHPSHVQPAYTNPPHMAHVPQAHVQSGMVPSHPTAHAPMMLMTTQPPGGPQAALAQSALQPIPVSTTAHFPYMTHPSVQAHHQQQL

SEQ ID NO: 854799 - protein, 1224 aa, Homo sapiens
MRSAAAAPRSPAVATESRRFAAARWPGWRSLQRPARRSGRGGGGAAPGPYPSAAPPPPGPGPPPSRQSSPPSASDCFGSNGNGGGAFRPGSRRLLGLGGPPRPFVVVLLPLASPGAPPAAPTRASPLGARASPPRSGVSLARPAPGCPRPACEPVYGPLTMSLKPQQQQQQQQQQQQQQQQQQQQQQPPPAAANVRKPGGSGLLASPAAAPSPSSSSVSSSSATAPSSVVAATSGGGRPGLGRGRNSNKGLPQSTISFDGIYANMRMVHILTSVVGSKCEVQVKNGGIYEGVFKTYSPKCDLVLDAAHEKSTESSSGPKREEIMESILFKCSDFVVVQFKDMDSSYAKRDAFTDSAISAKVNGEHKEKDLEPWDAGELTANEELEALENDVSNGWDPNDMFRYNEENYGVVSTYDSSLSSYTVPLERDNSEEFLKREARANQLAEEIESSAQYKARVALENDDRSEEEKYTAVQRNSSEREGHSINTRENKYIPPGQRNREVISWGSGRQNSPRMGQPGSGSMPSRSTSHTSDFNPNSGSDQRVVNGGPPRMSPKAQRHPRNHRVSAGRGSISSGLEFVSHNPPSEAATPPVARTSPSGGTWSSVVSGVPRLSPKTHRPRSPRQNSIGNTPSGPVLASPQAGIIPTEAVAMPIPAASPTPASPASNRAVTPSSEAKDSRLQDQRQNSPAGNKENIKPNETSPSFSKAENKGISPVVSEHRKQIDDLKKFKNDFRLQPSSTSESMDQLLNKNREGEKSRDLIKDKIEPSAKDSFIENSSSNCTSGSSKPNSPSISPSILSNTEHKRGPEVTSQGVQTSSPACKQEKDDKEEKKDAAEQVRKSTLNPNAKEFNPRSFSQPKPSTTPTSPRPQAQPSPSMVGHQQPTPVYTQPVCFAPNMMYPVPVSPGVQPLYPIPMTPMPVNQAKTYRAVPNMPQQRQDQHHQSAMMHPASAAGPPIAATPPAYSTQYVAYSPQQFPNQPLVQHVPHYQSQHPHVYSPVIQGNARMMAPPTHAQPGLVSSSATQYGAHEQTHAMYVSTGSLAQQYAHPNATLHPHTPHPQPSATPTGQQQSQHGGSHPAPSPVQHHQHQAAQALHLASPQQQSAIYHAGLAPTPPSMTPASNTQSPQNSFPAAQQTVFTIHPSHVQPAYTNPPHMAHVPQAHVQSGMVPSHPTAHAPMMLMTTQPPGGPQAALAQSALQPIPVSTTAHFPYMTHPSVQAHHQQQL

SEQ ID NO: 854800 - protein, 1309 aa, Homo sapiens
MRSAAAAPRSPAVATESRRFAAARWPGWRSLQRPARRSGRGGGGAAPGPYPSAAPPPPGPGPPPSRQSSPPSASDCFGSNGNGGGAFRPGSRRLLGLGGPPRPFVVVLLPLASPGAPPAAPTRASPLGARASPPRSGVSLARPAPGCPRPACEPVYGPLTMSLKPQQQQQQQQQQQQQQQQQQQQQQPPPAAANVRKPGGSGLLASPAAAPSPSSSSVSSSSATAPSSVVAATSGGGRPGLGRGRNSNKGLPQSTISFDGIYANMRMVHILTSVVGSKCEVQVKNGGIYEGVFKTYSPKCDLVLDAAHEKSTESSSGPKREEIMESILFKCSDFVVVQFKDMDSSYAKRDAFTDSAISAKVNGEHKEKDLEPWDAGELTANEELEALENDVSNGWDPNDMFRYNEENYGVVSTYDSSLSSYTVPLERDNSEEFLKREARANQLAEEIESSAQYKARVALENDDRSEEEKYTAVQRNSSEREGHSINTRENKYIPPGQRNREVISWGSGRQNSPRMGQPGSGSMPSRSTSHTSDFNPNSGSDQRVVNGGVPWPSPCPSPSSRPPSRYQSGPNSLPPRAATPTRPPSRPPSRPSRPPSHPSAHGSPAPVSTMPKRMSSEGPPRMSPKAQRHPRNHRVSAGRGSISSGLEFVSHNPPSEAATPPVARTSPSGGTWSSVVSGVPRLSPKTHRPRSPRQNSIGNTPSGPVLASPQAGIIPTEAVAMPIPAASPTPASPASNRAVTPSSEAKDSRLQDQRQNSPAGNKENIKPNETSPSFSKAENKGISPVVSEHRKQIDDLKKFKNDFRLQPSSTSESMDQLLNKNREGEKSRDLIKDKIEPSAKDSFIENSSSNCTSGSSKPNSPSISPSILSNTEHKRGPEVTSQGVQTSSPACKQEKDDKEEKKDAAEQVRKSTLNPNAKEFNPRSFSQPKPSTTPTSPRPQAQPSPSMVGHQQPTPVYTQPVCFAPNMMYPVPVSPGVQPLYPIPMTPMPVNQAKTYRAALEHMNLLKELCLKYLPNMPQQRQDQHHQSAMMHPASAAGPPIAATPPAYSTQYVAYSPQQFPNQPLVQHVPHYQSQHPHVYSPVIQGNARMMAPPTHAQPGLVSSSATQYGAHEQTHAMYVSTGSLAQQYAHPNATLHPHTPHPQPSATPTGQQQSQHGGSHPAPSPVQHHQHQAAQALHLASPQQQSAIYHAGLAPTPPSMTPASNTQSPQNSFPAAQQTVFTIHPSHVQPAYTNPPHMAHVPQAHVQSGMVPSHPTAHAPMMLMTTQPPGGPQAALAQSALQPIPVSTTAHFPYMTHPSVQAHHQQQL

SEQ ID NO: 854801 - protein, 1002 aa, Homo sapiens; identical to SEQ ID NO: 854792

SEQ ID NO: 854802 - protein, 1282 aa, Homo sapiens
MRSAAAAPRSPAVATESRRFAAARWPGWRSLQRPARRSGRGGGGAAPGPYPSAAPPPPGPGPPPSRQSSPPSASDCFGSNGNGGGAFRPGSRRLLGLGGPPRPFVVVLLPLASPGAPPAAPTRASPLGARASPPRSGVSLARPAPGCPRPACEPVYGPLTMSLKPQQQQQQQQQQQQQQQQQQQQQQPPPAAANVRKPGGSGLLASPAAAPSPSSSSVSSSSATAPSSVVAATSGGGRPGLGRGRNSNKGLPQSTISFDGIYANMRMVHILTSVVGSKCEVQVKNGGIYEGVFKTYSPKCDLVLDAAHEKSTESSSGPKREEIMESILFKCSDFVVVQFKDMDSSYAKRDAFTDSAISAKVNGEHKEKDLEPWDAGELTANEELEALENDVSNGWDPNDMFRYNEENYGVVSTYDSSLSSYTVPLERDNSEEFLKREARANQLAEEIESSAQYKARVALENDDRSEEEKYTAVQRNSSEREGHSINTRENKYIPPGQRNREVISWGSGRQNSPRMGQPGSGSMPSRSTSHTSDFNPNSGSDQRVVNGGVPWPSPCPSPSSRPPSRYQSGPNSLPPRAATPTRPPSRPPSRPSRPPSHPSAHGSPAPVSTMPKRMSSEGPPRMSPKAQRHPRNHRVSAGRGSISSGLEFVSHNPPSEAATPPVARTSPSGGTWSSVVSGVPRLSPKTHRPRSPRQNSIGNTPSGPVLASPQAGIIPTEAVAMPIPAASPTPASPASNRAVTPSSEAKDSRLQDQRQNSPAGNKENIKPNETSPSFSKAENKGISPVVSEHRKQIDDLKKFKNDFRLQPSSTSESMDQLLNKNREGEKSRDLIKDKIEPSAKDSFIENSSSNCTSGSSKPNSPSISPSILSNTEHKRGPEVTSQGVQTSSPACKQEKDDKEEKKDAAEQVRKSTLNPNAKEFNPRSFSQPKPSTTPTSPRPQAQPSPSMVGHQQPTPVYTQPVCFAPNMMYPVPVSPGVQPLYPIPMTPMPVNQAKTYRAVPNMPQQRQDQHHQSAMMHPASAAGPPIAATPPAYSTQYVAYSPQQFPNQPLVQHVPHYQSQHPHVYSPVIQGNARMMAPPTHAQPGLVSSSATQYGAHEQTHAMYACPKLPYNKETSPSFYFAISTGSLAQQYAHPNATLHPHTPHPQPSATPTGQQQSQHGGSHPAPSPVQHHQHQAAQALHLASPQQQSAIYHAGLAPTPPSMTPASNTQSPQNSFPAAQQTVFTIHPSHVQPAYTNPPHMAHVPQYKPTTNSSCKAALEEPKGQIPSSLLLLLPTGSTEN

SEQ ID NO: 854803 - protein, 398 aa, Homo sapiens
MASAVTSSNLIVSSGDARLANNLYGDSSFSQPKPSTTPTSPRPQAQPSPSMVGHQQPTPVYTQPVCFAPNMMYPVPVSPGVQPLYPIPMTPMPVNQAKTYRAVPNMPQQRQDQHHQSAMMHPASAAGPPIAATPPAYSTQYVAYSPQQFPNQPLVQHVPHYQSQHPHVYSPVIQGNARMMAPPTHAQPGLVSSSATQYGAHEQTHAMYVSTGSLAQQYAHPNATLHPHTPHPQPSATPTGQQQSQHGGSHPAPSPVQHHQHQAAQALHLASPQQQSAIYHAGLAPTPPSMTPASNTQSPQNSFPAAQQTVFTIHPSHVQPAYTNPPHMAHVPQAHVQSGMVPSHPTAHAPMMLMTTQPPGGPQAALAQSALQPIPVSTTAHFPYMTHPSVQAHHQQQL

SEQ ID NO: 854804 - protein, 210 aa, Homo sapiens
MYACPKLPYNKETSPSFYFAISTGSLAQQYAHPNATLHPHTPHPQPSATPTGQQQSQHGGSHPAPSPVQHHQHQAAQALHLASPQQQSAIYHAGLAPTPPSMTPASNTQSPQNSFPAAQQTVFTIHPSHVQPAYTNPPHMAHVPQAHVQSGMVPSHPTAHAPMMLMTTQPPGGPQAALAQSALQPIPVSTTAHFPYMTHPSVQAHHQQQL

SEQ ID NO: 854805 - protein, 1256 aa, Homo sapiens
MRSAAAAPRSPAVATESRRFAAARWPGWRSLQRPARRSGRGGGGAAPGPYPSAAPPPPGPGPPPSRQSSPPSASDCFGSNGNGGGAFRPGSRRLLGLGGPPRPFVVVLLPLASPGAPPAAPTRASPLGARASPPRSGVSLARPAPGCPRPACEPVYGPLTMSLKPQQQQQQQQQQQQQQQQQQQQQQPPPAAANVRKPGGSGLLASPAAAPSPSSSSVSSSSATAPSSVVAATSGGGRPGLGRGRNSNKGLPQSTISFDGIYANMRMVHILTSVVGSKCEVQVKNGGIYEGVFKTYSPKCDLVLDAAHEKSTESSSGPKREEIMESILFKCSDFVVVQFKDMDSSYAKRDAFTDSAISAKVNGEHKEKDLEPWDAGELTANEELEALENDVSNGWDPNDMFRYNEENYGVVSTYDSSLSSYTVPLERDNSEEFLKREARANQLAEEIESSAQYKARVALENDDRSEEEKYTAVQRNSSEREGHSINTRENKYIPPGQRNREVISWGSGRQNSPRMGQPGSGSMPSRSTSHTSDFNPNSGSDQRVVNGGVPWPSPCPSPSSRPPSRYQSGPNSLPPRAATPTRPPSRPPSRPSRPPSHPSAHGSPAPVSTMPKRMSSEGPPRMSPKAQRHPRNHRVSAGRGSISSGLEFVSHNPPSEAATPPVARTSPSGGTWSSVVSGVPRLSPKTHRPRSPRQNSIGNTPSGPVLASPQAGIIPTEAVAMPIPAASPTPASPASNRAVTPSSEAKDSRLQDQRQNSPAGNKENIKPNETSPSFSKAENKGISPVVSEHRKQIDDLKKFKNDFRLQPSSTSESMDQLLNKNREGEKSRDLIKDKIEPSAKDSFIENSSSNCTSGSSKPNSPSISPSILSNTEHKRGPEVTSQGVQTSSPACKQEKDDKEEKKDAAEQVRKSTLNPNAKEFNPRSFSQPKPSTTPTSPRPQAQPSPSMVGHQQPTPVYTQPVCFAPNMMYPVPVSPGVQPLYPIPMTPMPVNQAKTYRAVPNMPQQRQDQHHQSAMMHPASAAGPPIAATPPAYSTQYVAYSPQQFPNQPLVQHVPHYQSQHPHVYSPVIQGNARMMAPPTHAQPGLVSSSATQYGAHEQTHAMYACPKLPYNKETSPSFYFAISTGSLAQQYAHPNATLHPHTPHPQPSATPTGQQQSQHGGSHPAPSPVQHHQHQAAQALHLASPQQQSAIYHAGLAPTPPSMTPASNTQSPQNSFPAAQQTVFTIHPSHVQPAYTNPPHMAHVPQVIPALANFL

SEQ ID NO: 854806 - protein, 1015 aa, Homo sapiens
MRSAAAAPRSPAVATESRRFAAARWPGWRSLQRPARRSGRGGGGAAPGPYPSAAPPPPGPGPPPSRQSSPPSASDCFGSNGNGGGAFRPGSRRLLGLGGPPRPFVVVLLPLASPGAPPAAPTRASPLGARASPPRSGVSLARPAPGCPRPACEPVYGPLTMSLKPQQQQQQQQQQQQQQQQQQQQQQPPPAAANVRKPGGSGLLASPAAAPSPSSSSVSSSSATAPSSVVAATSGGGRPGLGRGRNSNKGLPQSTISFDGIYANMRMVHILTSVVGSKCEVQVKNGGIYEGVFKTYSPKCDLVLDAAHEKSTESSSGPKREEIMESILFKCSDFVVVQFKDMDSSYAKRDAFTDSAISAKVNGEHKEKDLEPWDAGELTANEELEALENDVSNGWDPNDMFRYNEENYGVVSTYDSSLSSYTVPLERDNSEEFLKREARANQLAEEIESSAQYKARVALENDDRSEEEKYTAVQRNSSEREGHSINTRENKYIPPGQRNREVISWGSGRQNSPRMGQPGSGSMPSRSTSHTSDFNPNSGSDQRVVNGGVPWPSPCPSPSSRPPSRYQSGPNSLPPRAATPTRPPSRPPSRPSRPPSHPSAHGSPAPVSTMPKRMSSEGPPRMSPKAQRHPRNHRVSAGRGSISSGLEFVSHNPPSEAATPPVARTSPSGGTWSSVVSGVPRLSPKTHRPRSPRQNSIGNTPSGPVLASPQAGIIPTEAVAMPIPAASPTPASPASNRAVTPSSEAKDSRLQDQRQNSPAGNKENIKPNETSPSFSKAENKGISPVVSEHRKQIDDLKKFKNDFRLQPSSTSESMDQLLNKNREGEKSRDLIKDKIEPSAKDSFIENSSSNCTSGSSKPNSPSISPSILSNTEHKRGPEVTSQGVQTSSPACKQEKDDKEEKKDAAEQVRKSTLNPNAKEFNPRSFSQPKPSTTPTSPRPQAQPSPSMVGHQQPTPVYTQPVCFAPNMMYPVPVSPGVQPLYPIPMTPMPVNQAKTYRAVKVRIILPVFACSLHAA

SEQ ID NO: 854807 - protein, 439 aa, Homo sapiens
MRSAAAAPRSPAVATESRRFAAARWPGWRSLQRPARRSGRGGGGAAPGPYPSAAPPPPGPGPPPSRQSSPPSASDCFGSNGNGGGAFRPGSRRLLGLGGPPRPFVVVLLPLASPGAPPAAPTRASPLGARASPPRSGVSLARPAPGCPRPACEPVYGPLTMSLKPQQQQQQQQQQQQQQQQQQQQQQPPPAAANVRKPGGSGLLASPAAAPSPSSSSVSSSSATAPSSVVAATSGGGRPGLGRGRNSNKGLPQSTISFDGIYANMRMVHILTSVVGSKCEVQVKNGGIYEGVFKTYSPKCDLVLDAAHEKSTESSSGPKREEIMESILFKCSDFVVVQFKDMDSSYAKRDAFTDSAISAKVNGEHKEKDLEPWDAGELTANEELEALENDVSNGWDPNDMFRYNEENYGVVSTYDSSLSSYTVPLERDTQKILNGRSGD

SEQ ID NO: 854808 - protein, 1209 aa, Homo sapiens
MADGPRCKRRKQANPRRKNVVNYDNVVDTGSETDEEDKLHIAEDDGIANPLDQETSPASVPNHESSPHVSQALLPREEEEDEIREGGVEHPWHNNEILQASVDGPEEMKEDYDTMGPEATIQTAINNGTVKNANCTSDFEEYFAKRKLEERDGHAVSIEEYLQRSDTAIIYPEAPEELSRLGTPEANGQEENDLPPGTPDAFAQLLTCPYCDRGYKRLTSLKEHIKYRHEKNEENFSCPLCSYTFAYRTQLERHMVTHKPGTDQHQMLTQGAGNRKFKCTECGKAFKYKHHLKEHLRIHSGEKPYECPNCKKRFSHSGSYSSHISSKKCIGLISVNGRMRNNIKTGSSPNSVSSSPTNSAITQLRNKLENGKPLSMSEQTGLLKIKTEPLDFNDYKVLMATHGFSGTSPFMNGGLGATSPLGVHPSAQSPMQHLGVGMEAPLLGFPTMNSNLSEVQKVLQIVDNTVSRQKMDCKAEEISKLKGYHMKDPCSQPEEQGVTSPNIPPVGLPVVSHNGATKSIIDYTLEKVNEAKACLQSLTTDSRRQISNIKKEKLRTLIDLVTDDKMIENHNISTPFSCQFCKESFPGPIPLHQHERYLCKMNEEIKAVLQPHENIVPNKAGVFVDNKALLLSSVLSEKGMTSPINPYKDHMSVLKAYYAMNMEPNSDELLKISIAVGLPQEFVKEWFEQRKVYQYSNSRSPSLERSSKPLAPNSNPPTKDSLLPRSPVKPMDSITSPSIAELHNSVTNCDPPLRLTKPSHFTNIKPVEKLDHSRSNTPSPLNLSSTSSKNSHSSSYTPNSFSSEELQAEPLDLSLPKQMKEPKSIIATKNKTKASSISLDHNSVSSSSENSDEPLNLTFIKKEFSNSNNLDNKSTNPVFSMNPFSAKPLYTALPPQSAFPPATFMPPVQTSIPGLRPYPGLDQMSFLPHMAYTYPTGAATFADMQQRRKYQRKQGFQGELLDGAQDYMSGLDDMTDSDSCLSRKKIKKTESGMYACDLCDKTFQKSSSLLRHKYEHTGKRPHQCQICKKAFKHKHHLIEHSRLHSGEKPYQCDKCGKRFSHSGSYSQHMNHRYSYCKREAEEREAAEREAREKGHLEPTELLMNRAYLQSITPQGYSDSEERESMPRDGESEKEHEKEGEDGYGKLGRQDGDEEFEEEEEESENKSMDTDPETIRDEEETGDHSMDDSSEDGKMETKSDHEEDNMEDGM

SEQ ID NO: 854809 - protein, 1209 aa, Homo sapiens; identical to SEQ ID NO: 854808

SEQ ID NO: 854810 - protein, 1192 aa, Homo sapiens
MADGPRCKRRKQANPRRKNDKLHIAEDDGIANPLDQETSPASVPNHESSPHVSQALLPREEEEDEIREGGVEHPWHNNEILQASVDGPEEMKEDYDTMGPEATIQTAINNGTVKNANCTSDFEEYFAKRKLEERDGHAVSIEEYLQRSDTAIIYPEAPEELSRLGTPEANGQEENDLPPGTPDAFAQLLTCPYCDRGYKRLTSLKEHIKYRHEKNEENFSCPLCSYTFAYRTQLERHMVTHKPGTDQHQMLTQGAGNRKFKCTECGKAFKYKHHLKEHLRIHSGEKPYECPNCKKRFSHSGSYSSHISSKKCIGLISVNGRMRNNIKTGSSPNSVSSSPTNSAITQLRNKLENGKPLSMSEQTGLLKIKTEPLDFNDYKVLMATHGFSGTSPFMNGGLGATSPLGVHPSAQSPMQHLGVGMEAPLLGFPTMNSNLSEVQKVLQIVDNTVSRQKMDCKAEEISKLKGYHMKDPCSQPEEQGVTSPNIPPVGLPVVSHNGATKSIIDYTLEKVNEAKACLQSLTTDSRRQISNIKKEKLRTLIDLVTDDKMIENHNISTPFSCQFCKESFPGPIPLHQHERYLCKMNEEIKAVLQPHENIVPNKAGVFVDNKALLLSSVLSEKGMTSPINPYKDHMSVLKAYYAMNMEPNSDELLKISIAVGLPQEFVKEWFEQRKVYQYSNSRSPSLERSSKPLAPNSNPPTKDSLLPRSPVKPMDSITSPSIAELHNSVTNCDPPLRLTKPSHFTNIKPVEKLDHSRSNTPSPLNLSSTSSKNSHSSSYTPNSFSSEELQAEPLDLSLPKQMKEPKSIIATKNKTKASSISLDHNSVSSSSENSDEPLNLTFIKKEFSNSNNLDNKSTNPVFSMNPFSAKPLYTALPPQSAFPPATFMPPVQTSIPGLRPYPGLDQMSFLPHMAYTYPTGAATFADMQQRRKYQRKQGFQGELLDGAQDYMSGLDDMTDSDSCLSRKKIKKTESGMYACDLCDKTFQKSSSLLRHKYEHTGKRPHQCQICKKAFKHKHHLIEHSRLHSGEKPYQCDKCGKRFSHSGSYSQHMNHRYSYCKREAEEREAAEREAREKGHLEPTELLMNRAYLQSITPQGYSDSEERESMPRDGESEKEHEKEGEDGYGKLGRQDGDEEFEEEEEESENKSMDTDPETIRDEEETGDHSMDDSSEDGKMETKSDHEEDNMEDGM

SEQ ID NO: 854811 - protein, 228 aa, Homo sapiens
MASGCKIGPSILNSDLANLGAECLRMLDSGADYLHLDVMDGHFVPNITFGHPVVESLRKQLGQDPFFDMHMMVSKPEQWVKPMAVAGANQYTFHLEATENPGALIKDIRENGMKVGLAIKPGTSVEYLAPWANQIDMALVMTVEPGFGGQKFMEDMMPKVHWLRTQFPSLDIEVDGGVGPDTVHKCAEAGANMIVSGSAIMRSEDPRSVINLLRNVCSEAAQKRSLDR

SEQ ID NO: 854812 - protein, 233 aa, Homo sapiens
MASGCKIGPSILNSDLANLGAECLRMLDSGADYLHLDVMDGHFVPNITFGHPVVESLRKQLGQDPFFDMHMMVSKPEQWVKPMAVAGANQYTFHLEATENPGALIKDIRENGMKVGLAIKPGTSVEYLAPWANQIDMALVMTVEPGFGGQKFMEDMMPKVHWLRTQFPSLDIEVDGGVGPDTVHKCAEAGANMIVSGSAIMRSEDPRSVINLLRNVCPLFRLWTVNIRACSGL

SEQ ID NO: 854813 - protein, 160 aa, Homo sapiens
MHMMVSKPEQWVKPMAVAGANQYTFHLEATENPGALIKDIRENGMKVGLAIKPGTSVEYLAPWANQIDMALVMTVEPGFGGQKFMEDMMPKVHWLRTQFPSLDIEVDGGVGPDTVHKCAEAGANMIVSGSAIMRSEDPRSVINLLRNVCSEAAQKRSLDR

SEQ ID NO: 854814 - protein, 230 aa, Homo sapiens
MASGCKIGPSILNSDLANLGAECLRMLDSGADYLHLDVMDGHFVPNITFGHPVVESLRKQLGQDPFFDMHMMVSKPEQWVKPMAVAGANQYTFHLEATENPGALIKDIRENGMKSCSVTQAEVQWHSQGPLQVGLAIKPGTSVEYLAPWANQIDMALVMTVEPGFGGQKFMEDMMPKVHWLRTQFPSLDIEVDGGVGPDTVHKCAECDVSTSRFLYNCHTFLLDIYLSKA

SEQ ID NO: 854815 - protein, 228 aa, Homo sapiens; identical to SEQ ID NO: 854811

SEQ ID NO: 854816 - protein, 232 aa, Homo sapiens
MSEYMRSLQCLAYIKFSIIVNYIIITILIFLSIFSSGTLLFREVRHFVPNITFGHPVVESLRKQLGQDPFFDMHMMVSKPEQWVKPMAVAGANQYTFHLEATENPGALIKDIRENGMKVGLAIKPGTSVEYLAPWANQIDMALVMTVEPGFGGQKFMEDMMPKVHWLRTQFPSLDIEVDGGVGPDTVHKCAEAGANMIVSGSAIMRSEDPRSVINLLRNVCSEAAQKRSLDR

SEQ ID NO: 854817 - protein, 160 aa, Homo sapiens; identical to SEQ ID NO: 854813

SEQ ID NO: 854818 - protein, 246 aa, Homo sapiens
MASGCKIGPSILNSDLANLGAECLRMLDSGADYLHLDVMDGHFVPNITFGHPVVESLRKQLGQDPFFDMHMMVSKPEQWVKPMAVAGANQYTFHLEATENPGALIKDIRENGMKSCSVTQAEVQWHSQGPLQVGLAIKPGTSVEYLAPWANQIDMALVMTVEPGFGGQKFMEDMMPKVHWLRTQFPSLDIEVDGGVGPDTVHKCAEAGANMIVSGSAIMRSEDPRSVINLLRNVCSEAAQKRSLDR

SEQ ID NO: 854819 - protein, 157 aa, Homo sapiens
MHMMVSKPEQWVKPMAVAGANQYTFHLEATENPGALIKDIRENGMKVGLAIKPGTSVEYLAPWANQIDMALVMTVEPGFGGQKFMEDMMPKVHWLRTQFPSLDIEVDGGVGPDTVHKCAEIGVQWRDLCSLQSLPAGFKRFSCLSLLSSWDYRQELT

SEQ ID NO: 854820 - protein, 212 aa, Homo sapiens
MASGCKIGPSILNSDLANLGAECLRMLDSGADYLHLDVMDGHFVPNITFGHPVVESLRKQLGQDPFFDMHMMVSKPEQWVKPMAVAGANQYTFHLEATENPGALIKDIRENGMKVGLAIKPGTSVEYLAPWANQIDMALVMTVEPGFGGQKFMEDMMPKVHWLRTQFPSLDIEVDGGVGPDTVHKCAECDVSTSRFLYNCHTFLLDIYLSKA

SEQ ID NO: 854821 - protein, 228 aa, Homo sapiens; identical to SEQ ID NO: 854811

SEQ ID NO: 854822 - protein, 246 aa, Homo sapiens; identical to SEQ ID NO: 854818

SEQ ID NO: 854823 - protein, 228 aa, Homo sapiens; identical to SEQ ID NO: 854811

SEQ ID NO: 854824 - protein, 228 aa, Homo sapiens; identical to SEQ ID NO: 854811

SEQ ID NO: 854825 - protein, 228 aa, Homo sapiens; identical to SEQ ID NO: 854811

SEQ ID NO: 854826 - protein, 234 aa, Homo sapiens
MASGCKIGPSILNSDLANLGAECLRMLDSGADYLHLDVMDGFCLSCRHFVPNITFGHPVVESLRKQLGQDPFFDMHMMVSKPEQWVKPMAVAGANQYTFHLEATENPGALIKDIRENGMKVGLAIKPGTSVEYLAPWANQIDMALVMTVEPGFGGQKFMEDMMPKVHWLRTQFPSLDIEVDGGVGPDTVHKCAEAGANMIVSGSAIMRSEDPRSVINLLRNVCSEAAQKRSLDR

SEQ ID NO: 854827 - protein, 190 aa, Homo sapiens
MASGCKIGPSILNSDLANLGAECLRMLDSGADYLHLDVMDGHFVPNITFGHPVVESLRKQLGQDPFFDMHMMVSKPEQWVKPMAVAGANQYTFHLEATENPGALIKDIRENGMKVGLAIKPGTSVEYLAPWANQIDMALVMTVEPGFGGQKFMEDMMPKELLISSCIYLGSLVEDPVPIFGYRGRWWSRS

SEQ ID NO: 854828 - protein, 178 aa, Homo sapiens
MHMMVSKPEQWVKPMAVAGANQYTFHLEATENPGALIKDIRENGMKSCSVTQAEVQWHSQGPLQVGLAIKPGTSVEYLAPWANQIDMALVMTVEPGFGGQKFMEDMMPKVHWLRTQFPSLDIEVDGGVGPDTVHKCAEAGANMIVSGSAIMRSEDPRSVINLLRNVCSEAAQKRSLDR

SEQ ID NO: 854829 - protein, 178 aa, Homo sapiens; identical to SEQ ID NO: 854828

SEQ ID NO: 854830 - protein, 228 aa, Homo sapiens; identical to SEQ ID NO: 854811

SEQ ID NO: 854831 - protein, 706 aa, Homo sapiens
GGVAPGSGVRAGPRAAAAAAATVRAGLHRASCSTLATAPGAPAAGAAPAMGEEDYYLELCERPVQFEKANPVNCVFFDEANKQVFAVRSGGATGVVVKGPDDRNPISFRMDDKGEVKCIKFSLENKILAVQRTSKTVDFCNFIPDNSQLEYTQECKTKNANILGFCWTSSTEIVFITDQGIEFYQVLPEKRSLKLLKSHNLNVNWYMYCPESAVILLSTTVLENVLQPFHFRAGTMSKLPKFEIELPAAPKSTKPSLSERDIAMATIYGQLYVLFLRHHSRTSNSTGAEVVLYHLPREGACKKMHILKLNRTGKFALNVVDNLVVVHHQDTETSVIFDIKLRGEFDGSVTFHHPVLPARSIQPYQIPITGPAAVTSQSPVPCKLYSSSWIVFQPDIIISASQGYLWNLQVKLEPIVNLLPDKGRLMDFLLQRKECKMVILSVCSQMLSESDRASLPVIATVFDKLNHEYKKYLDAEQSYAMAVEAGQSRSSPLLKRPVRTQAVLDQSDVYTHVLSAFVEKKEMPHKFVIAVLMEYIRSLNQFQIAVQHYLHELVIKTLVQHNLFYMLHQFLQYHVLSDSKPLACLLLSLESFYPPAHQLSLDMLKRLSTANDEIVEVLLSKHQVLAALRFIRGIGGHDNISARKFLDAAKQTEDNMLFYTIFRFFEQRNQRLRGSPNFTPGEHCEEHVAFFKQIFGDQALMRPTTF

SEQ ID NO: 854832 - protein, 736 aa, Homo sapiens
GGVAPGSGVRAGPRAAAAAAATVRAGLHRASCSTLATAPGAPAAGAAPAMGEEDYYLELCERPVQFEKANPVNCVFFDEANKQVFAVRSGGATGVVVKGPDDRNPISFRMDDKGEVKCIKFSLENKILAVQRTSKTVDFCNFIPDNSQLEYTQECKTKNANILGFCWTSSTEIVFITDQGIEFYQVLPEKRSLKLLKSHNLNVNWYMYCPESAVILLSTTVLENVLQPFHFRAGTMSKLPKFEIELPAAPKSTKPSLSERDIAMATIYGQLYVLFLRHHSRTSNSTGAEVVLYHLPRYISCFVFPLSLILKCELQLVDLFFAFYPTGEGACKKMHILKLNRTGKFALNVVDNLVVVHHQDTETSVIFDIKLRGEFDGSVTFHHPVLPARSIQPYQIPITGPAAVTSQSPVPCKLYSSSWIVFQPDIIISASQGYLWNLQVKLEPIVNLLPDKGRLMDFLLQRKECKMVILSVCSQMLSESDRASLPVIATVFDKLNHEYKKYLDAEQSYAMAVEAGQSRSSPLLKRPVRTQAVLDQSDVYTHVLSAFVEKKEMPHKFVIAVLMEYIRSLNQFQIAVQHYLHELVIKTLVQHNLFYMLHQFLQYHVLSDSKPLACLLLSLESFYPPAHQLSLDMLKRLSTANDEIVEVLLSKHQVLAALRFIRGIGGHDNISARKFLDAAKQTEDNMLFYTIFRFFEQRNQRLRGSPNFTPGEHCEEHVAFFKQIFGDQALMRPTTF

SEQ ID NO: 854833 - protein, 706 aa, Homo sapiens; identical to SEQ ID NO: 854831

SEQ ID NO: 854834 - protein, 417 aa, Homo sapiens
GGVAPGSGVRAGPRAAAAAAATVRAGLHRASCSTLATAPGAPAAGAAPAMGEEDYYLELCERPVQFEKANPVNCVFFDEANKQVFAVRSGGATGVVVKGPDDRNPISFRMDDKGEVKCIKFSLENKILAVQRTSKTVDFCNFIPDNSQLEYTQECKTKNANILGFCWTSSTEIVFITDQGIEFYQVLPEKRSLKLLKSHNLNVNWYMYCPESAVILLSTTVLENVLQPFHFRAGTMSKLPKFEIELPAAPKSTKPSLSERDIAMATIYGQLYVLFLRHHSRTSNSTGAEVVLYHLPREGACKKMHILKLNRTGKFALNVVDNLVVVHHQDTETSVIFDIKLRGEFDGSVTFHHPVLPARSIQPYQIPITGPAAVTSQSPVPCKLYSSSWIVFQPDIIISASQGRSAGTVVVLQHGAC

SEQ ID NO: 854835 - protein, 734 aa, Homo sapiens
GGVAPGSGVRAGPRAAAAAAATVRAGLHRASCSTLATAPGAPAAGAAPAMGEEDYYLELCERPVQFEKANPVNCVFFDEANKQVFAVRSGGATGVVVKGPDDRNPISFRMDDKGEVKCIKFSLENKILAVQRTSKTVDFCNFIPDNSQLEYTQECKTKNANILGFCWTSSTEIVFITDQGIEFYQVLPEKRSLKLLKSHNLNVNWYMYCPESAVILLSTTVLENVLQPFHFRAGTMSKLPKFEIELPAAPKSTKPSLSERDIAMATIYGQLYVLFLRHHSRTSNSTGAEVVLYHLPREGACKKMHILKLNRTGKFALNVVDNLVVVHHQDTETSVIFDIKLRGEFDGSVTFHHPVLPARSIQPYQIPITGPAAVTSQSPVPCKLYSSSWIVFQPDIIISASQGRSAGTVVVLQHGAVLTLDPSCSQGRFQGYLWNLQVKLEPIVNLLPDKGRLMDFLLQRKECKMVILSVCSQMLSESDRASLPVIATVFDKLNHEYKKYLDAEQSYAMAVEAGQSRSSPLLKRPVRTQAVLDQSDVYTHVLSAFVEKKEMPHKFVIAVLMEYIRSLNQFQIAVQHYLHELVIKTLVQHNLFYMLHQFLQYHVLSDSKPLACLLLSLESFYPPAHQLSLDMLKRLSTANDEIVEVLLSKHQVLAALRFIRGIGGHDNISARKFLDAAKQTEDNMLFYTIFRFFEQRNQRLRGSPNFTPGEHCEEHVAFFKQIFGDQALMRPTTF

SEQ ID NO: 854836 - protein, 531 aa, Homo sapiens
GGVAPGSGVRAGPRAAAAAAATVRAGLHRASCSTLATAPGAPAAGAAPAMGEEDYYLELCERPVQFEKANPVNCVFFDEANKQVFAVRSGGATGVVVKGPDDRNPISFRMDDKGEVKCIKFSLENKILAVQRTSKTVDFCNFIPDNSQLEYTQECKTKNANILGFCWTSSTEIVFITDQGIEFYQVLPEKRSLKLLKSHNLNVNWYMYCPESAVILLSTTVLENVLQPFHFRAGTMSKLPKFEIELPAAPKSTKPSLSERDIAMATIYGQLYVLFLRHHSRTSNSTGAEVVLYHLPREGACKKMHILKLNRTGKFALNVVDNLVVVHHQDTETSVIFDIKLRGEFDGSVTFHHPVLPARSIQPYQIPITGPAAVTSQSPVPCKLYSSSWIVFQPDIIISASQGYLWNLQVKLEPIVNLLPDKGRLMDFLLQRKECKMVILSVCSQMLSESDRASLPVIATVFDKLNHEYKKYLDAEQSYAMAVEAGQSRSSPLLKRPVRTQAVLDQSDVYTHVLSAFVEKKVGRSFPPLLD

SEQ ID NO: 854837 - protein, 417 aa, Homo sapiens; identical to SEQ ID NO: 854834

SEQ ID NO: 854838 - protein, 738 aa, Homo sapiens
GGVAPGSGVRAGPRAAAAAAATVRAGLHRASCSTLATAPGAPAAGAAPAMGEEDYYLELCERPVQFEKANPVNCVFFDEANKQVFAVRSGGATGVVVKGPDDRNPISFRMDDKGEVKCIKFSLENKILAVQRTSKTVDFCNFIPDNSQLEYTQECKTKNANILGFCWTSSTEIVFITDQGIEFYQVLPEKRSLKLLKSHNLNVNWYMYCPESAVILLSTTVLENVLQPFHFRAGTMSKLPKFEIELPAAPKSTKPSLSERDIAMATIYGQLYVLFLRHHSRTSNSTGAEVVLYHLPREGACKKMHILKLNRTGKFALNVVDNLVVVHHQDTETSVIFDIKLRGEFDGSVTFHHPVLPARSIQPYQIPITGPAAVTSQSPVPCKLYSSSWIVFQPDIIISASQGYLWNLQVKLEPIVNLLPDKGRLMDFLLQRKECKMVILSVCSQMLSESDRASLPVIATVFDKLNHEYKKYLDAEQSYAMAVEAGQSRSSPLLKRPVRTQAVLDQSDVYTHVLSAFVEKKEMPHKFVIAVLMEYIRSLNQFQIAVQHYLHELVIKTLVQHNLFYMLHQFLQYHVLSDSKPLVCIARFLLPLWLKMENFNRYLSNRSGSKNVFQACLLLSLESFYPPAHQLSLDMLKRLSTANDEIVEVLLSKHQVLAALRFIRGIGGHDNISARKFLDAAKQTEDNMLFYTIFRFFEQRNQRLRGSPNFTPGEHCEEHVAFFKQIFGDQALMRPTTF

SEQ ID NO: 854839 - protein, 605 aa, Homo sapiens
GGVAPGSGVRAGPRAAAAAAATVRAGLHRASCSTLATAPGAPAAGAAPAMGEEDYYLELCERPVQFEKANPVNCVFFDEANKQVFAVRSGGATGVVVKGPDDRNPISFRMDDKGEVKCIKFSLENKILAVQRTSKTVDFCNFIPDNSQLEYTQECKTKNANILGFCWTSSTEIVFITDQGIEFYQVLPEKRSLKLLKSHNLNVNWYMYCPESAVILLSTTVLENVLQPFHFRAGTMSKLPKFEIELPAAPKSTKPSLSERDIAMATIYGQLYVLFLRHHSRTSNSTGAEVVLYHLPREGACKKMHILKLNRTGKFALNVVDNLVVVHHQDTETSVIFDIKLRGEFDGSVTFHHPVLPARSIQPYQIPITGPAAVTSQSPVPCKLYSSSWIVFQPDIIISASQGYLWNLQVKLEPIVNLLPDKGRLMDFLLQRKECKMVILSVCSQMLSESDRASLPVIATVFDKLNHEYKKYLDAEQSYAMAVEAGQSRSSPLLKRPVRTQAVLDQSDVYTHVLSAFVEKKEMPHKFVIAVLMEYIRSLNQFQIAVQHYLHELVIKTLVQHNLFYMLHQFLQYHVLSDSKPLVCIARFLLPLWLKMENFNRYLSN

SEQ ID NO: 854840 - protein, 617 aa, Homo sapiens
GGVAPGSGVRAGPRAAAAAAATVRAGLHRASCSTLATAPGAPAAGAAPAMGEEDYYLELCERPVQFEKANPVNCVFFDEANKQVFAVRSGGATGVVVKGPDDRNPISFRMDDKGEVKCIKFSLENKILAVQRTSKTVDFCNFIPDNSQLEYTQECKTKNANILGFCWTSSTEIVFITDQGIEFYQVLPEKRSLKLLKSHNLNVNWYMYCPESAVILLSTTVLENVLQPFHFRAGTMSKLPKFEIELPAAPKSTKPSLSERDIAMATIYGQLYVLFLRHHSRTSNSTGAEVVLYHLPREGACKKMHILKLNRTGKFALNVVDNLVVVHHQDTETSVIFDIKLRGEFDGSVTFHHPVLPARSIQPYQIPITGPAAVTSQSPVPCKLYSSSWIVFQPDIIISASQGYLWNLQVKLEPIVNLLPDKGRLMDFLLQRKECKMVILSVCSQMLSESDRASLPVIATVFDKLNHEYKKYLDAEQSYAMAVEAGQSRSSPLLKRPVRTQAVLDQSDVYTHVLSAFVEKKEMPHKFVIAVLMEYIRSLNQFQIAVQHYLHELVIKTLVQHNLFYMLHQFLQYHVLSDSKPLACLLLSLESFYPPAHQLSLDMLKVTLMCEVLDYGN

SEQ ID NO: 854841 - protein, 531 aa, Homo sapiens; identical to SEQ ID NO: 854836

SEQ ID NO: 854842 - protein, 343 aa, Homo sapiens
MFSQFVGPAAVTSQSPVPCKLYSSSWIVFQPDIIISASQGYLWNLQVKLEPIVNLLPDKGRLMDFLLQRKECKMVILSVCSQMLSESDRASLPVIATVFDKLNHEYKKYLDAEQSYAMAVEAGQSRSSPLLKRPVRTQAVLDQSDVYTHVLSAFVEKKEMPHKFVIAVLMEYIRSLNQFQIAVQHYLHELVIKTLVQHNLFYMLHQFLQYHVLSDSKPLACLLLSLESFYPPAHQLSLDMLKRLSTANDEIVEVLLSKHQVLAALRFIRGIGGHDNISARKFLDAAKQTEDNMLFYTIFRFFEQRNQRLRGSPNFTPGEHCEEHVAFFKQIFGDQALMRPTTF

SEQ ID NO: 854843 - protein, 660 aa, Homo sapiens
GGVAPGSGVRAGPRAAAAAAATVRAGLHRASCSTLATAPGAPAAGAAPAMGEEDYYLELCERPVQFEKANPVNCVFFDEANKQVFAVRSGGATGVVVKGPDDRNPISFRMDDKGEVKCIKFSLENKILAVQRTSKTVDFCNFIPDNSQLEYTQECKTKNANILGFCWTSSTEIVFITDQGIEFYQVLPEKRSLKLLKSHNLNVNWYMYCPESAVILLSTTVLENVLQPFHFRAGTMSKLPKFEIELPAAPKSTKPSLSERDIAMATIYGQLYVLFLRHHSRTSNSTGAEVVLYHLPREGACKKMHILKLNRTGKFALNVVDNLVVVHHQDTETSVIFDIKLRGEFDGSVTFHHPVLPARSIQPYQIPITGPAAVTSQSPVPCKLYSSSWIVFQPDIIISASQGYLWNLQVKLEPIVNLLPDKGRLMDFLLQRKECKMVILSVCSQMLSESDRASLPVIATVFDKLNHEYKKYLDAEQSYAMAVEAGQSRSSPLLKRPVRTQAVLDQSDVYTHVLSAFVEKKEMPHKFVIAVLMEYIRSLNQFQIAVQHYLHELVIKTLVQHNLFYMLHQFLQYHVLSDSKPLACLLLSLESFYPPAHQLSLDMLKRLSTANDEIVEVLLSKHQVLGLPGQVDLTISGRLVVCRAHGRGKRRAISRSNNKK

SEQ ID NO: 854844 - protein, 531 aa, Homo sapiens; identical to SEQ ID NO: 854836

SEQ ID NO: 854845 - protein, 184 aa, Homo sapiens [sequence omitted]

SEQ ID NO: 854846 - protein, 500 aa, Homo sapiens
GGVAPGSGVRAGPRAAAAAAATVRAGLHRASCSTLATAPGAPAAGAAPAMGEEDYYLELCERPVQFEKANPVNCVFFDEANKQVFAVRSGGATGVVVKGPDDRNPISFRMDDKGEVKCIKFSLENKILAVQRTSKTVDFCNFIPDNSQLEYTQECKTKNANILGFCWTSSTEIVFITDQGIEFYQVLPEKRSLKLLKSHNLNVNWYMYCPESAVILLSTTVLENVLQPFHFRAGTMSKLPKFEIELPAAPKSTKPSLSERDIAMATIYGQLYVLFLRHHSRTSNSTGAEVVLYHLPREGACKKMHILKLNRTGKFALNVVDNLVVVHHQDTETSVIFDIKLRGEFDGSVTFHHPVLPARSIQPYQIPITGPAAVTSQSPVPCKLYSSSWIVFQPDIIISASQGYLWNLQVKLEPIVNLLPDKGRLMDFLLQRKECKMVILSVCSQMLSESDRASLPVIATVFDKLNHEYKKYLDAEQSYAMAVEAGQSRLSSQREILIES

SEQ ID NO: 854847 - protein, 500 aa, Homo sapiens
MYCPESAVILLSTTVLENVLQPFHFRAGTMSKLPKFEIELPAAPKSTKPSLSERDIAMATIYGQLYVLFLRHHSRTSNSTGAEVVLYHLPREGACKKMHILKLNRTGKFALNVVDNLVVVHHQDTETSVIFDIKLRGEFDGSVTFHHPVLPARSIQPYQIPITGPAAVTSQSPVPCKLYSSSWIVFQPDIIISASQGYLWNLQVKLEPIVNLLPDKGRLMDFLLQRKECKMVILSVCSQMLSESDRASLPVIATVFDKLNHEYKKYLDAEQSYAMAVEAGQSRSSPLLKRPVRTQAVLDQSDVYTHVLSAFVEKKEMPHKFVIAVLMEYIRSLNQFQIAVQHYLHELVIKTLVQHNLFYMLHQFLQYHVLSDSKPLACLLLSLESFYPPAHQLSLDMLKRLSTANDEIVEVLLSKHQVLAALRFIRGIGGHDNISARKFLDAAKQTEDNMLFYTIFRFFEQRNQRLRGSPNFTPGEHCEEHVAFFKQIFGDQALMRPTTF

SEQ ID NO: 854848 - protein, 485 aa, Homo sapiens
MSPGTGVAVLYFRLIKPKIISVIVNSLSFTPRLNHGEFQSALLLSTFYNYDLDDHIIVPLPYPGTGVEVVLYHLPREGACKKMHILKLNRTGKFALNVVDNLVVVHHQDTETSVIFDIKLRGEFDGSVTFHHPVLPARSIQPYQIPITGPAAVTSQSPVPCKLYSSSWIVFQPDIIISASQGYLWNLQVKLEPIVNLLPDKGRLMDFLLQRKECKMVILSVCSQMLSESDRASLPVIATVFDKLNHEYKKYLDAEQSYAMAVEAGQSRSSPLLKRPVRTQAVLDQSDVYTHVLSAFVEKKEMPHKFVIAVLMEYIRSLNQFQIAVQHYLHELVIKTLVQHNLFYMLHQFLQYHVLSDSKPLACLLLSLESFYPPAHQLSLDMLKRLSTANDEIVEVLLSKHQVLAALRFIRGIGGHDNISARKFLDAAKQTEDNMLFYTIFRFFEQRNQRLRGSPNFTPGEHCEEHVAFFKQIFGDQALMRPTTF

SEQ ID NO: 854849 - protein, 531 aa, Homo sapiens; identical to SEQ ID NO: 854836

SEQ ID NO: 854850 - protein, 658 aa, Homo sapiens
GGVAPGSGVRAGPRAAAAAAATVRAGLHRASCSTLATAPGAPAAGAAPAMGEEDYYLELCERPVQFEKANPVNCVFFDEANKQVFAVRSGGATGVVVKGPDDRNPISFRMDDKGEVKCIKFSLENKILAVQRTSKTVDFCNFIPDNSQLEYTQECKTKNANILGFCWTSSTEIVFITDQGIEFYQVLPEKRSLKLLKSHNLNVNWYMYCPESAVILLSTTVLENVLQPFHFRAGTMSKLPKFEIELPAAPKSTKPSLSERDIAMATIYGQLYVLFLRHHSRTSNSTGAEVVLYHLPREGACKKMHILKLNRTGKFALNVVDNLVVVHHQDTETSVIFDIKLRGEFDGSVTFHHPVLPARSIQPYQIPITGPAAVTSQSPVPCKLYSSSWIVFQPDIIISASQGYLWNLQVKLEPIVNLLPDKGRLMDFLLQRKECKMVILSVCSQMLSESDRASLPVIATVFDKLNHEYKKYLDAEQSYAMAVEAGQSRSSPLLKRPVRTQAVLDQSDVYTHVLSAFVEKKEMPHKFVIAVLMEYIRSLNQFQIAVQHYLHELVIKTLVQHNLFYMLHQFLQYHVLSDSKPLACLLLSLESFYPPAHQLSLDMLKMLQSRLKTTCFSIQYSAFLNSETSVCEGAPISHQGNTVKNMLLFSNRFLETKL

SEQ ID NO: 854851 - protein, 713 aa, Homo sapiens
GGVAPGSGVRAGPRAAAAAAATVRAGLHRASCSTLATAPGAPAAGAAPAMGEEDYYLELCERPVQFEKANPVNCVFFDEANKQVFAVRSGGATGVVVKGPDDRNPISFRMDDKGEVKCIKFSLENKILAVQRTSKTVDFCNFIPDNSQLEYTQECKTKNANILGFCWTSSTEIVFITDQGIEFYQVLPEKRSLKLLKSHNLNVNWYMYCPESAVILLSTTVLENVLQPFHFRAGTMSKLPKFEIELPAAPKSTKPSLSERDIAMATIYGQLYVLFLRHHSRTSNSTGAEVVLYHLPREGACKKMHILKLNRTGKFALNVVDNLVVVHHQDTETSVIFDIKLRGEFDGSVTFHHPVLPARSIQPYQIPITGPAAVTSQSPVPCKLYSSSWIVFQPDIIISASQGYLWNLQVKLEPIVNLLPDKGRLMDFLLQRKECKMVILSVCSQMLSESDRASLPVIATVFDKLNHEYKKYLDAEQSYAMAVEAGQSRSSPLLKRPVRTQAVLDQSDVYTHVLSAFVEKKEMPHKFVIAVLMEYIRSLNQFQIAVQHYLHELVIKTLVQHNLFYMLHQFLQYHVLSDSKPLACLLLSLESFYPPAHQLSLDMLKRLSTANDEIVEVLLSKHQVLAALRFIRGIGGHDNISARKFLDAAKQTEDNMLFYTIFRFFEQRNQRLRGSPNFTPGENAMKRLGVTIASKSSRGHWQLVGEDPGLAFL

SEQ ID NO: 854852 - protein, 531 aa, Homo sapiens; identical to SEQ ID NO: 854836

SEQ ID NO: 854853 - protein, 226 aa, Homo sapiens [sequence omitted]

SEQ ID NO: 854854 - protein, 184 aa, Homo sapiens [sequence omitted]

SEQ ID NO: 854855 - protein, 502 aa, Homo sapiens
GGVAPGSGVRAGPRAAAAAAATVRAGLHRASCSTLATAPGAPAAGAAPAMGEEDYYLELCERPVQFEKANPVNCVFFDEANKQVFAVRSGGATGVVVKGPDDRNPISFRMDDKGEVKCIKFSLENKILAVQRTSKTVDFCNFIPDNSQLEYTQECKTKNANILGFCWTSSTEIVFITDQGIEFYQVLPEKRSLKLLKSHNLNVNWYMYCPESAVILLSTTVLENVLQPFHFRAGTMSKLPKFEIELPAAPKSTKPSLSERDIAMATIYGQLYVLFLRHHSRTSNSTGAEVVLYHLPREGACKKMHILKLNRTGKFALNVVDNLVVVHHQDTETSVIFDIKLRGEFDGSVTFHHPVLPARSIQPYQIPITGPAAVTSQSPVPCKLYSSSWIVFQPDIIISASQGYLWNLQVKLEPIVNLLPDKGRLMDFLLQRKECKMVILSVCSQMLSESDRASLPVIATVFDKLNHEYKKYLDAEQSYAMVSYMEYDKGSSSPTPSRVFSK

SEQ ID NO: 854856 - protein, 411 aa, Homo sapiens
GGVAPGSGVRAGPRAAAAAAATVRAGLHRASCSTLATAPGAPAAGAAPAMGEEDYYLELCERPVQFEKANPVNCVFFDEANKQVFAVRSGGATGVVVKGPDDRNPISFRMDDKGEVKCIKFSLENKILAVQRTSKTVDFCNFIPDNSQLEYTQECKTKNANILGFCWTSSTEIVFITDQGIEFYQVLPEKRSLKLLKSHNLNVNWYMYCPESAVILLSTTVLENVLQPFHFRAGTMSKLPKFEIELPAAPKSTKPSLSERDIAMATIYGQLYVLFLRHHSRTSNSTGAEVVLYHLPREGACKKMHILKLNRTGKFALNVVDNLVVVHHQDTETSVIFDIKLRGEFDGSVTFHHPVLPARSIQPYQIPITGPAAVTSQSPVPCKLYSSSWIVFQPDIIISASQVPLEPPSET

SEQ ID NO: 854857 - protein, 188 aa, Homo sapiens [sequence omitted]

SEQ ID NO: 854858 - protein, 188 aa, Homo sapiens [sequence omitted]

SEQ ID NO: 854859 - protein, 188 aa, Homo sapiens [sequence omitted]

SEQ ID NO: 854860 - protein, 177 aa, Homo sapiens
MAASAFAGAVRAASGILRPLNILASSTYRNCVKNASLISALSTGRFSHIQTPVVSSTPRLTTSERNLTCGHTSVILNRMAPVLPSVLKLPVRSLTYFSARKGKRKTVKAVIDRFLRLHCGLWVRRKAGYKKKLWKKTPARKKRLREFVFCNKTQSKLLDKMTTSFWKRRNWHSPICR

SEQ ID NO: 854861 - protein, 188 aa, Homo sapiens [sequence omitted]

SEQ ID NO: 854862 - protein, 170 aa, Homo sapiens
MAASAFAGAVRAASGILRPLNILASSTYRNCVKNASLISALSTGRFSHIQTPVVSSTPRLTTSERNLTCGHTSVILNRMAPVLPSVLKLPVRSLTYFSARKGKRKTVKAVIDRFLRLHCGLWVRRKAGYKKKLWKKTPARKKRLREFVFCNKTQSKLLDKMTTSFWKRRN

SEQ ID NO: 854863 - protein, 1240 aa, Homo sapiens
MGVLDLSVRPVHPLQGVPRPCLPNPTVRNMVAGGPGVLEESCDHTSLLVRGTMGTVPSNGNVSAGRESGPWPKLGDHLARVLAWLRWTRVATRCPGPLERGALLLFLECPIAARMRRALREVFSYHRGVREGKGPGFEAAVTAGAEGAVPWVLITGCHSEGRCQVLNPHDSGRVGGVGIGFAVSLHALDSLAKGTSAPPQLPPWGFWASTPSPVYVPVIFGIITVVTKLPTSHSHEVGIPHEGPGVQCQHEVGEWHCLLMSYIEAMKSCGQGVQTLSWPLALVLSVKGTSRVDGRRLPPSLALSSLPQAMWRLSSVQAHLVLNLSVQGWSRDSVSPACLTQPSPLQCTTGPRARIWVARQIGPPLPGRSSFRGLIDVLWRAGPGLSFTWLSCLGEQQNRCWGPSRPRAVQPSWSCSSLELLRGVHSRAMWLWTGRPLCQQNLGRDEITMRLTSLETPTTEEETVSAPDIQLGKDAPEHWHSLPSKQPLPVGWQERQTEPAVKALSGEEGWPGGSTRRSACSSWDEPERRLLAAWLVAAITPLANPPTGRGSPSTSSSIMLLGSSEASQARENLVFGNNGGHFLPFSVPTQVGVFYHPVFLEVFFFLSQSLTLSPRLECNGAVSAHCNLCFPGSSDSPASASREAQDHPHRCRPSCPANFLFFFIEKESRYVAQAGFELLGSSDRSSRLYASQSTRIIGLSHCARPTILFLLEEFPCVEARAQRSWSSAQGPTRLRQGGSAAGGFFCSNPDSRGCEPQPWALSAWWCLHSQQGWPWGVLWSNFHGPEWDPEWLEPYAPASPAAASGAGGVGPSDYQELSEGQQVPLHWPVGSCVQGRGSWHVCLVRPCLQCQGASPLDGGRHHVLTSVQPHFTRRFGQHPIRGRAALTQRCAANRVPLRQAAVPRAFSFLPACYLQANRRPWVWDQENLPPPLAVGVPAGRLGLARRHRGVSRCREMIPGRAPEHSPGPAAAAGRSMLTAVRVSTPQAMMFNQVFPTCVSAKKPQNTLCTKGVFAQRKTTLRGFFRNAYTQLARTSCEIPAWKTTSRHRGKLCCAPALYQAASPTSPVVLGGHSCCTVPQACLSSGSQPSYQICQHPHSRLVGGESLRPSVTLSASPGQRAVAWLPRISFYGRPIRSWAGGTEGRPGSHCSVGRVAQPMRLASPTGEVPQHWPGSPHRKASVEEMKPRTMGTTATGCAKLRKLVGGAHKLFCFLVCLFVFSFKRPGTVGVSLCHPGWSAVA

SEQ ID NO: 854864 - protein, 120 aa, Homo sapiens
MSRFPAQVGWRQRWTLAWPSRQAVHTAPFRVALLPAAAAPAFRQMMTKLLSCWGKEAFPLGCFSLLAPTHWQTRRQGAQELQSLAGFAGHAQGRAMVLALLSNHGVSPSLPLEIPRDFIS

SEQ ID NO: 854865 - protein, 327 aa, Homo sapiens
MTAPCPPPPPDPQFVLRGTQSPVHALHFCEGAQAQGRPLLFSGSQSGLVHIWSLQTRRAVTTLDGHGGQCVTWLQTLPQGRQLLSQGRDLKLCLWDLAEGRSAVVDSVCLESVGFCRSSILAGGQPRWTLAVPGRGSDEVQILEMPSKTSVCALKPKADAKLGMPMCLRLWQADCSSRPLLLAGYEDGSVVLWDVSEQKVCSRIACHEEPVMDLDFDSQKARGISGSAGKALAVWSLDWQQALQVRGTHELTNPGIAEVTIRPDRKILATAGWDHRIRVFHWRTMQPLAVLAFHSAAVQCVAFTADGLLAAGSKDQRISLWSLYPRA

SEQ ID NO: 854866 - protein, 120 aa, Homo sapiens; identical to SEQ ID NO: 854864

SEQ ID NO: 854867 - protein, 374 aa, Homo sapiens
PISFSTFKVAPGLSPSEGGPSHGLWLRIPGPSSRAIRVASGNCILPSMTAPCPPPPPDPQFVLRGTQSPVHALHFCEGAQAQGRPLLFSGSQSGLVHIWSLQTRRAVTTLDGHGGQCVTWLQTLPQGRQLLSQGRDLKLCLWDLAEGRSAVVDSVCLESVGFCRSSILAGGQPRWTLAVPGRGSDEVQILEMPSKTSVCALKPKADAKLGMPMCLRLWQADCSSRPLLLAGYEDGSVVLWDVSEQKVCSRIACHEEPVMDLDFDSQKARGISGSAGKALAVWSLDWQQALQVRGTHELTNPGIAEVTIRPDRKILATAGWDHRIRVFHWRTMQPLAVLAFHSAAVQCVAFTADGLLAAGSKDQRISLWSLYPRA

SEQ ID NO: 854868 - protein, 327 aa, Homo sapiens; identical to SEQ ID NO: 854865

SEQ ID NO: 854869 - protein, 136 aa, Homo sapiens
CAGSYTAAARTLGAWLRDVIGLWTLRGAPRSRRSRLRQEGGAWTLALRGRPVPRSVATDPRTLFAGDSRSLRTGKAQRSSNKGARQIKLLPCRISQHEPDCAAVTKISNSAAATVGTAYFLLAPVGHRGWGLSDLC

SEQ ID NO: 854870 - protein, 212 aa, Homo sapiens
MTAPCPPPPPDPQFVLRGTQSPVHALHFCEGAQAQGRPLLFSGSQSGLVHIWSLQTRRAVTTLDGHGGQCVTWLQTLPQGRQLLSQGRDLKLCLWDLAEGRSAVVDSVCLESVGFCRSSILAGGQPRWTLAVPGRGSDEVQILEMPSKTSVCALKPKADAKLGMPMCLRLWQADCSSRPLLLAGYEDGSVVLWDVSEQKVCSRIACHEEPGL

SEQ ID NO: 854871 - protein, 120 aa, Homo sapiens; identical to SEQ ID NO: 854864

SEQ ID NO: 854872 - protein, 279 aa, Homo sapiens
MTAPCPPPPPDPQFVLRGTQSPVHALHFCEGAQAQGRPLLFSGSQSGLVHIWSLQTRRAVTTLDGHGGQCVTWLQTLPQGRQLLSQGRDLKLCLWDLAEGRSAVVDSVCLESVGFCRSSILAGGQPRWTLAVPGRGSDEVQILEMPSKTSVCALKPKADAKLGMPMCLRLWQADCSSRPLLLAGYEDGSVVLWDVSEQKVCSRIACHEEPVMDLDFDSQKARGISGSAGKALAVWSWPRAPRISGSASGHSTHAHDSPTPFPGDEEGGQGGGHQAPALA

SEQ ID NO: 854873 - protein, 143 aa, Homo sapiens
MKAGCSIVEKPEGGGGYQFPDWAYKTESSPGSRQIQLWHFILELLQKEEFRHVIAWQQGEYGEFVIKDPDEVARLWGRRKCKPQMNYDKLSRALRYYYNKRILHKTKGKRFTYKFNFNKLVMPNYPFINIRSSGKIQTLLVGN

SEQ ID NO: 854874 - protein, 104 aa, Homo sapiens
MKAGCSIVEKPEGGGGYQFPDWAYKTESSPGSRQIQLWHFILELLQKEEFRHVIAWQQGEYGEFVIKDPDEVARLWGRRKCKPQMNYDKLSRALREGKGFPNLC

SEQ ID NO: 854875 - protein, 348 aa, Homo sapiens
MKAGCSIVEKPEGGGGYQFPDWAYKTESSPGSRQIQLWHFILELLQKEEFRHVIAWQQGEYGEFVIKDPDEVARLWGRRKCKPQMNYDKLSRALRYYYNKRILHKTKGKRFTYKFNFNKLVMPNYPFINIRSSGVVPQSAPPVPTASSRFHFPPLDTHSPTNDVQPGRFSASSLTASGQESSNGTDRKTELSELEDGSAADWRRGVDPVSSRNAIGGGGIGHQKRKPDIMLPLFARPGMYPDPHSPFAVSPIPGRGGVLNVPISPALSLTPTIFSYSPSPGLSPFTSSSCFSFNPEEMKHYLHSQACSVFNYHLSPRTFPRYPGLMVPPLQCQMHPEESTQFSIKLQP

SEQ ID NO: 854876 - protein, 143 aa, Homo sapiens; identical to SEQ ID NO: 854873

SEQ ID NO: 854877 - protein, 122 aa, Homo sapiens
LSGPARAPRGWASCPGRREFGAVPYAARRNPVPATTAACSPPRLQSPDARESGARRGLTLGGRRLSGLTAVGAHPAAPEGPLEAGLLLCRGRPHPGRGAAGRGGPAAIPTPCQRRTQLLNIG

SEQ ID NO: 854878 - protein, 122 aa, Homo sapiens; identical to SEQ ID NO: 854877

SEQ ID NO: 854879 - protein, 122 aa, Homo sapiens; identical to SEQ ID NO: 854877

SEQ ID NO: 854880 - protein, 129 aa, Homo sapiens
MQDYNKDDMSYRRISAVEPKTALPFNRFLPNKSRQPSYVPAPLRKKKPDKHEDNRRSWASPVYTEADGTFSRSKSMSDVSAEDVQNLRQLRYEEMQKIKSQLKEQDQKWQDDLAKWKDRRKSYTSDLQK

SEQ ID NO: 854881 - protein, 129 aa, Homo sapiens; identical to SEQ ID NO: 854880

SEQ ID NO: 854882 - protein, 129 aa, Homo sapiens; identical to SEQ ID NO: 854880

SEQ ID NO: 854883 - protein, 236 aa, Homo sapiens
SQRSQKQCMPGHKIARLCMLWRTERLYKPYVFFFKYTYAWVLLLPLLLTDNINVFLKACEQIGLKEAQLFHPGDLQDLSNRVTVKLDSLVSNVNIELLNALRYHMVGRRVLTDELKHGMTLTSMYQNSNIQIHHYPNGIVTVNCARLLKGRHHATNGVVHLIDKVISTITNNIQQIIEIEDTFETLRAAVAASGLNTMLEGNGQYTLLARPMRPLEKIPSESLNRILGDQKALRDC

SEQ ID NO: 854884 - protein, 255 aa, Homo sapiens
AALDPDLENDDFFVRKTGAFHANPYVLRAFEDFRKFSEQDDSVERDIILQCREGELVLPDLEKDDMIVRRIPAQKKEVPLSGAPDRYHPVPFPEPWTLPPEIQAKFLCVLERTCPSKEKSNSCRILVPSYRQKKDDMLTRKIQSWKLGTTVPPISFTPGPCSEADLKRWEAIREASRLRHKKRLMVERLFQKIYGENGSKSMSDVSAEDVQNLRQLRYEEMQKIKSQLKEQDQKWQDDLAKWKDRRKSYTSDLQK

SEQ ID NO: 854885 - protein, 472 aa, Homo sapiens
NGYVRGWCRALPLGTRFASRVLPDCPGPRGPWVAFRSLEKARSSRSCRFETLTNCRAQQRELEPRRLRSRSGSRSCGRPACPPRPWGPDARGQPLPSTHPESLSPSLVLAMEGLEEAEANCSVAFAEAQRWVEAVTEKNFETKDFRASLENGVLLCDLINKLKPGVIKKINRLSTPIAGLDNINVFLKACEQIGLKEAQLFHPGDLQDLSNRVTVKQEETDRRVKNVLITLYWLGRKAQSNPYYNGPHLNLKAFENLLGQALTKALEDSSFLKRSGRDSGYGDIWCPERGEFLAPPRHHKREDSFESLDSLGSRSLTSCSSDITLRGGREGFESDTDSEFTFKMQDYNKDDMSYRRISAVEPKTALPFNRFLPNKSRQPSYVPAPLRKKKPDKHEDNRRSWASPVYTEADGTFSRSKSMSDVSAEDVQNLRQLRYEEMQKIKSQLKEQDQKWQDDLAKWKDRRKSYTSDLQK

SEQ ID NO: 854886 - protein, 139 aa, Homo sapiens
MQDYNKDDMSYRRISAVEPKTALPFNRFLPNKSRQPSYVPAPLRKKKPDKHEDNRRSWASPVYTEADGTFSRLFQKIYGENGSKSMSDVSAEDVQNLRQLRYEEMQKIKSQLKEQDQKWQDDLAKWKDRRKSYTSDLQK

SEQ ID NO: 854887 - protein, 106 aa, Homo sapiens
PPEIQAKFLCVLERTCPSKEKSNSCRILVPSYRQKKDDMLTRKIQSWKLGTTVPPISFTPGPCSEADLKRWEAIREASRLRHKKRLMVERSECVSARILLVMDGLV

SEQ ID NO: 854888 - protein, 442 aa, Homo sapiens
MAGAATGSRTPGRSELVEGCGWRCPEHGDRVAELFCRRCRRCVCALCPVLGAHRGHPVGLALEAAVHVQKLSQECLKQLAIKKQQHIDNITQIEDATEKLKANAESSKTWLKGKFTELRLLLDEEEALAKKFIDKNTQLTLQVYREQADSCREQLDIMNDLSNRVWSISQEPDPVQRLQAYTATEQEMQQQMSLGELCHPVPLSFEPVKSFFKGLVEAVESTLQTPLDIRLKESINCQLSDPSSTKPGTLLKTSPSPERSLLLKYARTPTLDPDTMHARLRLSADRLTVRCGLLGSLGPVPVLRFDALWQVLARDCFATGRHYWEVDVQEAGAGWWVGAAYASLRRRGASAAARLGCNRQSWCLKRYDLEYWAFHDGQRSRLRPRDDLDRLGVFLDYEAGVLAFYDVTGGMSHLHTFRATFQEPLYPALRLWEGAISIPRLP

SEQ ID NO: 854889 - protein, 442 aa, Homo sapiens; identical to SEQ ID NO: 854888

SEQ ID NO: 854890 - protein, 442 aa, Homo sapiens; identical to SEQ ID NO: 854888

SEQ ID NO: 854891 - protein, 442 aa, Homo sapiens; identical to SEQ ID NO: 854888

SEQ ID NO: 854892 - protein, 442 aa, Homo sapiens; identical to SEQ ID NO: 854888

SEQ ID NO: 854893 - protein, 442 aa, Homo sapiens; identical to SEQ ID NO: 854888

SEQ ID NO: 854894 - protein, 442 aa, Homo sapiens; identical to SEQ ID NO: 854888

SEQ ID NO: 854895 - protein, 442 aa, Homo sapiens; identical to SEQ ID NO: 854888

SEQ ID NO: 854896 - protein, 249 aa, Homo sapiens
MAGAATGSRTPGRSELVEGCGWRCPEHGDRVAELFCRRCRRCVCALCPVLGAHRGHPVGLALEAAVHVQKLSQECLKQLAIKKQQHIDNITQIEDATEKLKANAESSKTWLKGKFTELRLLLDEEEALAKKFIDKNTQLTLQVYREQADSCREQLDIMNDLSNRVWSISQEPDPVQRLQAYTATEQEMQQQMSLGELCHPVPLSFEPVKSFFKGLVEAVESTLQTPLDIRLKETFPDQSRLQCFEGFLS

SEQ ID NO: 854897 - protein, 275 aa, Homo sapiens
RYWNSVIKQEAHPLLAGSLGASHFWWDHLPAWAGRGSTLLVGGCSEARRCSRRAVILLGVGRPAWSRPAHGRGFGFPWEPRPVSRGAGGGGDEWRARRPGAGPLGGRSLSRDAAGAARSMATAWLSSSVAAAAAACARFARCWARTVATLWAWRWRQRCTCRWGRWGRGSPRGSWGSQPRHNGRGGGVPGRGQWRVTTWKPKVPQRASKRSTESSEREPETQGRAKASQSHQLSFRKGGFRSERLGAQAGTQMSLTVSTMADPPHCHWAGRQSAF

SEQ ID NO: 854898 - protein, 392 aa, Homo sapiens
MTLGKLPHLQMPPLEKNTRKLSQECLKQLAIKKQQHIDNITQIEDATEKLKANAESSKTWLKGKFTELRLLLDEEEALAKKFIDKNTQLTLQVYREQADSCREQLDIMNDLSNRVWSISQEPDPVQRLQAYTATEQEMQQQMSLGELCHPVPLSFEPVKSFFKGLVEAVESTLQTPLDIRLKESINCQLSDPSSTKPGTLLKTSPSPERSLLLKYARTPTLDPDTMHARLRLSADRLTVRCGLLGSLGPVPVLRFDALWQVLARDCFATGRHYWEVDVQEAGAGWWVGAAYASLRRRGASAAARLGCNRQSWCLKRYDLEYWAFHDGQRSRLRPRDDLDRLGVFLDYEAGVLAFYDVTGGMSHLHTFRATFQEPLYPALRLWEGAISIPRLP

SEQ ID NO: 854899 - protein, 440 aa, Homo sapiens
RYWNSVIKQEAHPLLAGSLGASHFWWDHLPAWAGRGSTLLVGGCSEARRCSRRAVILLGVGRPAWSRPAHGRGFGFPWEPRPVSRGAGGGGDEWRARRPGAGPLGGRSLSRDAAGAARSMATAWLSSSVAAAAAACARFARCWARTVATLWAWRWRQRCTCRVWSISQEPDPVQRLQAYTATEQEMQQQMSLGELCHPVPLSFEPVKSFFKGLVEAVESTLQTPLDIRLKESINCQLSDPSSTKPGTLLKTSPSPERSLLLKYARTPTLDPDTMHARLRLSADRLTVRCGLLGSLGPVPVLRFDALWQVLARDCFATGRHYWEVDVQEAGAGWWVGAAYASLRRRGASAAARLGCNRQSWCLKRYDLEYWAFHDGQRSRLRPRDDLDRLGVFLDYEAGVLAFYDVTGGMSHLHTFRATFQEPLYPALRLWEGAISIPRLP

SEQ ID NO: 854900 - protein, 476 aa, Homo sapiens
MAGAATGSRTPGRSELVEGCGWRCPEHGDRVAELFCRRCRRCVCALCPVLGAHRGHPVGLALEAAVHVQKLSQECLKQLAIKKQQHIDNITQIEDATEKLKANAESSKTWLKGKFTELRLLLDEEEALAKKFIDKNTQLTLQVYREQADSCREQLDIMNDLSNRVWSISQEPDPVQRLQAYTATEQEMQQQMSLGELCHPVPLSFEPVKSFFKGLVEAVESTLQTPLDIRLKESINCQLSDPSSTKPGTLLKTSPSPERSLLLKYQEMEISTPQKSSSCAFLFTIPKGDATLQTSRTIDARTPTLDPDTMHARLRLSADRLTVRCGLLGSLGPVPVLRFDALWQVLARDCFATGRHYWEVDVQEAGAGWWVGAAYASLRRRGASAAARLGCNRQSWCLKRYDLEYWAFHDGQRSRLRPRDDLDRLGVFLDYEAGVLAFYDVTGGMSHLHTFRATFQEPLYPALRLWEGAISIPRLP

SEQ ID NO: 854901 - protein, 442 aa, Homo sapiens; identical to SEQ ID NO: 854888

SEQ ID NO: 854902 - protein, 442 aa, Homo sapiens; identical to SEQ ID NO: 854888

SEQ ID NO: 854903 - protein, 442 aa, Homo sapiens; identical to SEQ ID NO: 854888

SEQ ID NO: 854904 - protein, 422 aa, Homo sapiens
MTVFFKTLRNHWKKTTAGLCLLTWGGHWLYGKHCDNLLRRAACQEAQVFGNQLIPPNAQVKKATVFLNPAACKGKARTLFEKNAAPILHLSGMDVTIVKTDYEGQAKKLLELMENTDVIIVAGGDGTLQEVVTGVLRRTDEATFSKIPIGFIPLGETSSLSHTLFAESGNKVQHITDATLAIVKGETVPLDVLQIKGEKEQPVFAMTGLRWGSFRDAGVKVSKYWYLGPLKIKAAHFFSTLKEWPQTHQASISYTGPTERPPNEPEETPVQRPSLYRRILRRLASYWAQPQDALSQEVSPEVWKDVQLSTIELSITTRNNQLDPTSKEDFLNICIEPDTISKGDFITIGSRKVRNPKLHVEGTECLQASQCTLLIPEGAGGSFSIDSEEYEAMPVEVKLLPRKLQFFCDPRKREQMLTSPTQ

SEQ ID NO: 854905 - protein, 422 aa, Homo sapiens; identical to SEQ ID NO: 854904

SEQ ID NO: 854906 - protein, 422 aa, Homo sapiens; identical to SEQ ID NO: 854904

SEQ ID NO: 854907 - protein, 214 aa, Homo sapiens
MTVFFKTLRNHWKKTTAGLCLLTWGGHWLYGKHCDNLLRRAACQEAQVFGNQLIPPNAQVKKATVFLNPAACKGKARTLFEKNAAPILHLSGMDVTIVKTDYEGQAKKLLELMENTDVIIVAGGDGTLQEVVTGVLRRTDEATFSKIPIGFIPLGETSSLSHTLFAESGNKVQHITDATLAIVKGETVPLDVLQIKVLVSWASKNQSSPLFQHS

SEQ ID NO: 854908 - protein, 210 aa, Homo sapiens
EKDSEFQRCWRQVQSIGSKIKAAHFFSTLKEWPQTHQASISYTGPTERPPNEPEETPVQRPSLYRRILRRLASYWAQPQDALSQEVSPEVWKDVQLSTIELSITTRNNQLDPTSKEDFLNICIEPDTISKGDFITIGSRKVRNPKLHVEGTECLQASQCTLLIPEGAGGSFSIDSEEYEAMPVEVKLLPRKLQFFCDPRKREQMLTSPTQ

SEQ ID NO: 854909 - protein, 102 aa, Homo sapiens
MREDCEGEGEEAELAGLSYRLSLRQIPFKITYTMPTHPMERDQCFSRLQNSYEKSMNEDHKKEGFLISYCILQGGKISAFGKNITDGSKHQHKDHSSHTTHR

SEQ ID NO: 854910 - protein, 409 aa, Homo sapiens
MTVFFKTLRNHWKKTTAGLCLLTWGGHWLYGKHCDNLLRRAACQEAQVFGNQLIPPNAQVKKATVFLNPAACKGKARTLFEKNAAPILHLSGMDVTIVKTDYEGQAKKLLELMENTDVIIVAGGDGTLQEVVTGVLRRTDEATFSKIPIGFIPLGETSSLSHTLFAESGNKVQHITDATLAIVKGETVPLDVLQIKGEKEQPVFAMTGLRWGSFRDAGVKVSKYWYLGPLKIKAAHFFSTLKEWPQTHQASISYTGPTERPPNEPEETPVQRPSLYRRILRRLASYWAQPQDALSQEVSPEVWKDVQLSTIELSITTRNNQLDPTSKEDFLNICIEPDTISKGDFITIGSRKVRNPKLHVEGTECLQASQCTLLIPEGAGGSFSIDMRKLVQRKAREGCLPRNSALHEV

SEQ ID NO: 854911 - protein, 113 aa, Homo sapiens
MTVFFKTLRNHWKKTTAGLCLLTWGGHWLYGKHCDNLLRRAACQEAQHYQDESRWEPTLSELQEVNHLVKSSSDAHPYRLFVSGLVPRTQNWTGRSSGNLFVSAVVFVDLSNP

SEQ ID NO: 854912 - protein, 422 aa, Homo sapiens; identical to SEQ ID NO: 854904

SEQ ID NO: 854913 - protein, 422 aa, Homo sapiens; identical to SEQ ID NO: 854904

SEQ ID NO: 854914 - protein, 213 aa, Homo sapiens
MPVVLEKMLGQVQKYWYLGPLKIKAAHFFSTLKEWPQTHQASISYTGPTERPPNEPEETPVQRPSLYRRILRRLASYWAQPQDALSQEVSPEVWKDVQLSTIELSITTRNNQLDPTSKEDFLNICIEPDTISKGDFITIGSRKVRNPKLHVEGTECLQASQCTLLIPEGAGGSFSIDSEEYEAMPVEVKLLPRKLQFFCDPRKREQMLTSPTQ

SEQ ID NO: 854915 - protein, 78 aa, Homo sapiens
LKKKKAVPSGIPGLHVEGTECLQASQCTLLIPEGAGGSFSIDSEEYEAMPVEVKLLPRKLQFFCDPRKREQMLTSPTQ

SEQ ID NO: 854916 - protein, 434 aa, Homo sapiens
MTVFFKTLRNHWKKTTAGLCLLTWGGHWLYGKHCDNLLRRAACQEAQVFGNQLIPPNAQVKKATVFLNPAACKGKARTLFEKNAAPILHLSGMDVTIVKTDYEGQAKKLLELMENTDVIIVAGGDGTLQEVVTGVLRRTDEATFSKIPIGFIPLGETSSLSHTLFAESGNKVQHITDATLAIVKGETVPLDVLQIKGEKEQPVFAMTGLRWGSFRDAGVKVSKYWYLGPLKIKAAHFFSTLKEWPQTHQASISYTGPTERPPNEPEETPVQRPSLYRRILRRLASYWAQPQDALSQEVSPEVWKDVQLSTIELSITTRNNQLDPTSKEDFLNICIEPDTISKGDFITIGSRKVRNPKLHVEGTECLQASQCTLLIPEGAGGSFSIDSEEYEAMPVEVKLLPRKLQFFCDPRKREQMLIYNIILRAHYCLCPTLS

SEQ ID NO: 854917 - protein, 173 aa, Homo sapiens [sequence omitted]

SEQ ID NO: 854918 - protein, 292 aa, Homo sapiens
AGTSLVRRLAAAAAAAAGARAPAAEGGRAGAGEGGGPVRDDSPDGVSPPSGAGFGLGGAGYSPSMTMGDKKSPTRPKRQAKPAADEGFWDCSVCTFRNSAEAFKCSICDVRKGTSTRKPRINSQLVAQQVAQQYATPPPPKKEKKEKVEKQDKEKPEKDKEISPSVTKKNTNKKTKPKSDILKDPPSEANSIQSANATTKTSETNHTSRPRLKNVDRSTAQQLAVTVGNVTVIITDFKEKTRSSSTSSSTVTSSAGSEQQNQSSSGSESTDKGSSRSSTPKGDMSAVNDESF

SEQ ID NO: 854919 - protein, 194 aa, Homo sapiens
PSCLGSSLSPVTSQMCDSGKPRINSQLVAQQVAQQYATPPPPKKEKKEKVEKQDKEKPEKDKEISPSVTKKNTNKKTKPKSDILKDPPSEANSIQSANATTKTSETNHTSRPRLKNVDRSTAQQLAVTVGNVTVIITDFKEKTRSSSTSSSTVTSSAGSEQQNQSSSGSESTDKGSSRSSTPKGDMSAVNDESF

SEQ ID NO: 854920 - protein, 292 aa, Homo sapiens; identical to SEQ ID NO: 854918

SEQ ID NO: 854921 - protein, 292 aa, Homo sapiens; identical to SEQ ID NO: 854918

SEQ ID NO: 854922 - protein, 69 aa, Homo sapiens
HVAGPEGSDGEELRILVCTCSIHTEPGSKQQHLHTALRAAIRSEITAGYIHVTVYIKGYLKPIHGNAGA

SEQ ID NO: 854923 - protein, 292 aa, Homo sapiens; identical to SEQ ID NO: 854918

SEQ ID NO: 854924 - protein, 292 aa, Homo sapiens; identical to SEQ ID NO: 854918

SEQ ID NO: 854925 - protein, 292 aa, Homo sapiens; identical to SEQ ID NO: 854918

SEQ ID NO: 854926 - protein, 255 aa, Homo sapiens
MKGRLITIILLVTSIFFYLSLKDVIICGQVNHAWMLMTQLNSLWNAIDFSSVKNVIPDKYIVSTLQRWRLNVLRLNFRGCLLRPKTFRSVSHCRNLQELNVSDCPTFTDESMRHISEGCPGVLCLNLSNTTITNRTMRLLPRHFHNLQNLSLAYCRRFTDKGLQYLNLGNGCHKLIYLDLSGCTQISVQGFRYIANSCTGIMHLTINDMPTLTDNCVKALVEKCSRITSLVFTGAPHISDCTFRALSACKLRKIR

SEQ ID NO: 854927 - protein, 523 aa, Homo sapiens
GTTPARARPLVPARGGYYRSFSVRPWAMASLRNANPRLKNYFKENYIPQVCEALLCGILVTCPEDPLRYLEGMIMVIIKSGLQNLLWDMCITPSMKPNIRRLSETYLEQLFELDDQLMTPELMIKACSFYTGHLVKTHFCTWRDIARTNENVVLAEKMNRAVTCYNFRLQKSVFHHWHSYMEDQKEKLKNMLLRIQQIIYCHKLTIILTKWRNTARHKSKKKEDELILKHELQLKTWNNRLILKRAAAEESNFPERSSSEVFLVDETLKCDISLLPERAILQIFFYLSLKDVIICGQVNHAWMLMTQLNSLWNAIDFSSVKNVIPDKYIVSTLQRWRLNVLRLNFRGCLLRPKTFRSVSHCRNLQELNVSDCPTFTDESMRHISEGCPGVLCLNLSNTTITNRTMRLLPRHFHNLQNLSLAYCRRFTDKGLQYLNLGNGCHKLIYLDLSGCTQISVQGFRYIANSCTGIMHLTINDMPTLTDNCVKALVEKCSRITSLVFTGAPHISDCTFRALSACKLRKIR

SEQ ID NO: 854928 - protein, 406 aa, Homo sapiens
MTPELMIKACSFYTGHLVKTHFCTWRDIARTNENVVLAEKMNRAVTCYNFRLQKSVFHHWHSYMEDQKEKLKNMLLRIQQIIYCHKLTIILTKWRNTARHKSKKKEDELILKHELQLKTWNTRLILKRAAAEESNFPERSSSEVFLVDETLKCDISLLPERAILQIFFYLSLKDVIICGQVNHAWMLMTQLNSLWNAIDFSSVKNVIPDKYIVSTLQRWRLNVLRLNFRGCLLRPKTFRSVSHCRNLQELNVSDCPTFTDESMRHISEGCPGVLCLNLSNTTITNRTMRLLPRHFHNLQNLSLAYCRRFTDKGLQYLNLGNGCHKLIYLDLSGCTQISVQGFRYIANSCTGIMHLTINDMPTLTDNCVKALVEKCSRITSLVFTGAPHISDCTFRALSACKLRKIR

SEQ ID NO: 854929 - protein, 147 aa, Homo sapiens
MGTPASVVSEPPPWQAPIEARGRKQASANIFQDAELLQIQALFQRSGDQLAEERAQIIWECAGDHRVAEALKRLRRKRPPRQKPLGHSLHHCSRLRILEPHSALANPQSATETASSEQYLHSRKKSARIRRNWRKSGPTSYLHQIRH

SEQ ID NO: 854930 - protein, 147 aa, Homo sapiens; identical to SEQ ID NO: 854929

SEQ ID NO: 854931 - protein, 147 aa, Homo sapiens; identical to SEQ ID NO: 854929

SEQ ID NO: 854932 - protein, 597 aa, Homo sapiens [sequence omitted]

SEQ ID NO: 854933 - protein, 668 aa, Homo sapiens [sequence omitted]

SEQ ID NO: 854934 - protein, 668 aa, Homo sapiens [sequence omitted]

SEQ ID NO: 854935 - protein, 597 aa, Homo sapiens [sequence omitted]

SEQ ID NO: 854936 - protein, 597 aa, Homo sapiens [sequence omitted]

SEQ ID NO: 854937 - protein, 568 aa, Homo sapiens
MRLRGSGMLRDLLLRSPAGVSATLRRAQPLVTLCRRPRGGGRPAAGPAAAARLHPWWGGGGWPAEPLARGLSSSPSEILQELGKGSTHPQPGVSPPAAPAAPGPKDGPGETDAFGNSEGKELVASGENKIKQGLLPSLEDLLFYTIAEGQEKIPVHKFITALKSTGLRTSDPRLKECMDMLRLTLQTTSDGVMLDKDLFKKCVQSNIVLLTQAFRRKFVIPDFMSFTSHIDELYESAKKQSGGKVADYIPQLAKFSPDLWGVSVCTVDGQRHSTGDTKVPFCLQSCVKPLKYAIAVNDLGTEYVHRYVGKEPSGLRFNKLFLNEDDKPHNPMVNAGAIVVTSLIKQGVNNAEKFDYVMQFLNKMAGNEYVGFSNATFQSERESGDRNFAIGYYLKEKKCFPEGTDMVGILDFYFQLCSIEVTCESASVMAATLANGGFCPITGERVLSPEAVRNTLSLMHSCGMYDFSGQFAFHVGLPAKSGVAGGILLVVPNVMGMMCWSPPLDKMGNSVKGIHFCHDLVSLCNFHNYDNLRHFAKKLDPRREGGDQRAWTFLHSSALINYVCCLNN

SEQ ID NO: 854938 - protein, 597 aa, Homo sapiens [sequence omitted]

SEQ ID NO: 854939 - protein, 647 aa, Homo sapiens
MRLRGSGMLRDLLLRSPAGVSATLRRAQPLVTLCRRPRGGGRPAAGPAAAARLHPWWGGGGWPAEPLARGLSSSPSEILQELGKGSTHPQPGVSPPAAPAAPGPKDGPGETDAFGNSEGKELVASGENKIKQGLLPSLEDLLFYTIAEGQEKIPVHKFITALKSTGLRTSDPRLKECMDMLRLTLQTTSDGVMLDKDLFKKCVQSNIVLLTQAFRRKFVIPDFMSFTSHIDELYESAKKQSGGKVADYIPQLAKFSPDLWGVSVCTVDGQRHSTGDTKVPFCLQSCVKPLKYAIAVNDLGTEYVHRYVGKEPSGLRFNKLFLNEDDKPHNPMVNAGAIVVTSLIKQGVNNAEKFDYVMQFLNKMAGNEYVGFSNATFQSERESGDRNFAIGYYLKEKKCFPEGTDMVGILDFYFQLCSIEVTCESASVMAATLANGGFCPITGERVLSPEAVRNTLSLMHSCGMYDFSGQFAFHVGLPAKSGVAGGILLVVPNVMGMMCWSPPLDKMGNSVKGIHFCHDLVSLCNFHNYDNLRHFAKKLDPRREGGDQRVKSVINLLFAAYTGDVSALRRFALSAMDMEQRDYDSRTALHVAAAERWNNTPMDEALHFGHHDVFKILQEYQVQYTPQGDSDNGKENQTVHKNLDGLL

SEQ ID NO: 854940 - protein, 174 aa, Homo sapiens
MGMMCWSPPLDKMGNSVKGIHFCHDLVSLCNFHNYDNLRHFAKKLDPRREGGDQRVKSVINLLFAAYTGDVSALRRFALSAMDMEQRDYDSRTALHVAAAEGHVEVVKFLLEACKVNPFPKDRWNNTPMDEALHFGHHDVFKILQEYQVQYTPQGDSDNGKENQTVHKNLDGLL

SEQ ID NO: 854941 - protein, 668 aa, Homo sapiens [sequence omitted]

SEQ ID NO: 854942 - protein, 597 aa, Homo sapiens [sequence omitted]

SEQ ID NO: 854943 - protein, 567 aa, Homo sapiens
MRLRGSGMLRDLLLRSPAGVSATLRRAQPLVTLCRRPRGGGRPAAGPAAAARLHPWWGGGGWPAEPLARGLSSSPSEILQELGKGSTHPQPGVSPPAAPAAPGPKDGPGETDAFGNSEGKELVASGENKIKQGLLPSLEDLLFYTIAEGQEKIPVHKFITALKSTGLRTSDPRLKECMDMLRLTLQTTSDGVMLDKDLFKKCVQSNIVLLTQAFRRKFVIPDFMSFTSHIDELYESAKKQSGGKVADYIPQLAKFSPDLWGVSVCTVDGQRHSTGDTKVPFCLQSCVKPLKYAIAVNDLGTEYVHRYVGKEPSGLRFNKLFLNEDDKPHNPMVNAGAIVVTSLIKQGVNNAEKFDYVMQFLNKMAGNEYVGFSNATFQSERESGDRNFAIGYYLKEKKCFPEGTDMVGILDFYFQLCSIEVTCESASVMAATLANGGFCPITGERVLSPEAVRNTLSLMHSCGMYDFSGQFAFHVGLPAKSGVAGGILLVVPNVMGMMCWSPPLDKMGNSVKGIHFCHDLVSLCNFHNYDNLRHFAKKLDPRREGGDQRGKQNSYLDKYIKFLRREK

SEQ ID NO: 854944 - protein, 201 aa, Homo sapiens [sequence omitted]

SEQ ID NO: 854945 - protein, 417 aa, Homo sapiens
MRLRGSGMLRDLLLRSPAGVSATLRRAQPLVTLCRRPRGGGRPAAGPAAAARLHPWWGGGGWPAEPLARGLSSSPSEILQELGKGSTHPQPGVSPPAAPAAPGPKDGPGETDAFGNSEGKELVASGENKIKQGLLPSLEDLLFYTIAEGQEKIPVHKFITALKSTGLRTSDPRLKECMDMLRLTLQTTSDGVMLDKDLFKKCVQSNIVLLTQAFRRKFVIPDFMSFTSHIDELYESAKKQSGGKVADYIPQLAKFSPDLWGVSVCTVDGQRHSTGDTKVPFCLQSCVKPLKYAIAVNDLGTEYVHRYVGKEPSGLRFNKLFLNEDDKPHNPMVNAGAIVVTSLIKQGVNNAEKFDYVMQFLNKMAGNEYVGFSNATFQSERESGDRNFAIGYYLKEKKCFPEGTDMVGILDFYFQVI

SEQ ID NO: 854946 - protein, 597 aa, Homo sapiens [sequence omitted]

SEQ ID NO: 854947 - protein, 597 aa, Homo sapiens [sequence omitted]

SEQ ID NO: 854948 - protein, 359 aa, Homo sapiens
MRLRGSGMLRDLLLRSPAGVSATLRRAQPLVTLCRRPRGGGRPAAGPAAAARLHPWWGGGGWPAEPLARGLSSSPSEILQELGKGSTHPQPGVSPPAAPAAPGPKDGPGETDAFGNSEGKELVASGENKIKQGLLPSLEDLLFYTIAEGQEKIPVHKFITALKSTGLRTSDPRLKECMDMLRLTLQTTSDGVMLDKDLFKKCVQSNIVLLTQAFRRKFVIPDFMSFTSHIDELYESAKKQSGGKVADYIPQLAKFSPDLWGVSVCTVDGQRHSTGDTKVPFCLQSCVKPLKYAIAVNDLGTEYVHRYVGKEPSGLRFNKLFLNEDDKPHNPMVNAGAIVVTSLIKQGVNNAEKFDYVSV

SEQ ID NO: 854949 - protein, 240 aa, Homo sapiens
MQFLNKMAGNEYVGFSNATFQSERESGDRNFAIGYYLKEKKCFPEGTDMVGILDFYFQLCSIEVTCESASVMAATLANGGFCPITGERVLSPEAVRNTLSLMHSCGMYDFSGQFAFHVGLPAKSGVAGGILLVVPNVMGMMCWSPPLDKMGNSVKGIHFCHDLVSLCNFHNYDNLRHFAKKLDPRREGGDQRHSFGPLDYESLQQELALKETVWKKVSPESNEDISTTVVYRMESLGEKS

SEQ ID NO: 854950 - protein, 330 aa, Homo sapiens
MSLIFLQQGVNNAEKFDYVMQFLNKMAGNEYVGFSNATFQSERESGDRNFAIGYYLKEKKCFPEGTDMVGILDFYFQLCSIEVTCESASVMAATLANGGFCPITGERVLSPEAVRNTLSLMHSCGMYDFSGQFAFHVGLPAKSGVAGGILLVVPNVMGMMCWSPPLDKMGNSVKGIHFCHDLVSLCNFHNYDNLRHFAKKLDPRREGGDQRVKSVINLLFAAYTGDVSALRRFALSAMDMEQRDYDSRTALHVAAAEGHVEVVKFLLEACKVNPFPKDRWNNTPMDEALHFGHHDVFKILQEYQVQYTPQGDSDNGKENQTVHKNLDGLL

SEQ ID NO: 854951 - protein, 69 aa, Homo sapiens
RTWAYALFLTLTTKLTNTNISDAQEIETVCTILPAIILVLIALPSLRILYNAQVRKPGTSFGETTANVP

SEQ ID NO: 854952 - protein, 168 aa, Homo sapiens
MRLRGSGMLRDLLLRSPAGVSATLRRAQPLVTLCRRPRGGGRPAAGPAAAARLHPWWGGGGWPAEPLARGLSSSPSEILQELGKGSTHPQPGVSPPAAPAAPGPKDGPGETDAFGNSEGKELVASGENKIKQGLLPSLEDLLFYTIAEGQEKIPVHKFITVSFYIFLS

SEQ ID NO: 854953 - protein, 487 aa, Homo sapiens
MRLRGSGMLRDLLLRSPAGVSATLRRAQPLVTLCRRPRGGGRPAAGPAAAARLHPWWGGGGWPAEPLARGLSSSPSEILQELGKGSTHPQPGVSPPAAPAAPGPKDGPGETDAFGNSEGKELVASGENKIKQGLLPSLEDLLFYTIAEGQEKIPVHKFITALKSTGLRTSDPRLKECMDMLRLTLQTTSDGVMLDKDLFKKCVQSNIVLLTQAFRRKFVIPDFMSFTSHIDELYESAKKQSGGKVADYIPQLAKFSPDLWGVSVCTVDGQRHSTGDTKVPFCLQSCVKPLKYAIAVNDLGTEYVHRYVGKEPSGLRFNKLFLNEDDKPHNPMVNAGAIVVTSLIKQGVNNAEKFDYVMQFLNKMAGNEYVGFSNATFQSERESGDRNFAIGYYLKEKKCFPEGTDMVGILDFYFQLCSIEVTCESASVMAATLANGGFCPITGERVLSPEAVRNTLSLMHSCGMYDFSGQFAFHVSNCLILFSLARN

SEQ ID NO: 854954 - protein, 333 aa, Homo sapiens
MRLRGSGMLRDLLLRSPAGVSATLRRAQPLVTLCRRPRGGGRPAAGPAAAARLHPWWGGGGWPAEPLARGLSSSPSEILQELGKGSTHPQPGVSPPAAPAAPGPKDGPGETDAFGNSEGKELVASGENKIKQGLLPSLEDLLFYTIAEGQEKIPVHKFITALKSTGLRTSDPRLKECMDMLRLTLQTTSDGVMLDKDLFKKCVQSNIVLLTQAFRRKFVIPDFMSFTSHIDELYESAKKQSGGKVADYIPQLAKFSPDLWGVSVCTVDGQRHSTGDTKVPFCLQSCVKPLKYAIAVNDLGTEYVHRYVGKEPSGLRFNKLFLNEDGKNYINIG

SEQ ID NO: 854955 - protein, 833 aa, Homo sapiens
MATLDRKVPSPEAFLGKPWSSWIDAAKLHCSDNVDLEEAGKEGGKSREVMRLNKEDMHLFGHYPAHDDFYLVVCSACNQVVKPQVFQSHCERRHGSMCRPSPSPVSPASNPRTSLVQVKTKACLSGHHSASSTSKPFKTPKDNLLTSSSKQHTVFPAKGSRDKPCVPVPVVSLEKIPNLVKADGANVKMNSTTTTAVSASSTSSSAVSTPPLIKPVLMSKSVPPSPEKILNGKGILPTTIDKKHQNGTKNSNKPYRRLSEREFDPNKHCGVLDPETKKPCTRSLTCKTHSLSHRRAVPGRKKQFDLLLAEHKAKSREKEVKDKEHLLTSTREILPSQSGPAQDSLLGSSGSSGPEPKVASPAKSRPPNSVLPRPSSANSISSSTSSNHSGHTPEPPLPPVGGDLASRLSSDEGEMDGADESEKLDCQFSTHHPRPLAFCSFGSRLMGRGYYVFDRRWDRFRFALNSMVEKHLNSQMWKKIPPAADSPLPSPAAHITTPVPASVLQPFSNPSAVYLPSAPISSRLTSSYIMTSAMLSNAAFVTSPDPSALMSHTTAFPHVAATLSIMDSTFKAPSAVSPIPAVIPSPSHKPSKTKTSKSSKVKDLSTRSDESPSNKKRKPQSSTSSSSSSSSSSLQTSLSSPLSGPHKKNCVLNASSALNSYQAAPPYNSLSVHNSNNGVSPLSAKLEPSGRTSLPGGPADIVRQVGAVGGSSDSCPLSVPSLALHAGDLSLASHNAVSSLPLSFDKSEGKKRKNSSSSSKACKITKMPGMNSVHKKNPPSLLAPVPDPVNSTSSRQVGKNSSLALSQSSPSSISSPGHSRQNTNRTGRIRTLP

SEQ ID NO: 854956 - protein, 100 aa, Homo sapiens
LFQNTLVFISPTDMHLFGHYPAHDDFYLVVCSACNQVVKPQVFQSHCGKWTPAPSATSAAAALGTVAFPWAPRQGLAMSCLSLRLWVKSSWAAASARRLF

SEQ ID NO: 854957 - protein, 792 aa, Homo sapiens
MATLDRKVPSPEAFLGKPWSSWIDAAKLHCSDNVDLEEAGKEGGKSREVMRLNKEDMHLFGHYPAHDDFYLVVCSACNQVVKPQVFQSHCERRHGSMCRPSPSPVSPASNPRTSLVQVKTKACLSGHHSASSTSKPFKTPKDNLLTSSSKQHTVFPAKGSRDKPCVPVPVVSLEKIPNLVKADGANVKMNSTTTTAVSASSTSSSAVSTPPLIKPVLMSKSVPPSPEKILNGKGILPTTIDKKHQNGTKNSNKPYRRLSEREFDPNKHCGVLDPETKKPCTRSLTCKTHSLSHRRAVPGRKKQFDLLLAEHKAKSREKEVKDKEHLLTSTREILPSQSGPAQDSLLGSSGSSGPEPKVASPAKSRPPNSVLPRPSSANSISSSTSSNHSGHTPEPPLPPVGGDLASRLSSDEGEMDGADESEKLDCQFSTHHPRPLAEDPSCGRYPLPSPAAHITTPVPASVLQPFSNPSAVYLPSAPISSRLTSSYIMTSAMLSNAAFVTSPDPSALMSHTTAFPHVAATLSIMDSTFKAPSAVSPIPAVIPSPSHKPSKTKTSKSSKVKDLSTRSDESPSNKKRKPQSSTSSSSSSSSSSLQTSLSSPLSGPHKKNCVLNASSALNSYQAAPPYNSLSVHNSNNGVSPLSAKLEPSGRTSLPGGPADIVRQVGAVGGSSDSCPLSVPSLALHAGDLSLASHNAVSSLPLSFDKSEGKKRKNSSSSSKACKITKMPGMNSVHKKNPPSLLAPVPDPVNSTSSRQVGKNSSLALSQSSPSSISSPGHSRQNTNRTGRIRTLP

SEQ ID NO: 854958 - protein, 759 aa, Homo sapiens
MNSTTTTAVSASSTSSSAVSTPPLIKPVLMSKSVPPSPEKILNGKGILPTTIDKKHQNGTKNSNKPYRRLSEREFDPNKHCGVLDPETKKPCTRSLTCKTHSLSHRRAVPGRKKQFDLLLAEHKAKSREKEVKDKEHLLTSTREILPSQSGPAQDSLLGSSGSSGPEPKVASPAKSRPPNSVLPRPSSANSISSSTSSNHSGHTPEPPLPPVGGDLASRLSSDEGEMDGADESEKLDCQFSTHHPRPLAFCSFGSRLMGRGYYVFDRRWDRFRFALNSMVEKHLNSQMWKHRNPSHRASGPSPLFRTCLTNLLSLSNIGAAWVSTLESVAPRYPLNLAAQTPGPGGPEPGGMAADGGVEDIRKKRNGQDSFFFNKHLTLHQEPPTQYSLSARKIPPAADSPLPSPAAHITTPVPASVLQPFSNPSAVYLPSAPISSRLTSSYIMTSAMLSNAAFVTSPDPSALMSHTTAFPHVAATLSIMDSTFKAPSAVSPIPAVIPSPSHKPSKTKTSKSSKVKDLSTRSDESPSNKKRKPQSSTSSSSSSSSSSLQTSLSSPLSGPHKKNCVLNASSALNSYQAAPPYNSLSVHNSNNGVSPLSAKLEPSGRTSLPGGPADIVRQVGAVGGSSDSCPLSVPSLALHAGDLSLASHNAVSSLPLSFDKSEGKKRKNSSSSSKACKITKMPGMNSVHKKNPPSLLAPVPDPVNSTSSRQVRDLLAPPSPALGGRGSWAAPLLSRAAPTGNTSLIPVLVFPEGSFHPLL

SEQ ID NO: 854959 - protein, 118 aa, Homo sapiens
MATLDRKVPSPEAFLGKPWSSWIDAAKLHCSDNVDLEEAGKEGGKSREVMRLNKEDMHLFGHYPAHDDFYLVVCSACNQVVKPQVFQSHCAGPATVPPSGSSFSFSDSWARCVHLAPC

SEQ ID NO: 854960 - protein, 130 aa, Homo sapiens
MATLDRKVPSPEAFLGKPWSSWIDAAKLHCSDNVDLEEAGKEGGKSREVMRLNKEDMHLFGHYPAHDDFYLVVCSACNQVVKPQVFQSHCALKEKTTVRQPVNLKQRKWVAGAMREASLKITLEPDRGRL

SEQ ID NO: 854961 - protein, 161 aa, Homo sapiens
RYAPRGEPGGPGALTFEFCTPRSLRWEGSSSRSKLTCVSERIYPLVSAPRATTAESPWSKVLQNTQCRNVPKMTSERSRIPCLSAAAAEGTGKKQQEGRAMATLDRKVPSPEAFLGKPWSSWIDAAKLHCSDNVDLEEAGKEGGKSREVMRLNKEAWKYGT

SEQ ID NO: 854962 - protein, 126 aa, Homo sapiens
MNSTTTTAVSASSTSSSAVSTPPLIKPVLMSKSVPPSPEKILNGKGILPTTIDKKHQNGTKNSNKPYRRLSEREFDPNKHCGVLDPETKKPCTRSLTCKTHSVKPRKAVQGGKAIYFSGDKSKSGK

SEQ ID NO: 854963 - protein, 947 aa, Homo sapiens
MATLDRKVPSPEAFLGKPWSSWIDAAKLHCSDNVDLEEAGKEGGKSREVMRLNKEDMHLFGHYPAHDDFYLVVCSACNQVVKPQVFQSHCERRHGSMCRPSPSPVSPASNPRTSLVQVKTKACLSGHHSASSTSKPFKTPKDNLLTSSSKQHTVFPAKGSRDKPCVPVPVVSLEKIPNLVKADGANVKMNSTTTTAVSASSTSSSAVSTPPLIKPVLMSKSVPPSPEKILNGKGILPTTIDKKHQNGTKNSNKPYRRLSEREFDPNKHCGVLDPETKKPCTRSLTCKTHSLSHRRAVPGRKKQFDLLLAEHKAKSREKEVKDKEHLLTSTREILPSQSGPAQDSLLGSSGSSGPEPKVASPAKSRPPNSVLPRPSSANSISSSTSSNHSGHTPEPPLPPVGGDLASRLSSDEGEMDGADESEKLDCQFSTHHPRPLAFCSFGSRLMGRGYYVFDRRWDRFRFALNSMVEKHLNSQMWKHRNPSHRASGPSPLFRTCLTNLLSLSNIGAAWVSTLESVAPRYPLNLAAQTPGPGGPEPGGMAADGGVEDIRKKRNGQDSFFFNKHLTLHQEPPTQYSLSARKIPPAADSPLPSPAAHITTPVPASVLQPFSNPSAVYLPSAPISSRLTSSYIMTSAMLSNAAFVTSPDPSALMSHTTAFPHVAATLSIMDSTFKAPSAVSPIPAVIPSPSHKPSKTKTSKSSKVKDLSTRSDESPSNKKRKPQSSTSSSSSSSSSSLQTSLSSPLSGPHKKNCVLNASSALNSYQAAPPYNSLSVHNSNNGVSPLSAKLEPSGRTSLPGGPADIVRQVGAVGGSSDSCPLSVPSLALHAGDLSLASHNAVSSLPLSFDKSEGKKRKNSSSSSKACKITKMPGMNSVHKKNPPSLLAPVPDPVNSTSSRQVRDLLAPPSPALGGRGSWAAPLLSRAAPTGNTSLIPVLVFPEGSFHPLL

SEQ ID NO: 854964 - protein, 478 aa, Homo sapiens [sequence omitted]

SEQ ID NO: 854965 - protein, 146 aa, Homo sapiens
MTSERSRIPCLSAAAAEGTGKKQQEGRAMATLDRKVPSPEAFLGKPWSSWIDAAKLHCSDNVDLEEAGKEGGKSREVMRLNKEDMHLFGHYPAHDDFYLVVCSACNQVVKPQVFQSHCGRKQDNRRNEGISRSGPESSQAIEKHQV

SEQ ID NO: 854966 - protein, 128 aa, Homo sapiens
MTGYTPDEKLRLQQLRELRRRWLKDQELSPREPVLPPQKMGPMEKFWNKFLENKSPWRKMVHGVYKKSIFVFTHVLVPVWIIHYYMKYHVSEKPYGIVEKKSRIFPGDTILETGEVIPPMKEFPDQHH

SEQ ID NO: 854967 - protein, 128 aa, Homo sapiens; identical to SEQ ID NO: 854966

SEQ ID NO: 854968 - protein, 91 aa, Homo sapiens
  misc_feature (10)..(10): Xaa can be any naturally occurring amino acid
SAATGDLATXDFPGCLNSARGILVHGVYKKSIFVFTHVLVPVWIIHYYMKYHVSEKPYGIVEKKSRIFPGDTILETGEVIPPMKEFPDQHH

SEQ ID NO: 854969 - protein, 78 aa, Homo sapiens
RPHNYEYSLSPPGPNLVGYSGGGRRENWRWRPLCMPTHCFPREESGALAEAEPGCDVITARGARRSRKVALQSGSALK

SEQ ID NO: 854970 - protein, 128 aa, Homo sapiens; identical to SEQ ID NO: 854966

SEQ ID NO: 854971 - protein, 128 aa, Homo sapiens; identical to SEQ ID NO: 854966

SEQ ID NO: 854972 - protein, 128 aa, Homo sapiens; identical to SEQ ID NO: 854966

SEQ ID NO: 854973 - protein, 128 aa, Homo sapiens; identical to SEQ ID NO: 854966

SEQ ID NO: 854974 - protein, 78 aa, Homo sapiens; identical to SEQ ID NO: 854969

SEQ ID NO: 854975 - protein, 138 aa, Homo sapiens
MTGYTPDEKLRLQQLRELRRRWLKDQELSPREPVLPPQKMGPMEKFWNKFLENKSPWRKMVSDRPLRSPPTHPTAAGSLNTERPLPAATPRTDNAQCSGTLASPESPPGVSGGRSPGICMALRESCLLLSSTVDGGEF

SEQ ID NO: 854976 - protein, 113 aa, Homo sapiens
MTGYTPDEKLRLQQLRELRRRWLKDQELSPREPVLPPQKMGPMEKFWNKFLENKSPWRKMVHGVYKKSIFVFTHVLVPVWIIHYYMKYHVSGDTILETGEVIPPMKEFPDQHH

SEQ ID NO: 854977 - protein, 570 aa, Homo sapiens
  misc_feature (288)..(288): Xaa can be any naturally occurring amino acid
VLGVLPWSAAAGLRAGVRVPRSPGPSRRMPARSGAQFCRRMGQKKQRPARAGQPHSSSDAAQAPAEQPHSSSDAAQAPCPRERCLGPPTTPGPYRSIYFSSPKGHLTRLGLEFFDQPAVPLARAFLGQVLVRRLPNGTELRGRIVETEAYLGPEDEAAHSRGGRQTPRNRGMFMKPGTLYVYIIYGMYFCMNISSQGTGMATLRRTPGDPGIVWNQCGTFQRPPEKRRPTGPKGPANLGAPTRGGRGHNNSVTRAGARTNCRGPTPHKCSKGRREQRPPSRERGRAHXLINPDKKTLHTFLLSLTYTTNHTYTRPHTTTLTSLTSITHHHRHPTPITHPTPRHTHLSGFTIAPITKTSTISTTKATHSRHAHTRPHSHPQRAKGTYDGAAQRTRGERSGGRRRREMTQGCADTRGGEGSNGRTTENQADERDYNRRRKRQHAERPRADGTAAKHACGAKWTKHTDDRDQTTKSAATQRTDGRRRDEERESRQSRRQKEGDTRRAERGTAWGRDGENEAKHGGQRRKDATTTTPHTTENTEPTPTRRRRDQRAERQQPESTRNRRTPPTHT

SEQ ID NO: 854978 - protein, 298 aa, Homo sapiens
MVTPALQMKKPKQFCRRMGQKKQRPARAGQPHSSSDAAQAPAEQPHSSSDAAQAPCPRERCLGPPTTPGPYRSIYFSSPKGHLTRLGLEFFDQPAVPLARAFLGQVLVRRLPNGTELRGRIVETEAYLGPEDEAAHSRGGRQTPRNRGMFMKPGTLYVYIIYGMYFCMNISSQGDGACVLLRALEPLEGLETMRQLRSTLRKGTASRVLKDRELCSGPSKLCQALAINKSFDQRDLAQDEAVWLERGPLEPSEPAVVAAARVGVGHAGEWARKPLRFYVRGSPWVSVVDRVAEQDTQA

SEQ ID NO: 854979 - protein, 281 aa, Homo sapiens
MGQKKQRPARAGQPHSSSDAAQAPAEQPHSSSDAAQAPCPRERCLGPPTTPGPYRSIYFSSPKGHLTRLGLEFFDQPAVPLARAFLGQVLVRRLPNGTELRGRIVETEAYLGPEDEAAHSRGGRQTPRNRGMFMKPGTLYVYIIYGMYFCMNISSQGDGACVLLRALEPLEGLETMRQLRSTLRKGTASRVLKDRELCSGPSKLCQALAINKSFDQRDLAQDEAVWLERGPLEPSEPAVVAAARVGVGHAGEWARKPLRFYVRGSPWVSVVDRVAEQDTQA

SEQ ID NO: 854980 - protein, 238 aa, Homo sapiens
VLGVLPWSAAAGLRAGVRVPRSPGPSRRMPARSGAQFCRRMGQKKQRPARAGQPHSSSDAAQAPAEQPHSSSDAAQAPCPRERCLGPPTTPGPYRSIYFSSPKGHLTRLGLEFFDQPAVPLARAFLGQVLVRRLPNGTELRGRIVETEAYLGPEDEAAHSRGGRQTPRNRGMFMKPGTLYVGRGLRLAASTGAPGRSGDHASASQHPPERHRQPCPQGPRALQWPLQAVPGPGHQQEL

SEQ ID NO: 854981 - protein, 321 aa, Homo sapiens
VLGVLPWSAAAGLRAGVRVPRSPGPSRRMPARSGAQFCRRMGQKKQRPARAGQPHSSSDAAQAPAEQPHSSSDAAQAPCPRERCLGPPTTPGPYRSIYFSSPKGHLTRLGLEFFDQPAVPLARAFLGQVLVRRLPNGTELRGRIVETEAYLGPEDEAAHSRGGRQTPRNRGMFMKPGTLYVYIIYGMYFCMNISSQGDGACVLLRALEPLEGLETMRQLRSTLRKGTASRVLKDRELCSGPSKLCQALAINKSFDQRDLAQDEAVWLERGPLEPSEPAVVAAARVGVGHAGEWARKPLRFYVRGSPWVSVVDRVAEQDTQA

SEQ ID NO: 854982 - protein, 321 aa, Homo sapiens; identical to SEQ ID NO: 854981

SEQ ID NO: 854983 - protein, 991 aa, Homo sapiens
MSSHHTTFPFDPERRVRSTLKKVFGFDSFKTPLQESATMAVVKGNKDVFVCMPTGAGKSLCYQLPALLAKGITIVVSPLIALIQDQVDHLLTLKVRVSSLNSKLSAQERKELLADLEREKPQTKILYITPEMAASSSFQPTLNSLVSRHLLSYLVVDEAHCVSQWGHDFRPDYLRLGALRSRLGHAPCVALTATATPQVQEDVFAALHLKKPVAIFKTPCFRANLFYDVQFKELISDPYGNLKDFCLKALGQEADKGLSGCGIVYCRTREACEQLAIELSCRGVNAKAYHAGLKASERTLVQNDWMEEKVPVIVATISFGMGVDKANVRFVAHWNIAKSMAGYYQESGRAGRDGKPSWCRLYYSRNDRDQVSFLIRKEVAKLQEKRGNKASDKATIMAFDALVTFCEELGCRHAAIAKYFGDALPACAKGCDHCQNPTAVRRRLEALERSSSWSKTCIGPSQGNGFDPELYEGGRKGYGDFSRYDEGSGGSGDEGRDEAHKREWNLFYQKQMQLRKGKDPKIEEFVPPDENCPLKEASSRRIPRLTVKAREHCLRLLEEALSSNRQSTRTADEADLRAKAVELEHETFRNAKVANLYKASVLKKVADIHRASKDGQPYDMGGSAKSCSAQAEPPEPNEYDIPPASHVYSLKPKRVGAGFPKGSCPFQTATELMETTRIREQAPQPERGGEHEPPSRPCGLLDEDGSEPLPGPRGEVPGGSAHYGGPSPEKKAKSSSGGSSLAKGRASKKQQLLATAAHKDSQSIARFFCRRVESPALLASAPEAEGACPSCEGVQGPPMAPEKYTGEEDGAGGHSPAPPQTEECLRERPSTCPPRDQGTPEVQPTPAKDTWKGKRPRSQQENPESQPQKRPRPSAKPSVVAEVKGSVSASEQGTLNPTAQDPFQLSAPGVSLKEAANVVVKCLTPFYKEGKFASKELFKGFARHLSHLLTQKTSPGRSVKEEAQNLIRHFFHGRARCESEADWHGLCGPQR

SEQ ID NO: 854984 - protein, 435 aa, Homo sapiens
MSSHHTTFPFDPERRVRSTLKKVFGFDSFKTPLQESATMAVVKGNKDVFVCMPTGAGKSLCYQLPALLAKGITIVVSPLIALIQDQVDHLLTLKVRVSSLNSKLSAQERKELLADLEREKPQTKILYITPEMAASSSFQPTLNSLVSRHLLSYLVVDEAHCVSQWGHDFRPDYLRLGALRSRLGHAPCVALTATATPQVQEDVFAALHLKKPVAIFKTPCFRANLFYDVQFKELISDPYGNLKDFCLKALGQEADKGLSGCGIVYCRTREACEQLAIELSCRGVNAKAYHAGLKASERTLVQNDWMEEKVPVIVATISFGMGVDKANVRFVAHWNIAKSMAGYYQESGRAGRDGKPSWCRLYYSRNDRDQVSFLIRKEVAKLQEKRGNKASDKATIMAFDALVTFCEELGRWGRGHGKSLRAAWCSQVVSRHAEL

SEQ ID NO: 854985 - protein, 187 aa, Homo sapiens
MGSPRPPGMREPPGPSAVMPALPSTSTCPPRDQGTPEVQPTPAKDTWKGKRPRSQQENPESQPQKRPRPSAKPSVVAEVKGSVSASEQGTLNPTAQDPFQLSAPGVSLKEAANVVVKCLTPFYKEGKFASKELFKGFARHLSHLLTQKTSPGRSVKEEAQNLIRHFFHGRARCESEADWHGLCGPQR

SEQ ID NO: 854986 - protein, 686 aa, Homo sapiens
MEEKVPVIVATISFGMGVDKANVRFVAHWNIAKSMAGYYQESGRAGRDGKPSWCRLYYSRNDRDQVSFLIRKEVAKLQEKRGNKASDKATIMAFDALVTFCEELGCRHAAIAKYFGDALPACAKGCDHCQNPTAVRRRLEALERSSSWSKTCIGPSQGNGFDPELYEGGRKGYGDFSRYDEGSGGSGDEGRDEAHKREWNLFYQKQMQLRKGKDPKIEEFVPPDENCPLKEASSRRIPRLTVKAREHCLRLLEEALSSNRQSTRTADEADLRAKAVELEHETFRNAKVANLYKASVLKKVADIHRASKDGQPYDMGGSAKSCSAQAEPPEPNEYDIPPASHVYSLKPKRVGAGFPKGSCPFQTATELMETTRIREQAPQPERGGEHEPPSRPCGLLDEDGSEPLPGPRGEVPGGSAHYGGPSPEKKAKSSSGGSSLAKGRASKKQQLLATAAHKDSQSIARFFCRRVESPALLASAPEAEGACPSCEGVQGPPMAPEKYTGEEDGAGGHSPAPPQTEECLRERPSTCPPRDQGTPEVQPTPAKDTWKGKRPRSQQENPESQPQKRPRPSAKPSVVAEVKGSVSASEQGTLNPTAQDPFQLSAPGVSLKEAANVVVKCLTPFYKEGKFASKELFKGFARHLSHLLTQKTSPGRSVKEEAQNLIRHFFHGRARCESEADWHGLCGPQR

SEQ ID NO: 854987 - protein, 823 aa, Homo sapiens
MSSHHTTFPFDPERRVRSTLKKVFGFDSFKTPLQESATMAVVKGNKDVFVCMPTGAGKSLCYQLPALLAKGITIVVSPLIALIQDQVDHLLTLKVRVSSLNSKLSAQERKELLADLEREKPQTKILYITPEMAASSSFQPTLNSLVSRHLLSYLVVDEAHCVSQWGHDFRPDYLRLGALRSRLGHAPCVALTATATPQVQEDVFAALHLKKPVAIFKTPCFRANLFYDVQFKELISDPYGNLKDFCLKALGQEADKGLSGCGIVYCRTREACEQLAIELSCRGVNAKAYHAGLKASERTLVQNDWMEEKVPVIVATISFGMGVDKANVRFVAHWNIAKSMAGYYQESGRAGRDGKPSWCRLYYSRNDRDQVSFLIRKEVAKLQEKRGNKASDKATIMAFDALVTFCEELGCRHAAIAKYFGDALPACAKGCDHCQNPTAVRRRLEALERSSSWSKTCIGPSQGNGFDPNEYDIPPASHVYSLKPKRVGAGFPKGSCPFQTATELMETTRIREQAPQPERGGEHEPPSRPCGLLDEDGSEPLPGPRGEVPGGSAHYGGPSPEKKAKSSSGGSSLAKGRASKKQQLLATAAHKDSQSIARFFCRRVESPALLASAPEAEGACPSCEGVQGPPMAPEKYTGEEDGAGGHSPAPPQTEECLRERPSTCPPRDQGTPEVQPTPAKDTWKGKRPRSQQENPESQPQKRPRPSAKPSVVAEVKGSVSASEQGTLNPTAQDPFQLSAPGVSLKEAANVVVKCLTPFYKEGKFASKELFKGFARHLSHLLTQKTSPGRSVKEEAQNLIRHFFHGRARCESEADWHGLCGPQR

SEQ ID NO: 854988 - protein, 589 aa, Homo sapiens
LCGAACSRCRHAAIAKYFGDALPACAKGCDHCQNPTAVRRRLEALERSSSWSKTCIGPSQGNGFDPELYEGGRKGYGDFSRYDEGSGGSGDEGRDEAHKREWNLFYQKQMQLRKGKDPKIEEFVPPDENCPLKEASSRRIPRLTVKAREHCLRLLEEALSSNRQSTRTADEADLRAKAVELEHETFRNAKVANLYKASVLKKVADIHRASKDGQPYDMGGSAKSCSAQAEPPEPNEYDIPPASHVYSLKPKRVGAGFPKGSCPFQTATELMETTRIREQAPQPERGGEHEPPSRPCGLLDEDGSEPLPGPRGEVPGGSAHYGGPSPEKKAKSSSGGSSLAKGRASKKQQLLATAAHKDSQSIARFFCRRVESPALLASAPEAEGACPSCEGVQGPPMAPEKYTGEEDGAGGHSPAPPQTEECLRERPSTCPPRDQGTPEVQPTPAKDTWKGKRPRSQQENPESQPQKRPRPSAKPSVVAEVKGSVSASEQGTLNPTAQDPFQLSAPGVSLKEAANVVVKCLTPFYKEGKFASKELFKGFARHLSHLLTQKTSPGRSVKEEAQNLIRHFFHGRARCESEADWHGLCGPQR

SEQ ID NO: 854989 - protein, 991 aa, Homo sapiens; identical to SEQ ID NO: 854983

SEQ ID NO: 854990 - protein, 410 aa, Homo sapiens
MSSHHTTFPFDPERRVRSTLKKVFGFDSFKTPLQESATMAVVKGNKDVFVCMPTGAGKSLCYQLPALLAKGITIVVSPLIALIQDQVDHLLTLKVRVSSLNSKLSAQERKELLADLEREKPQTKILYITPEMAASSSFQPTLNSLVSRHLLSYLVVDEAHCVSQWGHDFRPDYLRLGALRSRLGHAPCVALTATATPQVQEDVFAALHLKKPVAIFKTPCFRANLFYDVQFKELISDPYGNLKDFCLKALGQEADKGLSGCGIVYCRTREACEQLAIELSCRGVNAKAYHAGLKASERTLVQNDWMEEKVPVIVATISFGMGVDKANVRFVAHWNIAKSMAGYYQESGRAGRDGKPSWCRLYYSRNDRDQVSFLIRKEVAKLQEKRGNKASDKATIMAFDALVTFCEELG

SEQ ID NO: 854991 - protein, 1020 aa, Homo sapiens
MSSHHTTFPFDPERRVRSTLKKVFGFDSFKTPLQESATMAVVKGNKDVFVCMPTGAGKSLCYQLPALLAKGITIVVSPLIALIQDQVDHLLTLKVRVSSLNSKLSAQERKELLADLEREKPQTKILYITPEMAASSSFQPTLNSLVSRHLLSYLVVDEAHCVSQWGHDFRPDYLRLGALRSRLGHAPCVALTATATPQVQEDVFAALHLKKPVAIFKTPCFRANLFYDVQFKELISDPYGNLKDFCLKALGQEADKGLSGCGIVYCRTREACEQLAIELSCRGVNAKAYHAGLKASERTLVQNDWMEEKVPVIVATISFGMGVDKANVRFVAHWNIAKSMAGYYQESGRAGRDGKPSWCRLYYSRNDRDQVSFLIRKEVAKLQEKRGNKASDKATIMAFDALVTFCEELGCRHAAIAKYFGDALPACAKGCDHCQNPTAVRRRLEALERSSSWSKTCIGPSQGNGFDPELYEGGRKGYGDFSRYDEGSGGSGDEGRDEAHKREWNLFYQKQMQLRKGKDPKIEEFVPPDENCPLKEASSRRIPRLTVKAREHCLRLLEEALSSNRQSTRTADEADLRAKAVELEHETFRNAKVANLYKASVLKKVADIHRASKDGQPYDMGGSAKSCSAQAEPPEPNEYDIPPASHVYSLKPKRVGAGFPKGSCPFQTATELMETTRIREQAPQPERGGEHEPPSRPCGLLDEDGSEPLPGPRGEVPGGSAHYGGPSPEKKAKSSSGGSSLAKGRASKKQQLLATAAHKDSQSIARFFCRRVESPALLASAPEAEGACPSCEGVQGPPMAPEKYTGEEDGAGGHSPAPPQTEECLRERPSTCPPRDQGTPEVQPTPAKDTWKGKRPRSQQENPESQPQKRPRPSAKPSVVAEVKGSVSASEQGTLNPTAQDPFQLSAPGVSLKEAANVVVKCLTPFYKEGKFASKELFKGFARHLSHLLTQKTSPGRSVKEEAQNLIRHFFHGRARCESEADWHQQVRPRMTHARIWGRTAALPSQQLVTSGATQPCQVE

SEQ ID NO: 854992 - protein, 294 aa, Homo sapiens
MSSHHTTFPFDPERRVRSTLKKVFGFDSFKTPLQESATMAVVKGNKDVFVCMPTGAGKSLCYQLPALLAKGITIVVSPLIALIQDQVDHLLTLKVRVSSLNSKLSAQERKELLADLEREKPQTKILYITPEMAASSSFQPTLNSLVSRHLLSYLVVDEAHCVSQWGHDFRPDYLRLGALRSRLGHAPCVALTATATPQVQEDVFAALHLKKPVAIFKTPCFRANLFYDVQFKELISDPYGNLKDFCLKALGQEADKGVCRPLEYCQVYGWVLPGVWPGWQGWEAFLVPSLLLQE

SEQ ID NO: 854993 - protein, 385 aa, Homo sapiens
MSSHHTTFPFDPERRVRSTLKKVFGFDSFKTPLQESATMAVVKGNKDVFVCMPTGAGKSLCYQLPALLAKGITIVVSPLIALIQDQVDHLLTLKVRVSSLNSKLSAQERKELLADLEREKPQTKILYITPEMAASSSFQPTLNSLVSRHLLSYLVVDEAHCVSQWGHDFRPDYLRLGALRSRLGHAPCVALTATATPQVQEDVFAALHLKKPVAIFKTPCFRANLFYDVQFKELISDPYGNLKDFCLKALGQEADKGLSGCGIVYCRTREACEQLAIELSCRGVNAKAYHAGLKASERTLVQNDWMEEKVPVIVATISFGMGVDKANVRFVAHWNIAKSMAGYYQESGRAGRDGKPSWCRLYYSRNKVVLLWGMQACTQPFSKKK

SEQ ID NO: 854994 - protein, 410 aa, Homo sapiens; identical to SEQ ID NO: 854990

SEQ ID NO: 854995 - protein, 991 aa, Homo sapiens; identical to SEQ ID NO: 854983

SEQ ID NO: 854996 - protein, 1104 aa, Homo sapiens
MSSHHTTFPFDPERRVRSTLKKVFGFDSFKTPLQESATMAVVKGNKDVFVCMPTGAGKSLCYQLPALLAKGITIVVSPLIALIQDQVDHLLTLKVRVSSLNSKLSAQERKELLADLEREKPQTKILYITPEMAASSSFQPTLNSLVSRHLLSYLVVDEAHCVSQWGHDFRPDYLRLGALRSRLGHAPCVALTATATPQVQEDVFAALHLKKPVAIFKTPCFRANLFYDVQFKELISDPYGNLKDFCLKALGQEADKGLSGCGIVYCRTREACEQLAIELSCRGVNAKAYHAGLKASERTLVQNDWMEEKVPVIVATISFGMGVDKANVRFVAHWNIAKSMAGYYQESGRAGRDGKPSWCRLYYSRNDRDQVSFLIRKEVAKLQEKRGNKASDKATIMAFDALVTFCEELGCRHAAIAKYFGDALPACAKGCDHCQNPTAVRRRLEALERSSSWSKTCIGPSQGNGFDPELYEGGRKGYGDFSRYDEGSGGSGDEGRDEAHKREWNLFYQKQMQLRKGKDPKIEEFVPPDENCPLKEASSRRIPRLTVKAREHCLRLLEEALSSNRQSTRTADEWFHDHWAEEHSKLSFPWRLQDPVNPGLFGPPLPRLYLSYSRGLPLQPHQGQAWLQLRCYQQLLRDSKPQGAQRALIRIPVPKAYPTRPGVPQELSREKPRPPDTLCLLPCTHRADLRAKAVELEHETFRNAKVANLYKASVLKKVADIHRASKDGQPYDMGGSAKSCSAQAEPPEPNEYDIPPASHVYSLKPKRVGAGFPKGSCPFQTATELMETTRIREQAPQPERGGEHEPPSRPCGLLDEDGSEPLPGPRGEVPGGSAHYGGPSPEKKAKSSSGGSSLAKGRASKKQQLLATAAHKDSQSIARFFCRRVESPALLASAPEAEGACPSCEGVQGPPMAPEKYTGEEDGAGGHSPAPPQTEECLRERPSTCPPRDQGTPEVQPTPAKDTWKGKRPRSQQENPESQPQKRPRPSAKPSVVAEVKGSVSASEQGTLNPTAQDPFQLSAPGVSLKEAANVVVKCLTPFYKEGKFASKELFKGFARHLSHLLTQKTSPGRSVKEEAQNLIRHFFHGRARCESEADWHGLCGPQR

SEQ ID NO: 854997 - protein, 509 aa, Homo sapiens
DSRGSPIGYGDEGRDEAHKREWNLFYQKQMQLRKGKDPKIEEFVPPDENCPLKEASSRRIPRLTVKAREHCLRLLEEALSSNRQSTRTADEADLRAKAVELEHETFRNAKVANLYKASVLKKVADIHRASKDGQPYDMGGSAKSCSAQAEPPEPNEYDIPPASHVYSLKPKRVGAGFPKGSCPFQTATELMETTRIREQAPQPERGGEHEPPSRPCGLLDEDGSEPLPGPRGEVPGGSAHYGGPSPEKKAKSSSGGSSLAKGRASKKQQLLATAAHKDSQSIARFFCRRVESPALLASAPEAEGACPSCEGVQGPPMAPEKYTGEEDGAGGHSPAPPQTEECLRERPSTCPPRDQGTPEVQPTPAKDTWKGKRPRSQQENPESQPQKRPRPSAKPSVVAEVKGSVSASEQGTLNPTAQDPFQLSAPGVSLKEAANVVVKCLTPFYKEGKFASKELFKGFARHLSHLLTQKTSPGRSVKEEAQNLIRHFFHGRARCESEADWHGLCGPQR

SEQ ID NO: 854998 - protein, 1012 aa, Homo sapiens
MSSHHTTFPFDPERRVRSTLKKVFGFDSFKTPLQESATMAVVKGNKDVFVCMPTGAGKSLCYQLPALLAKGITIVVSPLIALIQDQVDHLLTLKVRVSSLNSKLSAQERKELLADLEREKPQTKILYITPEMAASSSFQPTLNSLVSRHLLSYLVVDEAHCVSQWGHDFRPDYLRLGALRSRLGHAPCVALTATATPQVQEDVFAALHLKKPVAIFKTPCFRANLFYDVQFKELISDPYGNLKDFCLKALGQEADKGLSGCGIVYCRTREACEQLAIELSCRGVNAKAYHAGLKASERTLVQNDWMEEKVPVIVATISFGMGVDKANVRFVAHWNIAKSMAGYYQESGRAGRDGKPSWCRLYYSRNDRDQVSFLIRKEVAKLQEKRGNKASDKATIMAFDALVTFCEELGCRHAAIAKYFGDALPACAKGCDHCQNPTAVRRRLEALERSSSWSKTCIGPSQGNGFDPELYEGGRKGYGDFSRYDEGSGGSGDEGRDEAHKREWNLFYQKQMQLRKGKDPKIEEFVPPDENCPLKEASSRRIPRLTVKAREHCLRLLEEALSSNRQSTRTADEADLRAKAVELEHETFRNAKVANLYKASVLKKVADIHRASKDGQPYDMGGSAKSCSAQAEPPEPNEYDIPPASHVYSLKPKRVGAGFPKGSCPFQTATELMETTRIREQAPQPERGGEHEPPSRPCGLLDEDGSEPLPGPRGEVPGGSAHYGGPSPEKKAKSSSGGSSLAKGRASKKQQLLATAAHKDSQSIARFFCRRVESPALLASAPEAEGACPSCEGVQGPPMAPEKYTGEEDGAGGHSPAPPQTEECLRERPRPPGMREPPGPSAVMPALPSTSTCPPRDQGTPEVQPTPAKDTWKGKRPRSQQENPESQPQKRPRPSAKPSVVAEVKGSVSASEQGTLNPTAQDPFQLSAPGVSLKEAANVVVKCLTPFYKEGKFASKELFKGFARHLSHLLTQKTSPGRSVKEEAQNLIRHFFHGRARCESEADWHGLCGPQR

SEQ ID NO: 854999 - protein, 991 aa, Homo sapiens; identical to SEQ ID NO: 854983

SEQ ID NO: 855000 - protein, 698 aa, Homo sapiens
MSSHHTTFPFDPERRVRSTLKKVFGFDSFKTPLQESATMAVVKGNKDVFVCMPTGAGKSLCYQLPALLAKGITIVVSPLIALIQDQVDHLLTLKVRVSSLNSKLSAQERKELLADLEREKPQTKILYITPEMAASSSFQPTLNSLVSRHLLSYLVVDEAHCVSQWGHDFRPDYLRLGALRSRLGHAPCVALTATATPQVQEDVFAALHLKKPVAIFKTPCFRANLFYDVQFKELISDPYGNLKDFCLKALGQEADKGLSGCGIVYCRTREACEQLAIELSCRGVNAKAYHAGLKASERTLVQNDWMEEKVPVIVATISFGMGVDKANVRFVAHWNIAKSMAGYYQESGRAGRDGKPSWCRLYYSRNDRDQVSFLIRKEVAKLQEKRGNKASDKATIMAFDALVTFCEELGCRHAAIAKYFGDALPACAKGCDHCQNPTAVRRRLEALERSSSWSKTCIGPSQGNGFDPELYEGGRKGYGDFSRYDEGSGGSGDEGRDEAHKREWNLFYQKQMQLRKGKDPKIEEFVPPDENCPLKEASSRRIPRLTVKAREHCLRLLEEALSSNRQSTRTADEADLRAKAVELEHETFRNAKVANLYKASVLKKVADIHRASKDGQPYDMGGSAKSCSAQAEPPEPNEYDIPPASHVYSVSCGPVASRPVTRKGFTSPLPSGVHLLPRPGSPPGSCLPLPSHTPESPV

SEQ ID NO: 855001 - protein, 329 aa, Homo sapiens
MSSHHTTFPFDPERRVRSTLKKVFGFDSFKTPLQESATMAVVKGNKDVFVCMPTGAGKSLCYQLPALLAKGITIVVSPLIALIQDQVDHLLTLKVRVSSLNSKLSAQERKELLADLEREKPQTKILYITPEMAASSSFQPTLNSLVSRHLLSYLVVDEAHCVSQWGHDFRPDYLRLGALRSRLGHAPCVALTATATPQVQEDVFAALHLKKPVAIFKTPCFRANLFYDVQFKELISDPYGNLKDFCLKALGQEADKGLSGCGIVYCRTREACEQLAIELSCRGVNAKAYHAGLKASERTLVQNDWMEEKVPVIVATISFGMGVDKANVR

SEQ ID NO: 855002 - protein, 292 aa, Homo sapiens
MSSHHTTFPFDPERRVRSTLKKVFGFDSFKTPLQESATMAVVKGNKDVFVCMPTGAGKSLCYQLPALLAKGITIVVSPLIALIQDQVDHLLTLKVRVSSLNSKLSAQERKELLADLEREKPQTKILYITPEMAASSSFQPTLNSLVSRHLLSYLVVDEAHCVSQWGHDFRPDYLRLGALRSRLGHAPCVALTATATPQVQEDVFAALHLKKPVAIFKTPCFRANLFYDVQFKELISDPYGNLKDFCLKALGQEADKGLSGCGIVYCRTREACEQLAIELSCRGVNAKAYHAG

SEQ ID NO: 855003 - protein, 352 aa, Homo sapiens
MAEPRQEFEVMEDHAGTYGLGDRKDQGGYTMHQDQEGDTDAGLKAEEAGIGDTPSLEDEAAGHVTQARMVSKSKDGTGSDDKKAKGADGKTKIATPRGAAPPGQKGQANATRIPAKTPPAPKTPPSSGEPPKSGDRSGYSSPGSPGTPGSRSRTPSLPTPPTREPKKVAVVRTPPKSPSSAKSRLQTAPVPMPDLKNVKSKIGSTENLKHQPGGGKVQIVYKPVDLSKVTSKCGSLGNIHHKPGGGQVEVKSEKLDFKDRVQSKIGSLDNITHVPGGGNKKIETHKLTFRENAKAKTDHGAEIVYKSPVVSGDTSPRHLSNVSSTGSIDMVDSPQLATLADEVSASLAKQGL

SEQ ID NO: 855004 - protein, 383 aa, Homo sapiens
MAEPRQEFEVMEDHAGTYGLGDRKDQGGYTMHQDQEGDTDAGLKAEEAGIGDTPSLEDEAAGHVTQARMVSKSKDGTGSDDKKAKGADGKTKIATPRGAAPPGQKGQANATRIPAKTPPAPKTPPSSGEPPKSGDRSGYSSPGSPGTPGSRSRTPSLPTPPTREPKKVAVVRTPPKSPSSAKSRLQTAPVPMPDLKNVKSKIGSTENLKHQPGGGKVQIINKKLDLSNVQSKCGSKDNIKHVPGGGSVQIVYKPVDLSKVTSKCGSLGNIHHKPGGGQVEVKSEKLDFKDRVQSKIGSLDNITHVPGGGNKKIETHKLTFRENAKAKTDHGAEIVYKSPVVSGDTSPRHLSNVSSTGSIDMVDSPQLATLADEVSASLAKQGL

SEQ ID NO: 855005 - protein, 758 aa, Homo sapiens
MAEPRQEFEVMEDHAGTYGLGDRKDQGGYTMHQDQEGDTDAGLKESPLQTPTEDGSEEPGSETSDAKSTPTAEDVTAPLVDEGAPGKQAAAQPHTEIPEGTTAEEAGIGDTPSLEDEAAGHVTQEPESGKVVQEGFLREPGPPGLSHQLMSGMPGAPLLPEGPREATRQPSGTGPEDTEGGRHAPELLKHQLLGDLHQEGPPLKGAGGKERPGSKEEVDEDRDVDESSPQDSPPSKASPAQDGRPPQTAAREATSIPGFPAEGAIPLPVDFLSKVSTEIPASEPDGPSVGRAKGQDAPLEFTFHVEITPNVQKEQAHSEEHLGRAAFPGAPGEGPEARGPSLGEDTKEADLPEPSEKQPAAAPRGKPVSRVPQLKARMVSKSKDGTGSDDKKAKTSTRSSAKTLKNRPCLSPKHPTPGSSDPLIQPSSPAVCPEPPSSPKHVSSVTSRTGSSGAKEMKLKGADGKTKIATPRGAAPPGQKGQANATRIPAKTPPAPKTPPSSGEPPKSGDRSGYSSPGSPGTPGSRSRTPSLPTPPTREPKKVAVVRTPPKSPSSAKSRLQTAPVPMPDLKNVKSKIGSTENLKHQPGGGKVQIINKKLDLSNVQSKCGSKDNIKHVPGGGSVQIVYKPVDLSKVTSKCGSLGNIHHKPGGGQVEVKSEKLDFKDRVQSKIGSLDNITHVPGGGNKKIETHKLTFRENAKAKTDHGAEIVYKSPVVSGDTSPRHLSNVSSTGSIDMVDSPQLATLADEVSASLAKQGL

SEQ ID NO: 855006 - protein, 352 aa, Homo sapiens; identical to SEQ ID NO: 855003

SEQ ID NO: 855007 - protein, 441 aa, Homo sapiens
MAEPRQEFEVMEDHAGTYGLGDRKDQGGYTMHQDQEGDTDAGLKESPLQTPTEDGSEEPGSETSDAKSTPTAEDVTAPLVDEGAPGKQAAAQPHTEIPEGTTAEEAGIGDTPSLEDEAAGHVTQARMVSKSKDGTGSDDKKAKGADGKTKIATPRGAAPPGQKGQANATRIPAKTPPAPKTPPSSGEPPKSGDRSGYSSPGSPGTPGSRSRTPSLPTPPTREPKKVAVVRTPPKSPSSAKSRLQTAPVPMPDLKNVKSKIGSTENLKHQPGGGKVQIINKKLDLSNVQSKCGSKDNIKHVPGGGSVQIVYKPVDLSKVTSKCGSLGNIHHKPGGGQVEVKSEKLDFKDRVQSKIGSLDNITHVPGGGNKKIETHKLTFRENAKAKTDHGAEIVYKSPVVSGDTSPRHLSNVSSTGSIDMVDSPQLATLADEVSASLAKQGL

SEQ ID NO: 855008 - protein, 383 aa, Homo sapiens; identical to SEQ ID NO: 855004

SEQ ID NO: 855009 - protein, 412 aa, Homo sapiens
MAEPRQEFEVMEDHAGTYGLGDRKDQGGYTMHQDQEGDTDAGLKESPLQTPTEDGSEEPGSETSDAKSTPTAEAEEAGIGDTPSLEDEAAGHVTQARMVSKSKDGTGSDDKKAKGADGKTKIATPRGAAPPGQKGQANATRIPAKTPPAPKTPPSSGEPPKSGDRSGYSSPGSPGTPGSRSRTPSLPTPPTREPKKVAVVRTPPKSPSSAKSRLQTAPVPMPDLKNVKSKIGSTENLKHQPGGGKVQIINKKLDLSNVQSKCGSKDNIKHVPGGGSVQIVYKPVDLSKVTSKCGSLGNIHHKPGGGQVEVKSEKLDFKDRVQSKIGSLDNITHVPGGGNKKIETHKLTFRENAKAKTDHGAEIVYKSPVVSGDTSPRHLSNVSSTGSIDMVDSPQLATLADEVSASLAKQGL

SEQ ID NO: 855010 - protein, 383 aa, Homo sapiens; identical to SEQ ID NO: 855004

SEQ ID NO: 855011 - protein, 653 aa, Homo sapiens
EISAHVQPGPCGEASGVSGPCLGEKEPEAPVPLTASLPQHRPVCPAPPPTGGPQEPSLEWGQKGGDWAEKGPAFPKPATTAYLHTEPESGKVVQEGFLREPGPPGLSHQLMSGMPGAPLLPEGPREATRQPSGTGPEDTEGGRHAPELLKHQLLGDLHQEGPPLKGAGGKERPGSKEEVDEDRDVDESSPQDSPPSKASPAQDGRPPQTAAREATSIPGFPAEGAIPLPVDFLSKVSTEIPASEPDGPSVGRAKGQDAPLEFTFHVEITPNVQKEQAHSEEHLGRAAFPGAPGEGPEARGPSLGEDTKEADLPEPSEKQPAAAPRGKPVSRVPQLKARMVSKSKDGTGSDDKKAKGADGKTKIATPRGAAPPGQKGQANATRIPAKTPPAPKTPPSSGEPPKSGDRSGYSSPGSPGTPGSRSRTPSLPTPPTREPKKVAVVRTPPKSPSSAKSRLQTAPVPMPDLKNVKSKIGSTENLKHQPGGGKVQIINKKLDLSNVQSKCGSKDNIKHVPGGGSVQIVYKPVDLSKVTSKCGSLGNIHHKPGGGQVEVKSEKLDFKDRVQSKIGSLDNITHVPGGGNKKIETHKLTFRENAKAKTDHGAEIVYKSPVVSGDTSPRHLSNVSSTGSIDMVDSPQLATLADEVSASLAKQGL

SEQ ID NO: 855012 - protein, 352 aa, Homo sapiens; identical to SEQ ID NO: 855003

SEQ ID NO: 855013 - protein, 133 aa, Homo sapiens
MAEPRQEFEVMEDHAGTYGLGDRKDQGGYTMHQDQEGDTDAGLKESPLQTPTEDGSEEPGSETSDAKSTPTAEAEEAGIGDTPSLEDEAAGHVTQARMVSKSKDGTGSDDKKAKGADGKTKIATPRGLVRGTE

SEQ ID NO: 855014 - protein, 165 aa, Homo sapiens
MVFPSSSLSGVKGWQRQCSVQFLTQAGPGYRSSALCVTARQLTQCRGSDRVRGSLLTPSVSRTLAFSWTCCSSEPFCHCHHLVRNSGRICTQSCAQAVEPTLAQRYCHMTRHCHHWASWVAQCRLDGPGGCLCHASASDGSPVSPLPALPCPQQLPGDSQWPGCF

SEQ ID NO: 855015 - protein, 352 aa, Homo sapiens; identical to SEQ ID NO: 855003

SEQ ID NO: 855016 - protein, 352 aa, Homo sapiens; identical to SEQ ID NO: 855003

SEQ ID NO: 855017 - protein, 352 aa, Homo sapiens; identical to SEQ ID NO: 855003

SEQ ID NO: 855018 - protein, 623 aa, Homo sapiens
MFKGKCPKVQRAWFLVNNNCLAFTPLHLLTHTPAEEAGIGDTPSLEDEAAGHVTQEPESGKVVQEGFLREPGPPGLSHQLMSGMPGAPLLPEGPREATRQPSGTGPEDTEGGRHAPELLKHQLLGDLHQEGPPLKGAGGKERPGSKEEVDEDRDVDESSPQDSPPSKASPAQDGRPPQTAAREATSIPGFPAEGAIPLPVDFLSKVSTEIPASEPDGPSVGRAKGQDAPLEFTFHVEITPNVQKEQAHSEEHLGRAAFPGAPGEGPEARGPSLGEDTKEADLPEPSEKQPAAAPRGKPVSRVPQLKARMVSKSKDGTGSDDKKAKGADGKTKIATPRGAAPPGQKGQANATRIPAKTPPAPKTPPSSGEPPKSGDRSGYSSPGSPGTPGSRSRTPSLPTPPTREPKKVAVVRTPPKSPSSAKSRLQTAPVPMPDLKNVKSKIGSTENLKHQPGGGKVQIINKKLDLSNVQSKCGSKDNIKHVPGGGSVQIVYKPVDLSKVTSKCGSLGNIHHKPGGGQVEVKSEKLDFKDRVQSKIGSLDNITHVPGGGNKKIETHKLTFRENAKAKTDHGAEIVYKSPVVSGDTSPRHLSNVSSTGSIDMVDSPQLATLADEVSASLAKQGL

SEQ ID NO: 855019 - protein, 352 aa, Homo sapiens; identical to SEQ ID NO: 855003

SEQ ID NO: 855020 - protein, 1817 aa, Homo sapiens
MSGASVKVAVRVRPFNSRETSKESKCIIQMQGNSTSIINPKNPKEAPKSFSFDYSYWSHTSPEDPCFASQNRVYNDIGKEMLLHAFEGYNVCIFAYGQTGAGKSYTMMGKQEESQAGIIPQLCEELFEKINDNCNEEMSYSVEVSYMEIYCERVRDLLNPKNKGNLRVREHPLLGPYVEDLSKLAVTSYTDIADLMDAGNKARTVAATNMNETSSRSHAVFTIVFTQKKHDNETNLSTEKVSKISLVDLAGSERADSTGAKGTRLKEGANINKSLTTLGKVISALAEVSKKKKKTDFIPYRDSVLTWLLRENLGGNSRTAMVAALSPADINYDETLSTLRYADRAKQIKCNAVINEDPNAKLVRELKEEVTRLKDLLRAQGLGDIIDIDPLIDDYSGSGSKYLKDFQNNKHRYLLASENQRPGHFSTASMGSLTSSPSSCSLSSQVGLTSVTSIQERIMSTPGGEEAIERLKESEKIIAELNETWEEKLRKTEAIRMEREALLAEMGVAIREDGGTLGVFSPKKTPHLVNLNEDPLMSECLLYYIKDGITRVGQADAERRQDIVLSGAHIKEEHCIFRSERSNSGEVIVTLEPCERSETYVNGKRVSQPVQLRSGNRIIMGKNHVFRFNHPEQARAEREKTPSAETPSEPVDWTFAQRELLEKQGIDMKQEMEKRLQEMEILYKKEKEEADLLLEQQRLDYESKLQALQKQVETRSLAAETTEEEEEEEEVPWTQHEFELAQWAFRKWKSHQFTSLRDLLWGNAVYLKEANAISVELKKKVQFQFVLLTDTLYSPLPPELLPTEMEKTHEDRPFPRTVVAVEVQDLKNGATHYWSLEKLKQRLDLMREMYDRAGEMASSAQDESETTVTGSDPFYDRFHWFKLVGSSPIFHGCVNERLADRTPSPTFSTADSDITELADEQQDEMEDFDDEAFVDDAGSDAGTEEGSDLFSDGHDPFYDRSPWFILVGRAFVYLSNLLYPVPLIHRVAIVSEKGEVRGFLRVAVQAIAADEEAPDYGSGIRQSGTAKISFDNEYFNQSDFSSVAMTRSGLSLEELRIVEGQGQSSEVITPPEEISRINDLDLKSSTLLDGKMVMEGFSEEIGNHLKLGSAFTFRVTVLQASGILPEYADIFCQFNFLHRHDEAFSTEPLKNNGRGSPLAFYHVQNIAVEITESFVDYIKTKPIVFEVFGHYQQHPLHLQGQELNSPPQPCRRFFPPPMPLSKPVPATKLNTMSKTSLGQSMSKYDLLVWFEISELEPTGEYIPAVVDHTAGLPCQGTFLLHQGIQRRITVTIIHEKGSELHWKDVRELVVGRIRNKPEVDEAAVDAILSLNIISAKYLKSSHNSSRTFYRFEAVWDSSLHNSLLLNRVTPYGEKIYMTLSAYLELDHCIQPAVITKDVCMVFYSRDAKISPPRSLRSLFGSGYSKSPDSNRVTGIYELSLCKMSDTGSPGMQRRRRKILDTSVAYVRGEENLAGWRPRGDSLILEHQWELEKLELLHEVEKTRHFLLLRERLGDSIPKSLSDSLSPSLSSGTLSTSTSISSQISTTTFESAITPSESSGYDSGDIESLVDREKELATKCLQLLTHTFNREFSQVHGSVSDCKLSDISPIGRDPSESSFSSATLTPSSTCPSLVDSRSNSLDQKTPEANSRASSPCPEFEQFQIVPAVETPYLARAGKNEFLNLVPDIEEIRPSSVVSKKGYLHFKEPLYSNWAKHFVVVRRPYVFIYNSDKDPVERGIINLSTAQVEYSEDQQAMVKTPNTFAVCTKHRGVLLQALNDKDMNDWLYAFNPLLAGTIRPGHLASEIIREDKSVSFSCQ

SEQ ID NO: 855021 - protein, 1770 aa, Homo sapiens
MSGASVKVAVRVRPFNSRETSKESKCIIQMQGNSTSIINPKNPKEAPKSFSFDYSYWSHTSPEDPCFASQNRVYNDIGKEMLLHAFEGYNVCIFAYGQTGAGKSYTMMGKQEESQAGIIPQLCEELFEKINDNCNEEMSYSVEVSYMEIYCERVRDLLNPKNKGNLRVREHPLLGPYVEDLSKLAVTSYTDIADLMDAGNKARTVAATNMNETSSRSHAVFTIVFTQKKHDNETNLSTEKVSKISLVDLAGSERADSTGAKGTRLKEGANINKSLTTLGKVISALAEVSKKKKKTDFIPYRDSVLTWLLRENLGGNSRTAMVAALSPADINYDETLSTLRYADRAKQIKCNAVINEDPNAKLVRELKEEVTRLKDLLRAQGLGDIIDTSMGSLTSSPSSCSLSSQVGLTSVTSIQERIMSTPGGEEAIERLKESEKIIAELNETWEEKLRKTEAIRMEREALLAEMGVAIREDGGTLGVFSPKKTPHLVNLNEDPLMSECLLYYIKDGITRVGQADAERRQDIVLSGAHIKEEHCIFRSERSNSGEVIVTLEPCERSETYVNGKRVSQPVQLRSGNRIIMGKNHVFRFNHPEQARAEREKTPSAETPSEPVDWTFAQRELLEKQGIDMKQEMEKRLQEMEILYKKEKEEADLLLEQQRLDYESKLQALQKQVETRSLAAETTEEEEEEEEVPWTQHEFELAQWAFRKWKSHQFTSLRDLLWGNAVYLKEANAISVELKKKVQFQFVLLTDTLYSPLPPELLPTEMEKTHEDRPFPRTVVAVEVQDLKNGATHYWSLEKLKQRLDLMREMYDRAGEMASSAQDESETTVTGSDPFYDRFHWFKLVGSSPIFHGCVNERLADRTPSPTFSTADSDITELADEQQDEMEDFDDEAFVDDAGSDAGTEEGSDLFSDGHDPFYDRSPWFILVGRAFVYLSNLLYPVPLIHRVAIVSEKGEVRGFLRVAVQAIAADEEAPDYGSGIRQSGTAKISFDNEYFNQSDFSSVAMTRSGLSLEELRIVEGQGQSSEVITPPEEISRINDLDLKSSTLLDGKMVMEGFSEEIGNHLKLGSAFTFRVTVLQASGILPEYADIFCQFNFLHRHDEAFSTEPLKNNGRGSPLAFYHVQNIAVEITESFVDYIKTKPIVFEVFGHYQQHPLHLQGQELNSPPQPCRRFFPPPMPLSKPVPATKLNTMSKTSLGQSMSKYDLLVWFEISELEPTGEYIPAVVDHTAGLPCQGTFLLHQGIQRRITVTIIHEKGSELHWKDVRELVVGRIRNKPEVDEAAVDAILSLNIISAKYLKSSHNSSRTFYRFEAVWDSSLHNSLLLNRVTPYGEKIYMTLSAYLELDHCIQPAVITKDVCMVFYSRDAKISPPRSLRSLFGSGYSKSPDSNRVTGIYELSLCKMSDTGSPGMQRRRRKILDTSVAYVRGEENLAGWRPRGDSLILEHQWELEKLELLHEVEKTRHFLLLRERLGDSIPKSLSDSLSPSLSSGTLSTSTSISSQISTTTFESAITPSESSGYDSGDIESLVDREKELATKCLQLLTHTFNREFSQVHGSVSDCKLSDISPIGRDPSESSFSSATLTPSSTCPSLVDSRSNSLDQKTPEANSRASSPCPEFEQFQIVPAVETPYLARAGKNEFLNLVPDIEEIRPSSVVSKKGYLHFKEPLYSNWAKHFVVVRRPYVFIYNSDKDPVERGIINLSTAQVEYSEDQQAMVKTPNTFAVCTKHRGVLLQALNDKDMNDWLYAFNPLLAGTIRSKLSRRCPSQSKY

SEQ ID NO: 855022 - protein, 579 aa, Homo sapiens [sequence omitted]

SEQ ID NO: 855023 - protein, 593 aa, Homo sapiens [sequence omitted]

SEQ ID NO: 855024 - protein, 1864 aa, Homo sapiens
MSGASVKVAVRVRPFNSRETSKESKCIIQMQGNSTSIINPKNPKEAPKSFSFDYSYWSHTSPEDPCFASQNRVYNDIGKEMLLHAFEGYNVCIFAYGQTGAGKSYTMMGKQEESQAGIIPQLCEELFEKINDNCNEEMSYSVEVSYMEIYCERVRDLLNPKNKGNLRVREHPLLGPYVEDLSKLAVTSYTDIADLMDAGNKARTVAATNMNETSSRSHAVFTIVFTQKKHDNETNLSTEKVSKISLVDLAGSERADSTGAKGTRLKEGANINKSLTTLGKVISALAEVSKKKKKTDFIPYRDSVLTWLLRENLGGNSRTAMVAALSPADINYDETLSTLRYADRAKQIKCNAVINEDPNAKLVRELKEEVTRLKDLLRAQGLGDIIDIDPLIDDYSGSGSKYLKDFQNNKHRYLLASENQRPGHFSTASMGSLTSSPSSCSLSSQVGLTSVTSIQERIMSTPGGEEAIERLKESEKIIAELNETWEEKLRKTEAIRMEREALLAEMGVAIREDGGTLGVFSPKKTPHLVNLNEDPLMSECLLYYIKDGITRVGQADAERRQDIVLSGAHIKEEHCIFRSERSNSGEVIVTLEPCERSETYVNGKRVSQPVQLRSGNRIIMGKNHVFRFNHPEQARAEREKTPSAETPSEPVDWTFAQRELLEKQGIDMKQEMEKRLQEMEILYKKEKEEADLLLEQQRLDYESKLQALQKQVETRSLAAETTEEEEEEEEVPWTQHEFELAQWAFRKWKSHQFTSLRDLLWGNAVYLKEANAISVELKKKVQFQFVLLTDTLYSPLPPELLPTEMEKTHEDRPFPRTVVAVEVQDLKNGATHYWSLEKLKQRLDLMREMYDRAGEMASSAQDESETTVTGSDPFYDRFHWFKLVGSSPIFHGCVNERLADRTPSPTFSTADSDITELADEQQDEMEDFDDEAFVDDAGSDAGTEEGSDLFSDGHDPFYDRSPWFILVGRAFVYLSNLLYPVPLIHRVAIVSEKGEVRGFLRVAVQAIAADEEAPDYGSGIRQSGTAKISFDNEYFNQSDFSSVAMTRSGLSLEELRIVEGQGQSSEVITPPEEISRINDLDLKSSTLLDGKMVMEGFSEEIGNHLKLGSAFTFRVTVLQASGILPEYADIFCQFNFLHRHDEAFSTEPLKNNGRGSPLAFYHVQNIAVEITESFVDYIKTKPIVFEVFGHYQQHPLHLQGQELNSPPQPCRRFFPPPMPLSKPVPATKLNTMSKTSLGQSMSKYDLLVWFEISELEPTGEYIPAVVDHTAGLPCQGTFLLHQGIQRRITVTIIHEKGSELHWKDVRELVVGRIRNKPEVDEAAVDAILSLNIISAKYLKSSHNSSRTFYRFEAVWDSSLHNSLLLNRVTPYGEKIYMTLSAYLELDHCIQPAVITKDVCMVFYSRDAKISPPRSLRSLFGSGYSKSPDSNRVTGIYELSLCKMSDTGSPGMQRRRRKILDTSVAYVRGEENLAGWRPRGDSLILEHQWELEKLELLHEVSRGRVVQMQELSDKIAKVSVFLPAAACDHSFSLFSPEVLTSFVFAIAVVLIFQVEKTRHFLLLRERLGDSIPKSLSDSLSPSLSSGTLSTSTSISSQISTTTFESAITPSESSGYDSGDIESLVDREKELATKCLQLLTHTFNREFSQVHGSVSDCKLSDISPIGRDPSESSFSSATLTPSSTCPSLVDSRSNSLDQKTPEANSRASSPCPEFEQFQIVPAVETPYLARAGKNEFLNLVPDIEEIRPSSVVSKKGYLHFKEPLYSNWAKHFVVVRRPYVFIYNSDKDPVERGIINLSTAQVEYSEDQQAMVKTPNTFAVCTKHRGVLLQALNDKDMNDWLYAFNPLLAGTIRSKLSRRCPSQSKY

SEQ ID NO: 855025 - protein, 1193 aa, Homo sapiens
MSGASVKVAVRVRPFNSRETSKESKCIIQMQGNSTSIINPKNPKEAPKSFSFDYSYWSHTSPEDPCFASQNRVYNDIGKEMLLHAFEGYNVCIFAYGQTGAGKSYTMMGKQEESQAGIIPQLCEELFEKINDNCNEEMSYSVEVSYMEIYCERVRDLLNPKNKGNLRVREHPLLGPYVEDLSKLAVTSYTDIADLMDAGNKARTVAATNMNETSSRSHAVFTIVFTQKKHDNETNLSTEKVSKISLVDLAGSERADSTGAKGTRLKEGANINKSLTTLGKVISALAEVSKKKKKTDFIPYRDSVLTWLLRENLGGNSRTAMVAALSPADINYDETLSTLRYADRAKQIKCNAVINEDPNAKLVRELKEEVTRLKDLLRAQGLGDIIDIDPLIDDYSGSGSKYLKDFQNNKHRYLLASENQRPGHFSTASMGSLTSSPSSCSLSSQVGLTSVTSIQERIMSTPGGEEAIERLKESEKIIAELNETWEEKLRKTEAIRMEREALLAEMGVAIREDGGTLGVFSPKKTPHLVNLNEDPLMSECLLYYIKDGITRVGQADAERRQDIVLSGAHIKEEHCIFRSERSNSGEVIVTLEPCERSETYVNGKRVSQPVQLRSGNRIIMGKNHVFRFNHPEQARAEREKTPSAETPSEPVDWTFAQRELLEKQGIDMKQEMEKRLQEMEILYKKEKEEADLLLEQQRLDADSDSGDDSDKRSCEESWKLITSLREKLPPSKLQTIVKKCGLPSSGKKREPIKMYQIPQRRRLSKDSKWVTISDLKIQAVKEICYEVALNDFRHSRQEIEALAIVKMKELCAMYGKKDPNERDSWRAVARDVWDTVGVGDEKIEDVMATGKGSTDVDDLKVHIDKLEDILQEVKKQNNMKDEEIKVLRNKMLKMEKVLPLIGSQEQKSPGSHKAKEPVGAGVSSTSENNVSKGDNGELAKEERVSQLMNGDPAFRRGRLRWMRQEQIRFKNLQQQEITKQLRRQNVPHRFIPPENRKPRFPFKSNPKHRNSWSPGTHIIITEDEVIELRIPKDDEARKGNKEESQEKGGKGAFKDPQFPWGSQGMRSQDHIQVSKQHINNQQQPPQLRWRSNSLNNGQPKSTRCQASASAESLNSHSGHPTADVQTFQAKRHIHQHRQSYCNYNTGGQLEGNAATSYQKQTDKPSHCSQFVTPPRMRRQFSAPNLKAGRETTV

SEQ ID NO: 855026 - protein, 1303 aa, Homo sapiens
MSGASVKVAVRVRPFNSRETSKESKCIIQMQGNSTSIINPKNPKEAPKSFSFDYSYWSHTSPEDPCFASQNRVYNDIGKEMLLHAFEGYNVCIFAYGQTGAGKSYTMMGKQEESQAGIIPQLCEELFEKINDNCNEEMSYSVEVSYMEIYCERVRDLLNPKNKGNLRVREHPLLGPYVEDLSKLAVTSYTDIADLMDAGNKARTVAATNMNETSSRSHAVFTIVFTQKKHDNETNLSTEKVSKISLVDLAGSERADSTGAKGTRLKEGANINKSLTTLGKVISALAEVSKKKKKTDFIPYRDSVLTWLLRENLGGNSRTAMVAALSPADINYDETLSTLRYADRAKQIKCNAVINEDPNAKLVRELKEEVTRLKDLLRAQGLGDIIDIDPLIDDYSGSGSKYLKDFQNNKHRYLLASENQRPGHFSTASMGSLTSSPSSCSLSSQVGLTSVTSIQERIMSTPGGEEAIERLKESEKIIAELNETWEEKLRKTEAIRMEREALLAEMGVAIREDGGTLGVFSPKKTPHLVNLNEDPLMSECLLYYIKDGITRVGQADAERRQDIVLSGAHIKEEHCIFRSERSNSGEVIVTLEPCERSETYVNGKRVSQPVQLRSGNRIIMGKNHVFRFNHPEQARAEREKTPSAETPSEPVDWTFAQRELLEKQGIDMKQEMEKRLQEMEILYKKEKEEADLLLEQQRLDYESKLQALQKQVETRSLAAETTEEEEEEEEVPWTQHEFELAQWAFRKWKSHQFTSLRDLLWGNAVYLKEANAISVELKKKVQFQFVLLTDTLYSPLPPELLPTEMEKTHEDRPFPRTVVAVEVQDLKNGATHYWSLEKLKQRLDLMREMYDRAGEMASSAQDESETTVTGSDPFYDRFHWFKLVGSSPIFHGCVNERLADRTPSPTFSTADSDITELADEQQDEMEDFDDEAFVDDAGSDAGTEEGSDLFSDGHDPFYDRSPWFILVGRAFVYLSNLLYPVPLIHRVAIVSEKGEVRGFLRVAVQAIAADEEAPDYGSGIRQSGTAKISFDNEYFNQSDFSSVAMTRSGLSLEELRIVEGQGQSSEVITPPEEISRINDLDLKSSTLLDGKMVMEGFSEEIGNHLKLGSAFTFRVTVLQASGILPEYADIFCQFNFLHRHDEAFSTEPLKNNGRGSPLAFYHVQNIAVEITESFVDYIKTKPIVFEVFGHYQQHPLHLQGQELNSPPQPCRRFFPPPMPLSKPVPATKLNTMSKTSLGQSMSKYDLLVWFEISELEPTGEYIPAVVDHTAGLPCQGTFLLHQGRSRGQEIETILANTVKPRLY

SEQ ID NO: 855027 - protein, 923 aa, Homo sapiens
MSGASVKVAVRVRPFNSRETSKESKCIIQMQGNSTSIINPKNPKEAPKSFSFDYSYWSHTSPEDPCFASQNRVYNDIGKEMLLHAFEGYNVCIFAYGQTGAGKSYTMMGKQEESQAGIIPQLCEELFEKINDNCNEEMSYSVEVSYMEIYCERVRDLLNPKNKGNLRVREHPLLGPYVEDLSKLAVTSYTDIADLMDAGNKARTVAATNMNETSSRSHAVFTIVFTQKKHDNETNLSTEKVSKISLVDLAGSERADSTGAKGTRLKEGANINKSLTTLGKVISALAEVSKKKKKTDFIPYRDSVLTWLLRENLGGNSRTAMVAALSPADINYDETLSTLRYADRAKQIKCNAVINEDPNAKLVRELKEEVTRLKDLLRAQGLGDIIDIDPLIDDYSGSGSKYLKDFQNNKHRYLLASENQRPGHFSTASMGSLTSSPSSCSLSSQVGLTSVTSIQERIMSTPGGEEAIERLKESEKIIAELNETWEEKLRKTEAIRMEREALLAEMGVAIREDGGTLGVFSPKKTPHLVNLNEDPLMSECLLYYIKDGITRVGQADAERRQDIVLSGAHIKEEHCIFRSERSNSGEVIVTLEPCERSETYVNGKRVSQPVQLRSGNRIIMGKNHVFRFNHPEQARAEREKTPSAETPSEPVDWTFAQRELLEKQGIDMKQEMEKRLQEMEILYKKEKEEADLLLEQQRLDYESKLQALQKQVETRSLAAETTEEEEEEEEVPWTQHEFELAQWAFRKWKSHQFTSLRDLLWGNAVYLKEANAISVELKKKVQFQFVLLTDTLYSPLPPELLPTEMEKTHEDRPFPRTVVAVEVQDLKNGATHYWSLEKLKQRLDLMREMYDRAGEMASSAQDESETTVTGSDPFYDRFHWFKLVGRAFVYLSNLLYPVPLIHRVAIVSEKGEVLGDNIIEILE

SEQ ID NO: 855028 - protein, 557 aa, Homo sapiens
MSGASVKVAVRVRPFNSRETSKESKCIIQMQGNSTSIINPKNPKEAPKSFSFDYSYWSHTSPEDPCFASQNRVYNDIGKEMLLHAFEGYNVCIFAYGQTGAGKSYTMMGKQEESQAGIIPQLCEELFEKINDNCNEEMSYSVEVSYMEIYCERVRDLLNPKNKGNLRVREHPLLGPYVEDLSKLAVTSYTDIADLMDAGNKARTVAATNMNETSSRSHAVFTIVFTQKKHDNETNLSTEKVSKISLVDLAGSERADSTGAKGTRLKEGANINKSLTTLGKVISALAEVSKKKKKTDFIPYRDSVLTWLLRENLGGNSRTAMVAALSPADINYDETLSTLRYADRAKQIKCNAVINEDPNAKLVRELKEEVTRLKDLLRAQGLGDIIDTSMGSLTSSPSSCSLSSQVGLTSVTSIQERIMSTPGGEEAIERLKESEKIIAELNETWEEKLRKTEAIRMEREALLAEMGVAIREDGGTLGVFSPKKVGNNAVKPNQTETLFVCLCYWGTSCLSGPTLPLIILILALISDISDFILEHGLIVQRQPISKMPILFTVYKRK

SEQ ID NO: 855029 - protein, 440 aa, Homo sapiens [sequence omitted]

SEQ ID NO: 855030 - protein, 1770 aa, Homo sapiens; identical to SEQ ID NO: 855021

SEQ ID NO: 855031 - protein, 1770 aa, Homo sapiens; identical to SEQ ID NO: 855021

SEQ ID NO: 855032 - protein, 1810 aa, Homo sapiens
MSGASVKVAVRVRPFNSRETSKESKCIIQMQGNSTSIINPKNPKEAPKSFSFDYSYWSHTSPEDPCFASQNRVYNDIGKEMLLHAFEGYNVCIFAYGQTGAGKSYTMMGKQEESQAGIIPQLCEELFEKINDNCNEEMSYSVEVSYMEIYCERVRDLLNPKNKGNLRVREHPLLGPYVEDLSKLAVTSYTDIADLMDAGNKARTVAATNMNETSSRSHAVFTIVFTQKKHDNETNLSTEKVSKISLVDLAGSERADSTGAKGTRLKEGANINKSLTTLGKVISALAEVSKKKKKTDFIPYRDSVLTWLLRENLGGNSRTAMVAALSPADINYDETLSTLRYADRAKQIKCNAVINEDPNAKLVRELKEEVTRLKDLLRAQGLGDIIDIDPLIDDYSGSGSKYLKDFQNNKHRYLLASENQRPGHFSTASMGSLTSSPSSCSLSSQVGLTSVTSIQERIMSTPGGEEAIERLKESEKIIAELNETWEEKLRKTEAIRMEREALLAEMGVAIREDGGTLGVFSPKKTPHLVNLNEDPLMSECLLYYIKDGITRVGQADAERRQDIVLSGAHIKEEHCIFRSERSNSGEVIVTLEPCERSETYVNGKRVSQPVQLRSGNRIIMGKNHVFRFNHPEQARAEREKTPSAETPSEPVDWTFAQRELLEKQGIDMKQEMEKRLQEMEILYKKEKEEADLLLEQQRLDYESKLQALQKQVETRSLAAETTEEEEEEEEVPWTQHEFELAQWAFRKWKSHQFTSLRDLLWGNAVYLKEANAISVELKKKVQFQFVLLTDTLYSPLPPELLPTEMEKTHEDRPFPRTVVAVEVQDLKNGATHYWSLEKLKQRLDLMREMYDRAGEMASSAQDESETTVTGSDPFYDRFHWFKLVGSSPIFHGCVNERLADRTPSPTFSTADSDITELADEQQDEMEDFDDEAFVDDAGSDAGTEEGSDLFSDGHDPFYDRSPWFILVGRAFVYLSNLLYPVPLIHRVAIVSEKGEVRGFLRVAVQAIAADEEAPDYGSGIRQSGTAKISFDNEYFNQSDFSSVAMTRSGLSLEELRIVEGQGQSSEVITPPEEISRINDLDLKSSTLLDGKMVMEGFSEEIGNHLKLGSAFTFRVTVLQASGILPEYADIFCQFNFLHRHDEAFSTEPLKNNGRGSPLAFYHVQNIAVEITESFVDYIKTKPIVFEVFGHYQQHPLHLQGQELNSPPQPCRRFFPPPMPLSKPVPATKLNTMSKTSLGQSMSKYDLLVWFEISELEPTGEYIPAVVDHTAGLPCQGTFLLHQGIQRRITVTIIHEKGSELHWKDVRELVVGRIRNKPEVDEAAVDAILSLNIISAKYLKSSHNSSRTFYRFEAVWDSSLHNSLLLNRVTPYGEKIYMTLSAYLELDHCIQPAVITKDVCMVFYSRDAKISPPRSLRSLFGSGYSKSPDSNRVTGIYELSLCKMSDTGSPGMQRRRRKILDTSVAYVRGEENLAGWRPRGDSLILEHQWELEKLELLHEVEKTRHFLLLRERLGDSIPKSLSDSLSPSLSSGTLSTSTSISSQISTTTFESAITPSESSGYDSGDIESLVDREKELATKCLQLLTHTFNREFSQVHGSVSDCKLSDISPIGRDPSESSFSSATLTPSSTCPSLVDSRSNSLDQKTPEANSRASSPCPEFEQFQIVPAVETPYLARAGKNEFLNLVPDIEEIRPSSVVSKKGYLHFKEPLYSNWAKHFVVVRRPYVFIYNSDKDPVERGIINLSTAQVEYSEDQQAMVKTPNTFAVCTKHRGVLLQALNDKDMNDWLYAFNPLLAGTIRSKLSRRCPSQSKY

SEQ ID NO: 855033 - protein, 1304 aa, Homo sapiens
MSGASVKVAVRVRPFNSRETSKESKCIIQMQGNSTSIINPKNPKEAPKSFSFDYSYWSHTSAHIKEEHCIFRSERSNSGEVIVTLEPCERSETYVNGKRVSQPVQLRSGNRIIMGKNHVFRFNHPEQARAEREKTPSAETPSEPVDWTFAQRELLEKQGIDMKQEMEKRLQEMEILYKKEKEEADLLLEQQRLDYESKLQALQKQVETRSLAAETTEEEEEEEEVPWTQHEFELAQWAFRKWKSHQFTSLRDLLWGNAVYLKEANAISVELKKKVQFQFVLLTDTLYSPLPPELLPTEMEKTHEDRPFPRTVVAVEVQDLKNGATHYWSLEKLKQRLDLMREMYDRAGEMASSAQDESETTVTGSDPFYDRFHWFKLVGSSPIFHGCVNERLADRTPSPTFSTADSDITELADEQQDEMEDFDDEAFVDDAGSDAGTEEGSDLFSDGHDPFYDRSPWFILVGRAFVYLSNLLYPVPLIHRVAIVSEKGEVRGFLRVAVQAIAADEEAPDYGSGIRQSGTAKISFDNEYFNQSDFSSVAMTRSGLSLEELRIVEGQGQSSEVITPPEEISRINDLDLKSSTLLDGKMVMEGFSEEIGNHLKLGSAFTFRVTVLQASGILPEYADIFCQFNFLHRHDEAFSTEPLKNNGRGSPLAFYHVQNIAVEITESFVDYIKTKPIVFEVFGHYQQHPLHLQGQELNSPPQPCRRFFPPPMPLSKPVPATKLNTMSKTSLGQSMSKYDLLVWFEISELEPTGEYIPAVVDHTAGLPCQGTFLLHQGIQRRITVTIIHEKGSELHWKDVRELVVGRIRNKPEVDEAAVDAILSLNIISAKYLKSSHNSSRTFYRFEAVWDSSLHNSLLLNRVTPYGEKIYMTLSAYLELDHCIQPAVITKDVCMVFYSRDAKISPPRSLRSLFGSGYSKSPDSNRVTGIYELSLCKMSDTGSPGMQRRRRKILDTSVAYVRGEENLAGWRPRGDSLILEHQWELEKLELLHEVEKTRHFLLLRERLGDSIPKSLSDSLSPSLSSGTLSTSTSISSQISTTTFESAITPSESSGYDSGDIESLVDREKELATKCLQLLTHTFNREFSQVHGSVSDCKLSDISPIGRDPSESSFSSATLTPSSTCPSLVDSRSNSLDQKTPEANSRASSPCPEFEQFQIVPAVETPYLARAGKNEFLNLVPDIEEIRPSSVVSKKGYLHFKEPLYSNWAKHFVVVRRPYVFIYNSDKDPVERGIINLSTAQVEYSEDQQAMVKTPNTFAVCTKHRGVLLQALNDKDMNDWLYAFNPLLAGTIRSKLSRRCPSQSKY

SEQ ID NO: 855034 - protein, 867 aa, Homo sapiens [sequence omitted]

SEQ ID NO: 855035 - protein, 593 aa, Homo sapiens [sequence omitted]

SEQ ID NO: 855036 - protein, 1153 aa, Homo sapiens
MSGASVKVAVRVRPFNSRETSKESKCIIQMQGNSTSIINPKNPKEAPKSFSFDYSYWSHTSPEDPCFASQNRVYNDIGKEMLLHAFEGYNVCIFAYGQTGAGKSYTMMGKQEESQAGIIPQLCEELFEKINDNCNEEMSYSVEVSYMEIYCERVRDLLNPKNKGNLRVREHPLLGPYVEDLSKLAVTSYTDIADLMDAGNKARTVAATNMNETSSRSHAVFTIVFTQKKHDNETNLSTEKVSKISLVDLAGSERADSTGAKGTRLKEGANINKSLTTLGKVISALAEVSKKKKKTDFIPYRDSVLTWLLRENLGGNSRTAMVAALSPADINYDETLSTLRYADRAKQIKCNAVINEDPNAKLVRELKEEVTRLKDLLRAQGLGDIIDTSMGSLTSSPSSCSLSSQVGLTSVTSIQERIMSTPGGEEAIERLKESEKIIAELNETWEEKLRKTEAIRMEREALLAEMGVAIREDGGTLGVFSPKKTPHLVNLNEDPLMSECLLYYIKDGITRVGQADAERRQDIVLSGAHIKEEHCIFRSERSNSGEVIVTLEPCERSETYVNGKRVSQPVQLRSGNRIIMGKNHVFRFNHPEQARAEREKTPSAETPSEPVDWTFAQRELLEKQGIDMKQEMEKRLQEMEILYKKEKEEADLLLEQQRLDADSDSGDDSDKRSCEESWKLITSLREKLPPSKLQTIVKKCGLPSSGKKREPIKMYQIPQRRRLSKDSKWVTISDLKIQAVKEICYEVALNDFRHSRQEIEALAIVKMKELCAMYGKKDPNERDSWRAVARDVWDTVGVGDEKIEDVMATGKGSTDVDDLKVHIDKLEDILQEVKKQNNMKDEEIKVLRNKMLKMEKVLPLIGSQEQKSPGSHKAKEPVGAGVSSTSENNVSKGDNGELAKEERVSQLMNGDPAFRRGRLRWMRQEQIRFKNLQQQEITKQLRRQNVPHRFIPPENRKPRFPFKSNPKHRNSWSPGTHIIITEDEVIELRIPKDDEARKGNKEESQEKGGKGAFKDPQFPWGSQGMRSQDHIQVSKQHINNQQQPPQLRWRSNSLNNGQPKSTRCQASASAESLNSHSGHPTADVQTFQAKRHIHQHRQSYCNYNTGGQLEGNAATSYQKQTDKPSHCSQFVTPPRMRRQFSAPNLKAGRETTV

SEQ ID NO: 855037 - protein, 1810 aa, Homo sapiens; identical to SEQ ID NO: 855032

SEQ ID NO: 855038 - protein, 1112 aa, Homo sapiens
MSGASVKVAVRVRPFNSRETSKESKCIIQMQGNSTSIINPKNPKEAPKSFSFDYSYWSHTSPEDPCFASQNRVYNDIGKEMLLHAFEGYNVCIFAYGQTGAGKSYTMMGKQEESQAGIIPQLCEELFEKINDNCNEEMSYSVEVSYMEIYCERVRDLLNPKNKGNLRVREHPLLGPYVEDLSKLAVTSYTDIADLMDAGNKARTVAATNMNETSSRSHAVFTIVFTQKKHDNETNLSTEKVSKISLVDLAGSERADSTGAKGTRLKEGANINKSLTTLGKVISALAEVSKKKKKTDFIPYRDSVLTWLLRENLGGNSRTAMVAALSPADINYDETLSTLRYADRAKQIKCNAVINEDPNAKLVRELKEEVTRLKDLLRAQGLGDIIDIDPLIDDYSGSGSKYLKDFQNNKHRYLLASENQRPGHFSTASMGSLTSSPSSCSLSSQVGLTSVTSIQERIMSTPGGEEAIERLKESEKIIAELNETWEEKLRKTEAIRMEREALLAEMGVAIREDGGTLGVFSPKKTPHLVNLNEDPLMSECLLYYIKDGITRVGQADAERRQDIVLSGAHIKEEHCIFRSERSNSGEVIVTLEPCERSETYVNGKRVSQPVQLRSGNRIIMGKNHVFRFNHPEQARAEREKTPSAETPSEPVDWTFAQRELLEKQGIDMKQEMEKRLQEMEILYKKEKEEADLLLEQQRLDYESKLQALQKQVETRSLAAETTEEEEEEEEVPWTQHEFELAQWAFRKWKSHQFTSLRDLLWGNAVYLKEANAISVELKKKVQFQFVLLTDTLYSPLPPELLPTEMEKTHEDRPFPRTVVAVEVQDLKNGATHYWSLEKLKQRLDLMREMYDRAGEMASSAQDESETTVTGSDPFYDRFHWFKLVGSSPIFHGCVNERLADRTPSPTFSTADSDITELADEQQDEMEDFDDEAFVDDAGSDAGTEEGSDLFSDGHDPFYDRSPWFILVGRAFVYLSNLLYPVPLIHRVAIVSEKGEVRGFLRVAVQAIAADEEAPSRGFLVSLTSRMKPWTLAVVVTVLKYGVYGVSPFRCSEFLPSGGYVVLLTSGVKLQTYTVSVTALKGGTQVVRPSRWVHGLADFRNEAADLRGECYSS

SEQ ID NO: 855039 - protein, 76 aa, Homo sapiens
KGYLHFKEPLYSNWAKHFVVVRRPYVFIYNSDKDPVERGIINLSTAQVEYSEDQQAMVKVRPALPWFLIATCALLF

SEQ ID NO: 855040 - protein, 354 aa, Homo sapiens
MRLAVLFSGALLGLLAAQGTGNDCPHKKSATLLPSFTVTPTVTESTGTTSHRTTKSHKTTTHRTTTTGTTSHGPTTATHNPTTTSHGNVTVHPTSNSTATSQGPSTATHSPATTSHGNATVHPTSNSTATSPGFTSSAHPEPPPPSPSPSPTSKETIGDYTWTNGSQPCVHLQAQIQIRVMYTTQGGGEAWGISVLNPNKTKVQGSCEGAHPHLLLSFPYGHLSFGFMQDLQQKVVYLSYMAVEYNVSFPHAAQWTFSAQNASLRDLQAPLGQSFSCSNSSIILSPAVHLDLLSLRLQAAQLPHTGVFGQSFSCPSDRSILLPLIIGLILLGLLALVLIAFCIIRRRPSAYQAL

SEQ ID NO: 855041 - protein, 208 aa, Homo sapiens
MRLAVLFSGALLGLLAAQGTGNDCPHKKSATLLPSFTVTPTVTESTGTTSHRTTKSHKTTTHRTTTTGTTSHGPTTATHNPTTTSHGNVTVHPTSNSTATSQGPSTATHSPATTSHGNATVHPTSNSTATSPGFTSSAHPEPPPPSPSPSPTSKETIGDYTWTNGSQPCVHLQAQIQIRVMYTTQGGGEAWGISVTEPYTEHNLTLAT

SEQ ID NO: 855042 - protein, 327 aa, Homo sapiens
MRLAVLFSGALLGLLAESTGTTSHRTTKSHKTTTHRTTTTGTTSHGPTTATHNPTTTSHGNVTVHPTSNSTATSQGPSTATHSPATTSHGNATVHPTSNSTATSPGFTSSAHPEPPPPSPSPSPTSKETIGDYTWTNGSQPCVHLQAQIQIRVMYTTQGGGEAWGISVLNPNKTKVQGSCEGAHPHLLLSFPYGHLSFGFMQDLQQKVVYLSYMAVEYNVSFPHAAQWTFSAQNASLRDLQAPLGQSFSCSNSSIILSPAVHLDLLSLRLQAAQLPHTGVFGQSFSCPSDRSILLPLIIGLILLGLLALVLIAFCIIRRRPSAYQAL

SEQ ID NO: 855043 - protein, 174 aa, Homo sapiens [sequence omitted]

SEQ ID NO: 855044 - protein, 240 aa, Homo sapiens
MRLAVLFSGALLGLLAAQGTGNDCPHKKSATLLPSFTVTPTVTESTGTTSHRTTKSHKTTTHRTTTTGTTSHGPTTATHNPTTTSHGNVTVHPTSNSTATSQGPSTATHSPATTSHGNATVHPTSNSTATSPGFTSSAHPEPPPPSPSPSPTSKETIGDYTWTNGSQPCVHLQAQIQIRVMYTTQGGGEAWGISVLNPNKTKVQGSCEGAHPHLLLSFPYGHLSFGFMQAPSQQKSMYYT

SEQ ID NO: 855045 - protein, 128 aa, Homo sapiens
MRLAVLFSGALLGLLAAQGTGNDCPHKKSATLLPSFTVTPTVTESTGTTSHRTTKSHKTTTHRTTTTGTTSHGPTTATHNPTTTSHGNVTVHPTSNSTATSQGPSTAMSAQVDNLLLEVLHESKAEGP

SEQ ID NO: 855046 - protein, 276 aa, Homo sapiens
MMYEVQSAGVVTVHPTSNSTATSQGPSTATHSPATTSHGNATVHPTSNSTATSPGFTSSAHPEPPPPSPSPSPTSKETIGDYTWTNGSQPCVHLQAQIQIRVMYTTQGGGEAWGISVLNPNKTKVQGSCEGAHPHLLLSFPYGHLSFGFMQDLQQKVVYLSYMAVEYNVSFPHAAQWTFSAQNASLRDLQAPLGQSFSCSNSSIILSPAVHLDLLSLRLQAAQLPHTGVFGQSFSCPSDRSILLPLIIGLILLGLLALVLIAFCIIRRRPSAYQAL

SEQ ID NO: 855047 - protein, 174 aa, Homo sapiens [sequence omitted]

SEQ ID NO: 855048 - protein, 193 aa, Homo sapiens
AVGVAAVGCQPGWESGGSWLGCWGSVVVVAMFFSEARARSRTWEASPSEHRKWVEVFKACDEDHKGYLSREDFKTAVVMLFGYKPSKIEVDSVMSSINPNTSGILLEGFLNIVRKKKEAQRYRNEVRHIFTAFDTYYRGFLTLEDFKKAFRQVAPKLPERTVLEVFREVDRDSDGHVSFRDFEYALNYGQKEA

SEQ ID NO: 855049 - protein, 172 aa, Homo sapiens
AVGVAAVGCQPGWESGGSWLGCWGSVVVVAMFFSEARARSRTWEASPSEHRKWVEVFKACDEDHKGYLSREDFKTAVVMLFGYKPSKIEVDSVMSSINPNTSGILLEGFLNIVRKKKEAQRYRNEVRHIFTAFDTYYRGFLTLEDFKKAFRQVAPKLPERTVLEVFRGIFSA

SEQ ID NO: 855050 - protein, 233 aa, Homo sapiens
AVGVAAVGCQPGWESGGSWLGCWGSVVVVAMFFSEARARSRTWEASPSEHRKWVEVFKACDEDHKGYLSREDFKTAVVMLFGYKPSKIEVDSVMSSINPNTSGILLEGFLNIVRKKKEAQRYRNEVRHIFTAFDTYYRGFLTLEDFKKAFRQVAPKLPERTVLEVFRSLHVNGSIMPPSKKPESSGISVSSGLSQCYGGSGFSKALQEDDDLDFSLPDIRLEEGAMEDEELTN

SEQ ID NO: 855051 - protein, 193 aa, Homo sapiens; identical to SEQ ID NO: 855048

SEQ ID NO: 855052 - protein, 73 aa, Homo sapiens
  misc_feature (36)..(36): Xaa can be any naturally occurring amino acid
  misc_feature (44)..(44): Xaa can be any naturally occurring amino acid
RSSNIPEVFGFIEDITESTSILEELVPKQHYNSSFXVLSAEISXVIFITCFKYRGHAHRGSGKRRKLNDIGTK

SEQ ID NO: 855053 - protein, 193 aa, Homo sapiens; identical to SEQ ID NO: 855048

SEQ ID NO: 855054 - protein, 139 aa, Homo sapiens
MVFKACDEDHKGYLSREDFKTAVVMLFGYKPSKIEVDSVMSSINPNTSGILLEGFLNIVRKKKEAQRYRNEVRHIFTAFDTYYRGFLTLEDFKKAFRQVAPKLPERTVLEVFREVDRDSDGHVSFRDFEYALNYGQKEA

SEQ ID NO: 855055 - protein, 191 aa, Homo sapiens
AVGVAAVGCQPGWESGGSWLGCWGSVVVVAMFFSEARARSRTWEASPSEHRKWVEVFKACDEDHKGYLSREDFKTAVVMLFGYKPSKIEVDSVMSSINPNTSGILLEGFLNIVRKKKEAQRYRNEVRHIFTAFDTYYRGFLTLEDFKKAFRQVAPKLPERTVLEVFRNLEVIPSSFLFLTLHIQAVNKSRL

SEQ ID NO: 855056 - protein, 73 aa, Homo sapiens; identical to SEQ ID NO: 855052
  misc_feature (36)..(36): Xaa can be any naturally occurring amino acid
  misc_feature (44)..(44): Xaa can be any naturally occurring amino acid

SEQ ID NO: 855057 - protein, 169 aa, Homo sapiens
AVGVAAVGCQPGWESGGSWLGCWGSVVVVAMFFSEARARSRTWEASPSEHRKWVEVFKACDEDHKGYLSREDFKTAVVMLFGYKPSKIEVDSVMSSINPNTSGILLEGFLNIVRKKKEAQRYRNEVRHIFTAFDTYYRGFLTLEDFKKAFRQVAPKLPERTVLEVFSDL

SEQ ID NO: 855058 - protein, 359 aa, Homo sapiens
MPLELELCPGRWVGGQHPCFIIAEIGQNHQGDLDVAKRMIRMAKECGADCAKFQKSELEFKFNRKALERPYTSKHSWGKTYGEHKRHLEFSHDQYRELQRYAEEVGIFFTASGMDEMAVEFLHELNVPFFKVGSGDTNNFPYLEKTAKKGRPMVISSGMQSMDTMKQVYQIVKPLNPNFCFLQCTSAYPLQPEDVNLRVISEYQKLFPDIPIGYSGHETGIAISVAAVALGAKVLERHITLDKTWKGSDHSASLEPGELAELVRSVRLVERALGSPTKQLLPCEMACNEKLGKSVVAKVKIPEGTILTMDMLTVKVGEPKGYPPEDIFNLVGKKVLVTVEEDDTIMEELVDNHGKKIKS

SEQ ID NO: 855059 - protein, 359 aa, Homo sapiens; identical to SEQ ID NO: 855058

SEQ ID NO: 855060 - protein, 320 aa, Homo sapiens [sequence omitted]

SEQ ID NO: 855061 - protein, 283 aa, Homo sapiens
MPLELELCPGRWVGGQHPCFIIAEIGQNHQGDLDVAKRMIRMAKECGADCAKFQKSELEFKFNRKALERPYTSKHSWGKTYGEHKRHLEFSHDQYRELQRYAEEVGIFFTASGMDEMAVEFLHELNVPFFKVGSGDTNNFPYLEKTAKKGRPMVISSGMQSMDTMKQVYQIVKPLNPNFCFLQCTSAYPLQPEDVNLRVISEYQKLFPDIPIGYSGHETGIAISVAAVALGAKVLERHITLDKTWKGSDHSASLEPGELAELVRSVRLVERAPKAILLKTSLI

SEQ ID NO: 855062 - protein, 232 aa, Homo sapiens
MCWGESEPPKEKVLMVLVLDYSGRPMVISSGMQSMDTMKQVYQIVKPLNPNFCFLQCTSAYPLQPEDVNLRVISEYQKLFPDIPIGYSGHETGIAISVAAVALGAKVLERHITLDKTWKGSDHSASLEPGELAELVRSVRLVERALGSPTKQLLPCEMACNEKLGKSVVAKVKIPEGTILTMDMLTVKVGEPKGYPPEDIFNLVGKKVLVTVEEDDTIMEELVDNHGKKIKS

SEQ ID NO: 855063 - protein, 160 aa, Homo sapiens
MPLELELCPGRWVGGQHPCFIIAEIGQNHQGDLDVAKRMIRMAKECGADCAKFQKSELEFKFNRKALERPYTSKHSWGKTYGEHKRHLEFSHDQYRELQRYAEEVGIFFTASGMDEMAVEFLHELNVPFFKVGSGDTNNFPYLEKTAKKGRPMVISSGMQ

SEQ ID NO: 855064 - protein, 127 aa, Homo sapiens
MPLELELCPGRWVGGQHPCFIIAEIGQNHQGDLDVAKRMIRMAKECGADCAKFQKSELEFKFNRKALERPYTSKHSWGKTYGEHKRHLEFSHDQYRELQRYAEEVGIFFTASGMDEVSPLLLCHLSL

SEQ ID NO: 855065 - protein, 112 aa, Homo sapiens
MCWGESEPPKEKVLMVLVLDYSGRPMVISSGMQSMDTMKQVYQIVKPLNPNFCFLQCTSAYPLQPEDVNLRVISVSRREGVPFLGHLLWGRRSLFYNQNSNKHGILYNLNIL

SEQ ID NO: 855066 - protein, 355 aa, Homo sapiens
MPLELELCPGRWVGGQHPCFIIAEIGQNHQGDLDVAKRMIRMAKECGADCAKFQKSELEFKFNRKALERPYTSKHSWGKTYGEHKRHLEFSHDQYRELQRYAEEVGIFFTASGMDEMAVEFLHELNVPFFKVGSGDTNNFPYLEKTAKKGRPMVISSGMQSMDTMKQVYQIVKPLNPNFCFLQCTSAYPLQPEDVNLRVISEYQKLFPDIPIGYSGHETGIAISVAAVALGAKVLERHITLDKTWKGSDHSASLEPGELAELVRSVRLVERALGSPTKQLLPCEMACNEKLGKSVVAKVKIPEGTILTMDMLTVKVGEPKGYPPEDIFNLVGKKVLVTVEEDDTIMEELVDNHGT

SEQ ID NO: 855067 - protein, 243 aa, Homo sapiens
MAVEFLHELNVPFFKVGSGDTNNFPYLEKTAKKGRPMVISSGMQSMDTMKQVYQIVKPLNPNFCFLQCTSAYPLQPEDVNLRVISEYQKLFPDIPIGYSGHETGIAISVAAVALGAKVLERHITLDKTWKGSDHSASLEPGELAELVRSVRLVERALGSPTKQLLPCEMACNEKLGKSVVAKVKIPEGTILTMDMLTVKVGEPKGYPPEDIFNLVGKKVLVTVEEDDTIMEELVDNHGKKIKS

SEQ ID NO: 855068 - protein, 274 aa, Homo sapiens
MPLELELCPGRWVGGQHPCFIIAEIGQNHQGDLDVAKRMIRMAKECGADCAKFQKSELEFKFNRKALERPYTSKHSWGKTYGEHKRHLEFSHDQYRELQRYAEEVGIFFTASGMDEEYQKLFPDIPIGYSGHETGIAISVAAVALGAKVLERHITLDKTWKGSDHSASLEPGELAELVRSVRLVERALGSPTKQLLPCEMACNEKLGKSVVAKVKIPEGTILTMDMLTVKVGEPKGYPPEDIFNLVGKKVLVTVEEDDTIMEELVDNHGKKIKS

SEQ ID NO: 855069 - protein, 606 aa, Homo sapiens
MTVVGNPRSWSCQWLPILILLLGTGHGPGVEGVTHYKAGDPVILYVNKVGPYHNPQETYHYYQLPVCCPEKIRHKSLSLGEVLDGDRMAESLYEIRFRENVEKRILCHMQLSSAQVEQLRQAIEELYYFEFVVDDLPIRGFVGYMEESGFLPHSHKIGLWTHLDFHLEFHGDRIIFANVSVRDVKPHSLDGLRPDEFLGLTHTYSVRWSETSVERRSDRRRGDDGGFFPRTLEIHWLSIINSMVLVFLLVGFVAVILMRVLRNDLARYNLDEETTSAGSGDDFDQGDNGWKIIHTDVFRFPPYRGLLCAVLGVGAQFLALGTGIIVMALLGMFNVHRHGAINSAAILLYALTCCISGYVSSHFYRQIGGERWVWNIILTTSLFSVPFFLTWSVVNSVHWANGSTQALPATTILLLLTVWLLVGFPLTVIGGIFGKNNASPFDAPCRTKNIAREIPPQPWYKSTVIHMTVGGFLPFSAISVELYYIFATVWGREQYTLYGILFFVFAILLSVGACISIALTYFQLSGEDYRWWWRSVLSVGSTGLFIFLYSVFYYARRSNMSGAVQTVEFFGYSLLTGYVFFLMLGTISFFSSLKFIRYIYVNLKMD

SEQ ID NO: 855070 - protein, 606 aa, Homo sapiens; identical to SEQ ID NO: 855069

SEQ ID NO: 855071 - protein, 489 aa, Homo sapiens
MTVVGNPRSWSCQWLPILILLLGTGHGPGVEGVTHYKAGDPVILYVNKVGPYHNPQETYHYYQLPVCCPEKIRHKSLSLGEVLDGDRMAESLYEIRFRENVEKRILCHMQLSSAQVEQLRQAIEELYYFEFVVDDLPIRGFVGYMEESGFLPHSHKIGLWTHLDFHLEFHGDRIIFANVSVRDVKPHSLDGLRPDEFLGLTHTYSVRWSETSVERRSDRRRGDDGGFFPRTLEIHWLSIINSMVLVFLLVGFVAVILMRVLRNDLARYNLDEETTSAGSGDDFDQGDNGWKIIHTDVFRFPPYRGLLCAVLGVGAQFLALGTGIIVMALLGMFNVHRHGAINSAAILLYALTCCISGYVSSHFYRQIGGERWVWNIILTTSLFSVPFFLTWSVVNSVHWANGSTQALPATTILLLLTVWLLVGFPLTVIGGIFGKNNASPFDAPCRTKNIAREIPPQPWYKSTVIHMTVGGFLPFRYPPFIPWLLLSGS

SEQ ID NO: 855072 - protein, 598 aa, Homo sapiens
IGEYEAGLNRPRVVGTGHGPGVEGVTHYKAGDPVILYVNKVGPYHNPQETYHYYQLPVCCPEKIRHKSLSLGEVLDGDRMAESLYEIRFRENVEKRILCHMQLSSAQVEQLRQAIEELYYFEFVVDDLPIRGFVGYMEESGFLPHSHKIGLWTHLDFHLEFHGDRIIFANVSVRDVKPHSLDGLRPDEFLGLTHTYSVRWSETSVERRSDRRRGDDGGFFPRTLEIHWLSIINSMVLVFLLVGFVAVILMRVLRNDLARYNLDEETTSAGSGDDFDQGDNGWKIIHTDVFRFPPYRGLLCAVLGVGAQFLALGTGIIVMALLGMFNVHRHGAINSAAILLYALTCCISGYVSSHFYRQIGGERWVWNIILTTSLFSVPFFLTWSVVNSVHWANGSTQALPATTILLLLTVWLLVGFPLTVIGGIFGKNNASPFDAPCRTKNIAREIPPQPWYKSTVIHMTVGGFLPFSAISVELYYIFATVWGREQYTLYGILFFVFAILLSVGACISIALTYFQLSGEDYRWWWRSVLSVGSTGLFIFLYSVFYYARRSNMSGAVQTVEFFGYSLLTGYVFFLMLGTISFFSSLKFIRYIYVNLKMD

SEQ ID NO: 855073 - protein, 606 aa, Homo sapiens; identical to SEQ ID NO: 855069

SEQ ID NO: 855074 - protein, 489 aa, Homo sapiens; identical to SEQ ID NO: 855071

SEQ ID NO: 855075 - protein, 275 aa, Homo sapiens [sequence omitted]

SEQ ID NO: 855076 - protein, 397 aa, Homo sapiens [sequence omitted]

SEQ ID NO: 855077 - protein, 397 aa, Homo sapiens [sequence omitted]

SEQ ID NO: 855078 - protein, 165 aa, Homo sapiens [sequence omitted]

SEQ ID NO: 855079 - protein, 146 aa, Homo sapiens
MTGKTQATVGGYLPFSAISVELYYIFATVWGREQYTLYGILFFVFAILLSVGACISIALTYFQLSGEDYRWWWRSVLSVGSTGLFIFLYSVFYYARRSNMSGAVQTVEFFGYSLLTGYVFFLMLGTISFFSSLKFIRYIYVNLKMD

SEQ ID NO: 855080 - protein, 653 aa, Homo sapiens
RAADRREDPRLAEDGRGKPSLTGSPELGRASRWRRRNGEFLSSTALRMTVVGNPRSWSCQWLPILILLLGTGHGPGVEGVTHYKAGDPVILYVNKVGPYHNPQETYHYYQLPVCCPEKIRHKSLSLGEVLDGDRMAESLYEIRFRENVEKRILCHMQLSSAQVEQLRQAIEELYYFEFVVDDLPIRGFVGYMEESGFLPHSHKIGLWTHLDFHLEFHGDRIIFANVSVRDVKPHSLDGLRPDEFLGLTHTYSVRWSETSVERRSDRRRGDDGGFFPRTLEIHWLSIINSMVLVFLLVGFVAVILMRVLRNDLARYNLDEETTSAGSGDDFDQGDNGWKIIHTDVFRFPPYRGLLCAVLGVGAQFLALGTGIIVMALLGMFNVHRHGAINSAAILLYALTCCISGYVSSHFYRQIGGERWVWNIILTTSLFSVPFFLTWSVVNSVHWANGSTQALPATTILLLLTVWLLVGFPLTVIGGIFGKNNASPFDAPCRTKNIAREIPPQPWYKSTVIHMTVGGFLPFSAISVELYYIFATVWGREQYTLYGILFFVFAILLSVGACISIALTYFQLSGEDYRWWWRSVLSVGSTGLFIFLYSVFYYARRSNMSGAVQTVEFFGYSLLTGYVFFLMLGTISFFSSLKFIRYIYVNLKMD

SEQ ID NO: 855081 - protein, 606 aa, Homo sapiens; identical to SEQ ID NO: 855069

SEQ ID NO: 855082 - protein, 519 aa, Homo sapiens
MAESLYEIRFRENVEKRILCHMQLSSAQVEQLRQAIEELYYFEFVVDDLPIRGFVGYMEESGFLPHSHKIGLWTHLDFHLEFHGDRIIFANVSVRDVKPHSLDGLRPDEFLGLTHTYSVRWSETSVERRSDRRRGDDGGFFPRTLEIHWLSIINSMVLVFLLVGFVAVILMRVLRNDLARYNLDEETTSAGSGDDFDQGDNGWKIIHTDVFRFPPYRGLLCAVLGVGAQFLALGTGIIVMALLGMFNVHRHGAINSAAILLYALTCCISGYVSSHFYRQIGGERWVWNIILTTSLFSVPFFLTWSVVNSVHWANGSTQALPATTILLLLTVWLLVGFPLTVIGGIFGKNNASPFDAPCRTKNIAREIPPQPWYKSTVIHMTVGGFLPFSAISVELYYIFATVWGREQYTLYGILFFVFAILLSVGACISIALTYFQLSGEDYRWWWRSVLSVGSTGLFIFLYSVFYYARRSNMSGAVQTVEFFGYSLLTGYVFFLMLGTISFFSSLKFIRYIYVNLKMD

SEQ ID NO: 855083 - protein, 462 aa, Homo sapiens
MEESGFLPHSHKIGLWTHLDFHLEFHGDRIIFANVSVRDVKPHSLDGLRPDEFLGLTHTYSVRWSETSVERRSDRRRGDDGGFFPRTLEIHWLSIINSMVLVFLLVGFVAVILMRVLRNDLARYNLDEETTSAGSGDDFDQGDNGWKIIHTDVFRFPPYRGLLCAVLGVGAQFLALGTGIIVMALLGMFNVHRHGAINSAAILLYALTCCISGYVSSHFYRQIGGERWVWNIILTTSLFSVPFFLTWSVVNSVHWANGSTQALPATTILLLLTVWLLVGFPLTVIGGIFGKNNASPFDAPCRTKNIAREIPPQPWYKSTVIHMTVGGFLPFSAISVELYYIFATVWGREQYTLYGILFFVFAILLSVGACISIALTYFQLSGEDYRWWWRSVLSVGSTGLFIFLYSVFYYARRSNMSGAVQTVEFFGYSLLTGYVFFLMLGTISFFSSLKFIRYIYVNLKMD

SEQ ID NO: 855084 - protein, 280 aa, Homo sapiens [sequence omitted]

SEQ ID NO: 855085 - protein, 140 aa, Homo sapiens
MTVGGFLPFSAISVELYYIFATVWGREQYTLYGILFFVFAILLSVGACISIALTYFQLSGEDYRWWWRSVLSVGSTGLFIFLYSVFYYARRSNMSGAVQTVEFFGYSLLTGYVFFLMLGTISFFSSLKFIRYIYVNLKMD

SEQ ID NO: 855086 - protein, 397 aa, Homo sapiens [sequence omitted]

SEQ ID NO: 855087 - protein, 378 aa, Homo sapiens
  misc_feature (319)..(319): Xaa can be any naturally occurring amino acid
MTVVGNPRSWSCQWLPILILLLGTGHGPGVEGVTHYKAGDPVILYVNKVGPYHNPQETYHYYQLPVCCPEKIRHKSLSLGEVLDGDRMAESLYEIRFRENVEKRILCHMQLSSAQVEQLRQAIEELYYFEFVVDDLPIRGFVGYMEESGFLPHSHKIGLWTHLDFHLEFHGDRIIFANVSVRDVKPHSLDGLRPDEFLGLTHTYSVRWSETSVERRSDRRRGDDGGFFPRTLEIHWLSIIKKKKKKKKKKKKKKKTRGNFWGGEKRVKKGHGTHTGLSSDRHFLCYTRGENLGGAPQIREAEYILQKAGVSLFYDCAHXRRADHDRSDMMTRGRTTELKRRDSSSESRTYNVNTRERPEGRRRATEIESEPKYDDCIL

SEQ ID NO: 855088 - protein, 89 aa, Homo sapiens
TKFAGASTSFLSRARCGGSRRSPASKCRTTPASSWTCTCRGNASASNRIIGAKDHASIQMNVAEVDKVTGRFNGQFKTYAICGAIRRMG

SEQ ID NO: 855089 - protein, 91 aa, Homo sapiens
  misc_feature (3)..(3): Xaa can be any naturally occurring amino acid
  misc_feature (5)..(5): Xaa can be any naturally occurring amino acid
ARXRXIRQRIRHEILEEQAHHRRSPASKCRTTPASSWTCTCRGNASASNRIIGAKDHASIQMNVAEVDKVTGRFNGQFKTYAICGAIRRMG

SEQ ID NO: 855090 - protein, 88 aa, Homo sapiens
CRVTYAASVLSRARCGGSRRSPASKCRTTPASSWTCTCRGNASASNRIIGAKDHASIQMNVAEVDKVTGRFNGQFKTYAICGAIRRMG

SEQ ID NO: 855091 - protein, 79 aa, Homo sapiens
RSGAGFGGSRRSPASKCRTTPASSWTCTCRGNASASNRIIGAKDHASIQMNVAEVDKVTGRFNGQFKTYAICGAIRRMG

SEQ ID NO: 855092 - protein, 192 aa, Homo sapiens
EECRPLLLRPGPRASVMGAPQEGSDAGRGRFLGSEVRHSGPGAAFTPGGVSISSWNLQPPPFPVFHSPVLAAPHCPPEGVVSSPPESGLGPRPSSSARKSPETQVLDQALREGTLRLEWARPWLCPSDLNECVSLEPKESGRRGGTRLGGQSQQLPCPPAPPDLWQQAQPSLEMQNDAGEFVDLYVPRKCVR

SEQ ID NO: 855093 - protein, 80 aa, Homo sapiens
NSLVMRCGGSRRSPASKCRTTPASSWTCTCRGNASASNRIIGAKDHASIQMNVAEVDKVTGRFNGQFKTYAICGAIRRMG

SEQ ID NO: 855094 - protein, 89 aa, Homo sapiens; identical to SEQ ID NO: 855088

SEQ ID NO: 855095 - protein, 143 aa, Homo sapiens
MQDHFSRASAFIDELFQDRFFTREPQDTLPLPAFSLPTEDLTFFFPKSRIVPQLMPFFSVRAPEFHAMVQAFLGMIPGGLAGLGISTFIAGLQAPANGFYEKGAIPVCAGDLANPGCWYKHLDRRDSFVVSHTFRYGGGPPRG

SEQ ID NO: 855096 - protein, 111 aa, Homo sapiens
MLTQSNNRKTTAKPDDAYNNHTKIKKEAAYTTKFAAASTADRRSPASKCRTTPASSWTCTCRGNASASNRIIGAKDHASIQMNVAEVDKVTGRFNGQFKTYAICGAIRRMG

SEQ ID NO: 855097 - protein, 148 aa, Homo sapiens
  misc_feature (33)..(33): Xaa can be any naturally occurring amino acid
MGAQVRRFEKSEPGTRAGVQAWDGDPIPQMATXRGSRMGQRQKAQENAEKGPGRPSTPVAGRAKRESTRGPAPENLAGPRTPWANSRFQRVQKPLPRENRGRVDPVKSPHAQVSAPRLARVGQGSLSEARGETRREKQAREPHPRKGP

SEQ ID NO: 855098 - protein, 88 aa, Homo sapiens; identical to SEQ ID NO: 855090

SEQ ID NO: 855099 - protein, 84 aa, Homo sapiens
RPQQWLGRGWCVGSRRSPASKCRTTPASSWTCTCRGNASASNRIIGAKDHASIQMNVAEVDKVTGRFNGQFKTYAICGAIRRMG

SEQ ID NO: 855100 - protein, 115 aa, Homo sapiens
MPPRSSGPGNLKQPLARGMKAIQGQGRQKQFVGPLQLPDTKPDCGSSREGPRLSSPDPSPGQHVLVTSLPCTPGQGGAKDHASIQMNVAEVDKVTGRFNGQFKTYAICGAIRRMG

SEQ ID NO: 855101 - protein, 67 aa, Homo sapiens
RGCHPTVTRRLLELAKVPQSAPKAPKAKWILIPDTCHPTLNPWWTEAVSELFVSIGPFKSQLVKDLA

SEQ ID NO: 855102 - protein, 160 aa, Homo sapiens
MSSAFDHRRERISVDIYDTKGTHLLYIGITPEEAKYKLSKSEKDLVGTKGIPHLVTHDEPGAYRITRSGVIKGGVIPLQMDKGDMGRSLIYINVRHLDNRVYSVTGGEKHIGKPRREKEPPQKGTQERRTQRTMVRMKKTKLAKGDHTQKVGGGKNNAKQ

SEQ ID NO: 855103 - protein, 83 aa, Homo sapiens
RRGLRAQGWGWGGSGGLDAGDGVRGAGCGWGRDPRGRFAPGAGARFRPYSRRRAVTPQAQPSLEMQNDAGEFVDLYVPRKCVR

SEQ ID NO: 855104 - protein, 53 aa, Homo sapiens
MSPVSDPRGTLPGGQATCSWERFKVYYNGATGGKYVPRAGSWIWSRHMDSRAR

SEQ ID NO: 855105 - protein, 71 aa, Homo sapiens
GLAASFLSRARCGGSRRSPASKCRTTPASSWTCTCRGNASASNRIIGAKDHASIQMNVAEGELGAREAGRL

SEQ ID NO: 855106 - protein, 71 aa, Homo sapiens; identical to SEQ ID NO: 855105

SEQ ID NO: 855107 - protein, 111 aa, Homo sapiens; identical to SEQ ID NO: 855096

SEQ ID NO: 855108 - protein, 233 aa, Homo sapiens
QLSNDPLLKCFPLCLTGWAFHSTTVDVIDDVMRMAAINITAHCLGSPQDLFNGSREFSGSGSVPHLSSNVDNLIKSDIPTVFNVFLFLSVSWWFLEGFDDQGRGRRHHLNLGLSVLNGQFHCNPQALPVTRCLGNVITNFFWRQTQGADLGGQGRSGTDFTSGAPQVYDFDLVGVELRRHGGGGWCRMNRIRDDRRKLHLGLLRAGQQAQPSLEMQNDAGEFVDLYVPRKCVR

SEQ ID NO: 855109 - protein, 83 aa, Homo sapiens
RRLLLLNKRPLASRRSPASKCRTTPASSWTCTCRGNASASNRIIGAKDHASIQMNVAEVDKVTGRFNGQFKTYAICGAIRRMG

SEQ ID NO: 855110 - protein, 78 aa, Homo sapiens
HPLPNSARRRSPASKCRTTPASSWTCTCRGNASASNRIIGAKDHASIQMNVAEVDKVTGRFNGQFKTYAICGAIRRMG

SEQ ID NO: 855111 - protein, 94 aa, Homo sapiens
SMVSTQSAHYGRASFLSRARCGGSRRSPASKCRTTPASSWTCTCRGNASASNRIIGAKDHASIQMNVAEVDKVTGRFNGQFKTYAICGAIRRMG

SEQ ID NO: 855112 - protein, 83 aa, Homo sapiens; identical to SEQ ID NO: 855103

SEQ ID NO: 855113 - protein, 84 aa, Homo sapiens; identical to SEQ ID NO: 855099

SEQ ID NO: 855114 - protein, 192 aa, Homo sapiens; identical to SEQ ID NO: 855092

SEQ ID NO: 855115 - protein, 233 aa, Homo sapiens; identical to SEQ ID NO: 855108

SEQ ID NO: 855116 - protein, 79 aa, Homo sapiens; identical to SEQ ID NO: 855091

SEQ ID NO: 855117 - protein, 89 aa, Homo sapiens; identical to SEQ ID NO: 855088

SEQ ID NO: 855118 - protein, 117 aa, Homo sapiens
  misc_feature (3)..(3): Xaa can be any naturally occurring amino acid
  misc_feature (5)..(5): Xaa can be any naturally occurring amino acid
ARXRXIRQRIRHEILEEQAHHRRSPASKCRTTPASSWTCTCRGNASASNRIIGAKDHASIQMNVAEVDKVTGRFNGQFKTYAICGAIRRMGECFPGLCSSLRDIVDFTVRIGVCDGA

SEQ ID NO: 855119 - protein, 82 aa, Homo sapiens
GLAASFLSRARCGGSRRSPASKCRTTPASSWTCTCRGNASASNRIIGAKDHASIQMNVAEGESDDSILRLCAKADGIVSKNF

SEQ ID NO: 855120 - protein, 53 aa, Homo sapiens; identical to SEQ ID NO: 855104

SEQ ID NO: 855121 - protein, 88 aa, Homo sapiens; identical to SEQ ID NO: 855090

SEQ ID NO: 855122 - protein, 55 aa, Homo sapiens
MLSAGPFVGWGESDDSILRLCAKADGIVSKNFDWIATDLDSRPNLDSRPNLDSRA

SEQ ID NO: 855123 - protein, 111 aa, Homo sapiens
GLAASFLSRARCGGSRRSPASKCRTTPASSWTCTCRGNASASNRIIGAKDHASIQMNVAEVDKVTGRFNGQFKTYAICGAIRRMGECFPGLCSSLRDIVDFTVRIGVCDGA

SEQ ID NO: 855124 - protein, 711 aa, Homo sapiens
MSRRCLVRISGSGGVSRWRDSDTTALLTGRLRGRWPGLASATMAIVQTLPVPLEPAPEAATAPQAPVMGSVSSLISGRPCPGGPAPPRHHGPPGPTFFRQQDGLLRGGYEAQEPLCPAVPPRKAVPVTSFTYINEDFRTESPPSPSSDVEDAREQRAHNAHLRGPPPKLIPVSGKLEKNMEKILIRPTAFKPVLPKPRGAPSLPSFMGPRATGLSGSQGSLTQLFGGPASSSSSSSSSSAADKPLAFSGWASGCPSGTLSDSGRNSLSSLPTYSTGGAEPTTSSPGGHLPSHGSGRGALPGPARGVPTGPSHSDSGRSSSSKSTGSLGGRVAGGLLGSGTRASPDSSSCGERSPPPPPPPPSDEALLHCVLEGKLRDREAELQQLRDSLDENEATMCQAYEERQRHWQREREALREDCAAQAQRAQRAQQLLQLQVFQLQQEKRQLQDDFAQLLQEREQLERRCATLEREQRELGPRLEETKWEVCQKSGEISLLKQQLKESQAELVQKGSELVALRVALREARATLRVSEGRARGLQEAARARELELEACSQELQRHRQEAEQLREKAGQLDAEAAGLREPPVPPATADPFLLAESDEAKVQRAAAGVGGSLRAQVERLRVELQRERRRGEEQRDSFEGERLAWQAEKEQVIRYQKQLQHNYIQMYRRNRQLEQELQQLSLELEARELADLGLAEQAPCICLEEITATEI

SEQ ID NO: 855125 - protein, 669 aa, Homo sapiens
MAIVQTLPVPLEPAPEAATAPQAPVMGSVSSLISGRPCPGGPAPPRHHGPPGPTFFRQQDGLLRGGYEAQEPLCPAVPPRKAVPVTSFTYINEDFRTESPPSPSSDVEDAREQRAHNAHLRGPPPKLIPVSGKLEKNMEKILIRPTAFKPVLPKPRGAPSLPSFMGPRATGLSGSQGSLTQLFGGPASSSSSSSSSSAADKPLAFSGWASGCPSGTLSDSGRNSLSSLPTYSTGGAEPTTSSPGGHLPSHGSGRGALPGPARGVPTGPSHSDSGRSSSSKSTGSLGGRVAGGLLGSGTRASPDSSSCGERSPPPPPPPPSDEALLHCVLEGKLRDREAELQQLRDSLDENEATMCQAYEERQRHWQREREALREDCAAQAQRAQRAQQLLQLQVFQLQQEKRQLQDDFAQLLQEREQLERRCATLEREQRELGPRLEETKWEVCQKSGEISLLKQQLKESQAELVQKGSELVALRVALREARATLRVSEGRARGLQEAARARELELEACSQELQRHRQEAEQLREKAGQLDAEAAGLREPPVPPATADPFLLAESDEAKVQRAAAGVGGSLRAQVERLRVELQRERRRGEEQRDSFEGERLAWQAEKEQVIRYQKQLQHNYIQMYRRNRQLEQELQQLSLELEARELADLGLAEQAPCICLEEITATEI

SEQ ID NO: 855126 - protein, 669 aa, Homo sapiens; identical to SEQ ID NO: 855125

SEQ ID NO: 855127 - protein, 669 aa, Homo sapiens; identical to SEQ ID NO: 855125

SEQ ID NO: 855128 - protein, 669 aa, Homo sapiens; identical to SEQ ID NO: 855125

SEQ ID NO: 855129 - protein, 315 aa, Homo sapiens
MQAYEERQRHWQREREALREDCAAQAQRAQRAQQLLQLQVFQLQQEKRQLQDDFAQLLQEREQLERRCATLEREQRELGPRLEETKWEVCQKSGEISLLKQQLKESQAELVQKGSELVALRVALREARATLRVSEGRARGLQEAARARELELEACSQELQRHRQEAEQLREKAGQLDAEAAGLREPPVPPATADPFLLAESDEAKVQRAAAGVGGSLRAQVERLRVELQRERRRGEEQRDSFEGERLAWQAEKEQVIRYQKQLQHNYIQMYRRNRQLEQELQQLSLELEARELADLGLAEQAPCICLEEITATEI

SEQ ID NO: 855130 - protein, 463 aa, Homo sapiens
MAIVQTLPVPLEPAPEAATAPQAPVMGSVSSLISGRPCPGGPAPPRHHGPPGPTFFRQQDGLLRGGYEAQEPLCPAVPPRKAVPVTSFTYINEDFRTESPPSPSSDVEDAREQRAHNAHLRGPPPKLIPVSGKLEKNMEKILIRPTAFKPVLPKPRGAPSLPSFMGPRATGLSGSQGSLTQLFGGPASSSSSSSSSSAADKPLAFSGWASGCPSGTLSDSGRNSLSSLPTYSTGGAEPTTSSPGGHLPSHGSGRGALPGPARGVPTGPSHSDSGRSSSSKSTGSLGGRVAGGLLGSGTRASPDSSSCGERSPPPPPPPPSDEALLHCVLEGKLRDREAELQQLRDSLDENEATMCQAYEERQRHWQREREALREDCAAQAQRAQRAQQLLQLQVFQLQQEKRQLQDDFAQLLQEREQLERRCATLEREQRELGPRLEETKWEVCQKSGEISLLKQQLKESQAE

SEQ ID NO: 855131 - protein, 388 aa, Homo sapiens
MAIVQTLPVPLEPAPEAATAPQAPVMGSVSSLISGRPCPGGPAPPRHHGPPGPTFFRQQDGLLRGGYEAQEPLCPAVPPRKAVPVTSFTYINEDFRTESPPSPSSDVEDAREQRAHNAHLRGPPPKLIPVSGKLEKLERRCATLEREQRELGPRLEETKWEVCQKSGEISLLKQQLKESQAELVQKGSELVALRVALREARATLRVSEGRARGLQEAARARELELEACSQELQRHRQEAEQLREKAGQLDAEAAGLREPPVPPATADPFLLAESDEAKVQRAAAGVGGSLRAQVERLRVELQRERRRGEEQRDSFEGERLAWQAEKEQVIRYQKQLQHNYIQMYRRNRQLEQELQQLSLELEARELADLGLAEQAPCICLEEITATEI

SEQ ID NO: 855132 - protein, 285 aa, Homo sapiens
MAIVQTLPVPLEPAPEAATAPQAPVMGSVSSLISGRPCPGGPAPPRHHGPPGPTFFRQQDGLLRGGYEAQEPLCPAVPPRKAVPVTSFTYINEDFRTESPPSPSSDVEDAREQRAHNAHLRGPPPKLIPVSGKLEKNMEKILIRPTAFKPVLPKPRGAPSLPSFMGPRATGLSGSQGSLTQLFGGPASSSSSSSSSSLQRERRRGEEQRDSFEGERLAWQAEKEQVIRYQKQLQHNYIQMYRRNRQLEQELQQLSLELEARELADLGLAEQAPCICLEEITATEI

SEQ ID NO: 855133 - protein, 344 aa, Homo sapiens
MAIVQTLPVPLEPAPEAATAPQAPVMGSVSSLISGRPCPGGPAPPRHHGPPGPTFFRQQDGLLRGGYEAQEPLCPAVPPRKAVPVTSFTYINEDFRTESPPSPSSDVEDAREQRAHNAHLRGPPPKLIPVSGKLEKNMEKILIRPTAFKPVLPKPRGAPSLPSFMGPRATGLSGSQGSLTQLFGGPASSSSSSSSSSAADKPLAFSGWASGCPSGTLSDSGRNSLSSLPTYSTGGAEPTTSSPGGHLPSHGSGRGALPGPARGVPTGPSHSDTTANPVHRRFQPTPARGAGKKKGLPPLHIPPDPKARESQMAPAAPDVPAHIGGQGRAWARFPGLSSAASLLE

SEQ ID NO: 855134 - protein, 641 aa, Homo sapiens
MAIVQTLPVPLEPAPEAATAPQAPVMGSVSSLISGRPCPGGPAPPRHHGPPGPTFFRQQDGLLRGGYEAQEPLCPAVPPRKAVPVTSFTYINEDFRTESPPSPSSDVEDAREQRAHNAHLRGPPPKLIPVSGKLEKNMEKILIRPTAFKPVLPKPRGAPSLPSFMGPRATGLSGSQGSLTQLFGGPASSSSSSSSSSAADKPLAFSGWASGCPSGTLSDSGRNSLSSLPTYSTGGAEPTTSSPGGHLPSHGSGRGALPGPARGVPTGPSHSDSGRSSSSKSTGSLGGRVAGGLLGSGTRASPDSSSCGERSPPPPPPPPSDEALLHCVLEGKLRDREAELQQLRDSLDENEATMCQAYEERQRHWQREREALREDCAAQAQRAQRAQQLLQLQVFQLQQEKRQLQDDFAQLLQEREQLERRCATLEREQRELGPRLEETKWEVCQKSGEISLLKQQLKESQAELVQKGSELVALRVALREARATLRVSEGRARGLQEAARARELELEACSQELQRHRQEAEQLREKAGQLDAEAAGLREPPVPPATADPFLLAESDEAKVQRAAAGVGGSLRAQVERLRVELQRERRRGEEQRDSFEGERLAWQAEKEQVIRYQKQLQHNYIQMYRRNRQLEQEPGLGSQV

SEQ ID NO: 855135 - protein, 360 aa, Homo sapiens
MAIVQTLPVPLEPAPEAATAPQAPVMGSVSSLISGRPCPGGPAPPRHHGPPGPTFFRQQDGLLRGGYEAQEPLCPAVPPRKAVPVTSFTYINEDFRTESPPSPSSDVEDAREQRAHNAHLRGPPPKLIPVSGKLEKLERRCATLEREQRELGPRLEETKWEVCQKSGEISLLKQQLKESQAELVQKGSELVALRVALREARATLRVSEGRARGLQEAARARELELEACSQELQRHRQEAEQLREKAGQLDAEAAGLREPPVPPATADPFLLAESDEAKVQRAAAGVGGSLRAQVERLRVELQRERRRGEEQRDSFEGERLAWQAEKEQVIRYQKQLQHNYIQMYRRNRQLEQEPGLGSQV

SEQ ID NO: 855136 - protein, 138 aa, Homo sapiens
MAIVQTLPVPLEPAPEAATAPQAPVMGSVSSLISGRPCPGGPAPPRHHGPPGPTFFRQQDGLLRGGYEAQEPLCPAVPPRKAVPVTSFTYINEDFRTESPPSPSSDVEDAREQRAHNAHLRGPPPKLIPVSGKLEKRR

SEQ ID NO: 855137 - protein, 669 aa, Homo sapiens; identical to SEQ ID NO: 855125

SEQ ID NO: 855138 - protein, 669 aa, Homo sapiens; identical to SEQ ID NO: 855125

SEQ ID NO: 855139 - protein, 647 aa, Homo sapiens
MAIVQTLPVPLEPAPEAATAPQAPVMGSVSSLISGRPCPGGPAPPRHHGPPGPTFFRQQDGLLRGGYEAQEPLCPAVPPRKAVPVTSFTYINEDFRTESPPSPSSDVEDAREQRAHNAHLRGPPPKLIPVSGKLEKNMEKILIRPTAFKPVLPKPRGAPSLPSFMGPRATGLSGSQGSLTQLFGGPASSSSSSSSSSAADKPLAFSGWASGCPSGTLSDSGRNSLSSLPTYSTGGAEPTTSSPGGHLPSHGSGRGALPGPARGVPTGPSHSDSGRSSSSKSTGSLGGRVAGGLLGSGTRASPDSSSCGERSPPPPPPPPSDEALLHCVLEGKLRDREAELQQLRDSLDENEATMCQAYEERQRHWQREREALREDCAAQAQRAQRAQQLLQLQVFQLQQEKRQLQDDFAQLLQEREQLERRCATLEREQRELGPRLEETKWEVCQKSGEISLLKQQLKESQAELVQKGSELVALRVALREARATLRVSEGRARGLQEAARARELELEACSQELQRHRQEAEQLREKAGQLDAEAAGLREPPVPPATADPFLLAESDEAKVQRAAAGVGGSLRAQVERLRVELQRERRRGEEQRDSFEGERLAWQAEKEQVIRYQKQLQHNYIQMYRRNRQLEQEPGPLHLPGGDHCY

SEQ ID NO: 855140 - protein, 625 aa, Homo sapiens
MAIVQTLPVPLEPAPEAATAPQAPVMGSVSSLISGRPCPGGPAPPRHHGPPGPTFFRQQDGLLRGGYEAQEPLCPAVPPRKAVPVTSFTYINEDFRTESPPSPSSDVEDAREQRAHNAHLRGPPPKLIPVSGKLEKNMEKILIRPTAFKPVLPKPRGAPSLPSFMGPRATGLSGSQGSLTQLFGGPASSSSSSSSSSAADKPLAFSGWASGCPSGTLSDSGRNSLSSLPTYSTGGAEPTTSSPGGHLPSHGSGRGALPGPARGVPTGPSHSDSGRSSSSKSTGSLGGRVAGGLLGSGTRASPDSSSCGERSPPPPPPPPSDEALLHCVLEGKLRDREAELQQLRDSLDENEATMCQAYEERQRHWQREREALREDCAAQAQRAQRAQQLLQLQVFQLQQEKRQLQDDFAQLLQEREQLERRCATLEREQRELGPRLEETKWEVCQKSGEISLLKQQLKESQAELVQKGSELVALRVALREARATLRVSEGRARGLQEAARARELELEACSQELQRHRQEAEQLREKAGQLDAEAAGLREPPVPPATADPFLLAESDEAKVQRAAAGVGGSLRAQVERLRVELQRERRRGEEQRDSFEGERLAWQAEKEQVQAPCICLEEITATEI

SEQ ID NO: 855141 - protein, 419 aa, Homo sapiens
MAIVQTLPVPLEPAPEAATAPQAPVMGSVSSLISGRPCPGGPAPPRHHGPPGPTFFRQQDGLLRGGYEAQEPLCPAVPPRKAVPVTSFTYINEDFRTESPPSPSSDVEDAREQRAHNAHLRGPPPKLIPVSGKLEKNMEKILIRPTAFKPVLPKPRGAPSLPSFMGPRATGLSGSQGSLTQLFGGPASSSSSSSSSSAADKPLAFSGWASGCPSGTLSDSGRNSLSSLPTYSTGGAEPTTSSPGGHLPSHGSGRGALPGPARGVPTGPSHSDSGRSSSSKSTGSLGGRVAGGLLGSGTRASPDSSSCGERSPPPPPPPPSDEALLHCVLEGKLRDREAELQQLRDSLDENEATMCQPLPTLFTGASSPLQPGEQGRRRGSLLFTFPPTPKPEKARWHQLLRMCLPTLGDRAGPGLGSQV

SEQ ID NO: 855142 - protein, 387 aa, Homo sapiens
MAIVQTLPVPLEPAPEAATAPQAPVMGSVSSLISGRPCPGGPAPPRHHGPPGPTFFRQQDGLLRGGYEAQEPLCPAVPPRKAVPVTSFTYINEDFRTESPPSPSSDVEDAREQRAHNAHLRGPPPKLIPVSGKLEKNMEKILIRPTAFKPVLPKPRGAPSLPSFMGPRATGLSGSQGSLTQLFGGPASSSSSSSSSSAADKPLAFSGWASGCPSGTLSDSGRNSLSSLPTYSTGGAEPTTSSPGGHLPSHGSGRGALPGPARGVPTGPSHSDSGRSSSSKSTGSLGGRVAGGLLGSGTRASPDSSSCGERSPPPPPPPPSDEALLHCVLEGKLRDREAELQQLRDSLDENEATMCQAYEERQRHWQREREALPTLGDRAGPGLGSQV

SEQ ID NO: 855143 - protein, 91 aa, Homo sapiens
MPKQVVWHGHWPAALSKQVAQIPPTWTFSSGAAPATLSHWVCDSPLHLSILHHFPSRKTDGRKPSVTLLLRRSISGTDIICLVSVNSKESS

SEQ ID NO: 855144 - protein, 70 aa, Homo sapiens
EWKLYQKEDTLKCFTPGVTAPRVAAVSGSGMLLPQTSSRRATYTEPTREQPISEMGPHNFREALSTSCPS

SEQ ID NO: 855145 - protein, 121 aa, Homo sapiens
MFTPSESPIQSLASWRALRFWYKRHFISTKWKSIIHIHLLLRHFSLESSSCLSTLGKRTGLIYITDILVMVWRDLWERRPSRGLSEGSFRMQLFWAEDGLHWPPPRRKASRVEKCPLTWLL

SEQ ID NO: 855146 - protein, 507 aa, Homo sapiens
MCDIEEATNQLLDVNLHENQKSVQVTESDLGSESELLVTIGATVPTGFEQTAADEVREKLGSSCKISRDRGKIYFVISVESLAQVHCLRSVDNLFVVVQEFQDYQFKQTKEEVLKDFEDLAGKLPWSNPLKVWKINASFKKKKAKRKKINQNSSKEKINNGQEVKIDQRNVKKEFTSHALDSHILDYYENPAIKEDVSTLIGDDLASCKDETDESSKEETEPQVLKFRVTCNRAGEKHCFTSNEAARDFGGAVQDYFKWKADMTNFDVEVLLNIHDNEVIVGIALTEESLHRRNITHFGPTTLRSTLAYGMLRLCDPLPYDIIVDPMCGTGAIPIEGATEWSDCFHIAGDNNPLAVNRAANNIASLLTKSQIKEGKPSWGLPIDAVQWDICNLPLRTGSVDIIVTDLPFGKRMGSKKRNWNLYPACLREMSRVCTPTTGRAVLLTQDTKCFTKALSGMRHVWRKVDTVWVNVGGLRAAVYVLIRTPQAFVHPSEQDGERGTLWQCKE

SEQ ID NO: 855147 - protein, 507 aa, Homo sapiens; identical to SEQ ID NO: 855146

SEQ ID NO: 855148 - protein, 507 aa, Homo sapiens; identical to SEQ ID NO: 855146

SEQ ID NO: 855149 - protein, 507 aa, Homo sapiens; identical to SEQ ID NO: 855146

SEQ ID NO: 855150 - protein, 445 aa, Homo sapiens
MCDIEEATNQLLDVNLHENQKSVQVTESDLGSESELLVTIGATVPTGFEQTAADEVREKLGSSCKISRDRGKIYFVISVESLAQVHCLRSVDNLFVVVQEFQDYQFKQTKEEVLKDFEDLAGKLPWSNPLKVWKINASFKKKKAKRKKINQNSSKEKINNGQEVKIDQRNVKKEFTSHALDSHILDYYENPAIKEDVSTLIGDDLASCKDETDESSKEETEPQVLKFRVTCNRAGEKHCFTSNEAARDFGGAVQDYFKWKADMTNFDVEVLLNIHDNEVIVGIALTEESLHRRNITHFGPTTLRSTLAYGMLSKPSWGLPIDAVQWDICNLPLRTGSVDIIVTDLPFGKRMGSKKRNWNLYPACLREMSRVCTPTTGRAVLLTQDTKCFTKALSGMRHVWRKVDTVWVNVGGLRAAVYVLIRTPQAFVHPSEQDGERGTLWQCKE

SEQ ID NO: 855151 - protein, 485 aa, Homo sapiens
LYRIPSNRRFLSELLVTIGATVPTGFEQTAADEVREKLGSSCKISRDRGKIYFVISVESLAQVHCLRSVDNLFVVVQEFQDYQFKQTKEEVLKDFEDLAGKLPWSNPLKVWKINASFKKKKAKRKKINQNSSKEKINNGQEVKIDQRNVKKEFTSHALDSHILDYYENPAIKEDVSTLIGDDLASCKDETDESSKEETEPQVLKFRVTCNRAGEKHCFTSNEAARDFGGAVQDYFKWKADMTNFDVEVLLNIHDNEVIVGIALTEESLHRRNITHFGPTTLRSTLAYGMLRLCDPLPYDIIVDPMCGTGAIPIEGATEWSDCFHIAGDNNPLAVNRAANNIASLLTKSQIKEGKPSWGLPIDAVQWDICNLPLRTGSVDIIVTDLPFGKRMGSKKRNWNLYPACLREMSRVCTPTTGRAVLLTQDTKCFTKALSGMRHVWRKVDTVWVNVGGLRAAVYVLIRTPQAFVHPSEQDGERGTLWQCKE

SEQ ID NO: 855152 - protein, 484 aa, Homo sapiens
MCDIEEATNQLLDVNLHENQKSVQVTESDLGSESELLVTIGATVPTGFEQTAADEVREKLGSSCKISRDRGKIYFVISVESLAQVHCLRSVDNLFVVVQEFQDYQFKQTKEEVLKDFEDLAGKLPWSNPLKVWKINASFKKKKAKRKKINQNSSKEKINNGQEVKIDQRNVKKEFTSHALDSHILDYYENPAIKEDVSTLIGDDLASCKDETDESSKEETEPQVLKFRVTCNRAGEKHCFTSNEAARDFGGAVQDYFKWKADMTNFDVEVLLNIHDNEVIVGIALTEESLHRRNITHFGPTTLRSTLAYGMLRLCDPLPYDIIVDPMCGTGAIPIEGATEWSDCFHIAGDNNPLAVNRAANNIASLLTKSQIKEGKPSWGLPIDAVQWDICNLPLRTGSVDIIVTDLPFGKRPTTGRAVLLTQDTKCFTKALSGMRHVWRKVDTVWVNVGGLRAAVYVLIRTPQAFVHPSEQDGERGTLWQCKE

SEQ ID NO: 855153 - protein, 375 aa, Homo sapiens [sequence omitted]

SEQ ID NO: 855154 - protein, 507 aa, Homo sapiens; identical to SEQ ID NO: 855146

SEQ ID NO: 855155 - protein, 507 aa, Homo sapiens; identical to SEQ ID NO: 855146

SEQ ID NO: 855156 - protein, 507 aa, Homo sapiens; identical to SEQ ID NO: 855146

SEQ ID NO: 855157 - protein, 483 aa, Homo sapiens
MCDIEEATNQLLDVNLHENQKSVQVTESDLGSESELLVTIGATVPTGFEQTAADEVREKLGSSCKISRDRGKIYFVISVESLAQVHCLRSVDNLFVVVQEFQDYQFKQTKEEVLKDFEDLAGKLPWSNPLKVWKINASFKKKKAKRKKINQNSSKEKINNGQEVKIDQRNVKKEFTSHALDSHILDYYENPAIKEDVSTLIGDDLASCKDETDESSKEETEPQVLKFRVTCNRAGEKHCFTSNEAARDFGGAVQDYFKWKADMTNFDVEVLLNIHDNEVIVGIALTEESLHRRNITHFGPTTLRSTLAYGMLRLCDPLPYDIIVDPMCGTGAIPIEQTLLGLAHRCCSVGYLQSAIENWLCGYYCNRFAIWKKDGIQEKKLEPLSSLPTGDEPCLHTYHRPSCTTYSRHKMLYQGVIWNATRMAKGGYSLGERWWSSCCSLRSDTYTSSFCSSFRTRRRKRNSLAMQRMKMTNSTCTSHHWKC

SEQ ID NO: 855158 - protein, 434 aa, Homo sapiens
MKSERNLGHHAVHCLRSVDNLFVVVQEFQDYQFKQTKEEVLKDFEDLAGKLPWSNPLKVWKINASFKKKKAKRKKINQNSSKEKINNGQEVKIDQRNVKKEFTSHALDSHILDYYENPAIKEDVSTLIGDDLASCKDETDESSKEETEPQVLKFRVTCNRAGEKHCFTSNEAARDFGGAVQDYFKWKADMTNFDVEVLLNIHDNEVIVGIALTEESLHRRNITHFGPTTLRSTLAYGMLRLCDPLPYDIIVDPMCGTGAIPIEGATEWSDCFHIAGDNNPLAVNRAANNIASLLTKSQIKEGKPSWGLPIDAVQWDICNLPLRTGSVDIIVTDLPFGKRMGSKKRNWNLYPACLREMSRVCTPTTGRAVLLTQDTKCFTKALSGMRHVWRKVDTVWVNVGGLRAAVYVLIRTPQAFVHPSEQDGERGTLWQCKE

SEQ ID NO: 855159 - protein, 263 aa, Homo sapiens
MRGRDRGCSTRECKWKADMSNMSVEVLLNIHDNEVIVGIALTEESLHRRNITHFGPTTLRSTLAYGMLRLCDPLPYDIIVDPMCGTGAIPIEGATEWSDCFHIAGDNNPLAVNRAANNIASLLTKSQIKEGKPSWGLPIDAVQWDICNLPLRTGSVDIIVTDLPFGKRMGSKKRNWNLYPACLREMSRVCTPTTGRAVLLTQDTKCFTKALSGMRHVWRKVDTVWVNVGGLRAAVYVLIRTPQAFVHPSEQDGERGTLWQCKE

SEQ ID NO: 855160 - protein, 522 aa, Homo sapiens
MSGFNFGGTGAPTGGFTFGTAKTATTTPATGFSFSTSGTGGFNFGAPFQPATSTPSTGLFSLATQTPATQTTGFTFGTATLASGGTGFSLGIGASKLNLSNTAATPAMANPSGFGLGSSNLTNAISSTVTSSQGTAPTGFVFGPSTTSVAPATTSGGFSFTGGSTAQPSGFNIGSAGNSAQPTAPATLPFTPATPAATTAGATQPAAPTPTATITSTGPSLFASIATAPTSSATTGLSLCTPVTTAGAPTAGTQGFSLKAPGAASGTSTTTSTAATATATTTSSSSTTGFALNLKPLAPAGIPSNTAAAVTAPPGPGAAAGAAASSAMTYAQLESLINKWSLELEDQERHFLQQATQVNAWDRTLIENGEKITSLHREVEKVKLDQKRLDQELDFILSQQKELEDLLSPLEELVKEQSGTIYLQHADEEREKTYKLAENIDAQLKRMAQDLKDIIEHLNTSGAPADTSDPLQQICKILNAHMDSLQWIDQNSALLQRKVEEVTKVCEGRRKEQERSFRITFD

SEQ ID NO: 855161 - protein, 522 aa, Homo sapiens; identical to SEQ ID NO: 855160

SEQ ID NO: 855162 - protein, 522 aa, Homo sapiens; identical to SEQ ID NO: 855160

SEQ ID NO: 855163 - protein, 522 aa, Homo sapiens; identical to SEQ ID NO: 855160

SEQ ID NO: 855164 - protein, 522 aa, Homo sapiens; identical to SEQ ID NO: 855160

SEQ ID NO: 855165 - protein, 522 aa, Homo sapiens; identical to SEQ ID NO: 855160

SEQ ID NO: 855166 - protein, 394 aa, Homo sapiens
MVARAGCCTTGFVFGPSTTSVAPATTSGGFSFTGGSTAQPSGFNIGSAGNSAQPTAPATLPFTPATPAATTAGATQPAAPTPTATITSTGPSLFASIATAPTSSATTGLSLCTPVTTAGAPTAGTQGFSLKAPGAASGTSTTTSTAATATATTTSSSSTTGFALNLKPLAPAGIPSNTAAAVTAPPGPGAAAGAAASSAMTYAQLESLINKWSLELEDQERHFLQQATQVNAWDRTLIENGEKITSLHREVEKVKLDQKRLDQELDFILSQQKELEDLLSPLEELVKEQSGTIYLQHADEEREKTYKLAENIDAQLKRMAQDLKDIIEHLNTSGAPADTSDPLQQICKILNAHMDSLQWIDQNSALLQRKVEEVTKVCEGRRKEQERSFRITFD

SEQ ID NO: 855167 - protein, 406 aa, Homo sapiens
MSVFSLLQKPTLSHPHQDIPAGVQPSSPSTTSVAPATTSGGFSFTGGSTAQPSGFNIGSAGNSAQPTAPATLPFTPATPAATTAGATQPAAPTPTATITSTGPSLFASIATAPTSSATTGLSLCTPVTTAGAPTAGTQGFSLKAPGAASGTSTTTSTAATATATTTSSSSTTGFALNLKPLAPAGIPSNTAAAVTAPPGPGAAAGAAASSAMTYAQLESLINKWSLELEDQERHFLQQATQVNAWDRTLIENGEKITSLHREVEKVKLDQKRLDQELDFILSQQKELEDLLSPLEELVKEQSGTIYLQHADEEREKTYKLAENIDAQLKRMAQDLKDIIEHLNTSGAPADTSDPLQQICKILNAHMDSLQWIDQNSALLQRKVEEVTKVCEGRRKEQERSFRITFD

SEQ ID NO: 855168 - protein, 87 aa, Homo sapiens
KVEAPSESAESGYSLHGCSKERRRRPRLKKEGGSGERRRAEVDVRLFSVAETHLVPSTSGHPSWSSTFIPSVAVRRLNQGPEKVEES

SEQ ID NO: 855169 - protein, 196 aa, Homo sapiens
MSGFNFGGTGAPTGGFTFGTAKTATTTPATGFSFSTSGTGGFNFGAPFQPATSTPSTGLFSLATQTPATQTTGFTFGTATLASGGTGFSLGIGASKLNLSNTAATPAMANPSGFGLGSSNLTNAISSTVTSSQGTAPTGFVFGPSTTSVAPATTSGGFSFTGGSTAQPSGFNMVMGISRQAAVPTSGKGDPLKRGR

SEQ ID NO: 855170 - protein, 522 aa, Homo sapiens; identical to SEQ ID NO: 855160

SEQ ID NO: 855171 - protein, 522 aa, Homo sapiens; identical to SEQ ID NO: 855160

SEQ ID NO: 855172 - protein, 522 aa, Homo sapiens; identical to SEQ ID NO: 855160

SEQ ID NO: 855173 - protein, 522 aa, Homo sapiens; identical to SEQ ID NO: 855160

SEQ ID NO: 855174 - protein, 522 aa, Homo sapiens; identical to SEQ ID NO: 855160

SEQ ID NO: 855175 - protein, 442 aa, Homo sapiens
MSGFNFGGTGAPTGGFTFGTAKTATTTPATGFSFSTSGTGGFNFGAPFQPATSTPSTGLFSLATQTPATQTTGFTFGTATLASGGTGFSLGIGASKLNLSNTAATPAMANPSGFGLGSSNLTNAISSTVTSSQGTAPTGFVFGPSTTSVAPATTSGGFSFTGGSTAQPSGFNIGSAGNSAQPTAPATLPFTPATPAATTAGATQPAAPTPTATITSTGPSLFASIATAPTSSATTGLSLCTPVTTAGAPTAGTQGFSLKAPGAASGTSTTTSTAATATATTTSSSSTTGFALNLKPLAPAGIPSNTAAAVTAPPGPGAAAGAAASSAMTYAQLESLINKWSLELEDQERHFLQQATQVNAWDRTLIENGEKITSLHREVEKVKLDQKRLDQELDFILSQQKELEDLLSPLEELVKEQSGTIYLQHADEEREKTYVRGPRRHQ

SEQ ID NO: 855176 - protein, 522 aa, Homo sapiens; identical to SEQ ID NO: 855160

SEQ ID NO: 855177 - protein, 195 aa, Homo sapiens
MTYAQLESLINKWSLELEDQERHFLQQATQVNAWDRTLIENGEKITSLHREVEKVKLDQKRLDQELDFILSQQKELEDLLSPLEELVKEQSGTIYLQHADEEREKTYKLAENIDAQLKRMAQDLKDIIEHLNTSGAPADTSDPLQQICKILNAHMDSLQWIDQNSALLQRKVEEVTKVCEGRRKEQERSFRITFD

SEQ ID NO: 855178 - protein, 220 aa, Homo sapiens
SSAPCSWQRPASGPGAAAGAAASSAMTYAQLESLINKWSLELEDQERHFLQQATQVNAWDRTLIENGEKITSLHREVEKVKLDQKRLDQELDFILSQQKELEDLLSPLEELVKEQSGTIYLQHADEEREKTYKLAENIDAQLKRMAQDLKDIIEHLNTSGAPADTSDPLQQICKILNAHMDSLQWIDQNSALLQRKVEEVTKVCEGRRKEQERSFRITFD

SEQ ID NO: 855179 - protein, 87 aa, Homo sapiens; identical to SEQ ID NO: 855168

SEQ ID NO: 855180 - protein, 1220 aa, Homo sapiens
MKLKEVDRTAMQAWSPAQNHPIYLATGTSAQQLDATFSTNASLEIFELDLSDPSLDMKSCATFSSSHRYHKLIWGPYKMDSKGDVSGVLIAGGENGNIILYDPSKIIAGDKEVVIAQNDKHTGPVRALDVNIFQTNLVASGANESEIYIWDLNNFATPMTPGAKTQPPEDISCIAWNRQVQHILASASPSGRATVWDLRKNEPIIKVSDHSNRMHCSGLAWHPDVATQMVLASEDDRLPVIQMWDLRFASSPLRVLENHARGILAIAWSMADPELLLSCGKDAKILCSNPNTGEVLYELPTNTQWCFDIQWCPRNPAVLSAASFDGRISVYSIMGGSTDGLRQKQVDKLSSSFGNLDPFGTGQPLPPLQIPQQTAQHSIVLPLKKPPKWIRRPVGASFSFGGKLVTFENVRMPSHQGAEQQQQQHHVFISQVVTEKEFLSRSDQLQQAVQSQGFINYCQKKIDASQTEFEKNVWSFLKVNFEDDSRGKYLELLGYRKEDLGKKIALALNKVDGANVALKDSDQVAQSDGEESPAAEEQLLGEHIKEEKEESEFLPSSGGTFNISVSGDIDGLITQALLTGNFESAVDLCLHDNRMADAIILAIAGGQELLARTQKKYFAKSQSKITRLITAVVMKNWKEIVESCDLKNWREALAAVLTYAKPDEFSALCDLLGTRLENEGDSLLQTQACLCYICAGNVEKLVACWTKAQDGSHPLSLQDLIEKVVILRKAVQLTQAMDTSTVGVLLAAKMSQYANLLAAQGSIAAALAFLPDNTNQPNIMQLRDRLCRAQGEPVAGHESPKIPYEKQQLPKGRPGPVAGHHQMPRVQTQQYYPHGENPPPPGFIMHGNVNPNASGQLPTSPGHMHTQVPPYPQPQPYQPAQPYPFGTGGSAMYRPQQPVAPPTSNAYPNTPYISSASSYTGQSQLYAAQHQASSPTSSPATSFPPPPSSGASFQHGGPGAPPSSSAYALPPGTTGTLPAASELPASQRTGPQNGWNDPPALNRVPKKKKMPENFMPPVPITSPIMNPLGDPQSQMLQQQPSAPVPLSSQSSFPQPHLPGGQPFHGVQQPLGQTGMPPSFSKPNIEGAPGAPIGNTFQHVQSLPTKKITKKPIPDEHLILKTTFEDLIQRCLSSATDPQTKRKLDDASKRLEFLYDKLREQTLSPTITSGLHNIARSIETRNYSEGLTMHTHIVSTSNFSETSAFMPVLKVVLTQANKLGV

SEQ ID NO: 855181 - protein, 1220 aa, Homo sapiens; identical to SEQ ID NO: 855180

SEQ ID NO: 855182 - protein, 175 aa, Homo sapiens
MKLKEVDRTAMQAWSPAQNHPIYLATGTSAQQLDATFSTNASLEIFELDLSDPSLDMKSCATFSSSHRYHKLIWGPYKMDSKGDVSGVLIAGGENGNIILYDPSKIIAGDKEVVIAQNDKHTGPVRALDVNIFQVKLYFTKTVEEPSNPEASSSTSVTPDVSDNEPDHYRYSDDH

SEQ ID NO: 855183 - protein, 74 aa, Homo sapiens
PGPAPRHATARRAPQGVRRLRGCSHTHWWKERPRSRLSTVSRVLQPTAEQLRVIFLLRGAPPSGFPRQHESRPL

SEQ ID NO: 855184 - protein, 74 aa, Homo sapiens; identical to SEQ ID NO: 855183

SEQ ID NO: 855185 - protein, 727 aa, Homo sapiens
MKLKEVDRTAMQAWSPAQNHPIYLATGTSAQQLDATFSTNASLEIFELDLSDPSLDMKSCATFSSSHRYHKLIWGPYKMDSKGDVSGVLIAGGENGNIILYDPSKIIAGDKEVVIAQNDKHTGPVRALDVNIFQTNLVASGANESEIYIWDLNNFATPMTPGAKTQPPEDISCIAWNRQVQHILASASPSGRATVWDLRKNEPIIKVSDHSNRMHCSGLAWHPDVATQMVLASEDDRLPVIQMWDLRFASSPLRVLENHARGILAIAWSMADPELLLSCGKDAKILCSNPNTGEVLYELPTNTQWCFDIQWCPRNPAVLSAASFDGRISVYSIMGGSTDGLRQKQVDKLSSSFGNLDPFGTGQPLPPLQIPQQTAQHSIVLPLKKPPKWIRRPVGASFSFGGKLVTFENVRMPSHQGAEQQQQQHHVFISQVVTEKEFLSRSDQLQQAVQSQGFINYCQKKIDASQTEFEKNVWSFLKVNFEDDSRGKYLELLGYRKEDLGKKIALALNKVDGANVALKDSDQVAQITSPIMNPLGDPQSQMLQQQPSAPVPLSSQSSFPQPHLPGGQPFHGVQQPLGQTGMPPSFSKPNIEGAPGAPIGNTFQHVQSLPTKKITKKPIPDEHLILKTTFEDLIQRCLSSATDPQTKRKLDDASKRLEFLYDKLREQTLSPTITSGLHNIARSIETRNYSEGLTMHTHIVSTSNFSETSAFMPVLKVVLTQANKLGV

SEQ ID NO: 855186 - protein, 74 aa, Homo sapiens; identical to SEQ ID NO: 855183

SEQ ID NO: 855187 - protein, 657 aa, Homo sapiens
MKLKEVDRTAMQAWSPAQNHPIYLATGTSAQQLDATFSTNASLEIFELDLSDPSLDMKSCATFSSSHRYHKLIWGPYKMDSKGDVSGVLIAGGENGNIILYDPSKIIAGDKEVVIAQNDKHTGPVRALDVNIFQTNLVASGANESEIYIWDLNNFATPMTPGAKTQPPEDISCIAWNRQVQHILASASPSGRATVWDLRKNEPIIKVSDHSNRMHCSGLAWHPDVATQMVLASEDDRLPVIQMWDLRFASSPLRVLENHARGILAIAWSMADPELLLSCGKDAKILCSNPNTGEVLYELPTNTQWCFDIQWCPRNPAVLSAASFDGRISVYSIMGGSTDGLRQKQVDKLSSSFGNLDPFGTGQPLPPLQIPQQTAQHSIVLPLKKPPKWIRRPVGASFSFGGKLVTFENVRMPSHQGAEQQQQQHHVFISQVVTEKEFLSRSDQLQQAVQSQGFINYCQKKIDASQTEFEKNVWSFLKVNFEDDSRGKYLELLGYRKEDLGKKIALALNKVDGANVALKDSDQVAQSDGEESPAAEEQLLGEHIKEEKEEEEKKTKFENLCKIMKDILEKKVEKVVVSNRLVTSPCCIVTSTYGWTANMERIMKAQALRDNSTMGYMAAKRHLEINPDHSIIETLRLKAEADKNDKSVKDLVILLYV

SEQ ID NO: 855188 - protein, 74 aa, Homo sapiens; identical to SEQ ID NO: 855183

SEQ ID NO: 855189 - protein, 418 aa, Homo sapiens
MKLKEVDRTAMQAWSPAQNHPIYLATGTSAQQLDATFSTNASLEIFELDLSDPSLDMKSCATFSSSHRYHKLIWGPYKMDSKGDVSGVLIAGGENGNIILYDPSKIIAGDKEVVIAQNDKHTGPVRALDVNIFQTNLVASGANESEIYIWDLNNFATPMTPGAKTQPPEDISCIAWNRQVQHILASASPSGRATVWDLRKNEPIIKVSDHSNRMHCSGLAWHPDVATQMVLASEDDRLPVIQMWDLRFASSPLRVLENHARGILAIAWSMADPELLLSCGKDAKILCSNPNTGEVLYELPTNTQWCFDIQWCPRNPAVLSAASFDGRISVYSIMGGSTDGLRQKQVDKLSSSFGNLDPFGTGQPLPPLQIPQQTAQHSIVLPLKKPPKWIRRPVGASFSFGGKLVTFENVRMPSHQGA

SEQ ID NO: 855190 - protein, 1181 aa, Homo sapiens
MKLKEVDRTAMQAWSPAQNHPIYLATGTSAQQLDATFSTNASLEIFELDLSDPSLDMKSCATFSSSHRYHKLIWGPYKMDSKGDVSGVLIAGGENGNIILYDPSKIIAGDKEVVIAQNDKHTGPVRALDVNIFQTNLVASGANESEIYIWDLNNFATPMTPGAKTQPPEDISCIAWNRQVQHILASASPSGRATVWDLRKNEPIIKVSDHSNRMHCSGLAWHPDVATQMVLASEDDRLPVIQMWDLRFASSPLRVLENHARGILAIAWSMADPELLLSCGKDAKILCSNPNTGEVLYELPTNTQWCFDIQWCPRNPAVLSAASFDGRISVYSIMGGSTDGLRQKQVDKLSSSFGNLDPFGTGQPLPPLQIPQQTAQHSIVLPLKKPPKWIRRPVGASFSFGGKLVTFENVRMPSHQGAEQQQQQHHVFISQVVTEKEFLSRSDQLQQAVQSQGFINYCQKKIDASQTEFEKNVWSFLKVNFEDDSRGKYLELLGYRKEDLGKKHIKEEKEESEFLPSSGGTFNISVSGDIDGLITQALLTGNFESAVDLCLHDNRMADAIILAIAGGQELLARTQKKYFAKSQSKITRLITAVVMKNWKEIVESCDLKNWREALAAVLTYAKPDEFSALCDLLGTRLENEGDSLLQTQACLCYICAGNVEKLVACWTKAQDGSHPLSLQDLIEKVVILRKAVQLTQAMDTSTVGVLLAAKMSQYANLLAAQGSIAAALAFLPDNTNQPNIMQLRDRLCRAQGEPVAGHESPKIPYEKQQLPKGRPGPVAGHHQMPRVQTQQYYPHGENPPPPGFIMHGNVNPNASGQLPTSPGHMHTQVPPYPQPQPYQPAQPYPFGTGGSAMYRPQQPVAPPTSNAYPNTPYISSASSYTGQSQLYAAQHQASSPTSSPATSFPPPPSSGASFQHGGPGAPPSSSAYALPPGTTGTLPAASELPASQRTGPQNGWNDPPALNRVPKKKKMPENFMPPVPITSPIMNPLGDPQSQMLQQQPSAPVPLSSQSSFPQPHLPGGQPFHGVQQPLGQTGMPPSFSKPNIEGAPGAPIGNTFQHVQSLPTKKITKKPIPDEHLILKTTFEDLIQRCLSSATDPQTKRKLDDASKRLEFLYDKLREQTLSPTITSGLHNIARSIETRNYSEGLTMHTHIVSTSNFSETSAFMPVLKVVLTQANKLGV

SEQ ID NO: 855191 - protein, 877 aa, Homo sapiens
MKLKEVDRTAMQAWSPAQNHPIYLATGTSAQQLDATFSTNASLEIFELDLSDPSLDMKSCATFSSSHRYHKLIWGPYKMDSKGDVSGVLIAGGENGNIILYDPSKIIAGDKEVVIAQNDKHTGPVRALDVNIFQTNLVASGANESEIYIWDLNNFATPMTPGAKTQPPEDISCIAWNRQVQHILASASPSGRATVWDLRKNEPIIKVSDHSNRMHCSGLAWHPDVATQMVLASEDDRLPVIQMWDLRFASSPLRVLENHARGILAIAWSMADPELLLSCGKDAKILCSNPNTGEVLYELPTNTQWCFDIQWCPRNPAVLSAASFDGRISVYSIMGGSTDGLRQKQVDKLSSSFGNLDPFGTGQPLPPLQIPQQTAQHSIVLPLKKPPKWIRRPVGASFSFGGKLVTFENVRMPSHQGAEQQQQQHHVFISQVVTEKEFLSRSDQLQQAVQSQGFINYCQKKIDASQTEFEKNVWSFLKVNFEDDSRGKYLELLGYRKEDLGKKIALALNKVDGANVALKDSDQVAQSDGEESPAAEEQLLGEHIKEEKEESEFLPSSGGTFNISVSGDIDGLITQALLTGNFESAVDLCLHDNRMADAIILAIAGGQELLARTQKKYFAKSQSKITRLITAVVMKNWKEIVESCDLKNWREALAAVLTYAKPDEFSALCDLLGTRLENEGDSLLQTQACLCYICAGNVEKLVACWTKAQDGSHPLSLQDLIEKVVILRKAVQLTQAMDTSTVGVLLAAKMSQYANLLAAQGSIAAALAFLPDNTNQPNIMQLRDRLCRAQGEPVAGHESPKIPYEKQQLPKGRPGPVAGHHQMPRVQTQQYYPHGENPPPPGFIMHGNVNPNASGQLPTSPGHMHTQVPPYPQPQRK

SEQ ID NO: 855192 - protein, 1220 aa, Homo sapiens; identical to SEQ ID NO: 855180

SEQ ID NO: 855193 - protein, 74 aa, Homo sapiens; identical to SEQ ID NO: 855183

SEQ ID NO: 855194 - protein, 1207 aa, Homo sapiens
MKLKEVDRTAMQAWSPAQNHPIYLATGTSAQQLDATFSTNASLEIFELDLSDPSLDMKSCATFSSSHRYHKLIWGPYKMDSKGDVSGVLIAGGENGNIILYDPSKIIAGDKEVVIAQNDKHTGPVRALDVNIFQTNLVASGANESEIYIWDLNNFATPMTPGAKTQPPEDISCIAWNRQVQHILASASPSGRATVWDLRKNEPIIKVSDHSNRMHCSGLAWHPDVATQMVLASEDDRLPVIQMWDLRFASSPLRVLENHARGILAIAWSMADPELLLSCGKDAKILCSNPNTGEVLYELPTNTQWCFDIQWCPRNPAVLSAASFDGRISVYSIMGGSTDGLRQKQVDKLSSSFGNLDPFGTGQPLPPLQIPQQTAQHSIVLPLKKPPKWIRRPVGASFSFGGKLVTFENVRMPSHQGAEQQQQQHHVFISQVVTEKEFLSRSDQLQQAVQSQGFINYCQKKIDASQTEFEKNVWSFLKVNFEDDSRGKYLELLGYRKEDLGKKLLKTLTKSAQSDGEESPAAEEQLLGEHIKEEKEESEFLPSSGGTFNISVSGDIDGLITQALLTGNFESAVDLCLHDNRMADAIILAIAGGQELLARTQKKYFAKSQSKITRLITAVVMKNWKEIVESCDLKNWREALAAVLTYAKPDEFSALCDLLGTRLENEGDSLLQTQACLCYICAGNVEKLVACWTKAQDGSHPLSLQDLIEKVVILRKAVQLTQAMDTSTVGVLLAAKMSQYANLLAAQGSIAAALAFLPDNTNQPNIMQLRDRLCRAQGEPVAGHESPKIPYEKQQLPKGRPGPVAGHHQMPRVQTQQYYPHGENPPPPGFIMHGNVNPNASGQLPTSPGHMHTQVPPYPQPQPYQPAQPYPFGTGGSAMYRPQQPVAPPTSNAYPNTPYISSASSYTGQSQLYAAQHQASSPTSSPATSFPPPPSSGASFQHGGPGAPPSSSAYALPPGTTGTLPAASELPASQRTGPQNGWNDPPALNRVPKKKKMPENFMPPVPITSPIMNPLGDPQSQMLQQQPSAPVPLSSQSSFPQPHLPGGQPFHGVQQPLGQTGMPPSFSKPNIEGAPGAPIGNTFQHVQSLPTKKITKKPIPDEHLILKTTFEDLIQRCLSSATDPQTKRKLDDASKRLEFLYDKLREQTLSPTITSGLHNIARSIETRNYSEGLTMHTHIVSTSNFSETSAFMPVLKVVLTQANKLGV

SEQ ID NO: 855195 - protein, 74 aa, Homo sapiens; identical to SEQ ID NO: 855183

SEQ ID NO: 855196 - protein, 74 aa, Homo sapiens; identical to SEQ ID NO: 855183

SEQ ID NO: 855197 - protein, 1195 aa, Homo sapiens
PGSVGRRAWLRLRLPRWNGTWRWPWPGRRGGGECWESPTSAALTQDPAAEGPRQQDEVKGSRSYSHAGMEPCPESPHLPSNRYHKLIWGPYKMDSKGDVSGVLIAGGENGNIILYDPSKIIAGDKEVVIAQNDKHTGPVRALDVNIFQTNLVASGANESEIYIWDLNNFATPMTPGAKTQPPEDISCIAWNRQVQHILASASPSGRATVWDLRKNEPIIKVSDHSNRMHCSGLAWHPDVATQMVLASEDDRLPVIQMWDLRFASSPLRVLENHARGILAIAWSMADPELLLSCGKDAKILCSNPNTGEVLYELPTNTQWCFDIQWCPRNPAVLSAASFDGRISVYSIMGGSTDGLRQKQVDKLSSSFGNLDPFGTGQPLPPLQIPQQTAQHSIVLPLKKPPKWIRRPVGASFSFGGKLVTFENVRMPSHQGAEQQQQQHHVFISQVVTEKEFLSRSDQLQQAVQSQGFINYCQKKIDASQTEFEKNVWSFLKVNFEDDSRGKYLELLGYRKEDLGKKHIKEEKEESEFLPSSGGTFNISVSGDIDGLITQALLTGNFESAVDLCLHDNRMADAIILAIAGGQELLARTQKKYFAKSQSKITRLITAVVMKNWKEIVESCDLKNWREALAAVLTYAKPDEFSALCDLLGTRLENEGDSLLQTQACLCYICAGNVEKLVACWTKAQDGSHPLSLQDLIEKVVILRKAVQLTQAMDTSTVGVLLAAKMSQYANLLAAQGSIAAALAFLPDNTNQPNIMQLRDRLCRAQGEPVAGHESPKIPYEKQQLPKGRPGPVAGHHQMPRVQTQQYYPHGENPPPPGFIMHGNVNPNASGQLPTSPGHMHTQVPPYPQPQPYQPAQPYPFGTGGSAMYRPQQPVAPPTSNAYPNTPYISSASSYTGQSQLYAAQHQASSPTSSPATSFPPPPSSGASFQHGGPGAPPSSSAYALPPGTTGTLPAASELPASQRTGPQNGWNDPPALNRVPKKKKMPENFMPPVPITSPIMNPLGDPQSQMLQQQPSAPVPLSSQSSFPQPHLPGGQPFHGVQQPLGQTGMPPSFSKPNIEGAPGAPIGNTFQHVQSLPTKKITKKPIPDEHLILKTTFEDLIQRCLSSATDPQTKRKLDDASKRLEFLYDKLREQTLSPTITSGLHNIARSIETRNYSEGLTMHTHIVSTSNFSETSAFMPVLKVVLTQANKLGV

SEQ ID NO: 855198 - protein, 288 aa, Homo sapiens
CDCFRGHVPRTGASSGWKPGARPEVPRTQPAQTLGEMTPLCPRPALCYHFLTSLLRSAMQNARGARQRAEAAVLSGPGPPLGRAAQHGIPRPLSSAGRLSQGCRGASTVGAAGWKGELPKAGGSPAPGPETPAISPSKRARPAEVGGMQLRFARLSEHATAPTRGSARAAGYDLYSAYDYTIPPMEKAVVKTDIQIALPSGCYGRVAPRSGLAAKHFIDVGAGVIDEDYRGNVGVVLFNFGKEKFEVKKGDRIAQLICERIFYPEIEEVQALDDTERGSGGFGSTGKN

SEQ ID NO: 855199 - protein, 164 aa, Homo sapiens
MPCSEETPAISPSKRARPAEVGGMQLRFARLSEHATAPTRGSARAAGYDLYSAYDYTIPPMEKAVVKTDIQIALPSGCYGRVAPRSGLAAKHFIDVGAGVIDEDYRGNVGVVLFNFGKEKFEVKKGDRIAQLICERIFYPEIEEVQALDDTERGSGGFGSTGKN

SEQ ID NO: 855200 - protein, 164 aa, Homo sapiens; identical to SEQ ID NO: 855199

SEQ ID NO: 855201 - protein, 288 aa, Homo sapiens; identical to SEQ ID NO: 855198

SEQ ID NO: 855202 - protein, 164 aa, Homo sapiens; identical to SEQ ID NO: 855199

SEQ ID NO: 855203 - protein, 288 aa, Homo sapiens; identical to SEQ ID NO: 855198

SEQ ID NO: 855204 - protein, 182 aa, Homo sapiens
RLLPRSCSQDGRVFRVEAWRTSGETPAISPSKRARPAEVGGMQLRFARLSEHATAPTRGSARAAGYDLYSAYDYTIPPMEKAVVKTDIQIALPSGCYGRVAPRSGLAAKHFIDVGAGVIDEDYRGNVGVVLFNFGKEKFEVKKGDRIAQLICERIFYPEIEEVQALDDTERGSGGFGSTGKN

SEQ ID NO: 855205 - protein, 167 aa, Homo sapiens
MAAGGAAPETPAISPSKRARPAEVGGMQLRFARLSEHATAPTRGSARAAGYDLYSAYDYTIPPMEKAVVKTDIQIALPSGCYGRVAPRSGLAAKHFIDVGAGVIDEDYRGNVGVVLFNFGKEKFEVKKGDRIAQLICERIFYPEIEEVQALDDTERGSGGFGSTGKN

SEQ ID NO: 855206 - protein, 288 aa, Homo sapiens; identical to SEQ ID NO: 855198

SEQ ID NO: 855207 - protein, 262 aa, Homo sapiens
CDCFRGHVPRTGASSGWKPGARPEVPRTQPAQTLGEMTPLCPRPALCYHFLTSLLRSAMQNARGARQRAEAAVLSGPGPPLGRAAQHGIPRPLSSAGRLSQGCRGASTVGAAGWKGELPKAGGSPAPGPETPAISPSKRARPAEVGGMQLRFARLSEHATAPTRGSARAAGYDLYSAYDYTIPPMEKAVVKTDIQIALPSGCYGRVAPRSGLAAKHFIDVGAGVIDEDYRGNVGVVLFNFGKEKFEGYGECVSNVSNKLFFL

SEQ ID NO: 855208 - protein, 279 aa, Homo sapiens
CDCFRGHVPRTGASSGWKPGARPEVPRTQPAQTLGEMTPLCPRPALCYHFLTSLLRSAMQNARGARQRAEAAVLSGPGPPLGRAAQHGIPRPLSSAGRLSQGCRGASTVGAAGWKGELPKAGGSPAPGPETPAISPSKRARPAEVGGMQLRFARLSEHATAPTRGSARAAGYDLYSAYDYTIPPMEKAVVKTDIQIALPSGCYGRVAPRSGLAAKHFIDVGAGVIDEDYRGNVGVVLFNFGKEKFEVKKGDRIAQLICERIFYPEIEEVQVSITKEDTE

SEQ ID NO: 855209 - protein, 249 aa, Homo sapiens
CDCFRGHVPRTGASSGWKPGARPEVPRTQPAQTLGEMTPLCPRPALCYHFLTSLLRSAMQNARGARQRAEAAVLSGPGPPLGRAAQHGIPRPLSSAGRLSQGCRGASTVGAAGWKGELPKAGGSPAPGPETPAISPSKRARPAEVGGMQLRFARLSEHATAPTRGSARAAGYDLYSAYDYTIPPMEKAVVKTDIQIALPSGCYGRVAPRSGLAAKHFIDVGAGVIDEDYRGNVGVVLFNFGKEKFEGLG

SEQ ID NO: 855210 - protein, 300 aa, Homo sapiens
CDCFRGHVPRTGASSGWKPGARPEVPRTQPAQTLGEMTPLCPRPALCYHFLTSLLRSAMQNARGARQRAEAAVLSGPGPPLGRAAQHGIPRPLSSAGRLSQGCRGASTVGAAGWKGELPKAGGSPAPGPETPAISPSKRARPAEVGGMQLRFARLSEHATAPTRGSARAAGYDLYSAYDYTIPPMEKAVVKTDIQIALPSGCYGRVAPRSGLAAKHFIDVGAGVIDEDYRGNVGVVLFNFGKEKFEVKKGDRIAQLICERIFYPEIEEVQPDRGATLSITPRRERYLNVRFHNSFLQSPV

SEQ ID NO: 855211 - protein, 229 aa, Homo sapiens
CDCFRGHVPRTGASSGWKPGARPEVPRTQPAQTLGEMTPLCPRPALCYHFLTSLLRSAMQNARGARQRAEAAVLSGPGPPLGRAAQHGIPRPLSSAGRLSQGCRGASTVGAAGWKGELPKAGGSPAPGPETPAISPSKRARPAEVGGMQLRFARLSEHATAPTRGSARAAGYDLYSAYDYTIPPMEKAVVKTDIQIALPSGCYGRVAPRSGLAAKHFIDVGGLLFGVEY

SEQ ID NO: 855212 - protein, 288 aa, Homo sapiens; identical to SEQ ID NO: 855198

SEQ ID NO: 855213 - protein, 265 aa, Homo sapiens
CDCFRGHVPRTGASSGWKPGARPEVPRTQPAQTLGEMTPLCPRPALCYHFLTSLLRSAMQNARGARQRAEAAVLSGPGPPLGRAAQHGIPRPLSSAGRLSQGCRGAKTPAISPSKRARPAEVGGMQLRFARLSEHATAPTRGSARAAGYDLYSAYDYTIPPMEKAVVKTDIQIALPSGCYGRVAPRSGLAAKHFIDVGAGVIDEDYRGNVGVVLFNFGKEKFEVKKGDRIAQLICERIFYPEIEEVQALDDTERGSGGFGSTGKN

SEQ ID NO: 855214 - protein, 121 aa, Homo sapiens
MLCSIEKPSAYDYTIPPMEKAVVKTDIQIALPSGCYGRVAPRSGLAAKHFIDVGAGVIDEDYRGNVGVVLFNFGKEKFEVKKGDRIAQLICERIFYPEIEEVQALDDTERGSGGFGSTGKN

SEQ ID NO: 855215 - protein, 262 aa, Homo sapiens; identical to SEQ ID NO: 855207

SEQ ID NO: 855216 - protein, 69 aa, Homo sapiens
MENGAVYSPTTEEDPGPARGPRSGLAAYFFMGRLPLLRRVLKGLQLLLSLLAFICVDVGSRCAFCPAAV

SEQ ID NO: 855217 - protein, 218 aa, Homo sapiens
  misc_feature (18)..(18): Xaa can be any naturally occurring amino acid
RGERVSLGRALGVNFVPXDCQRRGCCGRRAPRPEAMENGAVYSPTTEEDPGPARGPRSGLAAYFFMGRLPLLRRVLKGLQLLLSLLAFICEEVVSQCTLCGGLYFFEFVSCSAFLLSLLILIVYCTPFYERVDTTKVKSSDFYITLGTGCVFLLASIIFVSTHDRTSAEIAAIVFGFIASFMFLLDFITMLYEKRQESQLRKPENTTRAEALTEPLNA

SEQ ID NO: 855218 - protein, 183 aa, Homo sapiens
MENGAVYSPTTEEDPGPARGPRSGLAAYFFMGRLPLLRRVLKGLQLLLSLLAFICEEVVSQCTLCGGLYFFEFVSCSAFLLSLLILIVYCTPFYERVDTTKVKSSDFYITLGTGCVFLLASIIFVSTHDRTSAEIAAIVFGFIASFMFLLDFITMLYEKRQESQLRKPENTTRAEALTEPLNA

SEQ ID NO: 855219 - protein, 183 aa, Homo sapiens; identical to SEQ ID NO: 855218

SEQ ID NO: 855220 - protein, 144 aa, Homo sapiens
MENGAVYSPTTEEDPGPARGPRSGLAAYFFMGRLPLLRRVLKGLQLLLSLLAFICEEVVSQCTLCGGLYFFEFVSCSAFLLSLLILIVYCTPFYERVDTTKVKSSDFYITLGTGCVFLLASIIFVSTHDRTSAEIAAIVSTLYF

SEQ ID NO: 855221 - protein, 183 aa, Homo sapiens; identical to SEQ ID NO: 855218

SEQ ID NO: 855222 - protein, 169 aa, Homo sapiens
MENGAVYSPTTEEDPGPARGPRSGLAAYFFMGRLPLLRRVLKGLQLLLSLLAFICEEVVSQCTLCGGLYFFEFVSCSAFLLSLLILIVYCTPFYERVDTTKVKSSASIIFVSTHDRTSAEIAAIVFGFIASFMFLLDFITMLYEKRQESQLRKPENTTRAEALTEPLNA

SEQ ID NO: 855223 - protein, 183 aa, Homo sapiens; identical to SEQ ID NO: 855218

SEQ ID NO: 855224 - protein, 107 aa, Homo sapiens
MENGAVYSPTTEEDPGPARGPRSGLAAYFFMGRLPLLRRVLKGLQLLLSLLAFICEEVVSQCTLCGGLYFFEFVSCSAFLLSLLILIVYCTPFYERVDTTKVKSSNF

SEQ ID NO: 855225 - protein, 153 aa, Homo sapiens
MSWTFEYFVTKLDAVKILWKIFLVFWFHFSGQLTWLGSDCLCGLWIQFELTFQNLRIAVQVPGVPSMPLCSSQRLSSAALGQFTHGHVGGKLEIVYTNLEDVSSLRDFPCTQAPKSFFSWFFGEKTGILASLCFSYVFCRGAHFLNKMEREKS

SEQ ID NO: 855226 - protein, 153 aa, Homo sapiens; identical to SEQ ID NO: 855225

SEQ ID NO: 855227 - protein, 531 aa, Homo sapiens
MGNQMSVPQRVEDQENEPEAETYQDNASALNGVPVVVSTHTVQHLEEVDLGISVKTDNVATSSPETTEISAVADANGKNLGKEAKPEAPAAKSRFFLMLSRPVPGRTGDQAADSSLGSVKLDVSSNKAPANKDPSESWTLPVAAGPGQDTDKTPRQGPLCRQDPTLLPPETGGAGGEAPSKPKDSSFFDKFFKLDKGQEKVPGDSQQEAKRAEHQDKVDEVPGLSGQSDDVPAGKDIVDGKEKEGQELGTADCSVPGDPEGLETAKDDSQAAAIAENNNSIMSFFKTLVSPNKAETKKDPEDTASKAESVCDGQAGQKTSEIQARGTKKKHLDSPRLGLAFRKFFRHKGAEKSPTTSADLKSDKANFTSQETQGAGKNSKGCNPSGHTQSVTTPEPAKEGTKEKSGPTSLPLGKLFWKKTSDSTEKTITPPEPEPTGAPQKGKEGSSKDKKSAAEMNKQKSNKQEAKEPAQCTEQATVDTNSLQNGDKLQKRPEKRQQSLGGFFKGLGPKRMLDAQVQTDPVSIGPVGKSK

SEQ ID NO: 855228 - protein, 639 aa, Homo sapiens
MGNQMSVPQRVEDQENEPEAETYQDNASALNGVPVVVSTHTVQHLEEVDLGISVKTDNVATSSPETTEISAVADANGKNLGKEAKPEAPAAKSRFFLMLSRPVPGRTGDQAADSSLGSVKLDVSSNKAPANKDPSESWTLPVAAGPGQDTDKTPRHAPAQRQGPLCRQDPTLLPPETGGAGGEAPSKPKDSSFFDKFFKLDKGQEKVPGDSQQEAKRAEHQDKVDEVPGLSGQSDDVPAGKDIVDGKEKEGQELGTADCSVPGDPEGLETAKDDSQAAAIAENNNSIMSFFKTLVSPNKAETKKDPEDTFEVVTAVAPKASKAESVCDGQAGQKTSEIQARGTKKKHLDSPRLGLAFRKFFRHKGAEKSPTTSADLKSDKANFTSQETQGAGKNSKGCNPSGHTQSVTTPEPAKEGTKEKSGPTSLPLGKLFWKKSVKEDSVPTGAEENVVCESPVEIIKSKEVESALQTVDLNEGDAAPEPTEAKLKREESKPRTSLMAFLRQMSVKGDGGITHSEEINGKDSSCQTSDSTEKTITPPEPEPTGAPQKGKEGSSKDKKSAAEMNKQKSNKQEAKEPAQCTEQATVDTNSLQNGDKLQKRPEKRQQSLGGFFKGLGPKRMLDAQVQTDPVSIGPVGKSK

SEQ ID NO: 855229 - protein, 644 aa, Homo sapiens
MGNQMSVPQRVEDQENEPEAETYQDNASALNGVPVVVSTHTVQHLEEVDLGISVKTDNVATSSPETTEISAVADANGKNLGKEAKPEAPAAKSRFFLMLSRPVPGRTGDQAADSSLGSVKLDVSSNKAPANKDPSESWTLPVAAGPGQDTDKTPRQGPLCRQDPTLLPPETGGAGGEAPSKPKDSSFFDKFFKLDKGQEKVPGDSQQEAKRAEHQDKVDEVPGLSGQSDDVPAGKDIVDGKEKEGQELGTADCSVPGDPEGLETAKDDSQAAAIAENNNSIMSFFKTLVSPNKAETKKDPEDTASKAESVCDGQAGQKTSEIQARGTKKKHLDSPRLGLAFRKFFRHKGAEKSPTTSADLKSDKANFTSQETQGAGKNSKGCNPSGHTQSVTTPEPAKEGTKEKSGPTSLPLGKLFWKKSVKEDSVPTGAEENVVCESPVEIIKSKEVESALQTVDLNEGDAAPEPTEAKLKREESKPRTSLMAFLRQMSVKGDGGITHSEEINGKDSSCQTSDSTEKTITPPEPEPTGAPQKGKEGSSKDKKSAAEMNKQKSNKQEAKEPAQCTEQATVDTNSLQNGDKLQKRPEKRQQSLGGFFKGLGPKRMLDAQVQTDPVSIGPVGKSKYTGKCVFSHVKKKWPFQEWSY

SEQ ID NO: 855230 - protein, 411 aa, Homo sapiens
MGNQMSVPQRVEDQENEPEAETYQDNASALNGVPVVVSTHTVQHLEEVDLGISVKTDNVATSSPETTEISAVADANGKNLGKEAKPEAPAAKSRFFLMLSRPVPGRTGDQAADSSLGSVKLDVSSNKAPANKDPSESWTLPVAAGPGQDTDKTPRQGPLCRQDPTLLPPETGGAGGEAPSKPKDSSFFDKFFKLDKGQEKVPGDSQQEAKRAEHQDKVDEVPGLSGQSDDVPAGKDIVDGKEKEGQELGTADCSVPGDPEGLETAKDDSQAAAIAENNNSIMSFFKTLVSPNKAETKKDPEDTASKAESVCDGQAGQKTSEIQARGTKKKHLDSPRLGLAFRKFFRHKRVLKKFTQPLQLTFKVRNKSQLLPFPREDPKGAWHKEISQKGNWPTPIRGGTTTKFPGGTKPP

SEQ ID NO: 855231 - protein, 584 aa, Homo sapiens
MGNQMSVPQRVEDQENEPEAETYQDNASALNGVPVVVSTHTVQHLEEVDLGISVKTDNVATSSPETTEISAVADANGKNLGKEAKPEAPAAKSRFFLMLSRPVPGRTGDQAADSSLGSVKLDVSSNKAPANKDPSESWTLPVAAGPGQDTDKTPRHAPAQRQGPLCRQDPTLLPPETGGAGGEAPSKPKDSSFFDKFFKLDKGQEKVPGDSQQEAKRAEHQDKVDEVPGLSGQSDDVPAGKDIVDGKEKEGQELGTADCSVPGDPEGLETAKDDSQAAAIAENNNSIMSFFKTLVSPNKAETKKDPEDTGAEKSPTTSADLKSDKANFTSQETQGAGKNSKGCNPSGHTQSVTTPEPAKEGTKEKSGPTSLPLGKLFWKKSVKEDSVPTGAEENVVCESPVEIIKSKEVESALQTVDLNEGDAAPEPTEAKLKREESKPRTSLMAFLRQMSVKGDGGITHSEEINGKDSSCQTSDSTEKTITPPEPEPTGAPQKGKEGSSKDKKSAAEMNKQKSNKQEAKEPAQCTEQATVDTNSLQNGDKLQKRPEKRQQSLGGFFKGLGPKRMLDAQVQTDPVSIGPVGKSK

SEQ ID NO: 855232 - protein, 609 aa, Homo sapiens
MGNQMSVPQRVEDQENEPEAETYQDNASALNGVPVVVSTHTVQHLEEVDLGISVKTDNVATSSPETTEISAVADANGKNLGKEAKPEAPAAKSRFFLMLSRPVPGRTGDQAADSSLGSVKLDVSSNKAPANKDPSESWTLPVAAGPGQDTDKTPRQGPLCRQDPTLLPPETGGAGGEAPSKPKDSSFFDKFFKLDKGQEKVPGDSQQEAKRAEHQDKVDEVPGLSGQSDDVPAGKDIVDGKEKEGQELGTADCSVPGDPEGLETAKDDSQAAAIAENNNSIMSFFKTLVSPNKAETKKDPEDTASKAESVCDGQAGQKTSEIQARGTKKKHLDSPRLGLAFRKFFRHKGAEKSPTTSADLKSDKANFTSQETQGAGKNSKGCNPSGHTQSVTTPEPAKEGTKEKSGPTSLPLGKLFWKKVVCESPVEIIKSKEVESALQTVDLNEGDAAPEPTEAKLKREESKPRTSLMAFLRQMSVKGDGGITHSEEINGKDSSCQTSDSTEKTITPPEPEPTGAPQKGKEGSSKDKKSAAEMNKQKSNKQEAKEPAQCTEQATVDTNSLQNGDKLQKRPEKRQQSLGGFFKGLGPKRMLDAQVQTDPVSIGPVGKSK

SEQ ID NO: 855233 - protein, 528 aa, Homo sapiens
MGNQMSVPQRVEDQENEPEAETYQDNASALNGVPVVVSTHTVQHLEEVDLGISVKTDNVATSSPETTEISAVADANGKNLGKEAKPEAPAAKSRFFLMLSRPVPGRTGDQAADSSLGSVKLDVSSNKAPANKDPSESWTLPVAAGPGQDTDKTPRHAPAQRQGPLCRQDPTLLPPETGGAGGEAPSKPKDSSFFDKFFKLDKGQEKVPGDSQQEAKRAEHQDKVDEVPGLSGQSDDVPAGKDIVDGKEKEGQELGTADCSVPGDPEGLETAKDDSQAAAIAENNNSIMSFFKTLVSPNKAETKKDPEDTGAEKSPTTSADLKSDKANFTSQETQGAGKNSKGCNPSGHTQSVTTPEPAKEGTKEKSGPTSLPLGKLFWKKSVKEDSVPTGAEENSVKGDGGITHSEEINGKDSSCQTSDSTEKTITPPEPEPTGAPQKGKEGSSKDKKSAAEMNKQKSNKQEAKEPAQCTEQATVDTNSLQNGDKLQKRPEKRQQSLGGFFKGLGPKRMLDAQVQTDPVSIGPVGKSK

SEQ ID NO: 855234 - protein, 135 aa, Homo sapiens
MGRHEVGHIDNSMKIPLNNGAGCRFEGQFSINKVPGNFHVSTHSATAQPQNPDMTHVIHKLSFGDTLQVQNIHGAFNALGGADRLTSNPLASHDYILKIVPTVYEDKSGKQRYSYQYTVANKEYSLSTRGPDREF

SEQ ID NO: 855235 - protein, 120 aa, Homo sapiens
LVLARIVEEGRPAGAGRPEEALAAGSDPRGAAARLACSAPTPGGGTMPFDFRRFDIYRKVPKDLTQPTYTGAIISICCCLFILFLFLSELTGFITTEVVNELYVDDPDKDSGGKIDSESV

SEQ ID NO: 855236 - protein, 198 aa, Homo sapiens
MGRHEVGHIDNSMKIPLNNGAGCRFEGQFSINKVPGNFHVSTHSATAQPQNPDMTHVIHKLSFGDTLQVQNIHGAFNALGGADRLTSNPLASHDYILKIVPTVYEDKSGKQRYSYQYTVANKEYVAYSHTGRIIPAIWFRYDLSPITVKYTERRQPLYRFITTICAIIGGTFTVAGILDSCIFTASEAWKKIQLGKMH

SEQ ID NO: 855237 - protein, 198 aa, Homo sapiens; identical to SEQ ID NO: 855236

SEQ ID NO: 855238 - protein, 198 aa, Homo sapiens; identical to SEQ ID NO: 855236

SEQ ID NO: 855239 - protein, 198 aa, Homo sapiens; identical to SEQ ID NO: 855236

SEQ ID NO: 855240 - protein, 198 aa, Homo sapiens; identical to SEQ ID NO: 855236

SEQ ID NO: 855241 - protein, 252 aa, Homo sapiens
MPFDFRRFDIYRKVPKDLTQPTYTGAIISICCCLFILFLFLSELTGFITTEVVNELYVDDPDKDSGGKIDLNNGAGCRFEGQFSINKVPGNFHVSTHSATAQPQNPDMTHVIHKLSFGDTLQVQNIHGAFNALGGADRLTSNPLASHDYILKIVPTVYEDKSGKQRYSYQYTVANKEYVAYSHTGRIIPAIWFRYDLSPITVKYTERRQPLYRFITTICAIIGGTFTVAGILDSCIFTASEAWKKIQLGKMH

SEQ ID NO: 855242 - protein, 132 aa, Homo sapiens
MTSELSAGSARPPASFCCVLPAALASHDYILKIVPTVYEDKSGKQRYSYQYTVANKEYVAYSHTGRIIPAIWFRYDLSPITVKYTERRQPLYRFITTICAIIGGTFTVAGILDSCIFTASEAWKKIQLGKMH

SEQ ID NO: 855243 - protein, 198 aa, Homo sapiens; identical to SEQ ID NO: 855236

SEQ ID NO: 855244 - protein, 198 aa, Homo sapiens; identical to SEQ ID NO: 855236

SEQ ID NO: 855245 - protein, 198 aa, Homo sapiens; identical to SEQ ID NO: 855236

SEQ ID NO: 855246 - protein, 198 aa, Homo sapiens; identical to SEQ ID NO: 855236

SEQ ID NO: 855247 - protein, 116 aa, Homo sapiens
GRAAPNGLRGASLPGSGRRVASGEWRVSGGRPAGAGRPEEALAAGSDPRGAAARLACSAPTPGGGTMPFDFRSRLPKGTPLYTRHLPRKMVLPKQAPMICHYRWNPDFCPIPSCPT

SEQ ID NO: 855248 - protein, 204 aa, Homo sapiens
MGRHEVGHIDNSMKIPLNNGAGCRFEGQFSINKVPGNFHVSTHSATAQPQNPDMTHVIHKLSFGDTLQVQNIHGAFNALGGADRLTSNPLASHDYILKIVPTVYEDKSGKQRYSYQYTVANKEYVAYSHTGRIIPAIWFRYDLSPITVKYTERRQPLYRFITTICAIIGGTFTVAGILDSGHCLDSEHCLDSGHCLDSGHCLDS

SEQ ID NO: 855249 - protein, 128 aa, Homo sapiens
MGRHEVGHIDNSMKIPLNNGAGCRFEGQFSINKVPGNFHVSTHSATAQPQNPDMTHVIHKLSFGDTLQVQNIHGAFNALGGADRLTSNPLASHDYILKIVPTVYEDKSGKQRYSYQYTVANKNTSLST

SEQ ID NO: 855250 - protein, 140 aa, Homo sapiens
GRAAPNGLRGASLPGSGRRVASGEWRVSGGRPAGAGRPEEALAAGSDPRGAAARLACSAPTPGGGTMPFDFRRFDIYRKVPKDLTQPTYTGAIISICCCLFILFLFLSELTGFITTEVVNELYVDDPDKDSGGKIDSESV

SEQ ID NO: 855251 - protein, 140 aa, Homo sapiens; identical to SEQ ID NO: 855250

SEQ ID NO: 855252 - protein, 198 aa, Homo sapiens; identical to SEQ ID NO: 855236

SEQ ID NO: 855253 - protein, 112 aa, Homo sapiens [sequence omitted]

SEQ ID NO: 855254 - protein, 198 aa, Homo sapiens; identical to SEQ ID NO: 855236

SEQ ID NO: 855255 - protein, 198 aa, Homo sapiens; identical to SEQ ID NO: 855236

SEQ ID NO: 855256 - protein, 198 aa, Homo sapiens; identical to SEQ ID NO: 855236

SEQ ID NO: 855257 - protein, 271 aa, Homo sapiens
MGRHEVGHIDNSMKIPLNNGAGCRFEGQFSINKELTSSQMSEFACFEQQRQPHQRPHGDLVSSASPAGGGQDGTCLQNQTLMGCCTISYIPSSDTARTVFSLGWNKVPGNFHVSTHSATAQPQNPDMTHVIHKLSFGDTLQVQNIHGAFNALGGADRLTSNPLASHDYILKIVPTVYEDKSGKQRYSYQYTVANKEYVAYSHTGRIIPAIWFRYDLSPITVKYTERRQPLYRFITTICAIIGGTFTVAGILDSCIFTASEAWKKIQLGKMH

SEQ ID NO: 855258 - protein, 198 aa, Homo sapiens; identical to SEQ ID NO: 855236

SEQ ID NO: 855259 - protein, 220 aa, Homo sapiens
MALKMHTRKAVQTTGSNSGTTVPYKFHVPTVPRLVQATDHSPSDHPGSQAHKPNAVPGNFHVSTHSATAQPQNPDMTHVIHKLSFGDTLQVQNIHGAFNALGGADRLTSNPLASHDYILKIVPTVYEDKSGKQRYSYQYTVANKEYVAYSHTGRIIPAIWFRYDLSPITVKYTERRQPLYRFITTICAIIGGTFTVAGILDSCIFTASEAWKKIQLGKMH

SEQ ID NO: 855260 - protein, 184 aa, Homo sapiens
SLNIRLPNCRFEGQFSINKVPGNFHVSTHSATAQPQNPDMTHVIHKLSFGDTLQVQNIHGAFNALGGADRLTSNPLASHDYILKIVPTVYEDKSGKQRYSYQYTVANKEYVAYSHTGRIIPAIWFRYDLSPITVKYTERRQPLYRFITTICAIIGGTFTVAGILDSCIFTASEAWKKIQLGKMH

SEQ ID NO: 855261 - protein, 198 aa, Homo sapiens; identical to SEQ ID NO: 855236

SEQ ID NO: 855262 - protein, 198 aa, Homo sapiens; identical to SEQ ID NO: 855236

SEQ ID NO: 855263 - protein, 198 aa, Homo sapiens; identical to SEQ ID NO: 855236

SEQ ID NO: 855264 - protein, 135 aa, Homo sapiens
MGRHEVGHIDNSMKIPLNNGAGCRFEGQFSINKVPGNFHVSTHSATAQPQNPDMTHVIHKLSFGDTLQVQNIHGAFNALGGADRLTSNPLASHDYILKIVPTVYEDKSGKQRYSYQYTVANKVRWPNTVRGPTSA

SEQ ID NO: 855265 - protein, 145 aa, Homo sapiens
MGRHEVGHIDNSMKIPLNNGAGCRFEGQFSINKVPGNFHVSTHSATAQPQNPDMTHVIHKLSFGDTLQVQNIHGAFNALGGADRLTSNPNQWEGGPSPVQTQTLTEKEEGLSRGTADARTQWIPAITIIVALITATSSSLVELIT

SEQ ID NO: 855266 - protein, 140 aa, Homo sapiens; identical to SEQ ID NO: 855250

SEQ ID NO: 855267 - protein, 187 aa, Homo sapiens
MTSREHQVSLCNCVPLLRRLLCDAPWRKARPLHALSRYFRSRVSPSKMAEEPQSVLQLPTSIAAGGEGLTDVSPETTTPEPPSSAAVSPGTEEPAGDTKKKIDILLKAVGDTPIMKTKKWAVERTRTIQGLIDFIKKFLKLVASEQLFIYVNQSFAPSPDQEVGTLYECFGSDGKLVLHYCKSQAWG

SEQ ID NO: 855268 - protein, 187 aa, Homo sapiens; identical to SEQ ID NO: 855267

SEQ ID NO: 855269 - protein, 187 aa, Homo sapiens; identical to SEQ ID NO: 855267

SEQ ID NO: 855270 - protein, 187 aa, Homo sapiens; identical to SEQ ID NO: 855267

SEQ ID NO: 855271 - protein, 187 aa, Homo sapiens; identical to SEQ ID NO: 855267

SEQ ID NO: 855272 - protein, 122 aa, Homo sapiens
MTSREHQVSLCNCVPLLRRLLCDAPWRKARPLHALSRYFRSRVSPSKMAEEPQSVLQLPTSIAAGGEGLTDVSPETTTPEPPSSAAVSPGTEEPAGDTKKKNDSGLWPGAVAHSCNPSTLVG

SEQ ID NO: 855273 - protein, 121 aa, Homo sapiens
MTSREHQVSLCNCVPLLRRLLCDAPWRKARPLHALSRYFRSRVSPSKMAEEPQSVLQLPTSIAAGGEGLTDVSPETTTPEPPSSAAVSPGTEEPAGDTKKKIYLCESVLCSFPRPRSWNSL

SEQ ID NO: 855274 - protein, 108 aa, Homo sapiens
MTSREHQVSLCNCVPLLRRLLCDAPWRKARPLHALSRYFRSRVSPSKMAEEPQSVLQLPTSIAAGGEGLTDVSPETTTPEPPSSAAVSPGTEEPAGDTKKKIGCEFTP

SEQ ID NO: 855275 - protein, 187 aa, Homo sapiens; identical to SEQ ID NO: 855267

SEQ ID NO: 855276 - protein, 108 aa, Homo sapiens; identical to SEQ ID NO: 855274

SEQ ID NO: 855277 - protein, 187 aa, Homo sapiens; identical to SEQ ID NO: 855267

SEQ ID NO: 855278 - protein, 149 aa, Homo sapiens
MTSREHQVSLCNCVPLLRRLLCDAPWRKARPLHALSRYFRSRVSPSKMAEEPQSVLQLPTSIAAGGEGLTDVSPETTTPEPPSSAAVSPGTEEPAGDTKKKIDILLKAVGDTPIMKTKKWAVERTRTIQGLIDFIILCSFPRPRSWNSL

SEQ ID NO: 855279 - protein, 187 aa, Homo sapiens; identical to SEQ ID NO: 855267

SEQ ID NO: 855280 - protein, 1061 aa, Homo sapiens
MGDPGSEIIESVPPAGPEASESTTDENEDDIQFVSEGPLRPVLEYIDLVSSDDEEPSTSYTDENIKRKDHIDYQKDKVALTLARLARHVEVEKQQKEEKNRAFREKIDFQHAHGLQELEFIRGHSDTEAARLCVDQWLKMPGLKTGTINCGTKSSFRRGGHTWVSGKPILCPIMHCNKEFDNGHLLLGHLKRFDHSPCDPTITLHGPFFSSFACVVCYKKFVTQQQYRDHLFDKEATDDGHNNNLLPQIIQCFACPNCFLLFSRKEECSKHMSGKNHFHQSFKLGDNKGIAHPISFPSFAKKLLISLCKDVPFQVKCVACHKTLRSHMELTAHFRVHCRNAGPVAVAEKSITQVAEKFILRGYCPDCNQVFVDETSTQNHKQNSGHKVRVINSVEESVLLYCHSSEGNKDPSSDLHLLLDQSKFSSLKRTMSIKESSSLECIAIPKKKMNLKDKSHEGVACVQKEKSVVKTWFCECNQRFPSEDAVEKHVFSANTMGYKCVVCGKVCDDSGVIRLHMSRIHGGAHLNNFLFWCRTCKKELTRKDTIMAHVTEFHNGHRYFYEMDEVEGETLPSSSTTLDNLTANKPSSAITVIDHSPANSSPRGKWQCRICEDMFDSQEYVKQHCMSLASHKFHRYSCAHCRKPFHKIETLYRHCQDEHDNEIKIKYFCGLCDLIFNVEEAFLSHYEEHHSIDYVFVSEKTETSIKTEDDFPVIETSNQLTCGCRESYICKVNRKEDYSRCLQIMLDKGKLWFRCSLCSATAQNLTDMNTHIHQVHKEKSDEEEQQYVIKCGTCTKAFHDPESAQQHFHRKHCFLQKPSVAHFGSEKSNLYKFTASASHTERKLKQAINYSKSLDMEKGVENDLSYQNIEEEIVELPDLDYLRTMTHIVFVDFDNWSNFFGHLPGHLNQGTFIWGFQGGNTNWKPPLNCKIYNYLNRIGCFFLHPRCSKRKDAADFAICMHAGRLDEQLPKQIPFTILSGDQGFLELENQFKKTQRPAHILNPHHLEGDMMCALLNSISDTTKECDSDDNMGAKNTSIGEEFISTEDVELEEAIRRSLEEM

SEQ ID NO: 855281 - protein, 102 aa, Homo sapiens [sequence omitted]

SEQ ID NO: 855282 - protein, 559 aa, Homo sapiens
MGDPGSEIIESVPPAGPEASESTTDENEDDIQFVSEGPLRPVLEYIDLVSSDDEEPSTSYTDRMPESKVPSSENHRPEMCSSCNVPLPIGDSSSFSGSCSSSPERIVSQTSSVENPLENQKNDQNNSDTKISETETLKSSQNFQTLPSSPLLVPQESLASSEVKENLRIDSSSASQHGRDAILYLQTQVAEMSRVIRDLQSRSCFRFHHSRPSENSSVPWDISTSKEENLSTVEEETDYKSPSADDKGQPSDPSQSSFTGLLKRMEQRGVIKRVTLQSEAESCEGKPDCVTSKKRLVPPLHPLLRIATTEVFKDPADCHPSSFMGHRVYPVAKDTSPFQPNPPAEGPIVEALEHSKRGNTTSPLDSTSKEMEVMGCRFYHAASIAARAASYMAYMTQYQRKLWEDMEDLVHDPEFDRGKARCIISDGMDAGLWQLCTTRDIMDSVVRVMAMAIDYRRQAWLRLTSLTKKTQEKISHLPFDGTSLFGQDVKAVVAEDNNIKENDYKDHKYYNQHRYFYSHDQKAHYHNRGYSKGDWYKPRNHPYRYRKKGDSPERHGYKN

SEQ ID NO: 855283 - protein, 826 aa, Homo sapiens
MGDPGSEIIESVPPAGPEASESTTDENEDDIQFVSEGPLRPVLEYIDLVSSDDEEPSTSYTDENIKRKDHIDYQKDKVALTLARLARHVEVEKQQKEEKNRAFREKIDFQHAHGLQELEFIRGHSDTEAARLCVDQWLKMPGLKTGTINCGTKSSFRRGGHTWVSGKPILCPIMHCNKEFDNGHLLLGHLKRFDHSPCDPTITLHGPFFSSFACVVCYKKFVTQQQYRDHLFDKEATDDGHNNNLLPQIIQCFACPNCFLLFSRKEECSKHMSGKNHFHQSFKLGDNKGIAHPISFPSFAKKLLISLCKDVPFQVKCVACHKTLRSHMELTAHFRVHCRNAGPVAVAEKSITQVAEKFILRGYCPDCNQVFVDETSTQNHKQNSGHKVRVINSVEESVLLYCHSSEGNKDPSSDLHLLLDQSKFSSLKRTMSIKESSSLECIAIPKKKMNLKDKSHEGVACVQKEKSVVKTWFCECNQRFPSEDAVEKHVFSANTMGYKCVVCGKVCDDSGVIRLHMSRIHGGAHLNNFLFWCRTCKKELTRKDTIMAHVTEFHNGHRYFYEMDEVEGETLPSSSTTLDNLTANKPSSAITVIDHSPANSSPRGKWQCRICEDMFDSQEYVKQHCMSLASHKFHRYSCAHCRKPFHKIETLYRHCQDEHDNEIKIKYFCGLCDLIFNVEEAFLSHYEEHHSIDYVFVSEKTNTKNNKKKKIVVGRARGPGEKSSFKETLLVWGRARRPSCGVLWNPVAPKAWVPKRGARWGPEHNVALGFSYPQRKKSRAGGHPQGGFREHNSLGRGFRAGPYSGGVITAGSQGGSDNITRARGGG

SEQ ID NO: 855284 - protein, 192 aa, Homo sapiens
MGDPGSEIIESVPPAGPEASESTTDENEDDIQFVSEGPLRPVLEYIDLVSSDDEEPSTSYTDENIKRKDHIDYQKDKVALTLARLARHVEVEKQQKEEKNRAFREKIDFQHAHGLQELEFIRGHSDTEAARLCVDQWLKMPGLKTGTINCGTKSSFRRGGHTWVSGKPILCPIMHCNKEFDNGHLLLGHLKR

SEQ ID NO: 855285 - protein, 1061 aa, Homo sapiens; identical to SEQ ID NO: 855280

SEQ ID NO: 855286 - protein, 481 aa, Homo sapiens
MCSSCNVPLPIGDSSSFSGSCSSSPERIVSQTSSVENPLENQKNDQNNSDTKISETETLKSSQNFQTLPSSPLLVPQESLASSEVKENLRIDSSSASQHGRDAILYLQTQVAEMSRVIRDLQSRSCFRFHHSRPSENSSVPWDISTSKEENLSTVEEETDYKSPSADDKGQPSDPSQSSFTGLLKRMEQRGVIKRVTLQSEAESCEGKPDCVTSKKRLVPPLHPLLRIATTEVFKDPADCHPSSFMGHRVYPVAKDTSPFQPNPPAEGPIVEALEHSKRGNTTSPLDSTSKEMEVMGCRFYHAASIAARAASYMAYMTQYQRKLWEDMEDLVHDPEFDRGKARCIISDGMDAGLWQLCTTRDIMDSVVRVMAMAIDYRRQAWLRLTSLTKKTQEKISHLPFDGTSLFGQDVKAVVAEDNNIKENDYKDHKYYNQHRYFYSHDQKAHYHNRGYSKGDWYKPRNHPYRYRKKGDSPERHGYKN

SEQ ID NO: 855287 - protein, 102 aa, Homo sapiens
MGDPGSEIIESVPPAGPEASESTTDENEDDIQFVSEGPLRPVLEYIDLVSSDDEEPSTSYTDVPYTTGFFCSRTTGPQKICFLLEKRICRDPFRNGKWGKGL

SEQ ID NO: 855288 - protein, 1127 aa, Homo sapiens
PGSERKRLRGHERASKGRSSFEEVLRLFPPVASALTQGRVPVAPGGAGREGDSWRRRRQGQQEQWCCQRGRRRHGRPGVGAGPEASESTTDENEDDIQFVSEGPLRPVLEYIDLVSSDDEEPSTSYTDENIKRKDHIDYQKDKVALTLARLARHVEVEKQQKEEKNRAFREKIDFQHAHGLQELEFIRGHSDTEAARLCVDQWLKMPGLKTGTINCGTKSSFRRGGHTWVSGKPILCPIMHCNKEFDNGHLLLGHLKRFDHSPCDPTITLHGPFFSSFACVVCYKKFVTQQQYRDHLFDKEATDDGHNNNLLPQIIQCFACPNCFLLFSRKEECSKHMSGKNHFHQSFKLGDNKGIAHPISFPSFAKKLLISLCKDVPFQVKCVACHKTLRSHMELTAHFRVHCRNAGPVAVAEKSITQVAEKFILRGYCPDCNQVFVDETSTQNHKQNSGHKVRVINSVEESVLLYCHSSEGNKDPSSDLHLLLDQSKFSSLKRTMSIKESSSLECIAIPKKKMNLKDKSHEGVACVQKEKSVVKTWFCECNQRFPSEDAVEKHVFSANTMGYKCVVCGKVCDDSGVIRLHMSRIHGGAHLNNFLFWCRTCKKELTRKDTIMAHVTEFHNGHRYFYEMDEVEGETLPSSSTTLDNLTANKPSSAITVIDHSPANSSPRGKWQCRICEDMFDSQEYVKQHCMSLASHKFHRYSCAHCRKPFHKIETLYRHCQDEHDNEIKIKYFCGLCDLIFNVEEAFLSHYEEHHSIDYVFVSEKTETSIKTEDDFPVIETSNQLTCGCRESYICKVNRKEDYSRCLQIMLDKGKLWFRCSLCSATAQNLTDMNTHIHQVHKEKSDEEEQQYVIKCGTCTKAFHDPESAQQHFHRKHCFLQKPSVAHFGSEKSNLYKFTASASHTERKLKQAINYSKSLDMEKGVENDLSYQNIEEEIVELPDLDYLRTMTHIVFVDFDNWSNFFGHLPGHLNQGTFIWGFQGGNTNWKPPLNCKIYNYLNRIGCFFLHPRCSKRKDAADFAICMHAGRLDEQLPKQIPFTILSGDQGFLELENQFKKTQRPAHILNPHHLEGDMMCALLNSISDTTKECDSDDNMGAKNTSIGEEFISTEDVELEEAIRRSLEEM

SEQ ID NO: 855289 - protein, 798 aa, Homo sapiens
SRGSLKSALFYIYHFHQSFKLGDNKGIAHPISFPSFAKKLLISLCKDVPFQVKCVACHKTLRSHMELTAHFRVHCRNAGPVAVAEKSITQVAEKFILRGYCPDCNQVFVDETSTQNHKQNSGHKVRVINSVEESVLLYCHSSEGNKDPSSDLHLLLDQSKFSSLKRTMSIKESSSLECIAIPKKKMNLKDKSHEGVACVQKEKSVVKTWFCECNQRFPSEDAVEKHVFSANTMGYKCVVCGKVCDDSGVIRLHMSRIHGGAHLNNFLFWCRTCKKELTRKDTIMAHVTEFHNGHRYFYEMDEVEGETLPSSSTTLDNLTANKPSSAITVIDHSPANSSPRGKWQCRICEDMFDSQEYVKQHCMSLASHKFHRYSCAHCRKPFHKIETLYRHCQDEHDNEIKIKYFCGLCDLIFNVEEAFLSHYEEHHSIDYVFVSEKTETSIKTEDDFPVIETSNQLTCGCRESYICKVNRKEDYSRCLQIMLDKGKLWFRCSLCSATAQNLTDMNTHIHQVHKEKSDEEEQQYVIKCGTCTKAFHDPESAQQHFHRKHCFLQKPSVAHFGSEKSNLYKFTASASHTERKLKQAINYSKSLDMEKGVENDLSYQNIEEEIVELPDLDYLRTMTHIVFVDFDNWSNFFGHLPGHLNQGTFIWGFQGGNTNWKPPLNCKIYNYLNRIGCFFLHPRCSKRKDAADFAICMHAGRLDEQLPKQIPFTILSGDQGFLELENQFKKTQRPAHILNPHHLEGDMMCALLNSISDTTKECDSDDNMGAKNTSIGEEFISTEDVELEEAIRRSLEEM

SEQ ID NO: 855290 - protein, 1061 aa, Homo sapiens; identical to SEQ ID NO: 855280

SEQ ID NO: 855291 - protein, 932 aa, Homo sapiens
MGDPGSEIIESVPPAGPEASESTTDENEDDIQFVSEGPLRPVLEYIDLVSSDDEEPSTSYTDENIKRKDHIDYQKDKVALTLARLARHVEVEKQQKEEKNRAFREKIDFQHAHGLQELEFIRGHSDTEAARLCVDQWLKMPGLKTGTINCGTKSSFRRGGHTWVSGKPILCPIMHCNKEFDNGHLLLGHLKRFDHSPCDPTITLHGPFFSSFACVVCYKKFVTQQQYRDHLFDKEATDDGHNNNLLPQIIQCFACPNCFLLFSRKEECSKHMSGKNHFHQSFKLGDNKGIAHPISFPSFAKKLLISLCKDVPFQVKCVACHKTLRSHMELTAHFRVHCRNAGPVAVAEKSITQVAEKFILRGYCPDCNQVFVDETSTQNHKQNSGHKVRVINSVEESVLLYCHSSEGNKDPSSDLHLLLDQSKFSSLKRTMSIKESSSLECIAIPKKKMNLKDKSHEGVACVQKEKSVVKTWFCECNQRFPSEDAVEKHVFSANTMGYKCVVCGKVCDDSGVIRLHMSRIHGGAHLNNFLFWCRTCKKELTRKDTIMAHVTEFHNGHRYFYEMDEVEGETLPSSSTTLDNLTANKPSSAITVIDHSPANSSPRGKWQCRICEDMFDSQEYVKQHCMSLASHKFHRYSCAHCRKPFHKIETLYRHCQDEHDNEIKIKYFCGLCDLIFNVEEAFLSHYEEHHSIDYVFVSEKTETSIKTEDDFPVIETSNQLTCGCRESYICKVNRKEDYSRCLQIMLDKGKLWFRCSLCSATAQNLTDMNTHIHQVHKEKSDEEEQQYVIKCGTCTKAFHDPESAQQHFHRKHCFLQKPSVAHFGSEKSNLYKFTASASHTERKLKQAINYSKSLDMEKGVENDLSYQNIEEEIVELPDLDYLRTMTHIVFVDFDNWSNFFGHLPGHLNQGTFIWGFQGTVNKKNKRKLFPTS

SEQ ID NO: 855292 - protein, 1041 aa, Homo sapiens
MGDPGSEIIESVPPAGPEASESTTDENEDDIQFVSEGPLRPVLEYIDLVSSDDEEPSTSYTDENIKRKDHIDYQKDKVALTLARLARHVEVEKQQKEEKNRAFREKIDFQHAHGLQELEFIRGHSDTEAARLCVDQWLKMPGLKTGTINCGTKSSFRRGGHTWVSGKPILCPIMHCNKEFDNGHLLLGHLKRFDHSPCDPTITLHGPFFSSFACVVCYKKFVTQQQYRDHLFDKEATDDGHNNNLLPQIIQCFACPNCFLLFSRKEECSKHMSGKNHFHQSFKLGDNKGIAHPISFPSFAKKLLISLCKDVPFQVKCVACHKTLRSHMELTAHFRVHCRNAGPVAVAEKSITQVAEKFILRGYCPDCNQVFVDETSTQNHKQNSGHKVRVINSVEESVLLYCHSSEGNKDPSSDLHLLLDQSKFSSLKRTMSIKESSSLECIAIPKKKMNLKDKSHEGVACVQKEKSVVKTWFCECNQRFPSEDAVEKHVFSANTMGYKCVVCGKVCDDSGVIRLHMSRIHGGAHLNNFLFWCRTCKKELTRKDTIMAHVTEFHNGHRYFYEMDEVEGETLPSSSTTLDNLTANKPSSAITVIDHSPANSSPRGKWQCRICEDMFDSQEYVKQHCMSLASHKFHRYSCAHCRKPFHKIETLYRHCQDEHDNEIKIKYFCGLCDLIFNVEEAFLSHYEEHHSIDYVFVSEKTETSIKTEDDFPVIETSNQLTCGCRESYICKVNRKEDYSRCLQIMLDKGKLWFRCSLCSATAQNLTDMNTHIHQVHKEKSDEEEQQYVIKCGTCTKAFHDPESAQQHFHRKHCFLQKPSVAHFGSEKSNLYKFTASASHTERKLKQAINYSKSLDMEKGVENDLSYQNIEEEIVELPDLDYLRTMTHIVFVDFDNWSNFFGHLPGHLNQGTFIWGFQGGNTNWKPPLNCKIYNYLNRIGCFFLHPRCSKRKDAADFAICMHAGRLDEQLPKQIPFTILSGDQGFLELENQFKKTQRPAHILNPHHLEGDMMCALLNSISDTTKGTQLQSQCKPPKRRRLHC

SEQ ID NO: 855293 - protein, 1094 aa, Homo sapiens
MAARQAVGSGAQETCGLDRILEALKLLLSPGGSGSSSLQVTKHDVLLATLKSNLSALEDKFLKDPQWKNLKLLRDEIADKAEWPQNSVDVTWSFTSQTLLLLLCLKETMIRLAANFNPGKPNPRTPEVAPALSPDALSISQQKTVQFVLQFVVTLGICPYLMPGVGVPLRYRTEFGAVVQDVVCFDAAPDATRRLYTSCKALLNVAQHTSLGSLIFCHHFGDIAAGLCQLGFCPTKRKLLTPAEEVLTEEERTLSRGALRDMLDQVYQPLAVRELLILQGGPPQSCTDVKTQMRCRAPAWLRRLCGQLLSERLMRPNGVQAVVRGILEGAGAGAAGGSDAEVTAADWKKCDLIAKILASCPQQSLSPENYYRDICPQVLDLFHFQDKLTARQFQRVATTTFITLSRERPHLAAKYLLQPVLAPLHRCLNTAELSESDMVPGTILVTEEELSRCIEDVFKVYVVGNEPLTVLMDSLLPVLGVLFLLYCFTKQSVSHIRSLCQEILLWILGKLERKKAIASLKGFAGLDKAVPSLHSLCQFRVATQGGIMITIKEAISDEDEDEALYQKVSSEQGRVEHLGDLLSHCQECGLAGDFFIFCLKELTHVASENETELKTEPFSSKSLLELEQHQTLLVEGQERKLLVLQLMAVLCERMSEQIFTNVTQVVDFVAATLQRACASLAHQAESTVESQTLSMSMGLVAVMLGGAVQLKSSDFAVLKQLLPLLEKVSNTYPDPVIQELAVDLRITISTHGAFATEAVSMAAQSTLNRKDLEGKIEEQQQTSHERPTDVAHSHLEQQQSHETAPQTGLQSNAPIIPQGVNEPSTTTSQKSGSVTTEQLQEVLLSAYDPQIPTRAAALRTLSHWIEQREAKALEMQEKLLKIFLENLEHEDTFVYLSAIQGVALLSDVYPEKILPDLLAQYDSSKDKHTPETRMKVGEVLMRIVRALGDMVSKYREPLIHTFLRGVRDPDGAHRASSLANLGELCQRLDFLLGSVVHEVTACLIAVAKTDGEVQVRRAAIHVVVLLLRGLSQKATEVLSAVLKDLYHLLKHVVCLEPDDVAKLHAQLALEELDDIMKNFLFPPQKLEKKIMVLP

SEQ ID NO: 855294 - protein, 204 aa, Homo sapiens
MNPFFLFSTPGVALLSDVYPEKILPDLLAQYDSSKDKHTPETRMKVGEVLMRIVRALGDMVSKYREPLIHTFLRGVRDPDGAHRASSLANLGELCQRLDFLLGSVVHEVTACLIAVAKTDGEVQVRRAAIHVVVLLLRGLSQKATEVLSAVLKDLYHLLKHVVCLEPDDVAKLHAQLALEELDDIMKNFLFPPQKLEKKIMVLP

SEQ ID NO: 855295 - protein, 1094 aa, Homo sapiens; identical to SEQ ID NO: 855293

SEQ ID NO: 855296 - protein, 688 aa, Homo sapiens
MAARQAVGSGAQETCGLDRILEALKLLLSPGGSGSSSLQVTKHDVLLATLKSNLSALEDKFLKDPQWKNLKLLRDEIADKAEWPQNSVDVTWSFTSQTLLLLLCLKETMIRLAANFNPGKPNPRTPEVAPALSPDALSISQQKTVQFVLQFVVTLGICPYLMPGVGVPLRYRTEFGAVVQDVVCFDAAPDATRRLYTSCKALLNVAQHTSLGSLIFCHHFGDIAAGLCQLGFCPTKRKLLTPAEEVLTEEERTLSRGALRDMLDQVYQPLAVRELLILQGGPPQETLSMSMGLVAVMLGGAVQLKSSDFAVLKQLLPLLEKVSNTYPDPVIQELAVDLRITISTHGAFATEAVSMAAQSTLNRKDLEGKIEEQQQTSHERPTDVAHSHLEQQQSHETAPQTGLQSNAPIIPQGVNEPSTTTSQKSGSVTTEQLQEVLLSAYDPQIPTRAAALRTLSHWIEQREAKALEMQEKLLKIFLENLEHEDTFVYLSAIQGVALLSDVYPEKILPDLLAQYDSSKDKHTPETRMKVGEVLMRIVRALGDMVSKYREPLIHTFLRGVRDPDGAHRASSLANLGELCQRLDFLLGSVVHEVTACLIAVAKTDGEVQVRRAAIHVVVLLLRGLSQKATEVLSAVLKDLYHLLKHVVCLEPDDVAKLHAQLALEELDDIMKNFLFPPQKLEKKIMVLP

SEQ ID NO: 855297 - protein, 316 aa, Homo sapiens
MAARQAVGSGAQETCGLDRILEALKLLLSPGGSGSSSLQVTKHDVLLATLKSNLSALEDKFLKDPQWKNLKLLRDEIADKAEWPQNSVDVTWSFTSQTLLLLLCLKETMIRLAANFNPGKPNPRTPEVAPALSPDALSISQQKTVQFVLQFVVTLGICPYLMPGVGVPLRYRTEFGAVVQDVVCFDAAPDATRRLYTSCKALLNVAQHTSLGSLIFCHHFGDIAAGLCQLGFCPTKRKLLTPAEEVLTEEERTLSRGALRDMLDQVYQPLAVRELLILQGGPPQDSGLGTLGGDSLMIMCGLLSSSGKLNNFSSLF

SEQ ID NO: 855298 - protein, 169 aa, Homo sapiens
MWEGFSAVTVKGRASPRLLLVIVGPVSVPGRPAVLTSLLNEELDRIPGRGPGVSESRSAGACALCPAVLKSRGTCPLLAGRFLRNWKCHEMWPSLGWRSLASLVPVQEELINSVVISQLSHIPEDKDHQVRKLATQLLVDLAEGCHTHHFNSLLDIIEKVRAVVPGAGC

SEQ ID NO: 855299 - protein, 108 aa, Homo sapiens
MTPDVWPGWLLEWMVLSASGIRVGLPAEPAGHPHPLRGRARPGSDATLPLLLSPQSNSELAILSNEHGSYRYTEFLTGLGRLIELKDCHLRGSRLLQPQPTSGAPSVP

SEQ ID NO: 855300 - protein, 98 aa, Homo sapiens
PSLCSFFVFLQLYHSPFFGDESNKPILLPNESQSFERSVQLLDQIPSYDTHKIAVLYVGEGQSNSELAILSNEHGSYRYTEFLTGLGRLIELKDCRVW

SEQ ID NO: 855301 - protein, 1974 aa, Homo sapiens
RFLAWGERGQRSGAPETQPLRTAIFGKKAQGGNAGPHVGTVRGCRVCSPCPRSWEPQEAARDSSLQPLSRLLPRSSHGAALPAAASLLRRGPGSSLHPRGPAPGPRLRLRVSILALKAVMPDSCGLHIPAAHAAPSRDARIAGLSARGRHRTTTPSKLPRRPSAQCRYRKCGSRFRRRPGARGVRLSPRRGGPERGGAAREGFSGASWSTMAKPTSKDSGLKEKFKILLGLGTPRPNPRSAEGKQTEFIITAEILRELSMECGLNNRIRMIGQICEVAKTKKFEEHAVEALWKAVADLLQPERPLEARHAVLALLKAIVQGQGERLGVLRALFFKVIKDYPSNEDLHERLEVFKALTDNGRHITYLEEELADFVLQWMDVGLSSEFLLVLVNLVKFNSCYLDEYIARMVQMICLLCVRTASSVDIEVSLQVLDAVVCYNCLPAESLPLFIVTLCRTINVKELCEPCWKLMRNLLGTHLGHSAIYNMCHLMEDRAYMEDAPLLRGAVFFVGMALWGAHRLYSLRNSPTSVLPSFYQAMACPNEVVSYEIVLSITRLIKKYRKELQVVAWDILLNIIERLLQQLQTLDSPELRTIVHDLLTTVEELCDQNEFHGSQERYFELVERCADQRPESSLLNLISYRAQSIHPAKDGWIQNLQALMERFFRSESRGAVRIKVLDVLSFVLLINRQFYEEELINSVVISQLSHIPEDKDHQVRKLATQLLVDLAEGCHTHHFNSLLDIIEKVMARSLSPPPELEERDVAAYSASLEDVKTAVLGLLVILQTKLYTLPASHATRVYEMLVSHIQLHYKHSYTLPIASSIRLQAFDFLLLLRADSLHRLGLPNKDGVVRFSPYCVCDYMEPERGSEKKTSGPLSPPTGPPGPAPAGPAVRLGSVPYSLLFRVLLQCLKQESDWKVLKLVLGRLPESLRYKVLIFTSPCSVDQLCSALCSMLSGPKTLERLRGAPEGFSRTDLHLAVVPVLTALISYHNYLDKTKQREMVYCLEQGLIHRCASQCVVALSICSVEMPDIIIKALPVLVVKLTHISATASMAVPLLEFLSTLARLPHLYRNFAAEQYASVFAISLPYTNPSKFNQYIVCLAHHVIAMWFIRCRLPFRKDFVPFITKGLRSNVLLSFDDTPEKDSFRARSTSLNERPKSRIQTSLTSASLGSADENSVAQADDSLKNLHLELTETCLDMMARYVFSNFTAVPKRSPVGEFLLAGGRTKTWLVGNKLVTVTTSVGTGTRSLLGLDSGELQSGPESSSSPGVHVRQTKEAPAKLESQAGQQVSRGARDRVRSMSGGHGLRVGALDVPASQFLGSATSPGPRTAPAAKPEKASAGTRVPVQEKTNLAAYVPLLTQGWAEILVRRPTGNTSWLMSLENPLSPFSSDINNMPLQELSNALMAAERFKEHRDTALYKSLSVPAASTAKPPPLPRSNTVASFSSLYQSSCQGQLHRSVSWADSAVVMEEGSPGEVPVLVEPPGLEDVEAALGMDRRTDAYSRSSSVSSQEEKSLHAEELVGRGIPIERVVSSEGGRPSVDLSFQPSQPLSKSSSSPELQTLQDILGDPGDKADVGRLSPEVKARSQSGTLDGESAAWSASGEDSRGQPEGPLPSSSPRSPSGLRPRGYTISDSAPSRRGKRVERDALKSRATASNAEKVPGINPSFVFLQLYHSPFFGDESNKPILLPNESQSFERSVQLLDQIPSYDTHKIAVLYVGEGQSNSELAILSNEHGSYRYTEFLTGLGRLIELKDCQPDKVYLGGLDVCGEDGQFTYCWHDDIMQAVFHIATLMPTKDVDKHRCDKKRHLGNDFVSIVYNDSGEDFKLGTIKGQFNFVHVIVTPLDYECNLVSLQCRKDMEGLVDTSVAKIVSDRNLPFVARQMALHANMASQVHHSRSNPTDIYPSKWIARLRHIKRLRQRICEEAAYSNPSLPLVHPPSHSKAPAQTPAEPTPGYEVGQRKRLISSVEDFTEFV

SEQ ID NO: 855302 - protein, 2017 aa, Homo sapiens
RFLAWGERGQRSGAPETQPLRTAIFGKKAQGGNAGPHVGTVRGCRVCSPCPRSWEPQEAARDSSLQPLSRLLPRSSHGAALPAAASLLRRGPGSSLHPRGPAPGPRLRLRVSILALKAVMPDSCGLHIPAAHAAPSRDARIAGLSARGRHRTTTPSKLPRRPSAQCRYRKCGSRFRRRPGARGVRLSPRRGGPERGGAAREGFSGASWSTMAKPTSKDSGLKEKFKILLGLGTPRPNPRSAEGKQTEFIITAEILRELSMECGLNNRIRMIGQICEVAKTKKFEEHAVEALWKAVADLLQPERPLEARHAVLALLKAIVQGQGERLGVLRALFFKVIKDYPSNEDLHERLEVFKALTDNGRHITYLEEELADFVLQWMDVGLSSEFLLVLVNLVKFNSCYLDEYIARMVQMICLLCVRTASSVDIEVSLQVLDAVVCYNCLPAESLPLFIVTLCRTINVKELCEPCWKLMRNLLGTHLGHSAIYNMCHLMEDRAYMEDAPLLRGAVFFVGMALWGAHRLYSLRNSPTSVLPSFYQAMACPNEVVSYEIVLSITRLIKKYRKELQVVAWDILLNIIERLLQQLQTLDSPELRTIVHDLLTTVEELCDQNEFHGSQERYFELVERCADQRPESSLLNLISYRAQSIHPAKDGWIQNLQALMERFFRSESRGAVRIKVLDVLSFVLLINRQFYEEELINSVVISQLSHIPEDKDHQVRKLATQLLVDLAEGCHTHHFNSLLDIIEKVMARSLSPPPELEERDVAAYSASLEDVKTAVLGLLVILQTKLYTLPASHATRVYEMLVSHIQLHYKHSYTLPIASSIRLQAFDFLLLLRADSLHRLGLPNKDGVVRFSPYCVCDYMEPERGSEKKTSGPLSPPTGPPGPAPAGPAVRLGSVPYSLLFRVLLQCLKQESDWKVLKLVLGRLPESLRYKVLIFTSPCSVDQLCSALCSMLSGPKTLERLRGAPEGFSRTDLHLAVVPVLTALISYHNYLDKTKQREMVYCLEQGLIHRCASQCVVALSICSVEMPDIIIKALPVLVVKLTHISATASMAVPLLEFLSTLARLPHLYRNFAAEQYASVFAISLPYTNPSKFNQYIVCLAHHVIAMWFIRCRLPFRKDFVPFITKGLRSNVLLSFDDTPEKDSFRARSTSLNERPKSLRIARPPKQGLNNSPPVKEFKESSAAEAFRCRSISVSEHVVRSRIQTSLTSASLGSADENSVAQADDSLKNLHLELTETCLDMMARYVFSNFTAVPKRSPVGEFLLAGGRTKTWLVGNKLVTVTTSVGTGTRSLLGLDSGELQSGPESSSSPGVHVRQTKEAPAKLESQAGQQVSRGARDRVRSMSGGHGLRVGALDVPASQFLGSATSPGPRTAPAAKPEKASAGTRVPVQEKTNLAAYVPLLTQGWAEILVRRPTGNTSWLMSLENPLSPFSSDINNMPLQELSNALMAAERFKEHRDTALYKSLSVPAASTAKPPPLPRSNTVASFSSLYQSSCQGQLHRSVSWADSAVVMEEGSPGEVPVLVEPPGLEDVEAALGMDRRTDAYSRSSSVSSQEEKSLHAEELVGRGIPIERVVSSEGGRPSVDLSFQPSQPLSKSSSSPELQTLQDILGDPGDKADVGRLSPEVKARSQSGTLDGESAAWSASGEDSRGQPEGPLPSSSPRSPSGLRPRGYTISDSAPSRRGKRVERDALKSRATASNAEKVPGINPSFVFLQLYHSPFFGDESNKPILLPNESQSFERSVQLLDQIPSYDTHKIAVLYVGEGQSNSELAILSNEHGSYRYTEFLTGLGRLIELKDCQPDKVYLGGLDVCGEDGQFTYCWHDDIMQAVFHIATLMPTKDVDKHRCDKKRHLGNDFVSIVYNDSGEDFKLGTIKGQFNFVHVIVTPLDYECNLVSLQCRKDMEGLVDTSVAKIVSDRNLPFVARQMALHANMASQVHHSRSNPTDIYPSKWIARLRHIKRLRQRICEEAAYSNPSLPLVHPPSHSKAPAQTPAEPTPGYEVGQRKRLISSVEDFTEFV

SEQ ID NO: 855303 - protein, 1951 aa, Homo sapiens
RFLAWGERGQRSGAPETQPLRTAIFGKKAQGGNAGPHVGTVRGCRVCSPCPRSWEPQEAARDSSLQPLSRLLPRSSHGAALPAAASLLRRGPGSSLHPRGPAPGPRLRLRVSILALKAVMPDSCGLHIPAAHAAPSRDARIAGLSARGRHRTTTPSKLPRRPSAQCRYRKCGSRFRRRPGARGVRLSPRRGGPERGGAAREGFSGASWSTMAKPTSKDSGLKEKFKILLGLGTPRPNPRSAEGKQTEFIITAEILRELSMECGLNNRIRMIGQICEVAKTKKFEEHAVEALWKAVADLLQPERPLEARHAVLALLKAIVQGQGERLGVLRALFFKVIKDYPSNEDLHERLEVFKALTDNGRHITYLEEELADFVLQWMDVGLSSEFLLVLVNLVKFNSCYLDEYIARMVQMICLLCVRTASSVDIEVSLQVLDAVVCYNCLPAESLPLFIVTLCRTINVKELCEPCWKLMRNLLGTHLGHSAIYNMCHLMEDRAYMEDAPLLRGAVFFVGMALWGAHRLYSLRNSPTSVLPSFYQAMACPNEVVSYEIVLSITRLIKKYRKELQVVAWDILLNIIERLLQQLQTLDSPELRTIVHDLLTTVEELCDQNEFHGSQERYFELVERCADQRPESSLLNLISYRAQSIHPAKDGWIQNLQALMERFFRSESRGAVRIKVLDVLSFVLLINRQFYEEELINSVVISQLSHIPEDKDHQVRKLATQLLVDLAEGCHTHHFNSLLDIIEKVMARSLSPPPELEERDVAAYSASLEDVKTAVLGLLVILQTKLYTLPASHATRVYEMLVSHIQLHYKHSYTLPIASSIRLQAFDFLLLLRADSLHRLGLPNKDGVVRFSPYCVCDYMEPERGSEKKTSGPLSPPTGPPGPAPAGPAVRLGSVPYSLLFRVLLQCLKQESDWKVLKLVLGRLPESLRYKVLIFTSPCSVDQLCSALCSMLSGPKTLERLRGAPEGFSRTDLHLAVVPVLTALISYHNYLDKTKQREMVYCLEQGLIHRCASQCVVALSICSVEMPDIIIKALPVLVVKLTHISATASMAVPLLEFLSTLARLPHLYRNFAAEQYASVFAISLPYTNPSKFNQYIVCLAHHVIAMWFIRCRLPFRKDFVPFITKGLRSNVLLSFDDTPEKDSFRARSTSLNERPKSRIQTSLTSASLGSADENSVAQADDSLKNLHLELTETCLDMMARYVFSNFTAVPKRSPVGEFLLAGGRTKTWLVGNKLVTVTTSVGTGTRSLLGLDSGELQSGPESSSSPGVHVRQTKEAPAKLESQAGQQVSRGARDRVRSMSGGHGLRVGALDVPASQFLGSATSPGPRTAPAAKPEKASAGTRVPVQEKTNLAAYVPLLTQGWAEILVRRPTGNTSWLMSLENPLSPFSSDINNMPLQELSNALMAAERFKEHRDTALYKSLSVPAASTAKPPPLPRSNTDSAVVMEEGSPGEVPVLVEPPGLEDVEAALGMDRRTDAYSRSSSVSSQEEKSLHAEELVGRGIPIERVVSSEGGRPSVDLSFQPSQPLSKSSSSPELQTLQDILGDPGDKADVGRLSPEVKARSQSGTLDGESAAWSASGEDSRGQPEGPLPSSSPRSPSGLRPRGYTISDSAPSRRGKRVERDALKSRATASNAEKVPGINPSFVFLQLYHSPFFGDESNKPILLPNESQSFERSVQLLDQIPSYDTHKIAVLYVGEGQSNSELAILSNEHGSYRYTEFLTGLGRLIELKDCQPDKVYLGGLDVCGEDGQFTYCWHDDIMQAVFHIATLMPTKDVDKHRCDKKRHLGNDFVSIVYNDSGEDFKLGTIKGQFNFVHVIVTPLDYECNLVSLQCRKDMEGLVDTSVAKIVSDRNLPFVARQMALHANMASQVHHSRSNPTDIYPSKWIARLRHIKRLRQRICEEAAYSNPSLPLVHPPSHSKAPAQTPAEPTPGYEVGQRKRLISSVEDFTEFV

SEQ ID NO: 855304 - protein, 1558 aa, Homo sapiens
LGHPGSAAGTELGAPCRMICLLCVRTASSVDIEVSLQVLDAVVCYNCLPAESLPLFIVTLCRTINVKELCEPCWKLMRNLLGTHLGHSAIYNMCHLMEDRAYMEDAPLLRGAVFFVGMALWGAHRLYSLRNSPTSVLPSFYQAMACPNEVVSYEIVLSITRLIKKYRKELQVVAWDILLNIIERLLQQLQTLDSPELRTIVHDLLTTVEELCDQNEFHGSQERYFELVERCADQRPESSLLNLISYRAQSIHPAKDGWIQNLQALMERFFRSESRGAVRIKVLDVLSFVLLINRQFYEEELINSVVISQLSHIPEDKDHQVRKLATQLLVDLAEGCHTHHFNSLLDIIEKVMARSLSPPPELEERDVAAYSASLEDVKTAVLGLLVILQTKLYTLPASHATRVYEMLVSHIQLHYKHSYTLPIASSIRLQAFDFLLLLRADSLHRLGLPNKDGVVRFSPYCVCDYMEPERGSEKKTSGPLSPPTGPPGPAPAGPAVRLGSVPYSLLFRVLLQCLKQESDWKVLKLVLGRLPESLRYKVLIFTSPCSVDQLCSALCSMLSGPKTLERLRGAPEGFSRTDLHLAVVPVLTALISYHNYLDKTKQREMVYCLEQGLIHRCASQCVVALSICSVEMPDIIIKALPVLVVKLTHISATASMAVPLLEFLSTLARLPHLYRNFAAEQYASVFAISLPYTNPSKFNQYIVCLAHHVIAMWFIRCRLPFRKDFVPFITKGLRSNVLLSFDDTPEKDSFRARSTSLNERPKSRIQTSLTSASLGSADENSVAQADDSLKNLHLELTETCLDMMARYVFSNFTAVPKRSPVGEFLLAGGRTKTWLVGNKLVTVTTSVGTGTRSLLGLDSGELQSGPESSSSPGVHVRQTKEAPAKLESQAGQQVSRGARDRVRSMSGGHGLRVGALDVPASQFLGSATSPGPRTAPAAKPEKASAGTRVPVQEKTNLAAYVPLLTQGWAEILVRRPTGNTSWLMSLENPLSPFSSDINNMPLQELSNALMAAERFKEHRDTALYKSLSVPAASTAKPPPLPRSNTDSAVVMEEGSPGEVPVLVEPPGLEDVEAALGMDRRTDAYSRSSSVSSQEEKSLHAEELVGRGIPIERVVSSEGGRPSVDLSFQPSQPLSKSSSSPELQTLQDILGDPGDKADVGRLSPEVKARSQSGTLDGESAAWSASGEDSRGQPEGPLPSSSPRSPSGLRPRGYTISDSAPSRRGKRVERDALKSRATASNAEKVPGINPSFVFLQLYHSPFFGDESNKPILLPNESQSFERSVQLLDQIPSYDTHKIAVLYVGEGQSNSELAILSNEHGSYRYTEFLTGLGRLIELKDCQPDKVYLGGLDVCGEDGQFTYCWHDDIMQAVFHIATLMPTKDVDKHRCDKKRHLGNDFVSIVYNDSGEDFKLGTIKGQFNFVHVIVTPLDYECNLVSLQCRKDMEGLVDTSVAKIVSDRNLPFVARQMALHANMASQVHHSRSNPTDIYPSKWIARLRHIKRLRQRICEEAAYSNPSLPLVHPPSHSKAPAQTPAEPTPGYEVGQRKRLISSVEDFTEFV

SEQ ID NO: 855305 - protein, 1462 aa, Homo sapiens
EQQLPSQPLWPLERIWGVSWATWVRVAPGEDLGVSQPMRPGAASEGWGRLSPCGPERPERAEGVSMRWVCSEASGAKSMWGVEVSLCHRAWYLQTLDSPELRTIVHDLLTTVEELCDQNEFHGSQERYFELVERCADQRPESSLLNLISYRAQSIHPAKDGWIQNLQALMERFFRSESRGAVRIKVLDVLSFVLLINRQFYEEELINSVVISQLSHIPEDKDHQVRKLATQLLVDLAEGCHTHHFNSLLDIIEKVMARSLSPPPELEERDVAAYSASLEDVKTAVLGLLVILQTKLYTLPASHATRVYEMLVSHIQLHYKHSYTLPIASSIRLQAFDFLLLLRADSLHRLGLPNKDGVVRFSPYCVCDYMEPERGSEKKTSGPLSPPTGPPGPAPAGPAVRLGSVPYSLLFRVLLQCLKQESDWKVLKLVLGRLPESLRYKVLIFTSPCSVDQLCSALCSMLSGPKTLERLRGAPEGFSRTDLHLAVVPVLTALISYHNYLDKTKQREMVYCLEQGLIHRCASQCVVALSICSVEMPDIIIKALPVLVVKLTHISATASMAVPLLEFLSTLARLPHLYRNFAAEQYASVFAISLPYTNPSKFNQYIVCLAHHVIAMWFIRCRLPFRKDFVPFITKGLRSNVLLSFDDTPEKDSFRARSTSLNERPKSRIQTSLTSASLGSADENSVAQADDSLKNLHLELTETCLDMMARYVFSNFTAVPKRSPVGEFLLAGGRTKTWLVGNKLVTVTTSVGTGTRSLLGLDSGELQSGPESSSSPGVHVRQTKEAPAKLESQAGQQVSRGARDRVRSMSGGHGLRVGALDVPASQFLGSATSPGPRTAPAAKPEKASAGTRVPVQEKTNLAAYVPLLTQGWAEILVRRPTGNTSWLMSLENPLSPFSSDINNMPLQELSNALMAAERFKEHRDTALYKSLSVPAASTAKPPPLPRSNTDSAVVMEEGSPGEVPVLVEPPGLEDVEAALGMDRRTDAYSRSSSVSSQEEKSLHAEELVGRGIPIERVVSSEGGRPSVDLSFQPSQPLSKSSSSPELQTLQDILGDPGDKADVGRLSPEVKARSQSGTLDGESAAWSASGEDSRGQPEGPLPSSSPRSPSGLRPRGYTISDSAPSRRGKRVERDALKSRATASNAEKVPGINPSFVFLQLYHSPFFGDESNKPILLPNESQSFERSVQLLDQIPSYDTHKIAVLYVGEGQSNSELAILSNEHGSYRYTEFLTGLGRLIELKDCQPDKVYLGGLDVCGEDGQFTYCWHDDIMQAVFHIATLMPTKDVDKHRCDKKRHLGNDFVSIVYNDSGEDFKLGTIKGQFNFVHVIVTPLDYECNLVSLQCRKDMEGLVDTSVAKIVSDRNLPFVARQMALHANMASQVHHSRSNPTDIYPSKWIARLRHIKRLRQRICEEAAYSNPSLPLVHPPSHSKAPAQTPAEPTPGYEVGQRKRLISSVEDFTEFV

SEQ ID NO: 855306 - protein, 1277 aa, Homo sapiens
MWPSLGWRSLASLVPVQEELINSVVISQLSHIPEDKDHQVRKLATQLLVDLAEGCHTHHFNSLLDIIEKVMARSLSPPPELEERDVAAYSASLEDVKTAVLGLLVILQTKLYTLPASHATRVYEMLVSHIQLHYKHSYTLPIASSIRLQAFDFLLLLRADSLHRLGLPNKDGVVRFSPYCVCDYMEPERGSEKKTSGPLSPPTGPPGPAPAGPAVRLGSVPYSLLFRVLLQCLKQESDWKVLKLVLGRLPESLRYKVLIFTSPCSVDQLCSALCSMLSGPKTLERLRGAPEGFSRTDLHLAVVPVLTALISYHNYLDKTKQREMVYCLEQGLIHRCASQCVVALSICSVEMPDIIIKALPVLVVKLTHISATASMAVPLLEFLSTLARLPHLYRNFAAEQYASVFAISLPYTNPSKFNQYIVCLAHHVIAMWFIRCRLPFRKDFVPFITKGLRSNVLLSFDDTPEKDSFRARSTSLNERPKSRIQTSLTSASLGSADENSVAQADDSLKNLHLELTETCLDMMARYVFSNFTAVPKRSPVGEFLLAGGRTKTWLVGNKLVTVTTSVGTGTRSLLGLDSGELQSGPESSSSPGVHVRQTKEAPAKLESQAGQQVSRGARDRVRSMSGGHGLRVGALDVPASQFLGSATSPGPRTAPAAKPEKASAGTRVPVQEKTNLAAYVPLLTQGWAEILVRRPTGNTSWLMSLENPLSPFSSDINNMPLQELSNALMAAERFKEHRDTALYKSLSVPAASTAKPPPLPRSNTDSAVVMEEGSPGEVPVLVEPPGLEDVEAALGMDRRTDAYSRSSSVSSQEEKSLHAEELVGRGIPIERVVSSEGGRPSVDLSFQPSQPLSKSSSSPELQTLQDILGDPGDKADVGRLSPEVKARSQSGTLDGESAAWSASGEDSRGQPEGPLPSSSPRSPSGLRPRGYTISDSAPSRRGKRVERDALKSRATASNAEKVPGINPSFVFLQLYHSPFFGDESNKPILLPNESQSFERSVQLLDQIPSYDTHKIAVLYVGEGQSNSELAILSNEHGSYRYTEFLTGLGRLIELKDCQPDKVYLGGLDVCGEDGQFTYCWHDDIMQAVFHIATLMPTKDVDKHRCDKKRHLGNDFVSIVYNDSGEDFKLGTIKGQFNFVHVIVTPLDYECNLVSLQCRKDMEGLVDTSVAKIVSDRNLPFVARQMALHANMASQVHHSRSNPTDIYPSKWIARLRHIKRLRQRICEEAAYSNPSLPLVHPPSHSKAPAQTPAEPTPGYEVGQRKRLISSVEDFTEFV

SEQ ID NO: 855307 - protein, 1085 aa, Homo sapiens
MWMSPICAFPKWGSRAVHLTFLVCYLAGTPTTPKGRPFLGGRQEGSPAPLPPFLGLRSQGLPSPSGYPVTWPLGRGFMPGFGHQLSGPKTLERLRGAPEGFSRTDLHLAVVPVLTALISYHNYLDKTKQREMVYCLEQGLIHRCASQCVVALSICSVEMPDIIIKALPVLVVKLTHISATASMAVPLLEFLSTLARLPHLYRNFAAEQYASVFAISLPYTNPSKFNQYIVCLAHHVIAMWFIRCRLPFRKDFVPFITKGLRSNVLLSFDDTPEKDSFRARSTSLNERPKSRIQTSLTSASLGSADENSVAQADDSLKNLHLELTETCLDMMARYVFSNFTAVPKRSPVGEFLLAGGRTKTWLVGNKLVTVTTSVGTGTRSLLGLDSGELQSGPESSSSPGVHVRQTKEAPAKLESQAGQQVSRGARDRVRSMSGGHGLRVGALDVPASQFLGSATSPGPRTAPAAKPEKASAGTRVPVQEKTNLAAYVPLLTQGWAEILVRRPTGNTSWLMSLENPLSPFSSDINNMPLQELSNALMAAERFKEHRDTALYKSLSVPAASTAKPPPLPRSNTDSAVVMEEGSPGEVPVLVEPPGLEDVEAALGMDRRTDAYSRSSSVSSQEEKSLHAEELVGRGIPIERVVSSEGGRPSVDLSFQPSQPLSKSSSSPELQTLQDILGDPGDKADVGRLSPEVKARSQSGTLDGESAAWSASGEDSRGQPEGPLPSSSPRSPSGLRPRGYTISDSAPSRRGKRVERDALKSRATASNAEKVPGINPSFVFLQLYHSPFFGDESNKPILLPNESQSFERSVQLLDQIPSYDTHKIAVLYVGEGQSNSELAILSNEHGSYRYTEFLTGLGRLIELKDCQPDKVYLGGLDVCGEDGQFTYCWHDDIMQAVFHIATLMPTKDVDKHRCDKKRHLGNDFVSIVYNDSGEDFKLGTIKGQFNFVHVIVTPLDYECNLVSLQCRKDMEGLVDTSVAKIVSDRNLPFVARQMALHANMASQVHHSRSNPTDIYPSKWIARLRHIKRLRQRICEEAAYSNPSLPLVHPPSHSKAPAQTPAEPTPGYEVGQRKRLISSVEDFTEFV

SEQ ID NO: 855308 - protein, 798 aa, Homo sapiens
PKGFKPPPPRVGSEAGWPENSVAQADDSLKNLHLELTETCLDMMARYVFSNFTAVPKRSPVGEFLLAGGRTKTWLVGNKLVTVTTSVGTGTRSLLGLDSGELQSGPESSSSPGVHVRQTKEAPAKLESQAGQQVSRGARDRVRSMSGGHGLRVGALDVPASQFLGSATSPGPRTAPAAKPEKASAGTRVPVQEKTNLAAYVPLLTQGWAEILVRRPTGNTSWLMSLENPLSPFSSDINNMPLQELSNALMAAERFKEHRDTALYKSLSVPAASTAKPPPLPRSNTDSAVVMEEGSPGEVPVLVEPPGLEDVEAALGMDRRTDAYSRSSSVSSQEEKSLHAEELVGRGIPIERVVSSEGGRPSVDLSFQPSQPLSKSSSSPELQTLQDILGDPGDKADVGRLSPEVKARSQSGTLDGESAAWSASGEDSRGQPEGPLPSSSPRSPSGLRPRGYTISDSAPSRRGKRVERDALKSRATASNAEKVPGINPSFVFLQLYHSPFFGDESNKPILLPNESQSFERSVQLLDQIPSYDTHKIAVLYVGEGQSNSELAILSNEHGSYRYTEFLTGLGRLIELKDCQPDKVYLGGLDVCGEDGQFTYCWHDDIMQAVFHIATLMPTKDVDKHRCDKKRHLGNDFVSIVYNDSGEDFKLGTIKGQFNFVHVIVTPLDYECNLVSLQCRKDMEGLVDTSVAKIVSDRNLPFVARQMALHANMASQVHHSRSNPTDIYPSKWIARLRHIKRLRQRICEEAAYSNPSLPLVHPPSHSKAPAQTPAEPTPGYEVGQRKRLISSVEDFTEFV

SEQ ID NO: 855309 - protein, 1105 aa, Homo sapiens
RFLAWGERGQRSGAPETQPLRTAIFGKKAQGGNAGPHVGTVRGCRVCSPCPRSWEPQEAARDSSLQPLSRLLPRSSHGAALPAAASLLRRGPGSSLHPRGPAPGPRLRLRVSILALKAVMPDSCGLHIPAAHAAPSRDARIAGLSARGRHRTTTPSKLPRRPSAQCRYRKCGSRFRRRPGARGVRLSPRRGGPERGGAAREGFSGASWSTMAKPTSKDSGLKEKFKILLGLGTPRPNPRSAEGKQTEFIITAEILRELSMECGLNNRIRMIGQICEVAKTKKFEEHAVEALWKAVADLLQPERPLEARHAVLALLKAIVQGQGERLGVLRALFFKVIKDYPSNEDLHERLEVFKALTDNGRHITYLEEELADFVLQWMDVGLSSEFLLVLVNLVKFNSCYLDEYIARMVQMICLLCVRTASSVDIEVSLQVLDAVVCYNCLPAESLPLFIVTLCRTINVKELCEPCWKLMRNLLGTHLGHSAIYNMCHLMEDRAYMEDAPLLRGAVFFVGMALWGAHRLYSLRNSPTSVLPSFYQAMACPNEVVSYEIVLSITRLIKKYRKELQVVAWDILLNIIERLLQQLQTLDSPELRTIVHDLLTTVEELCDQNEFHGSQERYFELVERCADQRPESSLLNLISYRAQSIHPAKDGWIQNLQALMERFFRSESRGAVRIKVLDVLSFVLLINRQFYEEELINSVVISQLSHIPEDKDHQVRKLATQLLVDLAEGCHTHHFNSLLDIIEKVMARSLSPPPELEERDVAAYSASLEDVKTAVLGLLVILQTKLYTLPASHATRVYEMLVSHIQLHYKHSYTLPIASSIRLQAFDFLLLLRADSLHRLGLPNKDGVVRFSPYCVCDYMEPERGSEKKTSGPLSPPTGPPGPAPAGPAVRLGSVPYSLLFRVLLQCLKQESDWKVLKLVLGRLPESLRYKVLIFTSPCSVDQLCSALCSMLSGPKTLERLRGAPEGFSRTDLHLAVVPVLTALISYHNYLDKTKQREMVYCLEQGLIHRCASQCVVALSICSVEMPDIIIKALPVLVVKLTHISATASMAVPLLEFLSTLARLPHLYRNFAAEQYASVFAISLPYTNPSKFNQYIVCLAHHVIAM

SEQ ID NO: 855310 - protein, 403 aa, Homo sapiens
MSVGRLSPEVKARSQSGTLDGESAAWSASGEDSRGQPEGPLPSSSPRSPSGLRPRGYTISDSAPSRRGKRVERDALKSRATASNAEKVPGINPSFVFLQLYHSPFFGDESNKPILLPNESQSFERSVQLLDQIPSYDTHKIAVLYVGEGQSNSELAILSNEHGSYRYTEFLTGLGRLIELKDCQPDKVYLGGLDVCGEDGQFTYCWHDDIMQAVFHIATLMPTKDVDKHRCDKKRHLGNDFVSIVYNDSGEDFKLGTIKGQFNFVHVIVTPLDYECNLVSLQCRKDMEGLVDTSVAKIVSDRNLPFVARQMALHANMASQVHHSRSNPTDIYPSKWIARLRHIKRLRQRICEEAAYSNPSLPLVHPPSHSKAPAQTPAEPTPGYEVGQRKRLISSVEDFTEFV

SEQ ID NO: 855311 - protein, 193 aa, Homo sapiens [sequence omitted]

SEQ ID NO: 855312 - protein, 308 aa, Homo sapiens
MTPDVWPGWLLEWMVLSASGIRVGLPAEPAGHPHPLRGRARPGSDATLPLLLSPQSNSELAILSNEHGSYRYTEFLTGLGRLIELKDCQPDKVYLGGLDVCGEDGQFTYCWHDDIMQAVFHIATLMPTKDVDKHRCDKKRHLGNDFVSIVYNDSGEDFKLGTIKGQFNFVHVIVTPLDYECNLVSLQCRKDMEGLVDTSVAKIVSDRNLPFVARQMALHANMASQVHHSRSNPTDIYPSKWIARLRHIKRLRQRICEEAAYSNPSLPLVHPPSHSKAPAQTPAEPTPGYEVGQRKRLISSVEDFTEFV

SEQ ID NO: 855313 - protein, 1104 aa, Homo sapiens
RFLAWGERGQRSGAPETQPLRTAIFGKKAQGGNAGPHVGTVRGCRVCSPCPRSWEPQEAARDSSLQPLSRLLPRSSHGAALPAAASLLRRGPGSSLHPRGPAPGPRLRLRVSILALKAVMPDSCGLHIPAAHAAPSRDARIAGLSARGRHRTTTPSKLPRRPSAQCRYRKCGSRFRRRPGARGVRLSPRRGGPERGGAAREGFSGASWSTMAKPTSKDSGLKEKFKILLGLGTPRPNPRSAEGKQTEFIITAEILRELSMECGLNNRIRMIGQICEVAKTKKFEEHAVEALWKAVADLLQPERPLEARHAVLALLKAIVQGQGERLGVLRALFFKVIKDYPSNEDLHERLEVFKALTDNGRHITYLEEELADFVLQWMDVGLSSEFLLVLVNLVKFNSCYLDEYIARMVQMICLLCVRTASSVDIEVSLQVLDAVVCYNCLPAESLPLFIVTLCRTINVKELCEPCWKLMRNLLGTHLGHSAIYNMCHLMEDRAYMEDAPLLRGAVFFVGMALWGAHRLYSLRNSPTSVLPSFYQAMACPNEVVSYEIVLSITRLIKKYRKELQVVAWDILLNIIERLLQQLQTLDSPELRTIVHDLLTTVEELCDQNEFHGSQERYFELVERCADQRPESSLLNLISYRAQSIHPAKDGWIQNLQALMERFFRSESRGAVRIKVLDVLSFVLLINRQFYEEELINSVVISQLSHIPEDKDHQVRKLATQLLVDLAEGCHTHHFNSLLDIIEKVMARSLSPPPELEERDVAAYSASLEDVKTAVLGLLVILQTKLYTLPASHATRVYEMLVSHIQLHYKHSYTLPIASSIRLQAFDFLLLLRADSLHRLGLPNKDGVVRFSPYCVCDYMEPERGSEKKTSGPLSPPTGPPGPAPAGPAVRLGSVPYSLLFRVLLQCLKQESDWKVLKLVLGRLPESLRYKVLIFTSPCSVDQLCSALCSMLSGPKTLERLRGAPEGFSRTDLHLAVVPVLTALISYHNYLDKTKQREMVYCLEQGLIHRCASQCVVALSICSVEMPDIIIKALPVLVVKLTHISATASMAVPLLEFLSTLARLPHLYRNFAAEQYASVFAISLPYTNPSKFNQYIVCLAHHVIA

SEQ ID NO: 855314 - protein, 440 aa, Homo sapiens
RFLAWGERGQRSGAPETQPLRTAIFGKKAQGGNAGPHVGTVRGCRVCSPCPRSWEPQEAARDSSLQPLSRLLPRSSHGAALPAAASLLRRGPGSSLHPRGPAPGPRLRLRVSILALKAVMPDSCGLHIPAAHAAPSRDARIAGLSARGRHRTTTPSKLPRRPSAQCRYRKCGSRFRRRPGARGVRLSPRRGGPERGGAAREGFSGASWSTMAKPTSKDSGLKEKFKILLGLGTPRPNPRSAEGKQTEFIITAEILRELSMECGLNNRIRMIGQICEVAKTKKFEEHAVEALWKAVADLLQPERPLEARHAVLALLKAIVQGQVRPRATLGWVTSGCPLTVLSLLGRVWTPASGERLGVLRALFFKVIKDYPSNEDLHERLEVFKALTDNGRHITYLEEELADFVLQWMDVGLSSEFLLVLVNLVKFNSCYLDEYIARMVQ

SEQ ID NO: 855315 - protein, 449 aa, Homo sapiens
RFLAWGERGQRSGAPETQPLRTAIFGKKAQGGNAGPHVGTVRGCRVCSPCPRSWEPQEAARDSSLQPLSRLLPRSSHGAALPAAASLLRRGPGSSLHPRGPAPGPRLRLRVSILALKAVMPDSCGLHIPAAHAAPSRDARIAGLSARGRHRTTTPSKLPRRPSAQCRYRKCGSRFRRRPGARGVRLSPRRGGPERGGAAREGFSGASWSTMAKPTSKDSGLKEKFKILLGLGTPRPNPRSAEGKQTEFIITAEILRELSMECGLNNRIRMIGQICEVAKTKKFEEHAVEALWKAVADLLQPERPLEARHAVLALLKAIVQGQVRPRATLGWVTSGCPLTVLSLLGRVWTPASVSCWAQGLGADGLWSWMACGVSWCHEVCVTVGTASSPVNRWSLHLPLMGCSGDHMRQFSQSAEIVPGSWCGATVLFCPCTLSGPLPCSLHSICAGLG

SEQ ID NO: 855316 - protein, 232 aa, Homo sapiens
MWMSPICAFPKWGSRAVHLTFLVCYLAGTPTTPKGRPFLGGRQEGSPAPLPPFLGLRSQGLPSPSGYPVTWPLGRGFMPGFGHQLSGPKTLERLRGAPEGFSRTDLHLAVVPVLTALISYHNYLDKTKQREMVYCLEQGLIHRCASQCVVALSICSVEMPDIIIKALPVLVVKLTHISATASMAVPLLEFLSSESPPCLRMHPRGSGCVTCAGFSGALSQDSLGNLGVSPSA

SEQ ID NO: 855317 - protein, 1981 aa, Homo sapiens
RFLAWGERGQRSGAPETQPLRTAIFGKKAQGGNAGPHVGTVRGCRVCSPCPRSWEPQEAARDSSLQPLSRLLPRSSHGAALPAAASLLRRGPGSSLHPRGPAPGPRLRLRVSILALKAVMPDSCGLHIPAAHAAPSRDARIAGLSARGRHRTTTPSKLPRRPSAQCRYRKCGSRFRRRPGARGVRLSPRRGGPERGGAAREGFSGASWSTMAKPTSKDSGLKEKFKILLGLGTPRPNPRSAEGKQTEFIITAEILRELSMECGLNNRIRMIGQICEVAKTKKFEEHAVEALWKAVADLLQPERPLEARHAVLALLKAIVQGQVRPRATLGWVTSGCPLTVLSLLGRVWTPASGERLGVLRALFFKVIKDYPSNEDLHERLEVFKALTDNGRHITYLEEELADFVLQWMDVGLSSEFLLVLVNLVKFNSCYLDEYIARMVQMICLLCVRTASSVDIEVSLQVLDAVVCYNCLPAESLPLFIVTLCRTINVKELCEPCWKLMRNLLGTHLGHSAIYNMCHLMEDRAYMEDAPLLRGAVFFVGMALWGAHRLYSLRNSPTSVLPSFYQAMACPNEVVSYEIVLSITRLIKKYRKELQVVAWDILLNIIERLLQQLQTLDSPELRTIVHDLLTTVEELCDQNEFHGSQERYFELVERCADQRPESSLLNLISYRAQSIHPAKDGWIQNLQALMERFFRSESRGAVRIKVLDVLSFVLLINRQFYEEELINSVVISQLSHIPEDKDHQVRKLATQLLVDLAEGCHTHHFNSLLDIIEKVMARSLSPPPELEERDVAAYSASLEDVKTAVLGLLVILQTKLYTLPASHATRVYEMLVSHIQLHYKHSYTLPIASSIRLQAFDFLLLLRADSLHRLGLPNKDGVVRFSPYCVCDYMEPERGSEKKTSGPLSPPTGPPGPAPAGPAVRLGSVPYSLLFRVLLQCLKQESDWKVLKLVLGRLPESLRYKVLIFTSPCSVDQLCSALCSMLSGPKTLERLRGAPEGFSRTDLHLAVVPVLTALISYHNYLDKTKQREMVYCLEQGLIHRCASQCVVALSICSVEMPDIIIKALPVLVVKLTHISATASMAVPLLEFLSTLARLPHLYRNFAAEQYASVFAISLPYTNPSKFNQYIVCLAHHVIAMWFIRCRLPFRKDFVPFITKGLRSNVLLSFDDTPEKDSFRARSTSLNERPKSRIQTSLTSASLGSADENSVAQADDSLKNLHLELTETCLDMMARYVFSNFTAVPKRSPVGEFLLAGGRTKTWLVGNKLVTVTTSVGTGTRSLLGLDSGELQSGPESSSSPGVHVRQTKEAPAKLESQAGQQVSRGARDRVRSMSGGHGLRVGALDVPASQFLGSATSPGPRTAPAAKPEKASAGTRVPVQEKTNLAAYVPLLTQGWAEILVRRPTGNTSWLMSLENPLSPFSSDINNMPLQELSNALMAAERFKEHRDTALYKSLSVPAASTAKPPPLPRSNTDSAVVMEEGSPGEVPVLVEPPGLEDVEAALGMDRRTDAYSRSSSVSSQEEKSLHAEELVGRGIPIERVVSSEGGRPSVDLSFQPSQPLSKSSSSPELQTLQDILGDPGDKADVGRLSPEVKARSQSGTLDGESAAWSASGEDSRGQPEGPLPSSSPRSPSGLRPRGYTISDSAPSRRGKRVERDALKSRATASNAEKVPGINPSFVFLQLYHSPFFGDESNKPILLPNESQSFERSVQLLDQIPSYDTHKIAVLYVGEGQSNSELAILSNEHGSYRYTEFLTGLGRLIELKDCQPDKVYLGGLDVCGEDGQFTYCWHDDIMQAVFHIATLMPTKDVDKHRCDKKRHLGNDFVSIVYNDSGEDFKLGTIKGQFNFVHVIVTPLDYECNLVSLQCRKDMEGLVDTSVAKIVSDRNLPFVARQMALHANMASQVHHSRSNPTDIYPSKWIARLRHIKRLRQRICEEAAYSNPSLPLVHPPSHSKAPAQTPAEPTPGYEVGQRKRLISSVEDFTEFV

SEQ ID NO: 855318 - protein, 1184 aa, Homo sapiens
MRWCAPVIPATREAETKLYTLPASHATRVYEMLVSHIQLHYKHSYTLPIASSIRLQAFDFLLLLRADSLHRLGLPNKDGVVRFSPYCVCDYMEPERGSEKKTSGPLSPPTGPPGPAPAGPAVRLGSVPYSLLFRVLLQCLKQESDWKVLKLVLGRLPESLRYKVLIFTSPCSVDQLCSALCSMLSGPKTLERLRGAPEGFSRTDLHLAVVPVLTALISYHNYLDKTKQREMVYCLEQGLIHRCASQCVVALSICSVEMPDIIIKALPVLVVKLTHISATASMAVPLLEFLSTLARLPHLYRNFAAEQYASVFAISLPYTNPSKFNQYIVCLAHHVIAMWFIRCRLPFRKDFVPFITKGLRSNVLLSFDDTPEKDSFRARSTSLNERPKSRIQTSLTSASLGSADENSVAQADDSLKNLHLELTETCLDMMARYVFSNFTAVPKRSPVGEFLLAGGRTKTWLVGNKLVTVTTSVGTGTRSLLGLDSGELQSGPESSSSPGVHVRQTKEAPAKLESQAGQQVSRGARDRVRSMSGGHGLRVGALDVPASQFLGSATSPGPRTAPAAKPEKASAGTRVPVQEKTNLAAYVPLLTQGWAEILVRRPTGNTSWLMSLENPLSPFSSDINNMPLQELSNALMAAERFKEHRDTALYKSLSVPAASTAKPPPLPRSNTDSAVVMEEGSPGEVPVLVEPPGLEDVEAALGMDRRTDAYSRSSSVSSQEEKSLHAEELVGRGIPIERVVSSEGGRPSVDLSFQPSQPLSKSSSSPELQTLQDILGDPGDKADVGRLSPEVKARSQSGTLDGESAAWSASGEDSRGQPEGPLPSSSPRSPSGLRPRGYTISDSAPSRRGKRVERDALKSRATASNAEKVPGINPSFVFLQLYHSPFFGDESNKPILLPNESQSFERSVQLLDQIPSYDTHKIAVLYVGEGQSNSELAILSNEHGSYRYTEFLTGLGRLIELKDCQPDKVYLGGLDVCGEDGQFTYCWHDDIMQAVFHIATLMPTKDVDKHRCDKKRHLGNDFVSIVYNDSGEDFKLGTIKGQFNFVHVIVTPLDYECNLVSLQCRKDMEGLVDTSVAKIVSDRNLPFVARQMALHANMASQVHHSRSNPTDIYPSKWIARLRHIKRLRQRICEEAAYSNPSLPLVHPPSHSKAPAQTPAEPTPGYEVGQRKRLISSVEDFTEFV

SEQ ID NO: 855319 - protein, 793 aa, Homo sapiens
AGQHLGLGTRLVVENSVAQADDSLKNLHLELTETCLDMMARYVFSNFTAVPKRSPVGEFLLAGGRTKTWLVGNKLVTVTTSVGTGTRSLLGLDSGELQSGPESSSSPGVHVRQTKEAPAKLESQAGQQVSRGARDRVRSMSGGHGLRVGALDVPASQFLGSATSPGPRTAPAAKPEKASAGTRVPVQEKTNLAAYVPLLTQGWAEILVRRPTGNTSWLMSLENPLSPFSSDINNMPLQELSNALMAAERFKEHRDTALYKSLSVPAASTAKPPPLPRSNTDSAVVMEEGSPGEVPVLVEPPGLEDVEAALGMDRRTDAYSRSSSVSSQEEKSLHAEELVGRGIPIERVVSSEGGRPSVDLSFQPSQPLSKSSSSPELQTLQDILGDPGDKADVGRLSPEVKARSQSGTLDGESAAWSASGEDSRGQPEGPLPSSSPRSPSGLRPRGYTISDSAPSRRGKRVERDALKSRATASNAEKVPGINPSFVFLQLYHSPFFGDESNKPILLPNESQSFERSVQLLDQIPSYDTHKIAVLYVGEGQSNSELAILSNEHGSYRYTEFLTGLGRLIELKDCQPDKVYLGGLDVCGEDGQFTYCWHDDIMQAVFHIATLMPTKDVDKHRCDKKRHLGNDFVSIVYNDSGEDFKLGTIKGQFNFVHVIVTPLDYECNLVSLQCRKDMEGLVDTSVAKIVSDRNLPFVARQMALHANMASQVHHSRSNPTDIYPSKWIARLRHIKRLRQRICEEAAYSNPSLPLVHPPSHSKAPAQTPAEPTPGYEVGQRKRLISSVEDFTEFV

SEQ ID NO: 855320 - protein, 683 aa, Homo sapiens
MLLWDLPPSLLSVPSCGSGLELEGEPLLLGAVCLQTGTSPTSRSLRSSPRLRGLVSGSRSFRAEARRAESVLPLPTWRHRGGCWWTLGWAEPIACPTPGHSCRRGLCRGHVQAFPASSLPARWMAAVSRALGRLAGLLSLWSGEGWFSEATSGPGPGPAPTSSSPVCVLPDSAVVMEEGSPGEVPVLVEPPGLEDVEAALGMDRRTDAYSRSSSVSSQEEKSLHAEELVGRGIPIERVVSSEGGRPSVDLSFQPSQPLSKSSSSPELQTLQDILGDPGDKADVGRLSPEVKARSQSGTLDGESAAWSASGEDSRGQPEGPLPSSSPRSPSGLRPRGYTISDSAPSRRGKRVERDALKSRATASNAEKVPGINPSFVFLQLYHSPFFGDESNKPILLPNESQSFERSVQLLDQIPSYDTHKIAVLYVGEGQSNSELAILSNEHGSYRYTEFLTGLGRLIELKDCQPDKVYLGGLDVCGEDGQFTYCWHDDIMQAVFHIATLMPTKDVDKHRCDKKRHLGNDFVSIVYNDSGEDFKLGTIKGQFNFVHVIVTPLDYECNLVSLQCRKDMEGLVDTSVAKIVSDRNLPFVARQMALHANMASQVHHSRSNPTDIYPSKWIARLRHIKRLRQRICEEAAYSNPSLPLVHPPSHSKAPAQTPAEPTPGYEVGQRKRLISSVEDFTEFV

SEQ ID NO: 855321 - protein, 1105 aa, Homo sapiens; identical to SEQ ID NO: 855309

SEQ ID NO: 855322 - protein, 276 aa, Homo sapiens
MKCSLSSVPGAALSAGDPGASDQSNSELAILSNEHGSYRYTEFLTGLGRLIELKDCQPDKVYLGGLDVCGEDGQFTYCWHDDIMQAVFHIATLMPTKDVDKHRCDKKRHLGNDFVSIVYNDSGEDFKLGTIKGQFNFVHVIVTPLDYECNLVSLQCRKDMEGLVDTSVAKIVSDRNLPFVARQMALHANMASQVHHSRSNPTDIYPSKWIARLRHIKRLRQRICEEAAYSNPSLPLVHPPSHSKAPAQTPAEPTPGYEVGQRKRLISSVEDFTEFV

SEQ ID NO: 855323 - protein, 1178 aa, Homo sapiens
RFLAWGERGQRSGAPETQPLRTAIFGKKAQGGNAGPHVGTVRGCRVCSPCPRSWEPQEAARDSSLQPLSRLLPRSSHGAALPAAASLLRRGPGSSLHPRGPAPGPRLRLRVSILALKAVMPDSCGLHIPAAHAAPSRDARIAGLSARGRHRTTTPSKLPRRPSAQCRYRKCGSRFRRRPGARGVRLSPRRGGPERGGAAREGFSGASWSTMAKPTSKDSGLKEKFKILLGLGTPRPNPRSAEGKQTEFIITAEILRELSMECGLNNRIRMIGQICEVAKTKKFEEHAVEALWKAVADLLQPERPLEARHAVLALLKAIVQGQGERLGVLRALFFKVIKDYPSNEDLHERLEVFKALTDNGRHITYLEEELADFVLQWMDVGLSSEFLLVLVNLVKFNSCYLDEYIARMVQMICLLCVRTASSVDIEVSLQVLDAVVCYNCLPAESLPLFIVTLCRTINVKELCEPCWKLMRNLLGTHLGHSAIYNMCHLMEDRAYMEDAPLLRGAVFFVGMALWGAHRLYSLRNSPTSVLPSFYQAMACPNEVVSYEIVLSITRLIKKYRKELQVVAWDILLNIIERLLQQLQTLDSPELRTIVHDLLTTVEELCDQNEFHGSQERYFELVERCADQRPESSLLNLISYRAQSIHPAKDGWIQNLQALMERFFRSESRGAVRIKVLDVLSFVLLINRQFYEEELINSVVISQLSHIPEDKDHQVRKLATQLLVDLAEGCHTHHFNSLLDIIEKVMARSLSPPPELEERDVAAYSASLEDVKTAVLGLLVILQTKLYTLPASHATRVYEMLVSHIQLHYKHSYTLPIASSIRLQAFDFLLLLRADSLHRLGLPNKDGVVRFSPYCVCDYMEPERGSEKKTSGPLSPPTGPPGPAPAGPAVRLGSVPYSLLFRVLLQCLKQESDWKVLKLVLGRLPESLRYKVLIFTSPCSVDQLCSALCSMLSGPKTLERLRGAPEGFSRTDLHLAVVPVLTALISYHNYLDKTKQREMVYCLEQGLIHRCASQCVVALSICSVEMPDIIIKALPVLVVKLTHISATASMAVPLLEFLSTLARLPHLYRNFAAEQYASVFAISLPYTNPSKFNQYIVCLAHHVIAMWFIRCRLPFRKDFVPFITKGLRSNVLLSFDDTPEKDSFRARSTSLNERPKRYGLRGCAWSRCGVGKDMGLWPA

SEQ ID NO: 855324 - protein, 502 aa, Homo sapiens
RFLAWGERGQRSGAPETQPLRTAIFGKKAQGGNAGPHVGTVRGCRVCSPCPRSWEPQEAARDSSLQPLSRLLPRSSHGAALPAAASLLRRGPGSSLHPRGPAPGPRLRLRVSILALKAVMPDSCGLHIPAAHAAPSRDARIAGLSARGRHRTTTPSKLPRRPSAQCRYRKCGSRFRRRPGARGVRLSPRRGGPERGGAAREGFSGASWSTMAKPTSKDSGLKEKFKILLGLGTPRPNPRSAEGKQTEFIITAEILRELSMECGLNNRIRMIGQICEVAKTKKFEEHAVEALWKAVADLLQPERPLEARHAVLALLKAIVQGQVRPRATLGWVTSGCPLTVLSLLGRVWTPASGERLGVLRALFFKVIKDYPSNEDLHERLEVFKALTDNGRHITYLEEELGGCHLGLEVSLALTIKCNLDGKDLGLGRGCRSQGWPAAGMPTLLHAPGLTCVAGVPLRHVLKMQSPGLHPRPADCESLGLGASEHLCNGRSWASSVTGRWCC

SEQ ID NO: 855325 - protein, 130 aa, Homo sapiens
MPDEQGPPLCLWRALALGEQVLACFPVQQDRSSHDATGLPLFGGRLEEMLPGKQSSVPCVPGRGRTQSRAGLRQADGLVWGCGRALPTRPSRLPSRRSESRGAVRIKVLDVLSFVLLINRQFYEVRVQAA

SEQ ID NO: 855326 - protein, 108 aa, Homo sapiens
MNEDTVERIVRCIIQNEANAEALKEMLGDSEGEGTVQLSVWMPPPACRTEPPPIITQCTWALQPLASIAAAARGLHLSVRDAPRKEKAAPGQGRPLCSLWAGGAGAPG

SEQ ID NO: 855327 - protein, 154 aa, Homo sapiens
MLFLLVLVFFLMGLVGFMICHVLKKKGYRCRTSRGSEPDDAQLQPPEDDDMNEDTVERIVRCIIQNEANAEALKEMLGDSEGEGTVQLSVWMPPPACRTEPPPIITQCTWALQPLASIAAAARGLHLSVRDAPRKEKAAPGQGRPLCSLWAGSG

SEQ ID NO: 855328 - protein, 142 aa, Homo sapiens
MLFLLVLVFFLMGLVGFMICHVLKKKGYRCRTSRGSEPDDAQLQPPEDDDMNEDTVERIVRCIIQNEANAEALKEMLGDSEGEGTVQLSEHCPPAEGPALLPPGVAQSQAGGLRRGHSPSVSSPSPACNRLPAPPSPTPRSI

SEQ ID NO: 855329 - protein, 154 aa, Homo sapiens; identical to SEQ ID NO: 855327

SEQ ID NO: 855330 - protein, 120 aa, Homo sapiens
ATGEGIWEARAAAEAISLTQGRSCPEPATALSQPASFSVLPSPRLPRRGYPQPQPGAGEAAKGEGRNQGMSAGRASGALSRTRTPLEPEPQQKPEPEPNHRGRPGGQGGRNQKGRGVREY

SEQ ID NO: 855331 - protein, 417 aa, Homo sapiens
MTTQLGPALVLGVALCLGCGQPLPQVPERPFSVLWNVPSAHCEARFGVHLPLNALGIIANRGQHFHGQNMTIFYKNQLGLYPYFGPRGTAHNGGIPQALPLDRHLALAAYQIHHSLRPGFAGPAVLDWEEWCPLWAGNWGRRRAYQAASWAWAQQVFPDLDPQEQLYKAYTGFEQAARALMEDTLRVAQALRPHGLWGFYHYPACGNGWHSMASNYTGRCHAATLARNTQLHWLWAASSALFPSIYLPPRLPPAHHQAFVRHRLEEAFRVALVGHRHPLPVLAYVRLTHRRSGRFLSQDDLVQSIGVSAALGAAGVVLWGDLSLSSSEEECWHLHDYLVDTLGPYVINVTRAAMACSHQRCHGHGRCARRDPGQMEAFLHLWPDGSLGDWKSFSCHCYWGWAGPTCQEPRPGPKEAV

SEQ ID NO: 855332 - protein, 286 aa, Homo sapiens
MELILSTSPAELTLDPACQPKLPLDSTCQPEMTFNPGPTELTLDPEHQPEETPAPSLAELTLEPVHRRPELLDACADLINDQWPRSRTSRLHSLGQSSDAFPLCLMLLSPHPTLEAAPVVVGHARLSRVLNQPQSLLVETVVVARALRGRGFGRRLMEGLEVFARARGFRKLHLTTHDQVHFYTHLGYQLGEPVQGLVFTSRRLPATLLNAFPTAPSPRPPRKAPNLTAQAAPRGPKGPPLPPPPPLPECLTISPPVPSGPPSKSLLETQYQNVRGRPIFWMEKDI

SEQ ID NO: 855333 - protein, 286 aa, Homo sapiens; identical to SEQ ID NO: 855332

SEQ ID NO: 855334 - protein, 286 aa, Homo sapiens; identical to SEQ ID NO: 855332

SEQ ID NO: 855335 - protein, 417 aa, Homo sapiens; identical to SEQ ID NO: 855331

SEQ ID NO: 855336 - protein, 387 aa, Homo sapiens
MTTQLGPALVLGVALCLGCGQPLPQVPERPFSVLWNVPSAHCEARFGVHLPLNALGIIANRGQHFHGQNMTIFYKNQLGLYPYFGPRGTAHNGGIPQALPLDRHLALAAYQIHHSLRPGFAGPAVLDWEEWCPLWAGNWGRRRAYQAASWAWAQQVFPDLDPQEQLYKAYTGFEQAARALMEDTLRVAQALRPHGLWGFYHYPACGNGWHSMASNYTGRCHAATLARNTQLHWLWAASSALFPSIYLPPRLPPAHHQAFVRHRLEEAFRVALVGHRHPLPVLAYVRLTHRRSGRFLSQEECWHLHDYLVDTLGPYVINVTRAAMACSHQRCHGHGRCARRDPGQMEAFLHLWPDGSLGDWKSFSCHCYWGWAGPTCQEPRPGPKEAV

SEQ ID NO: 855337 - protein, 308 aa, Homo sapiens
MQELTLSPGPAKLTPTLDPTHRMELILSTSPAELTLDPACQPKLPLDSTCQPEMTFNPGPTELTLDPEHQPEETPAPSLAELTLEPVHRRPELLDACADLINDQWPRSRTSRLHSLGQSSDAFPLCLMLLSPHPTLEAAPVVVGHARLSRVLNQPQSLLVETVVVARALRGRGFGRRLMEGLEVFARARGFRKLHLTTHDQVHFYTHLGYQLGEPVQGLVFTSRRLPATLLNAFPTAPSPRPPRKAPNLTAQAAPRGPKGPPLPPPPPLPECLTISPPVPSGPPSKSLLETQYQNVRGRPIFWMEKDI

SEQ ID NO: 855338 - protein, 286 aa, Homo sapiens; identical to SEQ ID NO: 855332

SEQ ID NO: 855339 - protein, 286 aa, Homo sapiens; identical to SEQ ID NO: 855332

SEQ ID NO: 855340 - protein, 168 aa, Homo sapiens
MLPPAHHQAFVRHRLEEAFRVALVGHRHPLPVLAYVRLTHRRSGRFLSQDDLVQSIGVSAALGAAGVVLWGDLSLSSSEEECWHLHDYLVDTLGPYVINVTRAAMACSHQRCHGHGRCARRDPGQMEAFLHLWPDGSLGDWKSFSCHCYWGWAGPTCQEPRPGPKEAV

SEQ ID NO: 855341 - protein, 569 aa, Homo sapiens
MKVLLRLICFIALLISSLEADKCKEREEKIILVSSANEIDVRPCPLNPNEHKGTITWYKDDSKTPVSTEQASRIHQHKEKLWFVPAKVEDSGHYYCVVRNSSYCLRIKISAKFVENEPNLCYNAQAIFKQKLPVAGDGGLVCPYMEFFKNENNELPKLQWYKDCKPLLLDNIHFSGVKDRLIVMNVAEKHRGNYTCHASYTYLGKQYPITRVIEFITLEENKPTRPVIVSPANETMEVDLGSQIQLICNVTGQLSDIAYWKWNGSVIDEDDPVLGEDYYSVENPANKRRSTLITVLNISEIESRFYKHPFTCFAKNTHGIDAAYIQLIYPVTNFQKHMIGICVTLTVIIVCSVFIYKIFKIDIVLWYRDSCYDFLPIKASDGKTYDAYILYPKTVGEGSTSDCDIFVFKVLPEVLEKQCGYKLFIYGRDDYVGEDIVEVINENVKKSRRLIIILVRETSGFSWLGGSSEEQIAMYNALVQDGIKVVLLELEKIQDYEKMPESIKFIKQKHGAIRWSGDFTQGPQSAKTRFWKNVRYHMPVQRRSPSSKHQLLSPATKEKLQREAHVPLG

SEQ ID NO: 855342 - protein, 569 aa, Homo sapiens; identical to SEQ ID NO: 855341

SEQ ID NO: 855343 - protein, 569 aa, Homo sapiens; identical to SEQ ID NO: 855341

SEQ ID NO: 855344 - protein, 111 aa, Homo sapiens
AELILEDPALMSCCVNSQVGLVAMSPAPSTPLSLLLPAPFLLLCLGGLLAFSLADQNFTKIQNILQFHSLWETFPKRRLPLQPSLSGQAHCRDGGEHIWEAGLPPAGIAAL

SEQ ID NO: 855345 - protein, 569 aa, Homo sapiens; identical to SEQ ID NO: 855341

SEQ ID NO: 855346 - protein, 569 aa, Homo sapiens; identical to SEQ ID NO: 855341

SEQ ID NO: 855347 - protein, 569 aa, Homo sapiens; identical to SEQ ID NO: 855341

SEQ ID NO: 855348 - protein, 447 aa, Homo sapiens
MKVLLRLICFIALLISSLEADKCKEREEKIILVSSANEIDVRPCPLNPNEHKGTITWYKDDSKTPVSTEQASRIHQHKEKLWFVPAKVEDSGHYYCVVRNSSYCLRIKISAKFVENEPNLCYNAQAIFKQKLPVAGDGGLVCPYMEFFKNENNELPKLQWYKDCKPLLLDNIHFSGVKDRLIVMNVAEKHRGNYTCHASYTYLGKQYPITRVIEFITLEENKPTRPVIVSPANETMEVDLGSQIQLICNVTGQLSDIAYWKWNGSVIDEDDPVLGEDYYSVENPANKRRSTLITVLNISEIESRFYKHPFTCFAKNTHGIDAAYIQLIYPVTNFQKHMIGICVTLTVIIVCSVFIYKIFKIDIVLWYRDSCYDFLPIKASDGKTYDAYILYPKTVGEGSTSDCDIFVFKVLPEVLEKQCGYKLFIYGRDDYVGEGMCVMEQSKGLLL

SEQ ID NO: 855349 - protein, 569 aa, Homo sapiens; identical to SEQ ID NO: 855341

SEQ ID NO: 855350 - protein, 83 aa, Homo sapiens
AQNLAAHLGADSVRAAHSLNGGPRTPRQDFSPAPSKGHSASPSPAVGSALSLLSHLSHLPFDSSCSHSGGSVGLPSVPSCKRY

SEQ ID NO: 855351 - protein, 128 aa, Homo sapiens
MFNYERPKHFIQSQNPCGSRLQPPGPETSSFSSQTKQSSIIIQPRQCTEQRFSASSTLSSHITMSSSAFPASPQQHAGSNPGQRVTTTYNQSPASFLSSILPSQPDYNSSKIPSAMDSNYQQSSGGNL

SEQ ID NO: 855352 - protein, 135 aa, Homo sapiens
MARRLLGPQNAAAVFQAQDDSGAQDSQQHNSEHARLQVPTSQVRSRSTSRGDVNDQDAIQEKFYPPRFIQVPENMSIDEGRFCRMDFKGVDWQLLMCHGILTGRPSPQMIGHNDRVGKGSSSSWKCRVERVAVCQ

SEQ ID NO: 855353 - protein, 383 aa, Homo sapiens
MDSNYQQSSAGQPINAKPSQTANAKPIPRTPDHEIQGSKEALIQDLERKLKCKDTLLHNGNQRLTYEEKMARRLLGPQNAAAVFQAQDDSGAQDSQQHNSEHARLQVPTSQVRSRSTSRGDVNDQDAIQEKFYPPRFIQVPENMSIDEGRFCRMDFKVSGLPAPDVSWYLNGRTVQSDDLHKMIVSEKGLHSLIFEVVRASDAGAYACVAKNRAGEATFTVQLDVLAKEHKRAPMFIYKPQSKKVLEGDSVKLECQISAIPPPKLFWKRNNEMVQFNTDRISLYQDNTGRVTLLIKDVNKKDAGWYTVSAVNEAGVTTCNTRLDVTARPNQTLPAPKQLRVRPTFSKYLALNGKGLNVKQAFNPEGEFQRLAAQSGLYESEEL

SEQ ID NO: 855354 - protein, 228 aa, Homo sapiens
MFNYERPKHFIQSQNPCGSRLQPPGPETSSFSSQTKQSSIIIQPRQCTEQRFSASSTLSSHITMSSSAFPASPQQHAGSNPGQRVTTTYNQSPASFLSSILPSQPDYNSSKIPSAMDSNYQQSSAGQPINAKPSQTANAKPIPRTPDHEIQGSKEALIQDLERKLKCKDTLLHNGNQRLTYEEKMARRLLGPQNAAAVFQAQDDSGAQDSQQHNSEHARLQVPTSQVR

SEQ ID NO: 855355 - protein, 623 aa, Homo sapiens
DGQASTSDVTVWQLIKVSGAIIQDRATRLVCEGRRCLFLPFNSGLNPAGTLWNYGNNILQEKVTLPKPGAQYSQDLNKEEQTKVASDSLQPSVIPGLWPQIQGPTLPGTNHYSNNLPSSSIYQLSMFNYERPKHFIQSQNPCGSRLQPPGPETSSFSSQTKQSSIIIQPRQCTEQRFSASSTLSSHITMSSSAFPASPQQHAGSNPGQRVTTTYNQSPASFLSSILPSQPDYNSSKIPSAMDSNYQQSSAGQPINAKPSQTANAKPIPRTPDHEIQGSKEALIQDLERKLKCKDTLLHNGNQRLTYEEKMARRLLGPQNAAAVFQAQDDSGAQDSQQHNSEHARLQVPTSQVRSRSTSRGDVNDQDAIQEKFYPPRFIQVPENMSIDEGRFCRMDFKVSGLPAPDVSWYLNGRTVQSDDLHKMIVSEKGLHSLIFEVVRASDAGAYACVAKNRAGEATFTVQLDVLAKEHKRAPMFIYKPQSKKVLEGDSVKLECQISAIPPPKLFWKRNNEMVQFNTDRISLYQDNTGRVTLLIKDVNKKDAGWYTVSAVNEAGVTTCNTRLDVTARPNQTLPAPKQLRVRPTFSKYLALNGKGLNVKQAFNPEGEFQRLAAQSGLYESEEL

SEQ ID NO: 855356 - protein, 240 aa, Homo sapiens
MSIDEGRFCRMDFKVSGLPAPDVSWYLNGRTVQSDDLHKMIVSEKGLHSLIFEVVRASDAGAYACVAKNRAGEATFTVQLDVLAKEHKRAPMFIYKPQSKKVLEGDSVKLECQISAIPPPKLFWKRNNEMVQFNTDRISLYQDNTGRVTLLIKDVNKKDAGWYTVSAVNEAGVTTCNTRLDVTARPNQTLPAPKQLRVRPTFSKYLALNGKGLNVKQAFNPEGEFQRLAAQSGLYESEEL

SEQ ID NO: 855357 - protein, 149 aa, Homo sapiens
MFIYKPQSKKVLEGDSVKLECQISAIPPPKLFWKRNNEMVQFNTDRISLYQDNTGRVTLLIKDVNKKDAGWYTVSAVNEAGVTTCNTRLDVTARPNQTLPAPKQLRVRPTFSKYLALNGKGLNVKQAFNPEGEFQRLAAQSGLYESEEL

SEQ ID NO: 855358 - protein, 470 aa, Homo sapiens
  misc_feature (464)..(464): Xaa can be any naturally occurring amino acid
MFNYERPKHFIQSQNPCGSRLQPPGPETSSFSSQTKQSSIIIQPRQCTEQRFSASSTLSSHITMSSSAFPASPQQHAGSNPGQRVTTTYNQSPASFLSSILPSQPDYNSSKIPSAMDSNYQQSSAGQPINAKPSQTANAKPIPRTPDHEIQGSKEALIQDLERKLKCKDTLLHNGNQRLTYEEKMARRLLGPQNAAAVFQAQDDSGAQDSQQHNSEHARLQVPTSQVRSRSTSRGDVNDQDAIQEKFYPPRFIQVPENMSIDEGRFCRMDFKVSGLPAPDVSWYLNGRTVQSDDLHKMIVSEKGLHSLIFEVVRASDAGAYACVAKNRAGEATFTVQLDVLAKEHKRAPMFIYKPQSKKVLEGDSVKLECQISAIPPPKLFWKRNNEMVQFNTDRISLYQDNTGRVTLLIKDVNKKDAGWYTVSAVNEAGVTTCNTRLDVTARPNQTLPAPCSRACPELCCCEXCAPLSS

SEQ ID NO: 855359 - protein, 623 aa, Homo sapiens; identical to SEQ ID NO: 855355

SEQ ID NO: 855360 - protein, 383 aa, Homo sapiens; identical to SEQ ID NO: 855353

SEQ ID NO: 855361 - protein, 374 aa, Homo sapiens
MFNYERPKHFIQSQNPCGSRLQPPGPETSSFSSQTKQSSIIIQPRQCTEQRFSASSTLSSHITMSSSAFPASPQQHAGSNPGQRVTTTYNQSPASFLSSILPSQSRSTSRGDVNDQDAIQEKFYPPRFIQVPENMSIDEGRFCRMDFKVSGLPAPDVSWYLNGRTVQSDDLHKMIVSEKGLHSLIFEVVRASDAGAYACVAKNRAGEATFTVQLDVLAKEHKRAPMFIYKPQSKKVLEGDSVKLECQISAIPPPKLFWKRNNEMVQFNTDRISLYQDNTGRVTLLIKDVNKKDAGWYTVSAVNEAGVTTCNTRLDVTARPNQTLPAPKQLRVRPTFSKYLALNGKGLNVKQAFNPEGEFQRLAAQSGLYESEEL

SEQ ID NO: 855362 - protein, 314 aa, Homo sapiens
MARRLLGPQNAAAVFQAQDDSGAQDSQQHNSEHARLQVPTSQVRSRSTSRGDVNDQDAIQEKFYPPRFIQVPENMSIDEGRFCRMDFKVSGLPAPDVSWYLNGRTVQSDDLHKMIVSEKGLHSLIFEVVRASDAGAYACVAKNRAGEATFTVQLDVLAKEHKRAPMFIYKPQSKKVLEGDSVKLECQISAIPPPKLFWKRNNEMVQFNTDRISLYQDNTGRVTLLIKDVNKKDAGWYTVSAVNEAGVTTCNTRLDVTARPNQTLPAPKQLRVRPTFSKYLALNGKGLNVKQAFNPEGEFQRLAAQSGLYESEEL

SEQ ID NO: 855363 - protein, 201 aa, Homo sapiens
MIVSEKGLHSLIFEVVRASDAGAYACVAKNRAGEATFTVQLDVLAKEHKRAPMFIYKPQSKKVLEGDSVKLECQISAIPPPKLFWKRNNEMVQFNTDRISLYQDNTGRVTLLIKDVNKKDAGWYTVSAVNEAGVTTCNTRLDVTARPNQTLPAPKQLRVRPTFSKYLALNGKGLNVKQAFNPEGEFQRLAAQSGLYESEEL

SEQ ID NO: 855364 - protein, 149 aa, Homo sapiens; identical to SEQ ID NO: 855357

SEQ ID NO: 855365 - protein, 522 aa, Homo sapiens
DGQASTSDVTVWQLIKVSGAIIQDRATRLVCEGRRCLFLPFNSGLNPAGTLWNYGNNILQEKVTLPKPGAQYSQDLNKEEQTKVASDSLQPSVIPGLWPQIQGPTLPGTNHYSNNLPSSSIYQLSMFNYERPKHFIQSQNPCGSRLQPPGPETSSFSSQTKQSSIIIQPRQCTEQRFSASSTLSSHITMSSSAFPASPQQHAGSNPGQRVTTTYNQSPASFLSSILPSQPDYNSSKIPSAMDSNYQQSSAGQPINAKPSQTANAKPIPRTPDHEIQGSKEALIQDLERKLKCKDTLLHNGNQRLTYEEKMARRLLGPQNAAAVFQAQDDSGAQDSQQHNSEHARLQVPTSQVRSRSTSRGDVNDQDAIQEKFYPPRFIQVPENMSIDEGRFCRMDFKVSGLPAPDVSWYLNGRTVQSDDLHKMIVSEKGLHSLIFEVVRASDAGAYACVAKNRAGEATFTVQLDVLAKEHKRAPMFIYKPQSKKVLEGDSVKLECQISAIPPPKLFWKRNNEMVQFNTDRIR

SEQ ID NO: 855366 - protein, 102 aa, Homo sapiens
MFLTALLWRGRIPGRQWIGKHRRPRFVSLRAKQNMIRRLEIEAENHYWLSMPYMTREQERGHAAVRRREAFEAIKAAATSKFPPHRFIADQLDHLNVTKKWS

SEQ ID NO: 855367 - protein, 128 aa, Homo sapiens
ARRVRLRHGVCWRPRRRRVLSSAAGTMFLTALLWRGRIPGRQWIGKHRRPRFVSLRAKQNMIRRLEIEAENHYWLSMPYMTREQERGHAAVRRREAFEAIKAAATSKFPPHRFIADQLDHLNVTKKWS

SEQ ID NO: 855368 - protein, 445 aa, Homo sapiens
MKKGSQQKIFSKAKIPSSSHSPIPSSMSNMRSRSLSPLIGSETLPFHSGGQWCEQVEIADENNMLLDYQDHKGADSHAGVRYITEALIKKLTKQDNLALIKSLNLSLSKDGGKKFKYIENLEKCVKLEVLNLSYNLIGKIEKLDKLLKLRELNLSYNKISKIEGIENMCNLQKLNLAGNEIEHIPVWLGKKLKSLRVLNLKGNKISSLQDISKLKPLQDLISLILVENPVVTLPHYLQFTIFHLRSLESLEGQPVTTQDRQEAFERFSLEEVERLERDLEKKMIETEELKSKQTRFLEEIKNQDKLNKSLKEEAMLQKQSCEELKSDLNTKNELLKQKTIELTRACQKQYELEQELAFYKIDAKFEPLNYYPSEYAEIDKAPDESPYIGKSRYKRNMFATESYIIDSAQAVQIKKMEPDEQLRNDHMNLRGHTPLDTQLEDKEKK

SEQ ID NO: 855369 - protein, 276 aa, Homo sapiens
MKKGSQQKIFSKAKIPSSSHSPIPSSMSNMRSRSLSPLIGSETLPFHSGGQWCEQVEIADENNMLLDYQDHKGADSHAGVRYITEALIKKLTKQDNLALIKSLNLSLSKDGGKKFKYIENLEKCVKLEVLNLSYNLIGKIEKLDKLLKLRELNLSYNKISKIEGIENMCNLQKLNLAGNEIEHIPVWLGKKLKSLRVLNLKGNKISSLQDISKLKPLQDLISLILVENPVVTLPHYLQFTIFHLRSLESLEGQPVTTQDRQEAFERFSLGKIKFKK

SEQ ID NO: 855370 - protein, 445 aa, Homo sapiens; identical to SEQ ID NO: 855368

SEQ ID NO: 855371 - protein, 169 aa, Homo sapiens
RRRGSLPGAGRGRDWCSPGGRKKGEEKQRLSGLASGAAGSLQAVGGRSPASPAVLGARAVGVARPCPRRPRCRPRRSALVLCVAGLPRAPERERVPEQHPRVPARLRGFPAAGGERGRPRAEGGAGKTGLGPGWVLRSSRTSCLLRARIRPSPAARESGMCGTGRCGFG

SEQ ID NO: 855372 - protein, 131 aa, Homo sapiens
  misc_feature (24)..(24): Xaa can be any naturally occurring amino acid
EDENICSDTNGKNIRFQNPNLKHXGGMAKQSFKAQCQEVRKRKELELQILTEAIRNWEGDDIKTLGNVTYMSQVLIQCAGSEEKNERYLLLFPNVLLMLSASPRMSGFIYQVKHNLNLYFIVDLRIISNWL

SEQ ID NO: 855373 - protein, 646 aa, Homo sapiens
MTDNSNNQLVVRAKFNFQQTNEDELSFSKGDVIHVTRVEEGGWWEGTLNGRTGWFPSNYVREVKASEKPVSPKSGTLKSPPKGFDTTAINKSYYNVVLQNILETENEYSKELQTVLSTYLRPLQTSEKLSSANISYLMGNLEEICSFQQMLVQSLEECTKLPEAQQRVGGCFLNLMPQMKTLYLTYCANHPSAVNVLTEHSEELGEFMETKGASSPGILVLTTGLSKPFMRLDKYPTLLKELERHMEDYHTDRQDIQKSMAAFKNLSAQCQEVRKRKELELQILTEAIRNWEGDDIKTLGNVTYMSQVLIQCAGSEEKNERYLLLFPNVLLMLSASPRMSGFIYQGKLPTTGMTITKLEDSENHRNAFEISGSMIERILVSCNNQQDLQEWVEHLQKQTKVTSVGNPTIKPHSVPSHTLPSHPVTPSSKHADSKPAPLTPAYHTLPHPSHHGTPHTTINWGPLEPPKTPKPWSLSCLRPAPPLRPSAALCYKEDLSKSPKTMKKLLPKRKPERKPSDEEFASRKSTAALEEDAQILKVIEAYCTSAKTRQTLNSSSRKESAPQVLLPEEEKIIVEETKSNGQTVIEEKSLVDTVYALKDEVQELRQDNKKMKKSLEEEQRARKDLEKLVRKVLKNMNDPAWDETNL

SEQ ID NO: 855374 - protein, 727 aa, Homo sapiens
SGAGAHFLVREGAEIGAAPEEEKRVYPEPRSESECLSNIREFLRGCGASLRLETFDANDLYQGQNFNKVLSSLVTLNKVTADIGLGSDSVCARPSSHRIKSFDSLGSQSLHTRTSKLFQGQYRSLDMTDNSNNQWFPSNYVREVKASEKPVSPKSGTLKSPPKGFDTTAINKSYYNVVLQNILETENEYSKELQTVLSTYLRPLQTSEKLSSANISYLMGNLEEICSFQQMLVQSLEECTKLPEAQQRVGGCFLNLMPQMKTLYLTYCANHPSAVNVLTEHSEELGEFMETKGASSPGILVLTTGLSKPFMRLDKYPTLLKELERHMEDYHTDRQDIQKSMAAFKNLSAQCQEVRKRKELELQILTEAIRNWEGDDIKTLGNVTYMSQVLIQCAGSEEKNERYLLLFPNVLLMLSASPRMSGFIYQGKLPTTGMTITKLEDSENHRNAFEISGSMIERILVSCNNQQDLQEWVEHLQKQTKVTSVGNPTIKPHSVPSHTLPSHPVTPSSKHADSKPAPLTPAYHTLPHPSHHGTPHTTINWGPLEPPKTPKPWSLSCLRPAPPLRPSAALCYKEDLSKSPKTMKKLLPKRKPERKPSDEEFASRKSTAALEEDAQILKVIEAYCTSAKTRQTLNSSSRKESAPQVLLPEEEKIIVEETKSNGQTVIEEKSLVDTVYALKDEVQELRQDNKKMKKSLEEEQRARKDLEKLVRKVLKNMNDPAWDETNL

SEQ ID NO: 855375 - protein, 858 aa, Homo sapiens
RRPRPGGGGGRPQVPEPLLRRRLTAGRGARRSGPGRTCWAAPSQSPAPAARWARRRRRRRGPRAGPPLRGEGARPSPPASRAAAMNSAEQTVTWLITLGVLESPKKTISDPEGFLQASLKDGVVLCRLLERLLPGTIEKTFDANDLYQGQNFNKVLSSLVTLNKVTADIGLGSDSVCARPSSHRIKSFDSLGSQSLHTRTSKLFQGQYRSLDMTDNSNNQLVVRAKFNFQQTNEDELSFSKGDVIHVTRVEEGGWWEGTLNGRTGWFPSNYVREVKASEKPVSPKSGTLKSPPKGFDTTAINKSYYNVVLQNILETENEYSKELQTVLSTYLRPLQTSEKLSSANISYLMGNLEEICSFQQMLVQSLEECTKLPEAQQRVGGCFLNLMPQMKTLYLTYCANHPSAVNVLTEHSEELGEFMETKGASSPGILVLTTGLSKPFMRLDKYPTLLKELERHMEDYHTDRQDIQKSMAAFKNLSAQCQEVRKRKELELQILTEAIRNWEGDDIKTLGNVTYMSQVLIQCAGSEEKNERYLLLFPNVLLMLSASPRMSGFIYQGKLPTTGMTITKLEDSENHRNAFEISGSMIERILVSCNNQQDLQEWVEHLQKQTKVTSVGNPTIKPHSVPSHTLPSHPVTPSSKHADSKPAPLTPAYHTLPHPSHHGTPHTTINWGPLEPPKTPKPWSLSCLRPAPPLRPSAALCYKEDLSKSPKTMKKLLPKRKPERKPSDEEFASRKSTAALEEDAQILKVIEAYCTSAKTRQTLNSSSRKESAPQVLLPEEEKIIVEETKSNGQTVIEEKSLVDTVYALKDEVQELRQDNKKMKKSLEEEQRARKDLEKLVRKVLKNMNDPAWDETNL

SEQ ID NO: 855376 - protein, 764 aa, Homo sapiens
WWKVRRSKKTTTSFPISRSGLFGVYYVEVHQPALPWRQEAFFCSRTFDANDLYQGQNFNKVLSSLVTLNKVTADIGLGSDSVCARPSSHRIKSFDSLGSQSLHTRTSKLFQGQYRSLDMTDNSNNQLVVRAKFNFQQTNEDELSFSKGDVIHVTRVEEGGWWEGTLNGRTGWFPSNYVREVKASEKPVSPKSGTLKSPPKGFDTTAINKSYYNVVLQNILETENEYSKELQTVLSTYLRPLQTSEKLSSANISYLMGNLEEICSFQQMLVQSLEECTKLPEAQQRVGGCFLNLMPQMKTLYLTYCANHPSAVNVLTEHSEELGEFMETKGASSPGILVLTTGLSKPFMRLDKYPTLLKELERHMEDYHTDRQDIQKSMAAFKNLSAQCQEVRKRKELELQILTEAIRNWEGDDIKTLGNVTYMSQVLIQCAGSEEKNERYLLLFPNVLLMLSASPRMSGFIYQGKLPTTGMTITKLEDSENHRNAFEISGSMIERILVSCNNQQDLQEWVEHLQKQTKVTSVGNPTIKPHSVPSHTLPSHPVTPSSKHADSKPAPLTPAYHTLPHPSHHGTPHTTINWGPLEPPKTPKPWSLSCLRPAPPLRPSAALCYKEDLSKSPKTMKKLLPKRKPERKPSDEEFASRKSTAALEEDAQILKVIEAYCTSAKTRQTLNSSSRKESAPQVLLPEEEKIIVEETKSNGQTVIEEKSLVDTVYALKDEVQELRQDNKKMKKSLEEEQRARKDLEKLVRKVLKNMNDPAWDETNL

SEQ ID NO: 855377 - protein, 706 aa, Homo sapiens
SGAGAHFLVREGAEIGAAPEEEKRVYPEPRSESECLSNIREFLRGCGASLRLETFDANDLYQGQNFNKVLSSLVTLNKVTADIGLGSDSVCARPSSHRIKSFDSLGSQSLHTRTSKLFQGQYRSLDMTDNSNNQLVVRAKFNFQQTNEDELSFSKGDVIHVTRVEEGGWWEGTLNGRTGWFPSNYVREVKASEKPVSPKSGTLKSPPKGFDTTAINKSYYNVVLQNILETENEYSKELQTVLSTYLRPLQTSEKLSSANISYLMGNLEEICSFQQMLVQSLEECTKLPEAQQRVGGCFLNLMPQMKTLYLTYCANHPSAVNVLTEQQAQCQEVRKRKELELQILTEAIRNWEGDDIKTLGNVTYMSQVLIQCAGSEEKNERYLLLFPNVLLMLSASPRMSGFIYQGKLPTTGMTITKLEDSENHRNAFEISGSMIERILVSCNNQQDLQEWVEHLQKQTKVTSVGNPTIKPHSVPSHTLPSHPVTPSSKHADSKPAPLTPAYHTLPHPSHHGTPHTTINWGPLEPPKTPKPWSLSCLRPAPPLRPSAALCYKEDLSKSPKTMKKLLPKRKPERKPSDEEFASRKSTAALEEDAQILKVIEAYCTSAKTRQTLNSSSRKESAPQVLLPEEEKIIVEETKSNGQTVIEEKSLVDTVYALKDEVQELRQDNKKMKKSLEEEQRARKDLEKLVRKVLKNMNDPAWDETNL

SEQ ID NO: 855378 - protein, 294 aa, Homo sapiens
MTITKLEDSENHRNAFEISGSMIERILVSCNNQQDLQEWVEHLQKQTKVTSVGNPTIKPHSVPSHTLPSHPVTPSSKHADSKPAPLTPAYHTLPHPSHHGTPHTTINWGPLEPPKTPKPWSLSCLRPAPPLRPSAALCYKEDLSKSPKTMKKLLPKRKPERKPSDEEFASRKSTAALEEDAQILKVIEAYCTSAKTRQTLNSSSRKESAPQVLLPEEEKIIVEETKSNGQTVIEEKSLVDTVYALKDEVQELRQDNKKMKKSLEEEQRARKDLEKLVRKVLKNMNDPAWDETNL

SEQ ID NO: 855379 - protein, 144 aa, Homo sapiens
MHNHVLADDDQPSLDSLGRRSSLSRLEPSDLSEDSDYDSIWTAHSYRMGSTSRSRKESAPQVLLPEEEKIIVEETKSNGQTVIEEKSLVDTVYALKDEVQELRQDNKKMKKSLEEEQRARKDLEKLVRKVLKNMNDPAWDETNL

SEQ ID NO: 855380 - protein, 842 aa, Homo sapiens
RRPRPGGGGGRPQVPEPLLRRRLTAGRGARRSGPGRTCWAAPSQSPAPAARWARRRRRRRGPRAGPPLRGEGARPSPPASRAAAMNSAEQTVTWLITLGVLESPKKTISDPEGFLQASLKDGVVLCRLLERLLPGTIEKVYPEPRSESECLSNIREFLRGCGASLRLETFDANDLYQGQNFNKVLSSLVTLNKVTADIGLGSDSVCARPSSHRIKSFDSLGSQSLHTRTSKLFQGQYRSLDMTDNSNNQWFPSNYVREVKASEKPVSPKSGTLKSPPKGFDTTAINKSYYNVVLQNILETENEYSKELQTVLSTYLRPLQTSEKLSSANISYLMGNLEEICSFQQMLVQSLEECTKLPEAQQRVGGCFLNLMPQMKTLYLTYCANHPSAVNVLTEHSEELGEFMETKGASSPGILVLTTGLSKPFMRLDKYPTLLKELERHMEDYHTDRQDIQKSMAAFKNLSAQCQEVRKRKELELQILTEAIRNWEGDDIKTLGNVTYMSQVLIQCAGSEEKNERYLLLFPNVLLMLSASPRMSGFIYQGKLPTTGMTITKLEDSENHRNAFEISGSMIERILVSCNNQQDLQEWVEHLQKQTKVTSVGNPTIKPHSVPSHTLPSHPVTPSSKHADSKPAPLTPAYHTLPHPSHHGTPHTTINWGPLEPPKTPKPWSLSCLRPAPPLRPSAALCYKEDLSKSPKTMKKLLPKRKPERKPSDEEFASRKSTAALEEDAQILKVIEAYCTSAKTRQTLNSSSRKESAPQVLLPEEEKIIVEETKSNGQTVIEEKSLVDTVYALKDEVQELRQDNKKMKKSLEEEQRARKDLEKLVRKVLKNMNDPAWDETNL

SEQ ID NO: 855381 - protein, 821 aa, Homo sapiens
RRPRPGGGGGRPQVPEPLLRRRLTAGRGARRSGPGRTCWAAPSQSPAPAARWARRRRRRRGPRAGPPLRGEGARPSPPASRAAAMNSAEQTVTWLITLGVLESPKKTISDPEGFLQASLKDGVVLCRLLERLLPGTIEKVYPEPRSESECLSNIREFLRGCGASLRLETFDANDLYQGQNFNKVLSSLVTLNKVTADIGLGSDSVCARPSSHRIKSFDSLGSQSLHTRTSKLFQGQYRSLDMTDNSNNQWFPSNYVREVKASEKPVSPKSGTLKSPPKGFDTTAINKSYYNVVLQNILETENEYSKELQTVLSTYLRPLQTSEKLSSANISYLMGNLEEICSFQQMLVQSLEECTKLPEAQQRVGGCFLNLMPQMKTLYLTYCANHPSAVNVLTEHSEELGEFMETKGASSPGILVLTTGLSKPFMRLDKYPTLLKELERHMEDYHTDRQDIQKSMAAFKNLSAQCQEVRKRKELELQILTEAIRNWEGDDIKTLGNVTYMSQVLIQCAGSEEKNERYLLLFPNVLLMLSASPRMSGFIYQGKLPTTGMTITKLEDSENHRNAFEISGSMIERILVSCNNQQDLQEWVEHLQKQTKVTSVGNPTIKPHSVPSHTLPSHPVTPSSKHADSKPAPLTPAYHTLPHPSHHGTPHTTINWGPLEPPKTPKPWSLSCLRPAPPLRPSAALCYKEDLSKSPKTMKKLLPKRKPERKPSDEEFASRKSTAALEEDAQILKVIEAYCTSAKTRQTLNSTWQGTDLMHNHVLADDDQPSLDSLGRRSSLSRLEPSDLSEDSDYDSIWTAHSYRMGSTSRKSCCSYISHQN

SEQ ID NO: 855382 - protein, 561 aa, Homo sapiens
RRPRPGGGGGRPQVPEPLLRRRLTAGRGARRSGPGRTCWAAPSQSPAPAARWARRRRRRRGPRAGPPLRGEGARPSPPASRAAAMNSAEQTVTWLITLGVLESPKKTISDPEGFLQASLKDGVVLCRLLERLLPGTIEKVYPEPRSESECLSNIREFLRGCGASLRLETFDANDLYQGQNFNKVLSSLVTLNKVTADIGLGSDSVCARPSSHRIKSFDSLGSQSLHTRTSKLFQGQYRSLDMTDNSNNQWFPSNYVREVKASEKPVSPKSGTLKSPPKGFDTTAINKSYYNVVLQNILETENEYSKELQTVLSTYLRPLQTSEKLSSANISYLMGNLEEICSFQQMLVQSLEECTKLPEAQQRVGGCFLNLMPQMKTLYLTYCANHPSAVNVLTEHSEELGEFMETKGASSPGILVLTTGLSKPFMRLDKYPTLLKELERHMEDYHTDRQDIQKSMAAFKNLSAQCQEVRKRKELELQILTEAIRNWEGDDIKTLGNVTYMSQVLIQCAGSEEKNERYLLLFPNVLLMLSASPRMSGFIYQVKHNLNLYFIVDLRIISNWL

SEQ ID NO: 855383 - protein, 159 aa, Homo sapiens
RRPRPGGGGGRPQVPEPLLRRRLTAGRGARRSGPGRTCWAAPSQSPAPAARWARRRRRRRGPRAGPPLRGEGARPSPPASRAAAMNSAEQTVTWLITLGVLESPKKTISDPEGFLQASLKDGVVLCRLLERLLPGTIEKSCRHCFSLPAGGSQAGACEP

SEQ ID NO: 855384 - protein, 842 aa, Homo sapiens; identical to SEQ ID NO: 855380

SEQ ID NO: 855385 - protein, 772 aa, Homo sapiens
SGAGAHFLVREGAEIGAAPEEEKRVYPEPRSESECLSNIREFLRGCGASLRLETFDANDLYQGQNFNKVLSSLVTLNKVTADIGLGSDSVCARPSSHRIKSFDSLGSQSLHTRTSKLFQGQYRSLDMTDNSNNQLVVRAKFNFQQTNEDELSFSKGDVIHVTRVEEGGWWEGTLNGRTGWFPSNYVREVKASEKPVSPKSGTLKSPPKGFDTTAINKSYYNVVLQNILETENEYSKELQTVLSTYLRPLQTSEKLSSANISYLMGNLEEICSFQQMLVQSLEECTKLPEAQQRVGGCFLNLMPQMKTLYLTYCANHPSAVNVLTEHSEELGEFMETKGASSPGILVLTTGLSKPFMRLDKYPTLLKELERHMEDYHTDRQDIQKSMAAFKNLSAQCQEVRKRKELELQILTEAIRNWEGDDIKTLGNVTYMSQVLIQCAGSEEKNERYLLLFPNVLLMLSASPRMSGFIYQGKLPTTGMTITKLEDSENHRNAFEISGSMIERILVSCNNQQDLQEWVEHLQKQTKVTSVGNPTIKPHSVPSHTLPSHPVTPSSKHADSKPAPLTPAYHTLPHPSHHGTPHTTINWGPLEPPKTPKPWSLSCLRPAPPLRPSAALCYKEDLSKSPKTMKKLLPKRKPERKPSDEEFASRKSTAALEEDAQILKVIEAYCTSAKTRQTLNSSSRKESAPQVLLPEEEKIIVEETKSNGQTVIEEKSLVDTVYALKDEVQELRQDNKKMKKSLEEEQRARKDLEKLVRKVLKNMNDPAWDETNL

SEQ ID NO: 855386 - protein, 901 aa, Homo sapiens
RRPRPGGGGGRPQVPEPLLRRRLTAGRGARRSGPGRTCWAAPSQSPAPAARWARRRRRRRGPRAGPPLRGEGARPSPPASRAAAMNSAEQTVTWLITLGVLESPKKTISDPEGFLQASLKDGVVLCRLLERLLPGTIEKVYPEPRSESECLSNIREFLRGCGASLRLETFDANDLYQGQNFNKVLSSLVTLNKVTADIGLGSDSVCARPSSHRIKSFDSLGSQSLHTRTSKLFQGQYRSLDMTDNSNNQWFPSNYVREVKASEKPVSPKSGTLKSPPKGFDTTAINKSYYNVVLQNILETENEYSKELQTVLSTYLRPLQTSEKLSSANISYLMGNLEEICSFQQMLVQSLEECTKLPEAQQRVGGCFLNLMPQMKTLYLTYCANHPSAVNVLTEHSEELGEFMETKGASSPGILVLTTGLSKPFMRLDKYPTLLKELERHMEDYHTDRQDIQKSMAAFKNLSAQCQEVRKRKELELQILTEAIRNWEGDDIKTLGNVTYMSQVLIQCAGSEEKNERYLLLFPNVLLMLSASPRMSGFIYQGKLPTTGMTITKLEDSENHRNAFEISGSMIERILVSCNNQQDLQEWVEHLQKQTKVTSVGNPTIKPHSVPSHTLPSHPVTPSSKHADSKPAPLTPAYHTLPHPSHHGTPHTTINWGPLEPPKTPKPWSLSCLRPAPPLRPSAALCYKEDLSKSPKTMKKLLPKRKPERKPSDEEFASRKSTAALEEDAQILKVIEAYCTSAKTRQTLNSTWQGTDLMHNHVLADDDQPSLDSLGRRSSLSRLEPSDLSEDSDYDSIWTAHSYRMGSTSRSRKESAPQVLLPEEEKIIVEETKSNGQTVIEEKSLVDTVYALKDEVQELRQDNKKMKKSLEEEQRARKDLEKLVRKVLKNMNDPAWDETNL

SEQ ID NO: 855387 - protein, 145 aa, Homo sapiens [sequence omitted]

SEQ ID NO: 855388 - protein, 240 aa, Homo sapiens [sequence omitted]

SEQ ID NO: 855389 - protein, 632 aa, Homo sapiens
RRPRPGGGGGRPQVPEPLLRRRLTAGRGARRSGPGRTCWAAPSQSPAPAARWARRRRRRRGPRAGPPLRGEGARPSPPASRAAAMNSAEQTVTWLITLGVLESPKKTISDPEGFLQASLKDGVVLCRLLERLLPGTIEKVYPEPRSESECLSNIREFLRGCGASLRLETFDANDLYQGQNFNKVLSSLVTLNKVTADIGLGSDSVCARPSSHRIKSFDSLGSQSLHTRTSKLFQGQYRSLDMTDNSNNQWFPSNYVREVKASEKPVSPKSGTLKSPPKGFDTTAINKSYYNVVLQNILETENEYSKELQTVLSTYLRPLQTSEKLSSANISYLMGNLEEICSFQQMLVQSLEECTKLPEAQQRVGGCFLNLMPQMKTLYLTYCANHPSAVNVLTEHSEELGEFMETKGASSPGILVLTTGLSKPFMRLDKYPTLLKELERHMEDYHTDRQDIQKSMAAFKNLSAQCQEVRKRKELELQILTEAIRNWEGDDIKTLGNVTYMSQVLIQCAGSEEKNERYLLLFPNVLLMLSASPRMSGFIYQGKLPTTGMTITKLEDSENHRNAFEISGSMIERILVSCNNQQDLQEWVEHLQKQTKVTSVGNPTIKPHSVPSHTVRTWCFSSFQTPGVASRG

SEQ ID NO: 855390 - protein, 632 aa, Homo sapiens; identical to SEQ ID NO: 855389

SEQ ID NO: 855391 - protein, 492 aa, Homo sapiens [sequence omitted]

SEQ ID NO: 855392 - protein, 600 aa, Homo sapiens
RWGRPARPASSGGVRPLLLCSSKKARAALPQVLTFSQRRRARALSGRRLRRRPTLQSPLVAPRPSRCPESGGHEAQPRPPALARPAAAAMSRGPEEVNRLTESTYRNVMEQFNPGLRNLINLGKNYEKAVNAMILAGKAYYDGVAKIGEIATGSPVSTELGHVLIEISSTHKKLNESLDENFKKFHKEIIHELEKKIELDVKYMNATLKRYQTEHKNKLESLEKSQAELKKIRRKSQGSRNALKYEHKEIEYVETVTSRQSEIQKFIADGCKEALLEEKRRFCFLVDKHCGFANHIHYYHLQSAELLNSKLPRWQETCVDAIKVPEKIMNMIEEIKTPASTPVSGTPQASPMIERSNVVRKDYDTLSKCSPKMPPAPSGRAYTSPLIDMFNNPATAAPNSQRVNNSTGTSEDPSLQRSVSVATGLNMMKKQKVKTIFPHTAGSNKTLLSFAQGDVITLLIPEEKDGWLYGEHDVSKARGWFPSSYTKLLEENETEAVTVPTPSPTPVRSISTVNLSENSSVVIPPPDYLECLSMGAAADRRADSARTTSTFKAPASKPETAAPNDANGTAKPPFLSGENPFATVKLRPTVTNDRSAPIIR

SEQ ID NO: 855393 - protein, 600 aa, Homo sapiens; identical to SEQ ID NO: 855392

SEQ ID NO: 855394 - protein, 193 aa, Homo sapiens [sequence omitted]

SEQ ID NO: 855395 - protein, 509 aa, Homo sapiens
RWGRPARPASSGGVRPLLLCSSKKARAALPQVLTFSQRRRARALSGRRLRRRPTLQSPLVAPRPSRCPESGGHEAQPRPPALARPAAAAMSRGPEEVNRLTESTYRNVMEQFNPGLRNLINLGKNYEKAVNAMILAGKAYYDGVAKIGEIATGSPVSTELGHVLIEISSTHKKLNESLDENFKKFHKEIIHELEKKIELDVKYMNATLKRYQTEHKNKLESLEKSQAELKKIRRKSQGSRNALKYEHKEIEYVETVTSRQSEIQKFIADGCKEALLEEKRRFCFLVDKHCGFANHIHYYHLQSAELLNSKLPRWQETCVDAIKVPEKIMNMIEEIKTPASTPVSGTPQASPMIERSNVVRKDYDTLSKCSPKMPPAPSGRAYTSPLIDMFNNPATAAPNSQRVNNSTGTSEDPSLQRSVSVATGLNMMKKQKVKTIFPHTAGSNKTLLSFAQGDVITLLIPEEKDGWLYGEHDVSKARGWFPSSYTKLLEENETEAVTVPTPSLRPTPA

SEQ ID NO: 855396 - protein, 189 aa, Homo sapiens
RWGRPARPASSGGVRPLLLCSSKKARAALPQVLTFSQRRRARALSGRRLRRRPTLQSPLVAPRPSRCPESGGHEAQPRPPALARPAAAAMSRGPEEVNRLTESTYRNVMEQFNPGLRNLINLGKNYEKAVNAMILAGKAYYDGVAKIGEIATGSPVSTELERCQRDCKAAFSQRRKPLCHCETPPDCDE

SEQ ID NO: 855397 - protein, 193 aa, Homo sapiens [sequence omitted]

SEQ ID NO: 855398 - protein, 193 aa, Homo sapiens [sequence omitted]

SEQ ID NO: 855399 - protein, 105 aa, Homo sapiens
EDVWGLVVRHYLTRAVSFLGLSPPTPVRSISTVNLSENSSVVIPPPDYLECLSMGAAADRRADSARTTSTFKAPASKPETAAPVSKAAAGRPGSWTRHPRLGGAG

SEQ ID NO: 855400 - protein, 600 aa, Homo sapiens; identical to SEQ ID NO: 855392

SEQ ID NO: 855401 - protein, 396 aa, Homo sapiens
MEQFNPGLRNLINLGKNYEKAVNAMILAGKAYYDGVAKIGEIATGSPVSTELGHVLIEISSTHKKLNESLDENFKKFHKEIIHELEKKIELDVKYMNATLKRYQTEHKNKLESLEKSQAELKKIRRKSQGSRNALKYEHKEIEYVETVTSRQSEIQKFIADGCKEALLEEKRRFCFLVDKHCGFANHIHYYHLQSAELLNSKLPRWQETCVDAIKVPEKIMNMIEEIKTPASTPVSGTPQASPMIERSNVVRKDYDTLSKCSPKMPPAPSGRAYTSPLIDMFNNPATAAPNSQRVNNSTGTSEDPSLQRSVSVATGLNMMKKQKVKTIFPHTAGSNKTLLSFAQGDVITLLIPEEKDGWLYGEHDVSKARGWFPSSYTKLLEENETEAVTVPTPRC

SEQ ID NO: 855402 - protein, 600 aa, Homo sapiens; identical to SEQ ID NO: 855392

SEQ ID NO: 855403 - protein, 138 aa, Homo sapiens
VQSVHEVWTLEVCSSTLLHPDFSDSRRFGHSGVCMHTRKAIPTPVRSISTVNLSENSSVVIPPPDYLECLSMGAAADRRADSARTTSTFKAPASKPETAAPNDANGTAKPPFLSGENPFATVKLRPTVTNDRSAPIIR

SEQ ID NO: 855404 - protein, 494 aa, Homo sapiens
RWGRPARPASSGGVRPLLLCSSKKARAALPQVLTFSQRRRARALSGRRLRRRPTLQSPLVAPRPSRCPESGGHEAQPRPPALARPAAAAMSRGPEEVNRLTESTYRNVMEQFNPGLRNLINLGKNYEKAVNAMILAGKAYYDGVAKIGEIATGSPVSTELGHVLIEISSTHKKLNESLDENFKKFHKEIIHELEKKIELDVKYMNATLKRYQTEHKNKLESLEKSQAELKKIRRKSQGSRNALKYEHKEIEYVETVTSRQSEIQKFIADGCKEALLEEKRRFCFLVDKHCGFANHIHYYHLQSAELLNSKLPRWQETCVDAIKVPEKIMNMIEEIKTPASTPVSGTPQASPMIERSNVVRKDYDTLSKCSPKMPPAPSGRAYTSPLIDMFNNPATAAPNSQRVNNSTGTSEDPSLQRSVSVATGLNMMKKQKVKTIFPHTAGSNKTLLSFAQGDVITLLIPEEKDGWLYGEHDVSKASLSYRMLKNETNMPPPR

SEQ ID NO: 855405 - protein, 374 aa, Homo sapiens
RWGRPARPASSGGVRPLLLCSSKKARAALPQVLTFSQRRRARALSGRRLRRRPTLQSPLVAPRPSRCPESGGHEAQPRPPALARPAAAAMSRGPEEVNRLTESTYRNVMEQFNPGLRNLINLGKNYEKAVNAMILAGKAYYDGVAKIGEIATGSPVSTELGHVLIEISSTHKKLNESLDENFKKFHKEIIHELEKKIELDVKYMNATLKRYQTEHKNKLESLEKSQAELKKIRRKSQGSRNALKYEHKEIEYVETVTSRQSEIQKFIADGCKEALLEEKRRFCFLVDKHCGFANHIHYYHLQSAELLNSKLPRWQETCVDAIKVPEKIMNMIEEIKTPASTPVSGTPQASPMIERSNVVGASFLFQISIVCFLT

SEQ ID NO: 855406 - protein, 69 aa, Homo sapiens
TSEDPSLQRSVSVATGLNMMKKQKVKTIFPHTAGSNKTLLSFAQGDVITLLIPEEKDGWLYGEHDVSKA

SEQ ID NO: 855407 - protein, 88 aa, Homo sapiens
MSSEPPPPYPGGPTAPLLEEKSGAPPTPGRSSPAVMQPPPGMPLDSVTVAWPPKACQNTTSLTHCYPTTIKGLRKKAYPGFSLAVCNP

SEQ ID NO: 855408 - protein, 208 aa, Homo sapiens
MSSEPPPPYPGGPTAPLLEEKSGAPPTPGRSSPAVMQPPPGMPLPPADIGPPPYEPPGHPMPQPGFIPPHMSADGTYMPPGFYPPPGPHPPMGYYPPGPYTPGPYPGPGGHTATVLVPSGAATTVTVLQGEIFEGAPVQTVCPHCQQAITTKISYEIGLMNFVLGFFCCFMGCDLGCCLIPCLINDFKDVTHTCPSCKAYIYTYKRLC

SEQ ID NO: 855409 - protein, 208 aa, Homo sapiens; identical to SEQ ID NO: 855408

SEQ ID NO: 855410 - protein, 208 aa, Homo sapiens; identical to SEQ ID NO: 855408

SEQ ID NO: 855411 - protein, 173 aa, Homo sapiens
MQPPPGMPLPPADIGPPPYEPPGHPMPQPGFIPPHMSADGTYMPPGFYPPPGPHPPMGYYPPGPYTPGPYPGPGGHTATVLVPSGAATTVTVLQGEIFEGAPVQTVCPHCQQAITTKISYEIGLMNFVLGFFCCFMGCDLGCCLIPCLINDFKDVTHTCPSCKAYIYTYKRLC

SEQ ID NO: 855412 - protein, 129 aa, Homo sapiens
MSSEPPPPYPGGPTAPLLEEKSGAPPTPGRSSPAVMQPPPGAATTVTVLQGEIFEGAPVQTVCPHCQQAITTKISYEIGLMNFVLGFFCCFMGCDLGCCLIPCLINDFKDVTHTCPSCKAYIYTYKRLC

SEQ ID NO: 855413 - protein, 208 aa, Homo sapiens; identical to SEQ ID NO: 855408

SEQ ID NO: 855414 - protein, 208 aa, Homo sapiens; identical to SEQ ID NO: 855408

SEQ ID NO: 855415 - protein, 183 aa, Homo sapiens
MSSEPPPPYPGGPTAPLLEEKSGAPPTPGGHAAPSCAWRSRTHGHDRQHRVETTPGQDLCHNRRHTSRAHTHETQDPQTRHHNNQGQDKKSKTQEHTTQTTRQDTNTTTTTSTQPTHQDAQTHTPQHHTHHATQKRQRRHDDQQKANKQRHTPTSESPQTRTEREEKRRRAETTPPTKQHKHN

SEQ ID NO: 855416 - protein, 208 aa, Homo sapiens; identical to SEQ ID NO: 855408

SEQ ID NO: 855417 - protein, 173 aa, Homo sapiens; identical to SEQ ID NO: 855411

SEQ ID NO: 855418 - protein, 208 aa, Homo sapiens; identical to SEQ ID NO: 855408

SEQ ID NO: 855419 - protein, 69 aa, Homo sapiens
GGVGGGLGGFVVRAKPRGAEGLVLPAPVRTRAPLRFRPASGTGLLELPEPCLFPVHPGQQLKEPHLPHQ

SEQ ID NO: 855420 - protein, 34 aa, Homo sapiens
IESYGHGIAQSHDCHASMAAVTEALRDVFILCFK

SEQ ID NO: 855421 - protein, 196 aa, Homo sapiens
QALYLDLLLRSAFCLILFSGCFQGLSSVMALGLKCFRMVHPTFRNYLAASIRPVSEVTLKTVHERQHGHRQYMAYSAVPVRHFATKKAKAKGKGQSQTRVNINAALVEDIINLEEVNEEMKSVIEALKDNFNKTLNIRTSPGSLDKIAVVTADGKLALNQISQISMKSPQLILVNMASFPETMKQIKQYFNGPNVA

SEQ ID NO: 855422 - protein, 153 aa, Homo sapiens
MALGLKCFRMVHPTFRNYLAASIRPVSEVTLKTVHERQHGHRQYMAYSAVPVRHFATKKAKAKGKGQSQTRVNINAALVEDIINLEEVNEEMKSVIEALKDNFNKTLNIRTSPGSLDKIAVVTADGKLALNQISQISMKSPQLILVNMASFPE

SEQ ID NO: 855423 - protein, 262 aa, Homo sapiens
MALGLKCFRMVHPTFRNYLAASIRPVSEVTLKTVHERQHGHRQYMAYSAVPVRHFATKKAKAKGKGQSQTRVNINAALVEDIINLEEVNEEMKSVIEALKDNFNKTLNIRTSPGSLDKIAVVTADGKLALNQISQISMKSPQLILVNMASFPECTAAAIKAIRESGMNLNPEVEGTLIRVPIPQVTREHREMLVKLAKQNTNKAKDSLRKVRTNSMNKLKKSKDTVSEDTIRLIEKQISQMADDTVAELDRHLAVKTKELLG

SEQ ID NO: 855424 - protein, 262 aa, Homo sapiens; identical to SEQ ID NO: 855423

SEQ ID NO: 855425 - protein, 283 aa, Homo sapiens
MNLNGRWQGVISGCFQGLSSVMALGLKCFRMVHPTFRNYLAASIRPVSEVTLKTVHERQHGHRQYMAYSAVPVRHFATKKAKAKGKGQSQTRVNINAALVEDIINLEEVNEEMKSVIEALKDNFNKTLNIRTSPGSLDKIAVVTADGKLALNQISQISMKSPQLILVNMASFPECTAAAIKAIRESGMNLNPEVEGTLIRVPIPQVTREHREMLVKLAKQNTNKAKDSLRKVRTNSMNKLKKSKDTVSEDTIRLIEKQISQMADDTVAELDRHLAVKTKELLG

SEQ ID NO: 855426 - protein, 262 aa, Homo sapiens; identical to SEQ ID NO: 855423

SEQ ID NO: 855427 - protein, 168 aa, Homo sapiens
MALGLKCFRMVHPTFRNYLAASIRPVSEVTLKTVHERQHGHRQYMAYSAVPVRHFATKKAKAKGKGQSQTRVNINAALVEDIINLEEVNEEMKSVIEALKDNFNKTLNIRTSPGSLDKIAVVTADGKLALNQISQISMKSPQLILVNMASFPETMKQIKQYFNGPNVA

SEQ ID NO: 855428 - protein, 218 aa, Homo sapiens
MAYSAVPVRHFATKKAKAKGKGQSQTRVNINAALVEDIINLEEVNEEMKSVIEALKDNFNKTLNIRTSPGSLDKIAVVTADGKLALNQISQISMKSPQLILVNMASFPECTAAAIKAIRESGMNLNPEVEGTLIRVPIPQVTREHREMLVKLAKQNTNKAKDSLRKVRTNSMNKLKKSKDTVSEDTIRLIEKQISQMADDTVAELDRHLAVKTKELLG

SEQ ID NO: 855429 - protein, 210 aa, Homo sapiens
MALGLKCFRMVHPTFRNYLAASIRPVSEVTLKTVHERQHGHRQYMAYSAVPVRHFATKKAKGSLDKIAVVTADGKLALNQISQISMKSPQLILVNMASFPECTAAAIKAIRESGMNLNPEVEGTLIRVPIPQVTREHREMLVKLAKQNTNKAKDSLRKVRTNSMNKLKKSKDTVSEDTIRLIEKQISQMADDTVAELDRHLAVKTKELLG

SEQ ID NO: 855430 - protein, 110 aa, Homo sapiens
MCTAAAIKAIRESGMNLNPEVEGTLIRVPIPQVTREHREMLVKLAKQNTNKAKDSLRKVRTNSMNKLKKSKDTVSEDTIRLIEKQISQMADDTVAELDRHLAVKTKELLG

SEQ ID NO: 855431 - protein, 307 aa, Homo sapiens
MALGLKCFRMVHPTFRNYLAASIRPVSEVTLKTVHERQHGHRQYMAYSAVPVRHFATKKAKAKGKGQSQTRVNINAALVEDIINLEEVNEEMKSVIEALKDNFNKTLNIRTSPGSLDKIAVVTADGKLALNQISQISMKSPQLILVNMASFPECTAAAIKAIRESGMNLNPEVEGTLIRVPIPQVTREHREMLVKLAKQNTNKAKDSLRKVRTNSMNKLKKSKDTVSEDTIRLIEKQAPITVVLPVSRLHTCCFLCLALSSPPYLASPVYHQALSWISRPLGSLLFPSNLGPSLPALIAQSTALYEF

SEQ ID NO: 855432 - protein, 174 aa, Homo sapiens
MNLNGRWQGVISGCFQGLSSVMALGLKCFRMVHPTFRNYLAASIRPVSEVTLKTVHERQHGHRQYMAYSAVPVRHFATKKAKAKGKGQSQTRVNINAALVEDIINLEEVNEEMKSVIEALKDNFNKTLNIRTSPGSLDKIAVVTADGKLALNQISQISMKSPQLILVNMASFPE

SEQ ID NO: 855433 - protein, 153 aa, Homo sapiens; identical to SEQ ID NO: 855422

SEQ ID NO: 855434 - protein, 262 aa, Homo sapiens; identical to SEQ ID NO: 855423

SEQ ID NO: 855435 - protein, 283 aa, Homo sapiens; identical to SEQ ID NO: 855425

SEQ ID NO: 855436 - protein, 290 aa, Homo sapiens
QALYLDLLLRSAFCLILFSGCFQGLSSVMALGLKCFRMVHPTFRNYLAASIRPVSEVTLKTVHERQHGHRQYMAYSAVPVRHFATKKAKAKGKGQSQTRVNINAALVEDIINLEEVNEEMKSVIEALKDNFNKTLNIRTSPGSLDKIAVVTADGKLALNQISQISMKSPQLILVNMASFPECTAAAIKAIRESGMNLNPEVEGTLIRVPIPQVTREHREMLVKLAKQNTNKAKDSLRKVRTNSMNKLKKSKDTVSEDTIRLIEKQISQMADDTVAELDRHLAVKTKELLG

SEQ ID NO: 855437 - protein, 262 aa, Homo sapiens; identical to SEQ ID NO: 855423

SEQ ID NO: 855438 - protein, 124 aa, Homo sapiens
MAYSAVPVRHFATKKAKAKGKGQSQTRVNINAALVEDIINLEEVNEEMKSVIEALKDNFNKTLNIRTSPGSLDKIAVVTADGKLALNQISQISMKSPQLILVNMASFPETMKQIKQYFNGPNVA

SEQ ID NO: 855439 - protein, 204 aa, Homo sapiens
QALYLDLLLRSAFCLILFSGCFQGLSSVMALGLKCFRMVHPTFRNYLAASIRPVSEVTLKTVHERQHGHRQYMAYSAVPVRHFATKKAKAKGKGQSQTRVNINAALVEDIINLEEVNEEMKSVIEALKDNFNKTLNIRTSPGSLDKIAVVTADGKLALNQISQISMKSPQLILVNMASFPEELAWIRSLRVPGIRSHLYHQLAV

SEQ ID NO: 855440 - protein, 132 aa, Homo sapiens
YTWMSYGVDSVYLKLSPQPVNEEMKSVIEALKDNFNKTLNIRTSPGSLDKIAVVTADGKLALNQISQISMKSPQLILVNMASFPESNQRAQRNAGETGQTEHQQGQRLFTEGSHQLNEQAEEIQGYSLRGHH

SEQ ID NO: 855441 - protein, 108 aa, Homo sapiens
MYAYFYFALVPYVLRTRKECEYLLWIERFSRLAVGSMKVTKVSHTAPALWVDFTSSTPLTYAELPCGQARPSSLITPRPRSHSNKCLSLCPCCWQAEVPWQPLNIAEC

SEQ ID NO: 855442 - protein, 243 aa, Homo sapiens
MAELQEVQITEEKPLLPGQTPEAAKTHSVETPYGSVTFTVYGTPKPKRPAILTYHDVGLNYKSCFQPLFQFEDMQEIIQNFVRVHVDAPGMEEGAPVFPLGYQYPSLDQLADMIPCVLQYLNFSTIIGVGVGAGAYILARYALNHPDTVEGLVLINIDPNAKGWMDWAAHKLQAHLSIGDDPGPLSAERSRHPVSRRTSSSHWYCVARPPRTAAGVPADGGTASGVRPLLAPRASRSPRSCVQ

SEQ ID NO: 855443 - protein, 190 aa, Homo sapiens
SSRREAGGSAWPCVERPCVTGTHSVETPYGSVTFTVYGTPKPKRPAILTYHDVGLNYKSCFQPLFQFEDMQEIIQNFVRVHVDAPGMEEGAPVFPLGYQYPSLDQLADMIPCVLQYLNFSTIIGVGVGAGAYILARYALNHPDTVEGLVLINIDPNAKGWMDWAAHKVWRGLCAETYGWGSPRMDPVRLW

SEQ ID NO: 855444 - protein, 366 aa, Homo sapiens
MSPVGWRLGVAVRERPCVTGTHSVETPYGSVTFTVYGTPKPKRPAILTYHDVGLNYKSCFQPLFQFEDMQEIIQNFVRVHVDAPGMEEGAPVFPLGYQYPSLDQLADMIPCVLQYLNFSTIIGVGVGAGAYILARYALNHPDTVEGLVLINIDPNAKGWMDWAAHKLTGLTSSIPEMILGHLFSQEELSGNSELIQKYRNIITHAPNLDNIELYWNSYNNRRDLNFERGGDITLRCPVMLVVGDQAPHEDAVGDQLWGTKNLIPGKVECNSKLDPTQTSFLKMADSGGQPQLTQPGKLTEAFKYFLQGMGYMASSCMTRLSRSRTASLTSAASVDGNRSRSRTLSQSSESGTLSSGPPGHTMEVSC

SEQ ID NO: 855445 - protein, 253 aa, Homo sapiens
MSPVGWRLGVAVRERPCVTGTHSVETPYGSVTFTVYGTPKPKRPAILTYHDVGLNYKSCFQPLFQFEDMQEIIQNFVRVHVDAPGMEEGAPVFPLGYQYPSLDQLADMIPCVLQYLNFSTIIGVGVGAGAYILARYALNHPDTVEGLVLINIDPNAKGWMDWAAHKLTGLTSSIPEMILGHLFSQEELSGNSELIQKYRNIITHAPNLDNIELYWNSYNNRRDLNFERGGDITLRCPVMLVVGDQAPHEDAVG

SEQ ID NO: 855446 - protein, 382 aa, Homo sapiens
MSPVGWRLGVAVRERPCVTGTHSVETPYGSVTFTVYGTPKPKRPAILTYHDVGLNYKSCFQPLFQFEDMQEIIQNFVRVHVDAPGMEEGAPVFPLGYQYPSLDQLADMIPCVLQYLNFSTIIGVGVGAGAYILARYALNHPDTVEGLVLINIDPNAKGWMDWAAHKLTGLTSSIPEMILGHLFSQEELSGNSELIQKYRNIITHAPNLDNIELYWNSYNNRRDLNFERGGDITLRCPVMLVVGDQAPHEDAVVECNSKLDPTQTSFLKMADSGGQPQLTQPGKLTEAFKYFLQGMGYMASSCMTRLSRSRTASLTSAASVDGNRSRSRTLSQSSESGTLSSGPPGHTMEVSQPSPPPELTWEVLKGHWATVSKGKRADHAGR

SEQ ID NO: 855447 - protein, 352 aa, Homo sapiens
MSPVGWRLGVAVRERPCVTGTHSVETPYGSVTFTVYGTPKPKRPAILTYHDVGLNYKSCFQPLFQFEDMQEIIQNFVRVHVDAPGMEEGAPVFPLGYQYPSLDQLADMIPCVLQYLNFSTIIGVGVGAGAYILARYALNHPDTVEGLVLINIDPNAKGWMDWAAHKLTGLTSSIPEMILGHLFSQEELSGNSELIQKYRNIITHAPNLDNIELYWNSYNNRRDLNFERGGDITLRCPVMLVVGDQAPHEDAVVECNSKLDPTQTSFLKMADSGGQPQLTQPGKLTEAFKYFLQGMGYMASSCMTRLSRSRTASLTSAASVDGNRSRSRTLSQSSESGTLSSGPPGHTMEVSC

SEQ ID NO: 855448 - protein, 352 aa, Homo sapiens; identical to SEQ ID NO: 855447

SEQ ID NO: 855449 - protein, 352 aa, Homo sapiens; identical to SEQ ID NO: 855447

SEQ ID NO: 855450 - protein, 352 aa, Homo sapiens; identical to SEQ ID NO: 855447

SEQ ID NO: 855451 - protein, 352 aa, Homo sapiens; identical to SEQ ID NO: 855447

SEQ ID NO: 855452 - protein, 358 aa, Homo sapiens
MSPVGWRLGVAVRERPCVTGTHSVETPYGSVTFTVYGTPKPKRPAILTYHDVGLNYKSCFQPLFQFEDMQEIIQNFVRVHVDAPGMEEGAPVFPLGYQYPSLDQLADMIPCVLQYLNFSTIIGVGVGAGAYILARYALNHPDTVEGLVLINIDPNAKGWMDWAAHKLTGLTSSIPEMILGHLFSQEELSGNSELIQKYRNIITHAPNLDNIELYWNSYNNRRDLNFERGGDITLRCPVMLVVGDQAPHEDAVVECNSKLDPTQTSFLKMADSGGQPQLTQPGKLTEAFKYFLQGMGYMASSCMTRLSRSRTASLTSAASVDGNRAWGRLAALTLVAQCASRVGLGRELSLGWAAWGLA

SEQ ID NO: 855453 - protein, 353 aa, Homo sapiens
MSPVGWRLGVAVRERPCVTGTHSVETPYGSVTFTVYGTPKPKRPAILTYHDVGLNYKSCFQPLFQFEDMQEIIQNFVRVHVDAPGMEEGAPVFPLGYQYPSLDQLADMIPCVLQYLNFSTIIGVGVGAGAYILARYALNHPDTVEGLVLINIDPNAKGWMDWAAHKLTGLTSSIPEMILGHLFSQEELSGNSELIQKYRNIITHAPNLDNIELYWNSYNNRRDLNFERGGDITLRCPVMLVVGDQAPHEDAVVECNSKLDPTQTSFLKMADSGGQPQLTQPGKLTEAFKYFLQGMGYMASSCMTRLSRSRTASLTSAASVDGNRSRSRTLSQSSEWAGLLGAWHRVERATLGL

SEQ ID NO: 855454 - protein, 289 aa, Homo sapiens
SSRREAGGSAWPCVERPCVTGTHSVETPYGSVTFTVYGTPKPKRPAILTYHDVGLNYKSCFQPLFQFEDMQEIIQNFVRVHVDAPGMEEGAPVFPLGYQYPSLDQLADMIPCVLQYLNFSTIIGVGVGAGAYILARYALNHPDTVEGLVLINIDPNAKGWMDWAAHKLTGLTSSIPEMILGHLFSQEELSGNSELIQKYRNIITHAPNLDNIELYWNSYNNRRDLNFERGGDITLRCPVMLVVGDQAPHEDAVVECNSKLDPTQTSFLKVSNLFLGPRPQSYILSTCSC

SEQ ID NO: 855455 - protein, 217 aa, Homo sapiens
MSPVGWRLGVAVRERPCVTGTHSVETPYGSVTFTVYGTPKPKRPAILTYHDVGLNYKSCFQPLFQFEDMQEIIQNFVRVHVDAPGMEEGAPVFPLGYQYPSLDQLADMIPCVLQYLNFSTIIGVGVGAGAYILARYALNHPDTVEGLVLINIDPNAKGWMDWAAHKLTGLTSSIPEMILGHLFSQEELSGNSELIQKYRNIITHAPNLDNTFARGIL

SEQ ID NO: 855456 - protein, 190 aa, Homo sapiens; identical to SEQ ID NO: 855443

SEQ ID NO: 855457 - protein, 238 aa, Homo sapiens
MSPVGWRLGVAVRERPCVTGTHSVETPYGSVTFTVYGTPKPKRPAILTYHDVGLNYKSCFQPLFQFEDMQEIIQNFVRVHVDAPGMEEGAPVFPLGYQYPSLDQLADMIPCVLQYLNFSTIIGVGVGAGAYILARYALNHPDTVEGLVLINIDPNAKGWMDWAAHKLQAHLSIGDDPGPLSAERSRHPVSRRTSSSHWYCVARPPRTAAGVPADGGTASGVRPLLAPRASRSPRSCVQ

SEQ ID NO: 855458 - protein, 371 aa, Homo sapiens
MAELQEVQITEEKPLLPGQTPEAAKEAELAARILLDQGQTHSVETPYGSVTFTVYGTPKPKRPAILTYHDVGLNYKSCFQPLFQFEDMQEIIQNFVRVHVDAPGMEEGAPVFPLGYQYPSLDQLADMIPCVLQYLNFSTIIGVGVGAGAYILARYALNHPDTVEGLVLINIDPNAKGWMDWAAHKLTGLTSSIPEMILGHLFSQEELSGNSELIQKYRNIITHAPNLDNIELYWNSYNNRRDLNFERGGDITLRCPVMLVVGDQAPHEDAVVECNSKLDPTQTSFLKMADSGGQPQLTQPGKLTEAFKYFLQGMGYMASSCMTRLSRSRTASLTSAASVDGNRSRSRTLSQSSESGTLSSGPPGHTMEVSC

SEQ ID NO: 855459 - protein, 352 aa, Homo sapiens; identical to SEQ ID NO: 855447

SEQ ID NO: 855460 - protein, 360 aa, Homo sapiens
MSPVGWRLGVAVRERPCVTGTHSVETPYGSVTFTVYGTPKPKRPAILTYHDVGLNYKSCFQPLFQFEDMQEIIQNFVRVHVDAPGMEEGAPVFPLGYQYPSLDQLADMIPCVLQYLNFSTIIGVGVGAGAYILARYALNHPDTVEGLVLINIDPNAKGWMDWAAHKLTGLTSSIPEMILGHLFSQEELSGNSELIQKYRNIITHAPNLDNIELYWNSYNKWVGCVCIIRRDLNFERGGDITLRCPVMLVVGDQAPHEDAVVECNSKLDPTQTSFLKMADSGGQPQLTQPGKLTEAFKYFLQGMGYMASSCMTRLSRSRTASLTSAASVDGNRSRSRTLSQSSESGTLSSGPPGHTMEVSC

SEQ ID NO: 855461 - protein, 190 aa, Homo sapiens; identical to SEQ ID NO: 855443

SEQ ID NO: 855462 - protein, 352 aa, Homo sapiens; identical to SEQ ID NO: 855447

SEQ ID NO: 855463 - protein, 108 aa, Homo sapiens
MSPVGWRLGVAVLLNDRACLGLTLWRHHTALSLSLSMAPPNPNAQRSLPTTMWDSTINLASSHCFSSRTCRKSFRTLCGFMWMPLEWKREPLCSLWDISTHLWTSLQT

SEQ ID NO: 855464 - protein, 118 aa, Homo sapiens
SSRREAGGSAWPCVERPCVTGTHSVETPYGSVTFTVYGTPKPKRPAILTYHDVGLNYKSCFQPLFQFEDMQEIIQNFVRVHVDAPGMEEGAPVFPLGYQYPSLDQLADMIPCVLQYLK

SEQ ID NO: 855465 - protein, 105 aa, Homo sapiens
AQAGLELLVSSDPPILASQSAGITGVSHCAWLPETMLLLGSFSWFISSALLNKFSQMIGVLGDRSSLKTEASHHTYISSPWWQMEKKDLPLHFSPLTPLSGVGRN

SEQ ID NO: 855466 - protein, 744 aa, Homo sapiens
MDFSKFLADDFDVKEWINAAFRAGSKEAASGKADGHAATLVMKLQLFIQEVNHAVEETSHQALQNMPKVLRDVEALKQEASFLKEQMILVKEDIKKFEQDTSQSMQVLVEIDQVKSRMQLAAESLQEADKWSTLSADIEETFKTQDIAVISAKLTGMQNSLMMLVDTPDYSEKCVHLEALKNRLEALASPQIVAAFTSQAVDQSKVFVKVFTEIDRMPQLLAYYYKCHKVQLLAAWQELCQSDLSLDRQLTGLYDALLGAWHTQIQWATQVFQKPHEVVMVLLIQTLGALMPSLPSCLSNGVERAGPEQELTRLLEFYDATAHFAKGLEMALLPHLHEHNLVKVTELVDAVYDPYKPYQLKYGDMEESNLLIQMSAVPLEHGEVIDCVQELSHSVNKLFGLASAAVDRCVRFTNGLGTCGLLSALKSLFAKYVSDFTSTLQSIRKKCKLDHIPPNSLFQEDWTAFQNSIRIIATCGELLRHCGDFEQQLANRILSTAGKYLSDSCSPRSLAGFQESILTDKKNSAKNPWQEYNYLQKDNPAEYASLMEILYTLKEKGSSNHNLLAAPRAALTRLNQQAHQLAFDSVFLRIKQQLLLISKMDSWNTAGIGETLTDELPAFSLTPLEYISNIGQYIMSLPLNLEPFVTQEDSALELALHAGKLPFPPEQGDELPELDNMADNWLGSIARATMQTYCDAILQIPELSPHSAKQLATDIDYLINVMDALGLQPSRTLQHIVTLLKTQA

SEQ ID NO: 855467 - protein, 388 aa, Homo sapiens
ELAPRSMAMEESNLLIQMSAVPLEHGEVIDCVQELSHSVNKLFGLASAAVDRCVRFTNGLGTCGLLSALKSLFAKYVSDFTSTLQSIRKKCKLDHIPPNSLFQEDWTAFQNSIRIIATCGELLRHCGDFEQQLANRILSTAGKYLSDSCSPRSLAGFQESILTDKKNSAKNPWQEYNYLQKDNPAEYASLMEILYTLKEKGSSNHNLLAAPRAALTRLNQQAHQLAFDSVFLRIKQQLLLISKMDSWNTAGIGETLTDELPAFSLTPLEYISNIGQYIMSLPLNLEPFVTQEDSALELALHAGKLPFPPEQGDELPELDNMADNWLGSIARATMQTYCDAILQIPELSPHSAKQLATDIDYLINVMDALGLQPSRTLQHIVTLLKTQA

SEQ ID NO: 855468 - protein, 524 aa, Homo sapiens
MGFRHVDQAGLKLLGWSNLPTSAIQSTGITGLSHCTQPPFATFFGASDKENLNRSSRARGRDAILIITEKEESNEKHYGSSRQTFDHAFLPGVNFHDPTDDLDCSPLIQALEKHSNVGTIFLTSLLSDFTTDEKAWRSSPISALSVLKPNAALSVFADQEHGEVIDCVQELSHSVNKLFGLASAAVDRCVRFTNGLGTCGLLSALKSLFAKYVSDFTSTLQSIRKKCKLDHIPPNSLFQEDWTAFQNSIRIIATCGELLRHCGDFEQQLANRILSTAGKYLSDSCSPRSLAGFQESILTDKKNSAKNPWQEYNYLQKDNPAEYASLMEILYTLKEKGSSNHNLLAAPRAALTRLNQQAHQLAFDSVFLRIKQQLLLISKMDSWNTAGIGETLTDELPAFSLTPLEYISNIGQYIMSLPLNLEPFVTQEDSALELALHAGKLPFPPEQGDELPELDNMADNWLGSIARATMQTYCDAILQIPELSPHSAKQLATDIDYLINVMDALGLQPSRTLQHIVTLLKTQA

SEQ ID NO: 855469 - protein, 638 aa, Homo sapiens
MDFSKFLADDFDVKEWINAAFRAGSKEAASGKADGHAATLVMKLQLFIQEVNHAVEETSHQALQNMPKVLRDVEALKQEASFLKEQMILVKEDIKKFEQDTSQSMQVLVEIDQVKSRMQLAAESLQEADKWSTLSADIEETFKTQDIAVISAKLTGMQNSLMMLVDTPDYSEKCVHLEALKNRLEALASPQIVAAFTSQAVDQSKVFVKVFTEIDRMPQLLAYYYKCHKVQLLAAWQELCQSDLSLDRQLTGLYDALLGAWHTQIQWATQVFQKPHEVVMVLLIQTLGALMPSLPSCLSNGVERAGPEQELTRLLEFYDATAHFAKGLEMALLPHLHEHNLVKVTELVDAVYDPYKPYQLKYGDMEESNLLIQMSAVPLEHGEVIDCVQELSHSVNKLFGLASAAVDRCVRFTNGLGTCGLLSALKSLFAKYVSDFTSTLQSIRKKCKLDHIPPNSLFQEDWTAFQNSIRIIATCGELLRHCGDFEQQLANRILSTAGKYLSDSCSPRSLAGFQESILTDKKNSAKNPWQEYNYLQKDNPAEYASLMEILYTLKEKGSSNHNLLAAPRAALTRLNQQAHQLAFDSVFLRIKQQLLLISKMDVSFSLTTSIFPGSCLQLKHTECGLNPPCSKSFGKIPL

SEQ ID NO: 855470 - protein, 393 aa, Homo sapiens [sequence omitted]

SEQ ID NO: 855471 - protein, 105 aa, Homo sapiens
TYVDVPNKVPFVLSLQVQLLAAWQELCQSDLSLDRQLTGLYDALLGAWHTQIQWATQVTAHFCSRENRVCGDKGTGDCLGSGHPQLQSTAQRTSPFVAVIQGVKK

SEQ ID NO: 855472 - protein, 110 aa, Homo sapiens
MSLPLNLEPFVTQEDSALELALHAGKLPFPPEQGDELPELDNMADNWLGSIARATMQTYCDAILQIPELSPHSAKQLATDIDYLINVMDALGLQPSRTLQHIVTLLKTQA

SEQ ID NO: 855473 - protein, 744 aa, Homo sapiens; identical to SEQ ID NO: 855466

SEQ ID NO: 855474 - protein, 738 aa, Homo sapiens
AQAGLELLVSSDPPILASQSAGITGVSHCAWLPETMLLLGSFSWFISSALLNKFSQMIGVLGDRSSLKTEASHHTYISSPWWQMEKKDLPLHFSPLTLFQVLVEIDQVKSRMQLAAESLQEADKWSTLSADIEETFKTQDIAVISAKLTGMQNSLMMLVDTPDYSEKCVHLEALKNRLEALASPQIVAAFTSQAVDQSKVFVKVFTEIDRMPQLLAYYYKCHKVQLLAAWQELCQSDLSLDRQLTGLYDALLGAWHTQIQWATQVFQKPHEVVMVLLIQTLGALMPSLPSCLSNGVERAGPEQELTRLLEFYDATAHFAKGLEMALLPHLHEHNLVKVTELVDAVYDPYKPYQLKYGDMEESNLLIQMSAVPLEHGEVIDCVQELSHSVNKLFGLASAAVDRCVRFTNGLGTCGLLSALKSLFAKYVSDFTSTLQSIRKKCKLDHIPPNSLFQEDWTAFQNSIRIIATCGELLRHCGDFEQQLANRILSTAGKYLSDSCSPRSLAGFQESILTDKKNSAKNPWQEYNYLQKDNPAEYASLMEILYTLKEKGSSNHNLLAAPRAALTRLNQQAHQLAFDSVFLRIKQQLLLISKMDSWNTAGIGETLTDELPAFSLTPLEYISNIGQYIMSLPLNLEPFVTQEDSALELALHAGKLPFPPEQGDELPELDNMADNWLGSIARATMQTYCDAILQIPELSPHSAKQLATDIDYLINVMDALGLQPSRTLQHIVTLLKTQA

SEQ ID NO: 855475 - protein, 452 aa, Homo sapiens
MCIALVLDVKWIFDHAFLPGVNFHDPTDDLDCSPLIQALEKHSNVGTIFLTSLLSDFTTDEKAWRSSPISALSVLKPNAALSVFADQEHGEVIDCVQELSHSVNKLFGLASAAVDRCVRFTNGLGTCGLLSALKSLFAKYVSDFTSTLQSIRKKCKLDHIPPNSLFQEDWTAFQNSIRIIATCGELLRHCGDFEQQLANRILSTAGKYLSDSCSPRSLAGFQESILTDKKNSAKNPWQEYNYLQKDNPAEYASLMEILYTLKEKGSSNHNLLAAPRAALTRLNQQAHQLAFDSVFLRIKQQLLLISKMDSWNTAGIGETLTDELPAFSLTPLEYISNIGQYIMSLPLNLEPFVTQEDSALELALHAGKLPFPPEQGDELPELDNMADNWLGSIARATMQTYCDAILQIPELSPHSAKQLATDIDYLINVMDALGLQPSRTLQHIVTLLKTQA

SEQ ID NO: 855476 - protein, 110 aa, Homo sapiens; identical to SEQ ID NO: 855472

SEQ ID NO: 855477 - protein, 34 aa, Homo sapiens
KLQLFIQEVNHAVEGEPLGALAAGPSPALGWAEV

SEQ ID NO: 855478 - protein, 686 aa, Homo sapiens
MINNSQCHKQGDFPYQVGTELSIQISEDENYIVNKADGPNNTGNPEFPILRTQDSWRKTFLTESQRLNRDQQISIKNKLCQCKKGVDPIGWISHHDGHRVHKSEKSYRPNDYEKDNMKILTFDHNSMIHTGQKSYQCNECKKPFSDLSSFDLHQQLQSGEKSLTCVERGKGFCYSPVLPVHQKVHVGEKLKCDECGKEFSQGAHLQTHQKVHVIEKPYKCKQCGKGFSRRSALNVHCKVHTAEKPYNCEECGRAFSQASHLQDHQRLHTGEKPFKCDACGKSFSRNSHLQSHQRVHTGEKPYKCEECGKGFICSSNLYIHQRVHTGEKPYKCEECGKGFSRPSSLQAHQGVHTGEKSYICTVCGKGFTLSSNLQAHQRVHTGEKPYKCNECGKSFRRNSHYQVHLVVHTGEKPYKCEICGKGFSQSSYLQIHQKAHSIEKPFKCEECGQGFNQSSRLQIHQLIHTGEKPYKCEECGKGFSRRADLKIHCRIHTGEKPYNCEECGKVFRQASNLLAHQRVHSGEKPFKCEECGKSFGRSAHLQAHQKVHTGDKPYKCDECGKGFKWSLNLDMHQRVHTGEKPYKCGECGKYFSQASSLQLHQSVHTGEKPYKCDVCGKVFSRSSQLQSHQRVHTGEKPYKCEICGKSFSWRSNLTVHHRIHVGDKSYKSNRGGKNIRESTQEKKSIK

SEQ ID NO: 855479 - protein, 686 aa, Homo sapiens; identical to SEQ ID NO: 855478

SEQ ID NO: 855480 - protein, 686 aa, Homo sapiens; identical to SEQ ID NO: 855478

SEQ ID NO: 855481 - protein, 686 aa, Homo sapiens; identical to SEQ ID NO: 855478

SEQ ID NO: 855482 - protein, 686 aa, Homo sapiens; identical to SEQ ID NO: 855478

SEQ ID NO: 855483 - protein, 686 aa, Homo sapiens; identical to SEQ ID NO: 855478

SEQ ID NO: 855484 - protein, 686 aa, Homo sapiens; identical to SEQ ID NO: 855478

SEQ ID NO: 855485 - protein, 686 aa, Homo sapiens; identical to SEQ ID NO: 855478

SEQ ID NO: 855486 - protein, 686 aa, Homo sapiens; identical to SEQ ID NO: 855478

SEQ ID NO: 855487 - protein, 686 aa, Homo sapiens; identical to SEQ ID NO: 855478

SEQ ID NO: 855488 - protein, 189 aa, Homo sapiens
VGVVCYRVYCCCCLANVSLPGIGGTIPESKPFFYVNVADIESLEVEVSYVACTTEKIFEEKRELYDVYVDNQNVKTHHDHLQPLLKINSADREKYRRLNEQRQMLLYSQEVEEDYNPCEEDLFVLFFLEQNNRIFQTLLEVSASQDKTLTAEHARGMGLDPQGDRSFLLDLLEAYGIDVMLVIDNPCCP

SEQ ID NO: 855489 - protein, 102 aa, Homo sapiens
VEVSYVACEYGALPSSCPQVPALLLPDTGLLGALFPSGVGWVPTSLTPGSTGTTEKIFEEKRELYDVYVDNQNVKTHHDHLQPLLKINSADREKYRRLNEQR

SEQ ID NO: 855490 - protein, 189 aa, Homo sapiens; identical to SEQ ID NO: 855488

SEQ ID NO: 855491 - protein, 231 aa, Homo sapiens
MSGEENPASKPTPVQDVQGDGRWMSLHHRFVADSKDKEPEVVFIGDSLVQLMHQCEIWRELFSPLHALNFGIGGDGTQHVLWRLENGELEHIRPKIVVVWVGTNNHGHTAEQVTGGIKAIVQLVNERQPQARVVVLGLLPRGQHPNPLREKNRQVNELVRAALAGHPRAHFLDADPGFVHSDGTISHHDMYDYLHLSRLGYTPVCRALHSLLLRLLAQDQGQGAPLLEPAP

SEQ ID NO: 855492 - protein, 231 aa, Homo sapiens; identical to SEQ ID NO: 855491

SEQ ID NO: 855493 - protein, 231 aa, Homo sapiens; identical to SEQ ID NO: 855491

SEQ ID NO: 855494 - protein, 218 aa, Homo sapiens
MSGEENPASKPTPVQDVQGDGRWMSLHHRFVADSKDKEPEVVFIGDSLVQLMHQCEIWRELFSPLHALNFGIGGDGTQHVLWRLENGELEHIRPKIVVVWVGTNNHGHTAEQVTGGIKAIVQLGLLPRGQHPNPLREKNRQVNELVRAALAGHPRAHFLDADPGFVHSDGTISHHDMYDYLHLSRLGYTPVCRALHSLLLRLLAQDQGQGAPLLEPAP

SEQ ID NO: 855495 - protein, 207 aa, Homo sapiens
MSGEENPASKPTPVQDVQGDGRWMSLHHRFVADSKDKEPEVVFIGDSLVQLMHQCEIWRELFSPLHALNFGIGGDGTQHVLWRLENGELEHIRPKIVVVWVGTNNHGHTAEQGLLPRGQHPNPLREKNRQVNELVRAALAGHPRAHFLDADPGFVHSDGTISHHDMYDYLHLSRLGYTPVCRALHSLLLRLLAQDQGQGAPLLEPAP

SEQ ID NO: 855496 - protein, 218 aa, Homo sapiens; identical to SEQ ID NO: 855494

SEQ ID NO: 855497 - protein, 123 aa, Homo sapiens
GGRYGLGGRYGLDATSHLLCCVSVVVGAGLLPRGQHPNPLREKNRQVNELVRAALAGHPRAHFLDADPGFVHSDGTISHHDMYDYLHLSRLGYTPVCRALHSLLLRLLAQDQGQGAPLLEPAP

SEQ ID NO: 855498 - protein, 54 aa, Homo sapiens
EENPASKPTPVQDVQGDGRWMSLVSVPTWDIEESGGAGGGSGERLVRATLLPDW

SEQ ID NO: 855499 - protein, 207 aa, Homo sapiens; identical to SEQ ID NO: 855495

SEQ ID NO: 855500 - protein, 231 aa, Homo sapiens; identical to SEQ ID NO: 855491

SEQ ID NO: 855501 - protein, 231 aa, Homo sapiens; identical to SEQ ID NO: 855491

SEQ ID NO: 855502 - protein, 218 aa, Homo sapiens; identical to SEQ ID NO: 855494

SEQ ID NO: 855503 - protein, 108 aa, Homo sapiens
MLVSLLRLVFLLQGLLPRGQHPNPLREKNRQVNELVRAALAGHPRAHFLDADPGFVHSDGTISHHDMYDYLHLSRLGYTPVCRALHSLLLRLLAQDQGQGAPLLEPAP

SEQ ID NO: 855504 - protein, 103 aa, Homo sapiens
MSGEENPASKPTPVQDVQGDGRWMSLHHRFVADSKDKEPEVVFIGDSLVQLMHQCEIWRELFSPLHALNFGIGGDGTQHVLWRLENGELEHIRPKVSGAWVGL

SEQ ID NO: 855505 - protein, 180 aa, Homo sapiens
MGLTVSALFSRIFGKKQMRILMVGLDAAGKTTILYKLKLGEIVTTIPTIGFNVETVEYKNICFTVWDVGGQDKIRPLWRHYFQNTQGLIFVVDSNDRERVQESADELQKMLQEDELRDAVLLVFANKQDMPNAMPVSELTDKLGLQHLRSRTWYVQATCATQGTGLYDGLDWLSHELSKR

SEQ ID NO: 855506 - protein, 180 aa, Homo sapiens; identical to SEQ ID NO: 855505

SEQ ID NO: 855507 - protein, 132 aa, Homo sapiens
RGGGGGASSCCCCAPSPRGRPVPARTPRRCPRPSPGPAMGLTVSALFSRIFGKKQMRILMVGLDAAGKTTILYKLKLGEIVTTIPTIGFNVETVEYKNICFTVWDVGGQDKIRPLWRHYFQNTQVECWEGTF

SEQ ID NO: 855508 - protein, 180 aa, Homo sapiens; identical to SEQ ID NO: 855505

SEQ ID NO: 855509 - protein, 96 aa, Homo sapiens
ARRRRRSLLLLLLRPIPPRPASSSPHPASVPAPLPGPRHGPHRVRALFADLREEADADSHGWLGCGWQDHNPVQTEVGGDCHHHPNHRLQCRNSGI

SEQ ID NO: 855510 - protein, 170 aa, Homo sapiens
MGLTVSALFSRIFGKKQMRILMVGLDAAGKTTILYKLKLGEIVTTIPTIGFNVETVEYKNICFTVWDVGGQDKIRPLWRHYFQNTQGLIFVVDSNDRERVIPGMHAGASGHQGPAPGWLRFDSSWDSQSRPSYRPVPWVAQVAWTYHVRLRKCCSPSLSVSSLTGMALGM

SEQ ID NO: 855511 - protein, 84 aa, Homo sapiens
VVASPFPWSLGGSLAPISIPVPLSVAVGLDAAGKTTILYKLSVLEVVPPQRPNLVLASHVPDCETDVLIFHCFYIEAYGWDGGD

SEQ ID NO: 855512 - protein, 132 aa, Homo sapiens; identical to SEQ ID NO: 855507

SEQ ID NO: 855513 - protein, 98 aa, Homo sapiens
VVASPFPWSLGGSLAPISIPVPLSVAVGLDAAGKTTILYKLKLGEIVTTIPTIGFNVETVEYKNICFTVWDVGGQDKIRPLWRHYFQNTQVECWEGTF

SEQ ID NO: 855514 - protein, 132 aa, Homo sapiens; identical to SEQ ID NO: 855507

SEQ ID NO: 855515 - protein, 95 aa, Homo sapiens
MGLTVSALFSRIFGKKQMRILMGEADRARGPDRGAGPGAALPPPRPSSPAHLGLWPRVTHLITPRGLCSRAGPGLHRRPRGLTPGAAGLGGVKLP

SEQ ID NO: 855516 - protein, 50 aa, Homo sapiens
MQLSETNRTLFLFGVTKYTAGPYECEIWNSGSASRSDPVTLNLLREYLLF

SEQ ID NO: 855517 - protein, 369 aa, Homo sapiens
FFAGGRTAQLTAVLWKLLDPRLISTEENMHAAEIMGPLSAPPCTEHIKWKGLLLTALLLNFWNLPTTAQVMIEAQPPKVSEGKDVLLLVHNLPQNLTGYIWYKGQIRDLYHYITSYIVDGQIIIYGPAYSGRETVYSNASLLIQNVTREDAGSYTLHIIKRGDGTRGVTGYFTFTLYLETPKPSISSSNLNPREAMETVILTCNPETPDASYLWWMNGQSLPMTHRMQLSETNRTLFLFGVTKYTAGPYECEIWNSGSASRSDPVTLNLLHGPDLPRIFPSVTSYYSGENLDLSCFANSNPPAQYSWTINGKFQLSGQKLFIPQITPKHNGLYACSARNSATGEESSTSLTIRVIAPPGLGTFAFNNPT

SEQ ID NO: 855518 - protein, 247 aa, Homo sapiens
FFAGGRTAQLTAVLWKLLDPRLISTEENMHAAEIMGPLSAPPCTEHIKWKGLLLTVETPKPSISSSNLNPREAMETVILTCNPETPDASYLWWMNGQSLPMTHRMQLSETNRTLFLFGVTKYTAGPYECEIWNSGSASRSDPVTLNLLHGPDLPRIFPSVTSYYSGENLDLSCFANSNPPAQYSWTINGKFQLSGQKLFIPQITPKHNGLYACSARNSATGEESSTSLTIRVIAPPGLGTFAFNNPT

SEQ ID NO: 855519 - protein, 389 aa, Homo sapiens
FFAGGRTAQLTAVLWKLLDPRLISTEENMHAAEIMGPLSAPPCTEHIKWKGLLLTALLLNFWNLPTTAQVMIEAQPPKVSEGKDVLLLVHNLPQNLTGYIWYKGQIRDLYHYITSYIVDGQIIIYGPAYSGRETVYSNASLLIQNVTREDAGSYTLHIIKRGDGTRGVTGYFTFTLYLETPKPSISSSNLNPREAMETVILTCNPETPDASYLWWMNGQSLPMTHRMQLSETNRTLFLFGVTKYTAGPYECEIWNSGSASRSDPVTLNLLHGPDLPRIFPSVTSYYSGENLDLSCFANSNPPAQYSWTINGKFQLSGQKLFIPQITPKHNGLYACSARNSATGEESSTSLTIRVIESCFDSSSKYLKSATVQNCFFFKEIYGKDYEKDS

SEQ ID NO: 855520 - protein, 113 aa, Homo sapiens
MWWMLAREVLRMRGTISREHPWEVMPDLYFYRDPEEIEKEEQAAAEKAVTKEEFQGEWTAPAPEFTATQPEVADWSEGVQVPSVPIQLFPTEDWSAQPATEDWSAAPTAQATG

SEQ ID NO: 855521 - protein, 369 aa, Homo sapiens; identical to SEQ ID NO: 855517

SEQ ID NO: 855522 - protein, 235 aa, Homo sapiens
SQPLPAQSTSNGRGSWSQNVTREDAGSYTLHIIKRGDGTRGVTGYFTFTLYLETPKPSISSSNLNPREAMETVILTCDPETPDTSYQWWMNGQSLPMTHRFQLSETNRTLFLFGVTKYTAGPYECEIRNSGSASRSDPVTLNLLHGPDLPRIHPSYTNYRSGDNLYLSCFANSNPPAQYSWTINGKFQQSGQNLFIPQITTKHSGLYVCSVRNSATKDTGEARTPGEARTLARLG

SEQ ID NO: 855523 - protein, 79 aa, Homo sapiens
GRTAQLTAVLWKLLDPRLISTEENMHAAEIMGPLSAPPCTEHIKWKGLLLTGEERTSWERTGGGSRVTGWGLLERLLGF

SEQ ID NO: 855524 - protein, 369 aa, Homo sapiens; identical to SEQ ID NO: 855517

SEQ ID NO: 855525 - protein, 367 aa, Homo sapiens
FFAGGRTAQLTAVLWKLLDPRLISTEENMHAAEIMGPLSAPPCTEHIKWKGLLLTALLLNFWNLPTTAQVMIEAQPPKVSEGKDVLLLVHNLPQNLTGYIWYKGQIRDLYHYITSYIVDGQIIIYGPAYSGRETVYSNASLLIQNVTREDAGSYTLHIIKRGDGTRGVTGYFTFTLYLETPKPSISSSNLNPREAMETVILTCNPETPDASYLWWMNGQSLPMTHRMQLSETNRTLFLFGVTKYTAGPYECEIWNSGSASRSDPVTLNLLHGPDLPRIFPSVTSYYSGENLDLSCFANSNPPAQYSWTINGKFQLSGQKLFIPQITPKHNGLYACSARNSATGEESSTSLTIRVIGPCHGDLTECHS

SEQ ID NO: 855526 - protein, 367 aa, Homo sapiens; identical to SEQ ID NO: 855525

SEQ ID NO: 855527 - protein, 242 aa, Homo sapiens
SQPLPAQSTSNGRGSWSQNVTREDAGSYTLHIIKRGDGTRGVTGYFTFTLYLETPKPSISSSNLNPREAMETVILTCDPETPDTSYQWWMNGQSLPMTHRFQLSETNRTLFLFGVTKYTAGPYECEIRNSGSASRSDPVTLNLLHGPDLPRIHPSYTNYRSGDNLYLSCFANSNPPAQYSWTINGKFQQSGQNLFIPQITTKHSGLYVCSVRNSATHQWRGKLHIVDSQSLCFYKNRTSSSP

SEQ ID NO: 855528 - protein, 121 aa, Homo sapiens
MAWMPPPFLPHTYYHTREVPKLSCLTDTHPLAEHSWLIDGKFQQSAQVFFIPQITKTYRGLYVCFIHNSATAGTNLIIKRTIVPGKWIPETLAICFPVKSISYQGGETLEERARLNVMPAD

SEQ ID NO: 855529 - protein, 218 aa, Homo sapiens
MSCSGSGADPEAAPASAASAPGPAPPVSAPAALPSSTAAENKASPAGTAGGPGAGAAAGGTGPLAARAGEPAERRGAAPVSAGGAAPPEGAISNGVYVLPSAANGDVKPVVSSTPLVDFLMQLEDYTPTIPDAVTGYYLNRAGFEASDPRIIRLISLAAQKFISDIANDALQHCKMKGTASGSSRSKSKDRKYTLTMEDLTPALSEYGINVKKPHYFT

SEQ ID NO: 855530 - protein, 313 aa, Homo sapiens
MSCSGSGADPEAAPASAASAPGPAPPVSAPAALPSSTAAENKASPAGTAGGPGAGAAAGGTGPLAARAGEPAERRGAAPVSAGGAAPPEGAISNGVYVLPSAANGDVKPVVSSTPLVDFLMQLEDYTPTIPDAVTGYYLNRAGFEASDPRIIRLISLAAQKFISDIANDALQHCKMKGTASGSSRSKSKDRKYTLRHGGLDPVPLPEIKEQLTEKRDRKRKESGKQNEHTHKKNRTRGGRSERPRERQAATRPKKSEAEQTERSGAKKSEGQREAGERRGKEGKRRGRRSGDGRKAGENEGQRGERATDKRRA

SEQ ID NO: 855531 - protein, 218 aa, Homo sapiens; identical to SEQ ID NO: 855529

SEQ ID NO: 855532 - protein, 138 aa, Homo sapiens
MSCSGSGADPEAAPASAASAPGPAPPVSAPAALPSSTAAENKASPAGTAGGPGAGAAAGGTGPLAARAGEPAERRGAAPVSAGGAAPPEGAISNGVYVLPSAANGDVKPVVSSTPLVDFLMQLEDYTPTVGFRPNKAT

SEQ ID NO: 855533 - protein, 40 aa, Homo sapiens
MQLEDYTPTIPDAVTGYYLNRAGFEASDPRIFGSSPSQIP

SEQ ID NO: 855534 - protein, 138 aa, Homo sapiens; identical to SEQ ID NO: 855532

SEQ ID NO: 855535 - protein, 113 aa, Homo sapiens
GNQRQKTTVVSLSLAWHITRDTERDAVTEYTRAQKSDSVGHSMHAGIRLISLAAQKFISDIANDALQHCKMKGTASGSSRSKSKDRKYTLTMEDLTPALSEYGINVKKPHYFT

SEQ ID NO: 855536 - protein, 268 aa, Homo sapiens
MAGAEGAAGRQSELEPVVSLVDVLEEDEELENEACAVLGGSDSEKCSYSQNIYRFVIRGKQQRFNKFGTCTLLPDKAKVNSGNKYNDNFFGLYCICKRPYPDPEDEIPDEMIQCVVCEDWFHGRHLGAIPPESGDFQEMVCQACMKRCSFLWAYAAQLAVTKISTEDDGLVRNIDGIGDQEVIKPENGEHQDSTLKEDVPEQGKDDVREVKVEQNSEPCAGSSSESDLQTFSYSPGRYTTCYASSGAKGGSVFLYKLLSFKLLKSTEL

SEQ ID NO: 855537 - protein, 280 aa, Homo sapiens
MAGAEGAAGRQSELEPVVSLVDVLEEDEELENEACAVLGGSDSEKCSYSQGSVKRQALYACSTCTPEGEEPAGICLACSYECHGSHKLFELYTKRNFRCDCGNSKFKNLECKLLPDKAKVNSGNKYNDNFFGLYCICKRPYPDPEDEIPDEMIQCVVCEDWFHGRHLGAIPPESGDFQEMVCQACMKRCSFLWAYAAQLAVTKISTEDDGLVRNIDGIGDQEVIKPENGEHQDSTLKEDVPEQGKDDVREVKVEQNSEPCAGSSSESDLQVMCEVRAIKK

SEQ ID NO: 855538 - protein, 69 aa, Homo sapiens
HRRPAPNPRPHLDAATTSRLLRERTFSSSLKSFSQKREEEWMGCSITAARVEYEAFSFKPMKMRFPFLE

SEQ ID NO: 855539 - protein, 309 aa, Homo sapiens
MAGAEGAAGRQSELEPVVSLVDVLEEDEELENEACAVLGGSDSEKCSYSQGSVKRQALYACSTCTPEGEEPAGICLACSYECHGSHKLFELYTKRNFRCDCGNSKFKNLECKLLPDKAKVNSGNKYNDNFFGLYCICKRPYPDPEDEIPDEMIQCVVCEDWFHGRHLGAIPPESGDFQEMVCQACMKRCSFLWAYAAQLAVTKISTEDDGLVRNIDGIGDQEVIKPENGEHQDSTLKEDVPEQGKDDVREVKVEQNSEPCAGSSSESDLQTFSYSPGRYTTCYASSGAKGGSVFLYKLLSFKLLKSTEL

SEQ ID NO: 855540 - protein, 425 aa, Homo sapiens
MAGAEGAAGRQSELEPVVSLVDVLEEDEELENEACAVLGGSDSEKCSYSQGSVKRQALYACSTCTPEGEEPAGICLACSYECHGSHKLFELYTKRNFRCDCGNSKFKNLECKLLPDKAKVNSGNKYNDNFFGLYCICKRPYPDPEDEIPDEMIQCVVCEDWFHGRHLGAIPPESGDFQEMVCQACMKRCSFLWAYAAQLAVTKISTEDDGLVRNIDGIGDQEVIKPENGEHQDSTLKEDVPEQGKDDVREVKVEQNSEPCAGSSSESDLQTVFKNESLNAESKSGCKLQELKAKQLIKKDTATYWPLNWRSKLCTCQDCMKMYGDLDVLFLTDEYDTVLAYENKGKIAQATDRSDPLMDTLSSMNRVQQVELICEYNDLKTELKDYLKRFADEGTVVKREDIQQFFEEFQSKKRRRVDGMQYYCS

SEQ ID NO: 855541 - protein, 416 aa, Homo sapiens
MAGAEGAAGRQSELEPVVSLVDVLEEDEELENEACAVLGGSDSEKCSYSQGSVKRQALYACSTCTPEGEEPAGICLACSYECHGSHKLFELYTKSKFKNLECKLLPDKAKVNSGNKYNDNFFGLYCICKRPYPDPEDEIPDEMIQCVVCEDWFHGRHLGAIPPESGDFQEMVCQACMKRCSFLWAYAAQLAVTKISTEDDGLVRNIDGIGDQEVIKPENGEHQDSTLKEDVPEQGKDDVREVKVEQNSEPCAGSSSESDLQTVFKNESLNAESKSGCKLQELKAKQLIKKDTATYWPLNWRSKLCTCQDCMKMYGDLDVLFLTDEYDTVLAYENKGKIAQATDRSDPLMDTLSSMNRVQQVELICEYNDLKTELKDYLKRFADEGTVVKREDIQQFFEEFQSKKRRRVDGMQYYCS

SEQ ID NO: 855542 - protein, 425 aa, Homo sapiens; identical to SEQ ID NO: 855540

SEQ ID NO: 855543 - protein, 425 aa, Homo sapiens; identical to SEQ ID NO: 855540

SEQ ID NO: 855544 - protein, 118 aa, Homo sapiens
WTAGFPSTCQEGGTRVNHGLLRRPAKRCTAGCRQPHFGQVPPHELGRLSHGEGGEGKPPRASEPGRCCTGLAVACGADVRARSQQMAAGPATAAADVFESVVRCSWGFTRPNFPSPRH

SEQ ID NO: 855545 - protein, 459 aa, Homo sapiens
MALTLFDTDEYRPPVWKSYLYQLQQEAPHPRRITCTCEVENRPKYYGREFHGMISREAADQLLIVAEGSYLIRESQRQPGTYTLALRFGSQTRNFRLYYDGKHFVGEKRFESIHDLVTDGLITLYIETKAAEYIAKMTINPIYEHVGYTTLNREPAYKKHMPVLKETHDERDSTGQDGVSEKRLTSLVRRATLKENEQIPKYEKIHNFKVHTFRGPHWCEYCANFMWGLIAQGVKCADCGLNVHKQCSKMVPNDCKPDLKHVKKVYSCDLTTLVKAHTTKRPMVVDMCIREIESRGLNSEGLYRVSGFSDLIEDVKMAFDRDGEKADISVNMYEDINIITGALKLYFRDLPIPLITYDAYPKFIESAKIMDPDEQLETLHEALKLLPPAHCETLRYLMAHLKRVTLHEKENLMNAENLGIVFGPTLMRSPELDAMAALNDIRYQRLVVELLIKNEDILF

SEQ ID NO: 855546 - protein, 334 aa, Homo sapiens
MPSKESWSGRKTNRAAVHKSKQEGRQQDLLIAALGMKLGSPKSSVTIWQPLKLFAYSQLTSLVRRATLKENEQIPKYEKIHNFKVHTFRGPHWCEYCANFMWGLIAQGVKCADCGLNVHKQCSKMVPNDCKPDLKHVKKVYSCDLTTLVKAHTTKRPMVVDMCIREIESRGLNSEGLYRVSGFSDLIEDVKMAFDRDGEKADISVNMYEDINIITGALKLYFRDLPIPLITYDAYPKFIESAKIMDPDEQLETLHEALKLLPPAHCETLRYLMAHLKRVTLHEKENLMNAENLGIVFGPTLMRSPELDAMAALNDIRYQRLVVELLIKNEDILF

SEQ ID NO: 855547 - protein, 459 aa, Homo sapiens; identical to SEQ ID NO: 855545

SEQ ID NO: 855548 - protein, 288 aa, Homo sapiens
MPSKESWSGRKTNRAAVHKSKQEGRQQDLLIAALGMKLGSPKSSVTIWQPLKLFAYSQLTSLVRRATLKENEQIPKYEKIHNFKVHTFRGPHWCEYCANFMWGLIAQGVKCADCGLNVHKQCSKMVPNDCKPDLKHVKKVYSCDLTTLVKAHTTKRPMVVDMCIREIESRGLNSEGLYRVSGFSDLIEDVKMAFDREIMDPDEQLETLHEALKLLPPAHCETLRYLMAHLKRVTLHEKENLMNAENLGIVFGPTLMRSPELDAMAALNDIRYQRLVVELLIKNEDILF

SEQ ID NO: 855549 - protein, 299 aa, Homo sapiens
MKLGSPKSSVTIWQPLKLFAYSQLTSLVRRATLKENEQIPKYEKIHNFKVHTFRGPHWCEYCANFMWGLIAQGVKCADCGLNVHKQCSKMVPNDCKPDLKHVKKVYSCDLTTLVKAHTTKRPMVVDMCIREIESRGLNSEGLYRVSGFSDLIEDVKMAFDRDGEKADISVNMYEDINIITGALKLYFRDLPIPLITYDAYPKFIESAKIMDPDEQLETLHEALKLLPPAHCETLRYLMAHLKRVTLHEKENLMNAENLGIVFGPTLMRSPELDAMAALNDIRYQRLVVELLIKNEDILF

SEQ ID NO: 855550 - protein, 204 aa, Homo sapiens
MPSKESWSGRKTNRAAVHKSKQEGRQQDLLIAALGMKLGSPKSSVTIWQPLKLFAYSQLTSLVRRATLKENEQIPKYEKIHNFKVHTFRGPHWCEYCANFMWGLIAQGVKCAEIMDPDEQLETLHEALKLLPPAHCETLRYLMAHLKRVTLHEKENLMNAENLGIVFGPTLMRSPELDAMAALNDIRYQRLVVELLIKNEDILF

SEQ ID NO: 855551 - protein, 234 aa, Homo sapiens
MWGLIAQGVKCADCGLNVHKQCSKMVPNDCKPDLKHVKKVYSCDLTTLVKAHTTKRPMVVDMCIREIESRGLNSEGLYRVSGFSDLIEDVKMAFDRDGEKADISVNMYEDINIITGALKLYFRDLPIPLITYDAYPKFIESAKIMDPDEQLETLHEALKLLPPAHCETLRYLMAHLKRVTLHEKENLMNAENLGIVFGPTLMRSPELDAMAALNDIRYQRLVVELLIKNEDILF

SEQ ID NO: 855552 - protein, 324 aa, Homo sapiens
GGVWGSCIMLLILCRIMYLLIAALGMKLGSPKSSVTIWQPLKLFAYSQLTSLVRRATLKENEQIPKYEKIHNFKVHTFRGPHWCEYCANFMWGLIAQGVKCADCGLNVHKQCSKMVPNDCKPDLKHVKKVYSCDLTTLVKAHTTKRPMVVDMCIREIESRGLNSEGLYRVSGFSDLIEDVKMAFDRDGEKADISVNMYEDINIITGALKLYFRDLPIPLITYDAYPKFIESAKIMDPDEQLETLHEALKLLPPAHCETLRYLMAHLKRVTLHEKENLMNAENLGIVFGPTLMRSPELDAMAALNDIRYQRLVVELLIKNEDILF

SEQ ID NO: 855553 - protein, 511 aa, Homo sapiens
WETLSQDGVCEAAGCGVSAPRRGLCEAAAALPVAAAAAASAAPPLRQPLRRGQASCLADTDEYRPPVWKSYLYQLQQEAPHPRRITCTCEVENRPKYYGREFHGMISREAADQLLIVAEGSYLIRESQRQPGTYTLALRFGSQTRNFRLYYDGKHFVGEKRFESIHDLVTDGLITLYIETKAAEYIAKMTINPIYEHVGYTTLNREPAYKKHMPVLKETHDERDSTGQDGVSEKRLTSLVRRATLKENEQIPKYEKIHNFKVHTFRGPHWCEYCANFMWGLIAQGVKCADCGLNVHKQCSKMVPNDCKPDLKHVKKVYSCDLTTLVKAHTTKRPMVVDMCIREIESRGLNSEGLYRVSGFSDLIEDVKMAFDRDGEKADISVNMYEDINIITGALKLYFRDLPIPLITYDAYPKFIESAKIMDPDEQLETLHEALKLLPPAHCETLRYLMAHLKRVTLHEKENLMNAENLGIVFGPTLMRSPELDAMAALNDIRYQRLVVELLIKNEDILF

SEQ ID NO: 855554 - protein, 234 aa, Homo sapiens; identical to SEQ ID NO: 855551

SEQ ID NO: 855555 - protein, 91 aa, Homo sapiens
WETLSQDGVCEAAGCGVSAPRRGLCEAAAALPVAAAAAASAAPPLRQPLRRGQASCLAGTSSRAHAPRLMAATSAGSRRASGAPWARCARQ

SEQ ID NO: 855556 - protein, 334 aa, Homo sapiens; identical to SEQ ID NO: 855546

SEQ ID NO: 855557 - protein, 334 aa, Homo sapiens; identical to SEQ ID NO: 855546

SEQ ID NO: 855558 - protein, 459 aa, Homo sapiens; identical to SEQ ID NO: 855545

SEQ ID NO: 855559 - protein, 334 aa, Homo sapiens; identical to SEQ ID NO: 855546

SEQ ID NO: 855560 - protein, 334 aa, Homo sapiens; identical to SEQ ID NO: 855546

SEQ ID NO: 855561 - protein, 279 aa, Homo sapiens
MTFLTSLVRRATLKENEQIPKYEKIHNFKVHTFRGPHWCEYCANFMWGLIAQGVKCADCGLNVHKQCSKMVPNDCKPDLKHVKKVYSCDLTTLVKAHTTKRPMVVDMCIREIESRGLNSEGLYRVSGFSDLIEDVKMAFDRDGEKADISVNMYEDINIITGALKLYFRDLPIPLITYDAYPKFIESAKIMDPDEQLETLHEALKLLPPAHCETLRYLMAHLKRVTLHEKENLMNAENLGIVFGPTLMRSPELDAMAALNDIRYQRLVVELLIKNEDILF

SEQ ID NO: 855562 - protein, 277 aa, Homo sapiens
MATMGLLMLLTLAASPHFLSICFHHVCVHTFRGPHWCEYCANFMWGLIAQGVKCADCGLNVHKQCSKMVPNDCKPDLKHVKKVYSCDLTTLVKAHTTKRPMVVDMCIREIESRGLNSEGLYRVSGFSDLIEDVKMAFDRDGEKADISVNMYEDINIITGALKLYFRDLPIPLITYDAYPKFIESAKIMDPDEQLETLHEALKLLPPAHCETLRYLMAHLKRVTLHEKENLMNAENLGIVFGPTLMRSPELDAMAALNDIRYQRLVVELLIKNEDILF

SEQ ID NO: 855563 - protein, 482 aa, Homo sapiens
MALTLFDTDEYRPPVWKSYLYQLQQEAPHPRRITCTCEVENRPKYYGREFHGMISREAADQLLIVAEGSYLIRESQRQPGTYTLALRFGSQTRNFRLYYDGKHFVGEKRFESIHDLVTDGLITLYIETKAAEYIAKMTINPIYEHVGYTTLNREPAYKKHMPVLKETHDERDSTGQDGVSEKRVSSNRTGLMTCSTAGNVDSLSQWMTFLTSLVRRATLKENEQIPKYEKIHNFKVHTFRGPHWCEYCANFMWGLIAQGVKCADCGLNVHKQCSKMVPNDCKPDLKHVKKVYSCDLTTLVKAHTTKRPMVVDMCIREIESRGLNSEGLYRVSGFSDLIEDVKMAFDRDGEKADISVNMYEDINIITGALKLYFRDLPIPLITYDAYPKFIESAKKYGSDGALNPYEDETMALVMKPRYQDIKNGLQKGILMETGMWTPIIKNWVSIGKHAGPSRTFNGANNSHIMAIKRNKFDKVIRLLPLL

SEQ ID NO: 855564 - protein, 197 aa, Homo sapiens
MALTLFDTDEYRPPVWKSYLYQLQQEAPHPRRITCTCEVENRPKYYGREFHGMISREAADQLLIVAEGSYLIRESQRQPGTYTLALRFGSQTRNFRLYYDGKHFVGEKRFESIHDLVTDGLITLYIETKAAEYIAKMTINPIYEHVGYTTLNREPAYKKHMPVLKETHDERDSTGQDGVSEKRVSSNRTGLMTCSTA

SEQ ID NO: 855565 - protein, 826 aa, Homo sapiens
MEGAGGANDKKKISSERRKEKSRDAARSRRSKESEVFYELAHQLPLPHNVSSHLDKASVMRLTISYLRVRKLLDAGDLDIEDDMKAQMNCFYLKALDGFVMVLTDDGDMIYISDNVNKYMGLTQFELTGHSVFDFTHPCDHEEMREMLTHRNGLVKKGKEQNTQRSFFLRMKCTLTSRGRTMNIKSATWKVLHCTGHIHVYDTNSNQPQCGYKKPPMTCLVLICEPIPHPSNIEIPLDSKTFLSRHSLDMKFSYCDERITELMGYEPEELLGRSIYEYYHALDSDHLTKTHHDMFTKGQVTTGQYRMLAKRGGYVWVETQATVIYNTKNSQPQCIVCVNYVVSGIIQHDLIFSLQQTECVLKPVESSDMKMTQLFTKVESEDTSSLFDKLKKEPDALTLLAPAAGDTIISLDFGSNDTETDDQQLEEVPLYNDVMLPSPNEKLQNINLAMSPLPTAETPKPLRSSADPALNQEVALKLEPNPESLELSFTMPQIQDQTPSPSDGSTRQSSPEPNSPSEYCFYVDSDMVNEFKLELVEKLFAEDTEAKNPFSTQDTDLDLEMLAPYIPMDDDFQLRSFDQLSPLESSSASPESASPQSTVTVFQQTQIQEPTANATTTTATTDELKTVTKDRMEDIKILIASPSPTHIHKETTSATSSPYRDTQSRTASPNRAGKGVIEQTEKSHPRSPNVLSVALSQRTTVPEEELNPKILALQNAQRKRKMEHDGSLFQAVGIGTLLQQPDDHAATTSLSWKRVKGCKSSEQNGMEQKTIILIPSDLACRLLGQSMDESGLPQLTSYDCEVNAPIQGSRNLLQGEELLRALDQVN

SEQ ID NO: 855566 - protein, 826 aa, Homo sapiens; identical to SEQ ID NO: 855565

SEQ ID NO: 855567 - protein, 834 aa, Homo sapiens
SLTVHLSKICARHCILQYWQISSERRKEKSRDAARSRRSKESEVFYELAHQLPLPHNVSSHLDKASVMRLTISYLRVRKLLDAGDLDIEDDMKAQMNCFYLKALDGFVMVLTDDGDMIYISDNVNKYMGLTQFELTGHSVFDFTHPCDHEEMREMLTHRNGLVKKGKEQNTQRSFFLRMKCTLTSRGRTMNIKSATWKVLHCTGHIHVYDTNSNQPQCGYKKPPMTCLVLICEPIPHPSNIEIPLDSKTFLSRHSLDMKFSYCDERITELMGYEPEELLGRSIYEYYHALDSDHLTKTHHDMFTKGQVTTGQYRMLAKRGGYVWVETQATVIYNTKNSQPQCIVCVNYVVSGIIQHDLIFSLQQTECVLKPVESSDMKMTQLFTKVESEDTSSLFDKLKKEPDALTLLAPAAGDTIISLDFGSNDTETDDQQLEEVPLYNDVMLPSPNEKLQNINLAMSPLPTAETPKPLRSSADPALNQEVALKLEPNPESLELSFTMPQIQDQTPSPSDGSTRQSSPEPNSPSEYCFYVDSDMVNEFKLELVEKLFAEDTEAKNPFSTQDTDLDLEMLAPYIPMDDDFQLRSFDQLSPLESSSASPESASPQSTVTVFQQTQIQEPTANATTTTATTDELKTVTKDRMEDIKILIASPSPTHIHKETTSATSSPYRDTQSRTASPNRAGKGVIEQTEKSHPRSPNVLSVALSQRTTVPEEELNPKILALQNAQRKRKMEHDGSLFQAVGIGTLLQQPDDHAATTSLSWKRVKGCKSSEQNGMEQKTIILIPSDLACRLLGQSMDESGLPQLTSYDCEVNAPIQGSRNLLQGEELLRALDQVN

SEQ ID NO: 855568 - protein, 645 aa, Homo sapiens
GSRDSVRWKVLHCTGHIHVYDTNSNQPQCGYKKPPMTCLVLICEPIPHPSNIEIPLDSKTFLSRHSLDMKFSYCDERITELMGYEPEELLGRSIYEYYHALDSDHLTKTHHDMFTKGQVTTGQYRMLAKRGGYVWVETQATVIYNTKNSQPQCIVCVNYVVSGIIQHDLIFSLQQTECVLKPVESSDMKMTQLFTKVESEDTSSLFDKLKKEPDALTLLAPAAGDTIISLDFGSNDTETDDQQLEEVPLYNDVMLPSPNEKLQNINLAMSPLPTAETPKPLRSSADPALNQEVALKLEPNPESLELSFTMPQIQDQTPSPSDGSTRQSSPEPNSPSEYCFYVDSDMVNEFKLELVEKLFAEDTEAKNPFSTQDTDLDLEMLAPYIPMDDDFQLRSFDQLSPLESSSASPESASPQSTVTVFQQTQIQEPTANATTTTATTDELKTVTKDRMEDIKILIASPSPTHIHKETTSATSSPYRDTQSRTASPNRAGKGVIEQTEKSHPRSPNVLSVALSQRTTVPEEELNPKILALQNAQRKRKMEHDGSLFQAVGIGTLLQQPDDHAATTSLSWKRVKGCKSSEQNGMEQKTIILIPSDLACRLLGQSMDESGLPQLTSYDCEVNAPIQGSRNLLQGEELLRALDQVN

SEQ ID NO: 855569 - protein, 610 aa, Homo sapiens
MTCLVLICEPIPHPSNIEIPLDSKTFLSRHSLDMKFSYCDERITELMGYEPEELLGRSIYEYYHALDSDHLTKTHHDMFTKGQVTTGQYRMLAKRGGYVWVETQATVIYNTKNSQPQCIVCVNYVVSGIIQHDLIFSLQQTECVLKPVESSDMKMTQLFTKVESEDTSSLFDKLKKEPDALTLLAPAAGDTIISLDFGSNDTETDDQQLEEVPLYNDVMLPSPNEKLQNINLAMSPLPTAETPKPLRSSADPALNQEVALKLEPNPESLELSFTMPQIQDQTPSPSDGSTRQSSPEPNSPSEYCFYVDSDMVNEFKLELVEKLFAEDTEAKNPFSTQDTDLDLEMLAPYIPMDDDFQLRSFDQLSPLESSSASPESASPQSTVTVFQQTQIQEPTANATTTTATTDELKTVTKDRMEDIKILIASPSPTHIHKETTSATSSPYRDTQSRTASPNRAGKGVIEQTEKSHPRSPNVLSVALSQRTTVPEEELNPKILALQNAQRKRKMEHDGSLFQAVGIGTLLQQPDDHAATTSLSWKRVKGCKSSEQNGMEQKTIILIPSDLACRLLGQSMDESGLPQLTSYDCEVNAPIQGSRNLLQGEELLRALDQVN

SEQ ID NO: 855570 - protein, 386 aa, Homo sapiens
MEGAGGANDKKKISSERRKEKSRDAARSRRSKESEVFYELAHQLPLPHNVSSHLDKASVMRLTISYLRVRKLLDAGDLDIEDDMKAQMNCFYLKALDGFVMVLTDDGDMIYISDNVNKYMGLTQFELTGHSVFDFTHPCDHEEMREMLTHRNGLVKKGKEQNTQRSFFLRMKCTLTSRGRTMNIKSATWKVLHCTGHIHVYDTNSNQPQCGYKKPPMTCLVLICEPIPHPSNIEIPLDSKTFLSRHSLDMKFSYCDERITELMGYEPEELLGRSIYEYYHALDSDHLTKTHHDMFTKGQVTTGQYRMLAKRGGYVWVETQATVIYNTKNSQPQCIVCVNYVVSGIIQHDLIFSLQQTECVLKPVESSDMKMTQLFTKVESEDTKGT

SEQ ID NO: 855571 - protein, 826 aa, Homo sapiens; identical to SEQ ID NO: 855565

SEQ ID NO: 855572 - protein, 735 aa, Homo sapiens
MEGAGGANDKKKISSERRKEKSRDAARSRRSKESEVFYELAHQLPLPHNVSSHLDKASVMRLTISYLRVRKLLDAGDLDIEDDMKAQMNCFYLKALDGFVMVLTDDGDMIYISDNVNKYMGLTQFELTGHSVFDFTHPCDHEEMREMLTHRNGLVKKGKEQNTQRSFFLRMKCTLTSRGRTMNIKSATWKVLHCTGHIHVYDTNSNQPQCGYKKPPMTCLVLICEPIPHPSNIEIPLDSKTFLSRHSLDMKFSYCDERITELMGYEPEELLGRSIYEYYHALDSDHLTKTHHDMFTKGQVTTGQYRMLAKRGGYVWVETQATVIYNTKNSQPQCIVCVNYVVSGIIQHDLIFSLQQTECVLKPVESSDMKMTQLFTKVESEDTSSLFDKLKKEPDALTLLAPAAGDTIISLDFGSNDTETDDQQLEEVPLYNDVMLPSPNEKLQNINLAMSPLPTAETPKPLRSSADPALNQEVALKLEPNPESLELSFTMPQIQDQTPSPSDGSTRQSSPEPNSPSEYCFYVDSDMVNEFKLELVEKLFAEDTEAKNPFSTQDTDLDLEMLAPYIPMDDDFQLRSFDQLSPLESSSASPESASPQSTVTVFQQTQIQEPTANATTTTATTDELKTVTKDRMEDIKILIASPSPTHIHKETTSATSSPYRDTQSRTASPNRAGKGVIEQTEKSHPRSPNVLSVALSQRTTVPEEELNPKILALQNAQRKRKMEHDGSLFQAVGII

SEQ ID NO: 855573 - protein, 300 aa, Homo sapiens [sequence omitted]

SEQ ID NO: 855574 - protein, 237 aa, Homo sapiens
PTHIHKETTSATSSPYRDTINDANATTTTATTDELKTVTKDRMEDIKILIASPSPTHIHKETTSATSSPYRDTQSRTASPNRAGKGVIEQTEKSHPRSPNVLSVALSQRTTVPEEELNPKILALQNAQRKRKMEHDGSLFQAVGIGTLLQQPDDHAATTSLSWKRVKGCKSSEQNGMEQKTIILIPSDLACRLLGQSMDESGLPQLTSYDCEVNAPIQGSRNLLQGEELLRALDQVN

SEQ ID NO: 855575 - protein, 202 aa, Homo sapiens
SESTRTRLHPAHNTWKLNKAKSIHKETTSATSSPYRDTQSRTASPNRAGKGVIEQTEKSHPRSPNVLSVALSQRTTVPEEELNPKILALQNAQRKRKMEHDGSLFQAVGIGTLLQQPDDHAATTSLSWKRVKGCKSSEQNGMEQKTIILIPSDLACRLLGQSMDESGLPQLTSYDCEVNAPIQGSRNLLQGEELLRALDQVN

SEQ ID NO: 855576 - protein, 599 aa, Homo sapiens
MEGAGGANDKKKISSERRKEKSRDAARSRRSKESEVFYELAHQLPLPHNVSSHLDKASVMRLTISYLRVRKLLDAGDLDIEDDMKAQMNCFYLKALDGFVMVLTDDGDMIYISDNVNKYMGLTQFELTGHSVFDFTHPCDHEEMREMLTHRNGLVKKGKEQNTQRSFFLRMKCTLTSRGRTMNIKSATWKVLHCTGHIHVYDTNSNQPQCGYKKPPMTCLVLICEPIPHPSNIEIPLDSKTFLSRHSLDMKFSYCDERITELMGYEPEELLGRSIYEYYHALDSDHLTKTHHDMFTKGQVTTGQYRMLAKRGGYVWVETQATVIYNTKNSQPQCIVCVNYVVSGIIQHDLIFSLQQTECVLKPVESSDMKMTQLFTKVESEDTSSLFDKLKKEPDALTLLAPAAGDTIISLDFGSNDTETDDQQLEEVPLYNDVMLPSPNEKLQNINLAMSPLPTAETPKPLRSSADPALNQEVALKLEPNPESLELSFTMPQIQDQTPSPSDGSTRQSSPEPNSPSEYCFYVDSDMVNEFKLELVEKLFAEDTEAKNPFSTQDTDLDLEMLAPYIPMDDDFQFRRLVHRQHFNPSPLPRISNPYTHLP

SEQ ID NO: 855577 - protein, 574 aa, Homo sapiens
MEGAGGANDKKKISSERRKEKSRDAARSRRSKESEVFYELAHQLPLPHNVSSHLDKASVMRLTISYLRVRKLLDAGDLDIEDDMKAQMNCFYLKALDGFVMVLTDDGDMIYISDNVNKYMGLTQFELTGHSVFDFTHPCDHEEMREMLTHRNGLVKKGKEQNTQRSFFLRMKCTLTSRGRTMNIKSATWKVLHCTGHIHVYDTNSNQPQCGYKKPPMTCLVLICEPIPHPSNIEIPLDSKTFLSRHSLDMKFSYCDERITELMGYEPEELLGRSIYEYYHALDSDHLTKTHHDMFTKGQVTTGQYRMLAKRGGYVWVETQATVIYNTKNSQPQCIVCVNYVVSGIIQHDLIFSLQQTECVLKPVESSDMKMTQLFTKVESEDTSSLFDKLKKEPDALTLLAPAAGDTIISLDFGSNDTETDDQQLEEVPLYNDVMLPSPNEKLQNINLAMSPLPTAETPKPLRSSADPALNQEVALKLEPNPESLELSFTMPQIQDQTPSPSDGSTRQSSPEPNSPSEYCFYVDSDMVNEFKLELVEKLFAEDTEAKNPFSTQDTDLDLEMLAPYIPAHVAGPS

SEQ ID NO: 855578 - protein, 211 aa, Homo sapiens
MEGAGGANDKKKISSERRKEKSRDAARSRRSKESEVFYELAHQLPLPHNVSSHLDKASVMRLTISYLRVRKLLDAGDLDIEDDMKAQMNCFYLKALDGFVMVLTDDGDMIYISDNVNKYMGLTQFEPSWTQCVRFYSLACDIEAMRELALPRRACETGQPHTHQEFPHKEMALNARRTYLSGPGGLAEGHSHMSPRTPAGKPQSGRWTSTT

SEQ ID NO: 855579 - protein, 826 aa, Homo sapiens; identical to SEQ ID NO: 855565

SEQ ID NO: 855580 - protein, 691 aa, Homo sapiens
  misc_feature (3)..(4): Xaa can be any naturally occurring amino acid
PIXXWPGEMREMLTHRNGLVKKGKEQNTQRSFFLRMKCTLTSRGRTMNIKSATWKVLHCTGHIHVYDTNSNQPQCGYKKPPMTCLVLICEPIPHPSNIEIPLDSKTFLSRHSLDMKFSYCDERITELMGYEPEELLGRSIYEYYHALDSDHLTKTHHDMFTKGQVTTGQYRMLAKRGGYVWVETQATVIYNTKNSQPQCIVCVNYVVSGIIQHDLIFSLQQTECVLKPVESSDMKMTQLFTKVESEDTSSLFDKLKKEPDALTLLAPAAGDTIISLDFGSNDTETDDQQLEEVPLYNDVMLPSPNEKLQNINLAMSPLPTAETPKPLRSSADPALNQEVALKLEPNPESLELSFTMPQIQDQTPSPSDGSTRQSSPEPNSPSEYCFYVDSDMVNEFKLELVEKLFAEDTEAKNPFSTQDTDLDLEMLAPYIPMDDDFQLRSFDQLSPLESSSASPESASPQSTVTVFQQTQIQEPTANATTTTATTDELKTVTKDRMEDIKILIASPSPTHIHKETTSATSSPYRDTQSRTASPNRAGKGVIEQTEKSHPRSPNVLSVALSQRTTVPEEELNPKILALQNAQRKRKMEHDGSLFQAVGIGTLLQQPDDHAATTSLSWKRVKGCKSSEQNGMEQKTIILIPSDLACRLLGQSMDESGLPQLTSYDCEVNAPIQGSRNLLQGEELLRALDQVN

SEQ ID NO: 855581 - protein, 785 aa, Homo sapiens
MEGAGGANDKKKISSERRKEKSRDAARSRRSKESEVFYELAHQLPLPHNVSSHLDKASVMRLTISYLRVRKLLDAGDLDIEDDMKAQMNCFYLKALDGFVMVLTDDGDMIYISDNVNKYMGLTQFELTGHSVFDFTHPCDHEEMREMLTHRNGLVKKGKEQNTQRSFFLRMKCTLTSRGRTMNIKSATWKVLHCTGHIHVYDTNSNQPQCGYKKPPMTCLVLICEPIPHPSNIEIPLDSKTFLSRHSLDMKFSYCDERITELMGYEPEELLGRSIYEYYHALDSDHLTKTHHDMFTKGQVTTGQYRMLAKRGGYVWVETQATVIYNTKNSQPQCIVCVNYVVSGIIQHDLIFSLQQTECVLKPVESSDMKMTQLFTKVESEDTSSLFDKLKKEPDALTLLAPAAGDTIISLDFGSNDTETDDQQLEEVPLYNDVMLPSPNEKLQNINLAMSPLPTAETPKPLRSSADPALNQEVALKLEPNPESLELSFTMPQIQDQTPSPSDGSTRQSSPEDTDLDLEMLAPYIPMDDDFQLRSFDQLSPLESSSASPESASPQSTVTVFQQTQIQEPTANATTTTATTDELKTVTKDRMEDIKILIASPSPTHIHKETTSATSSPYRDTQSRTASPNRAGKGVIEQTEKSHPRSPNVLSVALSQRTTVPEEELNPKILALQNAQRKRKMEHDGSLFQAVGIGTLLQQPDDHAATTSLSWKRVKGCKSSEQNGMEQKTIILIPSDLACRLLGQSMDESGLPQLTSYDCEVNAPIQGSRNLLQGEELLRALDQVN

SEQ ID NO: 855582 - protein, 417 aa, Homo sapiens
MEGAGGANDKKKISSERRKEKSRDAARSRRSKESEVFYELAHQLPLPHNVSSHLDKASVMRLTISYLRVRKLLDAGDLDIEDDMKAQMNCFYLKALDGFVMVLTDDGDMIYISDNVNKYMGLTQFELTGHSVFDFTHPCDHEEMREMLTHRNGLVKKGKEQNTQRSFFLRMKCTLTSRGRTMNIKSATWKVLHCTGHIHVYDTNSNQPQCGYKKPPMTCLVLICEPIPHPSNIEIPLDSKTFLSRHSLDMKFSYCDERITELMGYEPEELLGRSIYEYYHALDSDHLTKTHHDMFTKGQVTTGQYRMLAKRGGYVWVETQATVIYNTKNSQPQCIVCVNYVVSGIIQHDLIFSLQQTECVLKPVESSDMKMTQLFTKVESEDTSSLFDKLKKEPDALTLLAPAAGDTIISLDFGSNA

SEQ ID NO: 855583 - protein, 427 aa, Homo sapiens
MEGAGGANDKKKISSERRKEKSRDAARSRRSKESEVFYELAHQLPLPHNVSSHLDKASVMRLTISYLRVRKLLDAGDLDIEDDMKAQMNCFYLKALDGFVMVLTDDGDMIYISDNVNKYMGLTQFELTGHSVFDFTHPCDHEEMREMLTHRNGLVKKGKEQNTQRSFFLRMKCTLTSRGRTMNIKSATWKVLHCTGHIHVYDTNSNQPQCGYKKPPMTCLVLICEPIPHPSNIEIPLDSKTFLSRHSLDMKFSYCDERITELMGYEPEELLGRSIYEYYHALDSDHLTKTHHDMFTKGQVTTGQYRMLAKRGGYVWVETQATVIYNTKNSQPQCIVCVNYVVSGIIQHDLIFSLQQTECVLKPVESSDMKMTQLFTKVESEDTSSLFDKLKKEPDALTLLAPAAGDTIISLDFGSNVIWSMNSSWNW

SEQ ID NO: 855584 - protein, 503 aa, Homo sapiens
HQNVRNENDKDVNQQANSAVGIIQHDLIFSLQQTECVLKPVESSDMKMTQLFTKVESEDTSSLFDKLKKEPDALTLLAPAAGDTIISLDFGSNDTETDDQQLEEVPLYNDVMLPSPNEKLQNINLAMSPLPTAETPKPLRSSADPALNQEVALKLEPNPESLELSFTMPQIQDQTPSPSDGSTRQSSPEPNSPSEYCFYVDSDMVNEFKLELVEKLFAEDTEAKNPFSTQDTDLDLEMLAPYIPMDDDFQLRSFDQLSPLESSSASPESASPQSTVTVFQQTQIQEPTANATTTTATTDELKTVTKDRMEDIKILIASPSPTHIHKETTSATSSPYRDTQSRTASPNRAGKGVIEQTEKSHPRSPNVLSVALSQRTTVPEEELNPKILALQNAQRKRKMEHDGSLFQAVGIGTLLQQPDDHAATTSLSWKRVKGCKSSEQNGMEQKTIILIPSDLACRLLGQSMDESGLPQLTSYDCEVNAPIQGSRNLLQGEELLRALDQVN

SEQ ID NO: 855585 - protein, 255 aa, Homo sapiens
MTLQIKYDQPVRTSSSASPESASPQSTVTVFQQTQIQEPTANATTTTATTDELKTVTKDRMEDIKILIASPSPTHIHKETTSATSSPYRDTQSRTASPNRAGKGVIEQTEKSHPRSPNVLSVALSQRTTVPEEELNPKILALQNAQRKRKMEHDGSLFQAVGIGTLLQQPDDHAATTSLSWKRVKGCKSSEQNGMEQKTIILIPSDLACRLLGQSMDESGLPQLTSYDCEVNAPIQGSRNLLQGEELLRALDQVN

SEQ ID NO: 855586 - protein, 723 aa, Homo sapiens
MEGAGGANDKKKISSERRKEKSRDAARSRRSKESEVFYELAHQLPLPHNVSSHLDKASVMRLTISYLRVRKLLDAGDLDIEDDMKAQMNCFYLKALDGFVMVLTDDGDMIYISDNVNKYMGLTQFELTGHSVFDFTHPCDHEEMREMLTHRNGLVKKGKEQNTQRSFFLRMKCTLTSRGRTMNIKSATWKVLHCTGHIHVYDTNSNQPQCGYKKPPMTCLVLICEPIPHPSNIEIPLDSKTFLSRHSLDMKFSYCDERITELMGYEPEELLGRSIYEYYHALDSDHLTKTHHDMFTKGQVTTGQYRMLAKRGGYVWVETQATVIYNTKNSQPQCIVCVNYVVSGIIQHDLIFSLQQTECVLKPVESSDMKMTQLFTKVESEDTSSLFDKLKKEPDALTLLAPAAGDTIISLDFGSNDTETDDQQLEEVPLYNDVMLPSPNEKLQNINLAMSPLPTAETPKPLRSSADPALNQEVALKLEPNPESLELSFTMPQIQDQTPSPSDGSTRQSSPEPNSPSEYCFYVDSDMVNEFKLELVEKLFAEDTEAKNPFSTQDTDLDLEMLAPYIPMDDDFQLRSFDQLSPLESSSASPESASPQSTVTVFQQTQIQEPTANATTTTATTDELKTVTKDRMEDIKILIASPSPTHIHKETTSATSSPYRDTQSRTASPNRAGKGVIEQTEKSHPRSPNVLSVALSQRTTVPEEELNPKILALQNVRALDQVN

SEQ ID NO: 855587 - protein, 715 aa, Homo sapiens
  misc_feature (698)..(698): Xaa can be any naturally occurring amino acid
  misc_feature (700)..(700): Xaa can be any naturally occurring amino acid
  misc_feature (712)..(712): Xaa can be any naturally occurring amino acid
MEGAGGANDKKKISSERRKEKSRDAARSRRSKESEVFYELAHQLPLPHNVSSHLDKASVMRLTISYLRVRKLLDAGDLDIEDDMKAQMNCFYLKALDGFVMVLTDDGDMIYISDNVNKYMGLTQFELTGHSVFDFTHPCDHEEMREMLTHRNGLVKKGKEQNTQRSFFLRMKCTLTSRGRTMNIKSATWKVLHCTGHIHVYDTNSNQPQCGYKKPPMTCLVLICEPIPHPSNIEIPLDSKTFLSRHSLDMKFSYCDERITELMGYEPEELLGRSIYEYYHALDSDHLTKTHHDMFTKGQVTTGQYRMLAKRGGYVWVETQATVIYNTKNSQPQCIVCVNYVVSGIIQHDLIFSLQQTECVLKPVESSDMKMTQLFTKVESEDTSSLFDKLKKEPDALTLLAPAAGDTIISLDFGSNDTETDDQQLEEVPLYNDVMLPSPNEKLQNINLAMSPLPTAETPKPLRSSADPALNQEVALKLEPNPESLELSFTMPQIQDQTPSPSDGSTRQSSPEPNSPSEYCFYVDSDMVNEFKLELVEKLFAEDTEAKNPFSTQDTDLDLEMLAPYIPMDDDFQLRSFDQLSPLESSSASPESASPQSTVTVFQQTQIQEPTANATTTTATTDELKTVTKDRMEDIKILIASPSPTHIHKETTSATSSPYRDTQSRTASPNRAGKGVIEQTEKSHPRSPNVLSVALSQXNXPGFSPLLGKGGXKKR

SEQ ID NO: 855588 - protein, 418 aa, Homo sapiens
MEGAGGANDKKKISSERRKEKSRDAARSRRSKESEVFYELAHQLPLPHNVSSHLDKASVMRLTISYLRVRKLLDAGDLDIEDDMKAQMNCFYLKALDGFVMVLTDDGDMIYISDNVNKYMGLTQFELTGHSVFDFTHPCDHEEMREMLTHRNGLVKKGKEQNTQRSFFLRMKCTLTSRGRTMNIKSATWKVLHCTGHIHVYDTNSNQPQCGYKKPPMTCLVLICEPIPHPSNIEIPLDSKTFLSRHSLDMKFSYCDERITELMGYEPEELLGRSIYEYYHALDSDHLTKTHHDMFTKGQVTTGQYRMLAKRGGYVWVETQATVIYNTKNSQPQCIVCVNYVVSGIIQHDLIFSLQQTECVLKPVESSDMKMTQLFTKVESEDTSSLFDKLKKEPDALTLLAPAAGDTIISLDFGSNGE

SEQ ID NO: 855589 - protein, 352 aa, Homo sapiens
MNTTSSAAPPSLGVEFISLLAIILLSVALAVGLPGNSFVVWSILKRMQKRSVTALMVLNLALADLAVLLTAPFFLHFLAQGTWSFGLAGCRLCHYVCGVSMYASVLLITAMSLDRSLAVARPFVSQKLRTKAMARRVLAGIWVLSFLLATPVLAYRTVVPWKTNMSLCFPRYPSEGHRAFHLIFEAVTGFLLPFLAVVASYSDIGRRLQARRFRRSRRTGRLVVLIILTFAAFWLPYHVVNLAEAGRALAGQAAGLGLVGKRLSLARNVLIALAFLSSSVNPVLYACAGGGLLRSAGVGFVAKLLEGTGSEASSTRRGGSLGQTARSGPAALEPGPSESLTASSPLKLNELN

SEQ ID NO: 855590 - protein, 1170 aa, Homo sapiens
MCSWCPPQATSSSGCYLSRGLSFPFPQLYPSARPPSNLFISKFCLTFPRGEGCFLVCPYSSFPFLSCILVQPGNVGLFMVVCHDSLTIMPPCIPCSSWNLAPCLTWKSCHCQPGESPEGGVTGAGPEAKRWEEVGGQGLSRTRRLETGKDKAGGGLSCLGHLCRPERPGNIHTAEGGLGGLGPELGEEMRTEAGPGFSRVLLFPSTTRESYCPTSACAVSWQGRLSHAWTPGCVGDGKEQGEGGAPGEAQDEPHLVPPHSCLTLCKCDRHRTGVGTSPTAAYPFSFSRPPILLAPSLVSRSVHVPLHPTIQFCPDVLEWGWTRRRGQTRGVVVEIVTAWGEDFYACLPLSSGKEARSGAGQLTGSRGSGFQEGVVFEVGSGSSWKSGLPGRKEAGCREVRRRHGTFSSGITGGVCPTPERPLWRLPPTCRPRRMSVCYRPPGNETLLSWKTSRATGTAFLLLAALLGLPGNGFVVWSLAGWRPARGRPLAATLVLHLALADGAVLLLTPLFVAFLTRQAWPLGQAGCKAVYYVCALSMYASVLLTGLLSLQRCLAVTRPFLAPRLRSPALARRLLLAVWLAALLLAVPAAVYRHLWRDRVCQLCHPSPVHAAAHLSLETLTAFVLPFGLMLGCYSVTLARLRGARWGSGRHGARVGRLVSAIVLAFGLLWAPYHAVNLLQAVAALAPPEGALAKLGGAGQAARAGTTALAFFSSSVNPVLYVFTAGDLLPRAGPRFLTRLFEGSGEARGGGRSREGTMELRTTPQLKVVGQGRGNGDPGGGMEKDGPDGTFDSRPYNLLPFPGPFPPPTHPPEVLPTAMNTTSSAAPPSLGVEFISLLAIILLSVALAVGLPGNSFVVWSILKRMQKRSVTALMVLNLALADLAVLLTAPFFLHFLAQGTWSFGLAGCRLCHYVCGVSMYASVLLITAMSLDRSLAVARPFVSQKLRTKAMARRVLAGIWVLSFLLATPVLAYRTVVPWKTNMSLCFPRYPSEGHRAFHLIFEAVTGFLLPFLAVVASYSDIGRRLQARRFRRSRRTGRLVVLIILTFAAFWLPYHVVNLAEAGRALAGQAAGLGLVGKRLSLARNVLIALAFLSSSVNPVLYACAGGGLLRSAGVGFVAKLLEGTGSEASSTRRGGSLGQTARSGPAALEPGPSESLTASSPLKLNELN

SEQ ID NO: 855591 - protein, 982 aa, Homo sapiens
MRTEAGPGFSRVLLFPSTTRESYCPTSACAVSWQGRLSHAWTPGCVGDGKEQGEGGAPGEAQDEPHLVPPHSCLTLCKCDRHRTGVGTSPTAAEPFSFSRPPILLAPSLVSRSVHVPLHPTIQFCPDVLEWGWTRRRGQTRGVVVEIVTAWGEDFYACLPLSSGKEARSGAGQLTGSRGSGFQEGVVFEVGSGSSWKSGLPGRKEAGCREVRRRHGTFSSGITGGVCPTPERPLWRLPPTCRPRRMSVCYRPPGNETLLSWKTSRATGTAFLLLAALLGLPGNGFVVWSLAGWRPARGRPLAATLVLHLALADGAVLLLTPLFVAFLTRQAWPLGQAGCKAVYYVCALSMYASVLLTGLLSLQRCLAVTRPFLAPRLRSPALARRLLLAVWLAALLLAVPAAVYRHLWRDRVCQLCHPSPVHAAAHLSLETLTAFVLPFGLMLGCYSVTLARLRGARWGSGRHGARVGRLVSAIVLAFGLLWAPYHAVNLLQAVAALAPPEGALAKLGGAGQAARAGTTALAFFSSSVNPVLYVFTAGDLLPRAGPRFLTRLFEGSGEARGGGRSREGTMELRTTPQLKVVGQGRGNGDPGGGMEKDGPDGTFDSRPYNLLPFPVPFHPPPTLQKVLPTAMNTTSSAAPPSLGVEFISLLAIILLSVALAVGLPGNSFVVWSILKRMQKRSVTALMVLNLALADLAVLLTAPFFLHFLAQGTWSFGLAGCRLCHYVCGVSMYASVLLITAMSLDRSLAVARPFVSQKLRTKAMARRVLAGIWVLSFLLATPVLAYRTVVPWKTNMSLCFPRYPSEGHRAFHLIFEAVTGFLLPFLAVVASYSDIGRRLQARRFRRSRRTGRLVVLIILTFAAFWLPYHVVNLAEAGRALAGQAAGLGLVGKRLSLARNVLIALAFLSSSVNPVLYACAGGGLLRSAGVGFVAKLLEGTGSEASSTRRGGSLGQTARSGPAALEPGPSESLTASSPLKLNELN

SEQ ID NO: 855592 - protein, 737 aa, Homo sapiens
MSVCYRPPGNETLLSWKTSRATGTAFLLLAALLGLPGNGFVVWSLAGWRPARGRPLAATLVLHLALADGAVLLLTPLFVAFLTRQAWPLGQAGCKAVYYVCALSMYASVLLTGLLSLQRCLAVTRPFLAPRLRSPALARRLLLAVWLAALLLAVPAAVYRHLWRDRVCQLCHPSPVHAAAHLSLETLTAFVLPFGLMLGCYSVTLARLRGARWGSGRHGARVGRLVSAIVLAFGLLWAPYHAVNLLQAVAALAPPEGALAKLGGAGQAARAGTTALAFFSSSVNPVLYVFTAGDLLPRAGPRFLTRLFEGSGEARGGGRSREGTMELRTTPQLKVVGQGRGNGDPGGGMEKDGPDGTFDSRPYNLLPFPGPFPPPTHPPEVLPTAMNTTSSAAPPSLGVEFISLLAIILLSVALAVGLPGNSFVVWSILKRMQKRSVTALMVLNLALADLAVLLTAPFFLHFLAQGTWSFGLAGCRLCHYVCGVSMYASVLLITAMSLDRSLAVARPFVSQKLRTKAMARRVLAGIWVLSFLLATPVLAYRTVVPWKTNMSLCFPRYPSEGHRAFHLIFEAVTGFLLPFLAVVASYSDIGRRLQARRFRRSRRTGRLVVLIILTFAAFWLPYHVVNLAEAGRALAGQAAGLGLVGKRLSLARNVLIALAFLSSSVNPVLYACAGGGLLRSAGVGFVAKLLEGTGSEASSTRRGGSLGQTARSGPAALEPGPSESLTASSPLKLNELN

SEQ ID NO: 855593 - protein, 90 aa, Homo sapiens
SIQGQYVALACSRHGSRVLDAIWSGAALRARKEIAAELGEQNQELIRDPFGHHVARNVALTTFLKRREAWEQQQGAVAKRRRALNSILED

SEQ ID NO: 855594 - protein, 737 aa, Homo sapiens; identical to SEQ ID NO: 855592

SEQ ID NO: 855595 - protein, 377 aa, Homo sapiens
MASGNPWSSTLMRVSALTLQVLPTAMNTTSSAAPPSLGVEFISLLAIILLSVALAVGLPGNSFVVWSILKRMQKRSVTALMVLNLALADLAVLLTAPFFLHFLAQGTWSFGLAGCRLCHYVCGVSMYASVLLITAMSLDRSLAVARPFVSQKLRTKAMARRVLAGIWVLSFLLATPVLAYRTVVPWKTNMSLCFPRYPSEGHRAFHLIFEAVTGFLLPFLAVVASYSDIGRRLQARRFRRSRRTGRLVVLIILTFAAFWLPYHVVNLAEAGRALAGQAAGLGLVGKRLSLARNVLIALAFLSSSVNPVLYACAGGGLLRSAGVGFVAKLLEGTGSEASSTRRGGSLGQTARSGPAALEPGPSESLTASSPLKLNELN

SEQ ID NO: 855596 - protein, 252 aa, Homo sapiens [sequence omitted]

SEQ ID NO: 855597 - protein, 1013 aa, Homo sapiens
MFGSPLQARETRQHTHCRRWAGRIGARAGGGMRTEAGPGFSRVLLFPSTTRESYCPTSACAVSWQGRLSHAWTPGCVGDGKEQGEGGAPGEAQDEPHLVPPHSCLTLCKCDRHRTGVGTSPTAAYPFSFSRPPILLAPSLVSRSVHVPLHPTIQFCPDVLEWGWTRRRGQTRGVVVEIVTAWGEDFYACLPLSSGKEARSGAGQLTGSRGSGFQEGVVFEVGSGSSWKSGLPGRKEAGCREVRRRHGTFSSGITGGVCPTPERPLWRLPPTCRPRRMSVCYRPPGNETLLSWKTSRATGTAFLLLAALLGLPGNGFVVWSLAGWRPARGRPLAATLVLHLALADGAVLLLTPLFVAFLTRQAWPLGQAGCKAVYYVCALSMYASVLLTGLLSLQRCLAVTRPFLAPRLRSPALARRLLLAVWLAALLLAVPAAVYRHLWRDRVCQLCHPSPVHAAAHLSLETLTAFVLPFGLMLGCYSVTLARLRGARWGSGRHGARVGRLVSAIVLAFGLLWAPYHAVNLLQAVAALAPPEGALAKLGGAGQAARAGTTALAFFSSSVNPVLYVFTAGDLLPRAGPRFLTRLFEGSGEARGGGRSREGTMELRTTPQLKVVGQGRGNGDPGGGMEKDGPDGTFDSRPYNLLPFPGPFPPPTHPPEVLPTAMNTTSSAAPPSLGVEFISLLAIILLSVALAVGLPGNSFVVWSILKRMQKRSVTALMVLNLALADLAVLLTAPFFLHFLAQGTWSFGLAGCRLCHYVCGVSMYASVLLITAMSLDRSLAVARPFVSQKLRTKAMARRVLAGIWVLSFLLATPVLAYRTVVPWKTNMSLCFPRYPSEGHRAFHLIFEAVTGFLLPFLAVVASYSDIGRRLQARRFRRSRRTGRLVVLIILTFAAFWLPYHVVNLAEAGRALAGQAAGLGLVGKRLSLARNVLIALAFLSSSVNPVLYACAGGGLLRSAGVGFVAKLLEGTGSEASSTRRGGSLGQTARSGPAALEPGPSESLTASSPLKLNELN

SEQ ID NO: 855598 - protein, 90 aa, Homo sapiens; identical to SEQ ID NO: 855593

SEQ ID NO: 855599 - protein, 90 aa, Homo sapiens; identical to SEQ ID NO: 855593

SEQ ID NO: 855600 - protein, 155 aa, Homo sapiens
MDIFDMFFGGGGRMARERRGKNVVHQLSVTLEDLYNGVTKKLALQKNVICEKCEGVGGKKGSVEKCPLCKGRGMQIHIQQIGPGMVQQIQTVCIECKGQGERINPKDRCESCSGAKVIREKKIIEVHVEKGEAAQSWCSTRAGNAVWVLIVRYTD

SEQ ID NO: 855601 - protein, 197 aa, Homo sapiens
SGVPPFGAGLRPTQPSRPPTLQPAGSTDPRKGKGAASGRRDSCRRAPSRPKPPSPAPAMARGGSQSWSSGESDGQPKEQTPEKPRHKMVKETQYYDILGVKPSASPEEIKKAYRKLALKYHPDKNPDEGEKGHGHLQPDISLYSYSGFSVTSDTQLIISTNHRLKMLCILETEVKSFSILFTESLLFISKEAHDPPE

SEQ ID NO: 855602 - protein, 727 aa, Homo sapiens
SGVPPFGAGLRPTQPSRPPTLQPAGSTDPRKGKGAASGRRDSCRRAPSRPKPPSPAPAMARGGSQSWSSGESDGQPKEQTPEKPRHKMVKETQYYDILGVKPSASPEEIKKAYRKLALKYHPDKNPDEGEKFKLISQAYEVLSDPKKRDVYDQGGEQAIKEGGSGSPSFSSPMDIFDMFFGGGGRMARERRGKNVVHQLSVTLEDLYNGVTKKLALQKNVICEKCEGVGGKKGSVEKCPLCKGRGMQIHIQQIGPGMVQQIQTVCIECKGQGERINPKDRCESCSGAKVIREKKIIEVHVEKDRSCTSMGNKHTHFHGSTGTIQRSLEHGSRGCMSIHLSLASRQASHSSTYPAARRPIDLDSMHTLHHIQAYLQAPSDRLHSKHDNKNDLGAIALRRFLSIQKQRDGRYTATEDLTHACDDDTECPYYQRTPGNKAGLPCTPEQDITRGYTLIHHEKNNMRLSIMEKQQFTQDMSTTLYITSLRPDTVKGYNTEVTQLDTHSKDDASNEKHYRHTKMKPANMSGSKRRRNRPKEETRDPKNRDTPKARGAAQRTAQDLHVRNARDHREGHTHTEKQRSNEKKKNTDEATHAQNETTTITKTTDSIKGNRPKADKTINDTENYEHRTTTYAVKAAARIKKTVNSNLQTNMHHIQQPELVYNVKYNGLRDLRTRKHCSTSTQRRHTSDRTCGTTRRDTRSPERKTQRQRDDRAIDTNHEQHRRRHSEN

SEQ ID NO: 855603 - protein, 327 aa, Homo sapiens
SGVPPFGAGLRPTQPSRPPTLQPAGSTDPRKGKGAASGRRDSCRRAPSRPKPPSPAPAMARGGSQSWSSGESDGQPKEQTPEKPRHKMVKETQYYDILGVKPSASPEEIKKAYRKLALKYHPDKNPDEGEKFKLISQAYEVLSDPKKRDVYDQGGEQAIKEGGSGSPSFSSPMDIFDMFFGGGGRMARERRGKNVVHQLSVTLEDLYNGVTKKLALQKNVICEKCEGVGGKKGSVEKCPLCKGRGMQIHIQQIGPGMVQQIQTVCIECKGQGERINPKDRCESCSGAKVIREKKIIEVHVEKGEAAQSWCSTRAGNAVWVLIVRYTD

SEQ ID NO: 855604 - protein, 431 aa, Homo sapiens
SGVPPFGAGLRPTQPSRPPTLQPAGSTDPRKGKGAASGRRDSCRRAPSRPKPPSPAPAMARGGSQSWSSGESDGQPKEQTPEKPRHKMVKETQYYDILGVKPSASPEEIKKAYRKLALKYHPDKNPDEGEKFKLISQAYEVLSDPKKRDVYDQGGEQAIKEGGSGSPSFSSPMDIFDMFFGGGGRMARERRGKNVVHQLSVTLEDLYNGVTKKLALQKNVICEKCEGVGGKKGSVEKCPLCKGRGMQIHIQQIGPGMVQQIQTVCIECKGQGERINPKDRCESCSGAKVIREKKIIEVHVEKGMKDGQKILFHGEGDQEPELEPGDVIIVLDQKDHSVFQRRGHDLIMKMKIQLSEALCGFKKTIKTLDNRILVITSKAGEVIKHGDLRCVRDEGMPIYKAPLEKGILIIQFLVIFPEEHCTWITMHLIRS

SEQ ID NO: 855605 - protein, 484 aa, Homo sapiens
SGVPPFGAGLRPTQPSRPPTLQPAGSTDPRKGKGAASGRRDSCRRAPSRPKPPSPAPAMARGGSQSWSSGESDGQPKEQTPEKPRHKMVKETQYYDILGVKPSASPEEIKKAYRKLALKYHPDKNPDEGEKFKLISQAYEVLSDPKKRDVYDQGGEQAIKEGGSGSPSFSSPMDIFDMFFGGGGRMARERRGKNVVHQLSVTLEDLYNGVTKKLALQKNVICEKCEGVGGKKGSVEKCPLCKGRGMQIHIQQIGPGMVQQIQTVCIECKGQGERINPKDRCESCSGAKVIREKKIIEVHVEKGMKDGQKILFHGEGDQEPELEPGDVIIVLDQKDHSVFQRRGHDLIMKMKIQLSEALCGFKKTIKTLDNRILVITSKAGEVIKHGDLRCVRDEGMPIYKAPLEKGILIIQFLVIFPEKHWLSLEKLPQLEALLPPRQKVRITDDMDQVELKEFCPNEQNWRQHREAYEEDEDGPQAGVQCQTA

SEQ ID NO: 855606 - protein, 457 aa, Homo sapiens
KSVRRGAGGGRELQAAAAAATVTVTRERAAGARARGAGQGAGRGVRGALTGLARPPRRHKMVKETQYYDILGVKPSASPEEIKKAYRKLALKYHPDKNPDEGEKFKLISQAYEVLSDPKKRDVYDQGGEQAIKEGGSGSPSFSSPMDIFDMFFGGGGRMARERRGKNVVHQLSVTLEDLYNGVTKKLALQKNVICEKCEGVGGKKGSVEKCPLCKGRGMQIHIQQIGPGMVQQIQTVCIECKGQGERINPKDRCESCSGAKVIREKKIIEVHVEKGMKDGQKILFHGEGDQEPELEPGDVIIVLDQKDHSVFQRRGHDLIMKMKIQLSEALCGFKKTIKTLDNRILVITSKAGEVIKHGDLRCVRDEGMPIYKAPLEKGILIIQFLVIFPEKHWLSLEKLPQLEALLPPRQKVRITDDMDQVELKEFCPNEQNWRQHREAYEEDEDGPQAGVQCQTA

SEQ ID NO: 855607 - protein, 391 aa, Homo sapiens
QSPLRRACRLLISHFSKLAKDMWESLTLDSGQISALTRFKLISQAYEVLSDPKKRDVYDQGGEQAIKEGGSGSPSFSSPMDIFDMFFGGGGRMARERRGKNVVHQLSVTLEDLYNGVTKKLALQKNVICEKCEGVGGKKGSVEKCPLCKGRGMQIHIQQIGPGMVQQIQTVCIECKGQGERINPKDRCESCSGAKVIREKKIIEVHVEKGMKDGQKILFHGEGDQEPELEPGDVIIVLDQKDHSVFQRRGHDLIMKMKIQLSEALCGFKKTIKTLDNRILVITSKAGEVIKHGDLRCVRDEGMPIYKAPLEKGILIIQFLVIFPEKHWLSLEKLPQLEALLPPRQKVRITDDMDQVELKEFCPNEQNWRQHREAYEEDEDGPQAGVQCQTA

SEQ ID NO: 855608 - protein, 312 aa, Homo sapiens
MDIFDMFFGGGGRMARERRGKNVVHQLSVTLEDLYNGVTKKLALQKNVICEKCEGVGGKKGSVEKCPLCKGRGMQIHIQQIGPGMVQQIQTVCIECKGQGERINPKDRCESCSGAKVIREKKIIEVHVEKGMKDGQKILFHGEGDQEPELEPGDVIIVLDQKDHSVFQRRGHDLIMKMKIQLSEALCGFKKTIKTLDNRILVITSKAGEVIKHGDLRCVRDEGMPIYKAPLEKGILIIQFLVIFPEKHWLSLEKLPQLEALLPPRQKVRITDDMDQVELKEFCPNEQNWRQHREAYEEDEDGPQAGVQCQTA

SEQ ID NO: 855609 - protein, 492 aa, Homo sapiens
SGVPPFGAGLRPTQPSRPPTLQPAGSTDPRKGKGAASGRRDSCRRAPSRPKPPSPAPAMARGGSQSWSSGESDGQPKEQTPEKPRHKMVKETQYYDILGVKPSASPEEIKKAYRKLALKYHPDKNPDEGEKFKLISQAYEVLSDPKKRDVYDQGGEQAIKEGGSGSPSFSSPMDIFDMFFGGGGRMARERRGKNVVHQLSVTLEDLYNGVTKKLALQKNVICEKCEGVGGKKGSVEKCPLCKGRGMQIHIQQIGPGMVQQIQTVCIECKGQGERINPKDRCESCSGAKVIREKKIIEVHVEKGMKDGQKILFHGEGDQEPELEPGDVIIVLDQKDHSVFQRRGHDLIMKMKIQLSEALCGFKKTIKTLDNRILVITSKAGEVIKHGDLRCVRDEGMPIYKAPLEKGILIIQFLVIFPEKHWLSLEKLPQLEALLPPRQKVRITDDMDQVELKEFCPNEQNWRQHREAYEEDEDGPQVPAKHCQLVRHNLLKV

SEQ ID NO: 855610 - protein, 426 aa, Homo sapiens
HAAGGGVACPRPSRLFFASAGVRGVALAARAMPGRSCVALVLLAAAVSCAVAQHAPPWTEDCRKSTYPPSGPTYRGAVPWYTINLDLPPYKRWHELMLDKAPMLKVIVNSLKNMINTFVPSGKVMQVVDEKLPGLLGNFPGPFEEEMKGIAAVTDIPLGEIISFNIFYELFTICTSIVAEDKKGHLIHGRNMDFGVFLGWNINNDTWVITEQLKPLTVNLDFQRNNKTVFKASSFAGYVGMLTGFKPGLFSLTLNERFSINGGYLGILEWILGKKDAMWIGFLTRTVLENSTSYEEAKNLLTKTKILAPAYFILGGNQSGEGCVITRDRKESLDVYELDAKQGRWYVVQTNYDRWKHPFFLDDRRTPAKMCLNRTSQENISFETMYDVLSTKPVLNKLTVYTTLIDVTKGQFETYLRDCPDPCIGW

SEQ ID NO: 855611 - protein, 426 aa, Homo sapiens; identical to SEQ ID NO: 855610

SEQ ID NO: 855612 - protein, 111 aa, Homo sapiens
HAAGGGVACPRPSRLFFASAGVRGVALAARAMPGRSCVALVLLAAAVSCAVAQHAPPWTEDCRKSTYPPSGPTYRGAVPWYTINLDLPPYKRWHELMLDKAPMHYSDVTID

SEQ ID NO: 855613 - protein, 411 aa, Homo sapiens
MNCCIGLGEKARGSHRASYPSLSALFTEASILGFGSFAVKAQWTEDCRKSTYPPSGPTYRGAVPWYTINLDLPPYKRWHELMLDKAPMLKVIVNSLKNMINTFVPSGKVMQVVDEKLPGLLGNFPGPFEEEMKGIAAVTDIPLGEIISFNIFYELFTICTSIVAEDKKGHLIHGRNMDFGVFLGWNINNDTWVITEQLKPLTVNLDFQRNNKTVFKASSFAGYVGMLTGFKPGLFSLTLNERFSINGGYLGILEWILGKKDAMWIGFLTRTVLENSTSYEEAKNLLTKTKILAPAYFILGGNQSGEGCVITRDRKESLDVYELDAKQGRWYVVQTNYDRWKHPFFLDDRRTPAKMCLNRTSQENISFETMYDVLSTKPVLNKLTVYTTLIDVTKGQFETYLRDCPDPCIGW

SEQ ID NO: 855614 - protein, 267 aa, Homo sapiens
HAAGGGVACPRPSRLFFASAGVRGVALAARAMPGRSCVALVLLAAAVSCAVAQHAPPWTEDCRKSTYPPSGPTYRGAVPWYTINLDLPPYKRWHELMLDKAPMLKVIVNSLKNMINTFVPSGKVMQVVDEKLPGLLGNFPGPFEEEMKGIAAVTDIPLGEIISFNIFYELFTICTSIVAEDKKGHLIHGRNMDFGVFLGWNINNDTWVITEQLKPLTVNLDFQRNNKTVFKASSFAGYVGMLTGFKPGLFSLTLNERFSINGGYLGK

SEQ ID NO: 855615 - protein, 330 aa, Homo sapiens [sequence omitted]

SEQ ID NO: 855616 - protein, 426 aa, Homo sapiens; identical to SEQ ID NO: 855610

SEQ ID NO: 855617 - protein, 393 aa, Homo sapiens
MNCCIGLGEKARGSHRASYPSLSALFTEASILGFGSFAVKAQWTEDCRKSTYPPSGPTYRGAVPWYTINLDLPPYKRWHELMLDKAPMLKVIVNSLKNMINTFVPSGKVMQVVDEKLPLFTDIPLGEIISFNIFYELFTICTSIVAEDKKGHLIHGRNMDFGVFLGWNINNDTWVITEQLKPLTVNLDFQRNNKTVFKASSFAGYVGMLTGFKPGLFSLTLNERFSINGGYLGILEWILGKKDAMWIGFLTRTVLENSTSYEEAKNLLTKTKILAPAYFILGGNQSGEGCVITRDRKESLDVYELDAKQGRWYVVQTNYDRWKHPFFLDDRRTPAKMCLNRTSQENISFETMYDVLSTKPVLNKLTVYTTLIDVTKGQFETYLRDCPDPCIGW

SEQ ID NO: 855618 - protein, 392 aa, Homo sapiens
MNCCIGLGEKARGSHRASYPSLSALFTEASILGFGSFAVKAQWTEDCRKSTYPPSGPTYRGAVPWYTINLDLPPYKRWHELMLDKAPMLKVIVNSLKNMINTFVPSGKVMQVVDEKLPGLLGNFPGPFEEEMKGIAAVTDIPLGEIISFNIFYELFTICTSIVAEDKKGHLIHGRNMDFGVFLGWNINNDTWVITEQLKPLTVNLDFQRNNKTGLFSLTLNERFSINGGYLGILEWILGKKDAMWIGFLTRTVLENSTSYEEAKNLLTKTKILAPAYFILGGNQSGEGCVITRDRKESLDVYELDAKQGRWYVVQTNYDRWKHPFFLDDRRTPAKMCLNRTSQENISFETMYDVLSTKPVLNKLTVYTTLIDVTKGQFETYLRDCPDPCIGW

SEQ ID NO: 855619 - protein, 192 aa, Homo sapiens
SRGPSVMYTGFKPGLFSLTLNERFSINGGYLGILEWILGKKDAMWIGFLTRTVLENSTSYEEAKNLLTKTKILAPAYFILGGNQSGEGCVITRDRKESLDVYELDAKQGRWYVVQTNYDRWKHPFFLDDRRTPAKMCLNRTSQENISFETMYDVLSTKPVLNKLTVYTTLIDVTKGQFETYLRDCPDPCIGW

SEQ ID NO: 855620 - protein, 296 aa, Homo sapiens
MNCCIGLGEKARGSHRASYPSLSALFTEASILGFGSFAVKAQWTEDCRKSTYPPSGPTYRGAVPWYTINLDLPPYKRWHELMLDKAPMLKVIVNSLKNMINTFVPSGKVMQVVDEKLPGLLGNFPGPFEEEMKGIAAVTDIPLGEIISFNIFYELFTICTSIVAEDKKGHLIHGRNMDFGVFLGWNINNDTWVITEQLKPLTVNLDFQRNNKTVFKASSFAGYVGMLTGFKPGLFSLTLNERFSINGGYLGILEWILGKKDAMWIGFLTRTVLENSTRYWPQPTLSWEATSLGKVV

SEQ ID NO: 855621 - protein, 426 aa, Homo sapiens; identical to SEQ ID NO: 855610

SEQ ID NO: 855622 - protein, 267 aa, Homo sapiens; identical to SEQ ID NO: 855614

SEQ ID NO: 855623 - protein, 267 aa, Homo sapiens; identical to SEQ ID NO: 855614

SEQ ID NO: 855624 - protein, 181 aa, Homo sapiens
MNCCIGLGEKARGSHRASYPSLSALFTEASILGFGSFAVKAQWTEDCRKSTYPPSGPTYRGAVPWYTINLDLPPYKRWHELMLDKAPMLKVIVNSLKNMINTFVPSGKVMQVVDEKLPGLLGNFPGPFEEEMKGIAAVTDIPLGKVHLEALKKKVIKFFYKFPLRCDIHTAKCTGLRYTAQ

SEQ ID NO: 855625 - protein, 386 aa, Homo sapiens
MNCCIGLGEKARGSHRASYPSLSALFTEASILGFGSFAVKAQWTEDCRKSTYPPSGPTYRGAVPWYTINLDLPPYKRWHELMLDKAPMLKVIVNSLKNMINTFVPSGKVMQVVDEKLPGLLGNFPGPFEEEMKGIAAVTDIPLGEIISFNIFYELFTICTSIVAEDKKGHLIHGRNMDFGVFLGWNINNDTWVITEQLKPLTVNLDFQRNNKTVFKASSFAGYVGMLTGFKPGLFSLTLNERFSINGGYLGILEWILGKKDAMWIGFLTRTVLENSTSYEEAKNLLTKTKILAPAYFILGGNQSGEGCVITRDRKESLDVYELDAKQGRWYVVQTNYDRWKHPFFLDDRRTPAKMCLNRTSQELTRPQPKKIFYLKPFFNCPGKQK

SEQ ID NO: 855626 - protein, 201 aa, Homo sapiens
HAAGGGVACPRPSRLFFASAGVRGVALAARAMPGRSCVALVLLAAAVSCAVAQHAPPWTEDCRKSTYPPSGPTYRGAVPWYTINLDLPPYKRWHELMLDKAPMLKVIVNSLKNMINTFVPSGKVMQVVDEKLPGLLGNFPGPFEEEMKGIAAVTDIPLGKVHLEALKKKVIKFFYKFPLRCDIHQHKVLYVLDIQHRCCMS

SEQ ID NO: 855627 - protein, 152 aa, Homo sapiens
MNCCIGLGEKARGSHRASYPSLSALFTEASILGFGSFAVKAQWTEDCRKSTYPPSGPTYRGAVPWYTINLDLPPYKRWHELMLDKAPMLKVIVNSLKNMINTFVPSGKVMQVVDEKLPGLLGNFPGPFEEEMKGIAAVTDIPLERLFTQISY

SEQ ID NO: 855628 - protein, 196 aa, Homo sapiens
HAAGGGVACPRPSRLFFASAGVRGVALAARAMPGRSCVALVLLAAAVSCAVAQHAPPWTEDCRKSTYPPSGPTYRGAVPWYTINLDLPPYKRWHELMLDKAPMLKVIVNSLKNMINTFVPSGKVMQVVDEKLPGLLGNFPGPFEEEMKGIAAVTDIPLGKVHLEALKKKVIKFFYKFPLRCDIHTAKCTGLRYTAQ

SEQ ID NO: 855629 - protein, 411 aa, Homo sapiens; identical to SEQ ID NO: 855613

SEQ ID NO: 855630 - protein, 426 aa, Homo sapiens; identical to SEQ ID NO: 855610

SEQ ID NO: 855631 - protein, 427 aa, Homo sapiens
CEFIILLREFIILLREIIILLREFIILLREFIILLREFIILLRDSSPAQLAIAQHAPAWTEDCRKSTYPPSGPTYRGAVPWYTINLDLPPYKRWHELMLDKAPMLKVIVNSLKNMINTFVPSGKVMQVVDEKLPGLLGNFPGPFEEEMKGIAAVTDIPLGEIISFNIFYELFTICTSIVAEDKKGHLIHGRNMDFGVFLGWNINNDTWVITEQLKPLTVNLDFQRNNKTVFKASSFAGYVGMLTGFKPGLFSLTLNERFSINGGYLGILEWILGKKDAMWIGFLTRTVLENSTSYEEAKNLLTKTKILAPAYFILGGNQSGEGCVITRDRKESLDVYELDAKQGRWYVVQTNYDRWKHPFFLDDRRTPAKMCLNRTSQENISFETMYDVLSTKPVLNKLTVYTTLIDVTKGQFETYLRDCPDPCIGW

SEQ ID NO: 855632 - protein, 387 aa, Homo sapiens
  misc_feature (3)..(3): Xaa can be any naturally occurring amino acid
PPXPPPATPPPPPPPPPAPPPPPPPPPPPPPPPPPRPPPPSPPPPPPPPPPPPPPLPPLPPPPVLKVIVNSLKNMINTFVPSGKVMQVVDEKLPGLLGNFPGPFEEEMKGIAAVTDIPLGEIISFNIFYELFTICTSIVAEDKKGHLIHGRNMDFGVFLGWNINNDTWVITEQLKPLTVNLDFQRNNKTVFKASSFAGYVGMLTGFKPGLFSLTLNERFSINGGYLGILEWILGKKDAMWIGFLTRTVLENSTSYEEAKNLLTKTKILAPAYFILGGNQSGEGCVITRDRKESLDVYELDAKQGRWYVVQTNYDRWKHPFFLDDRRTPAKMCLNRTSQENISFETMYDVLSTKPVLNKLTVYTTLIDVTKGQFETYLRDCPDPCIGW

SEQ ID NO: 855633 - protein, 426 aa, Homo sapiens; identical to SEQ ID NO: 855610

SEQ ID NO: 855634 - protein, 411 aa, Homo sapiens
HAAGGGVACPRPSRLFFASAGVRGVALAARAMPGRSCVALVLLAAAVSCAVAQHAPPWTEDCRKSTYPPSGPTYRGAVPWYTINLDLPPYKRWHELMLDKAPMLKVIVNSLKNMINTFVPSGKVMQVVDEKLPGLLGNFPGPFEEEMKGIAAVTDIPLGEIISFNIFYELFTICTSIVAEDKKGHLIHGRNMDFGVFLGWNINNDTWVITEQLKPLTVNLDFQRNNKTVFKASSFAGYVGMLTGFKPGLFSLTLNERFSINGGYLGILEWILGKKDAMWIGFLTRTVLENSTSYEEAKNLLTKTKILAPAYFILGGNQSGEGCVITRDRKESLDVYELDAKQGRWYVVQTNYDRWKHPFFLDDRRTPAKMCLNRTSQENISFETMYDVLSTKPVLNKVNSKLTCGTALTLV

SEQ ID NO: 855635 - protein, 408 aa, Homo sapiens
HAAGGGVACPRPSRLFFASAGVRGVALAARAMPGRSCVALVLLAAAVSCAVAQHAPPWTEDCRKSTYPPSGPTYRGAVPWYTINLDLPPYKRWHELMLDKAPMLKVIVNSLKNMINTFVPSGKVMQVVDEKLPGLLGNFPGPFEEEMKGIAAVTDIPLGEIISFNIFYELFTICTSIVAEDKKGHLIHGRNMDFGVFLGWNINNDTWVITEQLKPLTVNLDFQRNNKTVFKASSFAGYVGMLTGFKPGLFSLTLNERFSINGGYLGILEWILGKKDAMWIGFLTRTVLENSTSYEEAKNLLTKTKILAPAYFILGGNQSGEGCVITRDRKESLDVYELDAKQGRWYVVQTNYDRWKHPFFLDDRRTPAKMCLNRTSQENISFETMYDVLSTKPVLNKTSGLQNAASET

SEQ ID NO: 855636 - protein, 426 aa, Homo sapiens; identical to SEQ ID NO: 855610

SEQ ID NO: 855637 - protein, 460 aa, Homo sapiens
HAAGGGVACPRPSRLFFASAGVRGVALAARAMPGRSCVALVLLAAAVSCAVAQHAPPWTEDCRKSTYPPSGPTYRGAVPWYTINLDLPPYKRWHELMLDKAPMLKVIVNSLKNMINTFVPSGKVMQVVDEKLPGLLGNFPGPFEEEMKGIAAVTDIPLGEIISFNIFYELFTICTSIVAEDKKGHLIHGRNMDFGVFLGWNINNDTWVITEQLKPLTVNLDFQRNNKTVFKASSFAGYVGMLTGFKPGLFSLTLNERFSINGGYLGILEWILGKKDAMWIGFLTRTVLENSTSYEEAKNLLTKTKILAPAYFILGGNQSGEGCVITRDRKESLDVYELDAKQGRWYVVQTNYDRWKHPFFLDDRRTPAKMCLNRTSQENISFETMYDVLSTKPVLNKLTRIHKLCIDGHPKGPNSENFTWRDLALDALVIRVGKKHNSTGHTSNGRASWRPLNRQTLSNC

SEQ ID NO: 855638 - protein, 306 aa, Homo sapiens
HAAGGGVACPRPSRLFFASAGVRGVALAARAMPGRSCVALVLLAAAVSCAVAQHAPPWTEDCRKSTYPPSGPTYRGAVPWYTINLDLPPYKRWHELMLDKAPMLKVIVNSLKNMINTFVPSGKVMQVVDEKLPGLLGNFPGPFEEEMKGIAAVTDIPLGEIISFNIFYELFTICTSIVAEDKKGHLIHGRNMDFGVFLGWNINNDTWVITEQLKPLTVNLDFQRNNKTVFKASSFAGYVGMLTGFKPGLFSLTLNERFSINGGYLGILEWILGKKDAMWIGFLTRTVLENSTRGKVFRCFTIKYLF

SEQ ID NO: 855639 - protein, 196 aa, Homo sapiens; identical to SEQ ID NO: 855628

SEQ ID NO: 855640 - protein, 196 aa, Homo sapiens; identical to SEQ ID NO: 855628

SEQ ID NO: 855641 - protein, 184 aa, Homo sapiens
HAAGGGVACPRPSRLFFASAGVRGVALAARAMPGRSCVALVLLAAAVSCAVAQHAPPWTEDCRKSTYPPSGPTYRGAVPWYTINLDLPPYKRWHELMLDKAPMLKVIVNSLKNMINTFVPSGKVMQVVDEKLPGLLGNFPGPFEEEMKGIAAVTDIPLGEIISFNIFYELFTICTSIVAEDKKG

SEQ ID NO: 855642 - protein, 359 aa, Homo sapiens
MSYRRELEKYRDLDEDEILGALTEEELRTLENELDELDPDNALLPAGLRQKDQTTKAPTGPFKREELLDHLEKQAKEFKDREDLVPYTGEKRGKVWVPKQKPLDPVLESVTLEPELEEALANASDAELCDIAAILGMHTLMSNQQYYQALSSSSIMNKEGLNSVIKPTQYKPVPDEEPNSTDVEETLERIKNNDPKLEEVNLNNIRNIPIPTLKAYAEALKENSYVKKFSIVGTRSNDPVAYALAEMLKENKVLKTLNVESNFISGAGILRLVEALPYNTSLVEMKIDNQSQPLGNKVEMEIVSMLEKNATLLKFGYHFTQQGPRLRASNAMMNNNDLVRKRRLADLTGPIIPKCRSGV

SEQ ID NO: 855643 - protein, 164 aa, Homo sapiens
MDLVLEEDVTVAGTLSGCSGLVPSVPENSYVKKFSIVGTRSNDPVAYALAEMLKENKVLKTLNVESNFISGAGILRLVEALPYNTSLVEMKIDNQSQPLGNKVEMEIVSMLEKNATLLKFGYHFTQQGPRLRASNAMMNNNDLVRKRRLADLTGPIIPKCRSGV

SEQ ID NO: 855644 - protein, 359 aa, Homo sapiens; identical to SEQ ID NO: 855642

SEQ ID NO: 855645 - protein, 359 aa, Homo sapiens; identical to SEQ ID NO: 855642

SEQ ID NO: 855646 - protein, 359 aa, Homo sapiens; identical to SEQ ID NO: 855642

SEQ ID NO: 855647 - protein, 1041 aa, Homo sapiens
MATPAGLERWVQDELHSVLGLSERHVAQFLIGTAQRCTSAEEFVQRLRDTDTLDLSGPARDFALRLWNKVPRKAVVEKPARAAEREARALLEKNRSYRLLEDSEESSEETVSRAGSSLQKKRKKRKHLRKKREEEEEEEASEKGKKKTGGSKQQTEKPESEDEWERTERERLQDLEERDAFAERVRQRDKDRTRNVLERSDKKAYEEAQKRLKMAEEDRKAMVPELRKKSRREYLAKREREKLEDLEAELADEEFLFGDVELSRHERQELKYKRRVRDLAREYRAAGEQEKLEATNRYHMPKETRGQPARAVDLVEEESGAPGEEQRRWEEARLGAASLKFGARDAASQEPKYQLVLEEEETIEFVRATQLQGDEEPSAPPTSTQAQQKESIQAVRRSLPVFPFREELLAAIANHQVLIIEGETGSGKTTQIPQYLFEEGYTNKGMKIACTQPRRVAAMSVAARVAREMGVKLGNEVGYSIRFEDCTSERTVLRYMTDGMLLREFLSEPDLASYSVVMVDEAHERTLHTDILFGLIKDVARFRPELKVLVASATMDTARFSTFFDDAPVFRIPGRRFPVDIFYTKAPEADYLEACVVSVLQIHVTQPPGDILVFLTGQEEIEAACEMLQDRCRRLGSKIRELLVLPIYANLPSDMQARIFQPTPPGARKVVVATNIAETSLTIEGIIYVLDPGFCKQKSYNPRTGMESLTVTPCSKASANQRAGRAGRVAAGKCFRLYTAWAYQHELEETTVPEIQRTSLGNVVLLLKSLGIHDLMHFDFLDPPPYETLLLALEQLYALGALNHLGELTTSGRKMAELPVDPMLSKMILASEKYSCSEEILTVAAMLSVNNSIFYRPKDKVVHADNARVNFFLPGGDHLVLLNVYTQWAESGYSSQWCYENFVQFRSMRRARDVREQLEGLLERVEVGLSSCQGDYIRVRKAITAGYFYHTARLTRSGYRTVKQQQTVFIHPNSSLFEQQPRWLLYHELVLTTKEFMRQVLEIESSWLLEVAPHYYKAKELEDPHAKKMPKKIGKTREELG

SEQ ID NO: 855648 - protein, 1041 aa, Homo sapiens; identical to SEQ ID NO: 855647

SEQ ID NO: 855649 - protein, 1041 aa, Homo sapiens; identical to SEQ ID NO: 855647

SEQ ID NO: 855650 - protein, 820 aa, Homo sapiens
MVPELRKKSRREYLAKREREKLEDLEAELADEEFLFGDVELSRHERQELKYKRRVRDLAREYRAAGEQEKLEATNRYHMPKETRGQPARAVDLVEEESGAPGEEQRRWEEARLGAASLKFGARDAASQEPKYQLVLEEEETIEFVRATQLQGDEEPSAPPTSTQAQQKESIQAVRRSLPVFPFREELLAAIANHQVLIIEGETGSGKTTQIPQYLFEEGYTNKGMKIACTQPRRVAAMSVAARVAREMGVKLGNEVGYSIRFEDCTSERTVLRYMTDGMLLREFLSEPDLASYSVVMVDEAHERTLHTDILFGLIKDVARFRPELKVLVASATMDTARFSTFFDDAPVFRIPGRRFPVDIFYTKAPEADYLEACVVSVLQIHVTQPPGDILVFLTGQEEIEAACEMLQDRCRRLGSKIRELLVLPIYANLPSDMQARIFQPTPPGARKVVVATNIAETSLTIEGIIYVLDPGFCKQKSYNPRTGMESLTVTPCSKASANQRAGRAGRVAAGKCFRLYTAWAYQHELEETTVPEIQRTSLGNVVLLLKSLGIHDLMHFDFLDPPPYETLLLALEQLYALGALNHLGELTTSGRKMAELPVDPMLSKMILASEKYSCSEEILTVAAMLSVNNSIFYRPKDKVVHADNARVNFFLPGGDHLVLLNVYTQWAESGYSSQWCYENFVQFRSMRRARDVREQLEGLLERVEVGLSSCQGDYIRVRKAITAGYFYHTARLTRSGYRTVKQQQTVFIHPNSSLFEQQPRWLLYHELVLTTKEFMRQVLEIESSWLLEVAPHYYKAKELEDPHAKKMPKKIGKTREELG

SEQ ID NO: 855651 - protein, 224 aa, Homo sapiens
MATPAGLERWVQDELHSVLGLSERHVAQFLIGTAQRCTSAEEFVQRLRDTDTLDLSGPARDFALRLWNKVPRKAVVEKPARAAEREARALLEKNRSYRLLEDSEESSEETVSRAGSSLQKKRKKRKHLRKKREEEEEEEASEKGKKKTGGSKQQTEKPESEDEWERTERERLQDLEERDAFAERVRQRDKDRTRNVLERSDKKAYEEAQKRLKMAEEDRKAMTI

SEQ ID NO: 855652 - protein, 560 aa, Homo sapiens
MESQPAQECLMQMFLPIEPACFVEWLGTSPSQLGVVMVDEAHERTLHTDILFGLIKDVARFRPELKVLVASATMDTARFSTFFDDAPVFRIPGRRFPVDIFYTKAPEADYLEACVVSVLQIHVTQPPGDILVFLTGQEEIEAACEMLQDRCRRLGSKIRELLVLPIYANLPSDMQARIFQPTPPGARKVVVATNIAETSLTIEGIIYVLDPGFCKQKSYNPRTGMESLTVTPCSKASANQRAGRAGRVAAGKCFRLYTAWAYQHELEETTVPEIQRTSLGNVVLLLKSLGIHDLMHFDFLDPPPYETLLLALEQLYALGALNHLGELTTSGRKMAELPVDPMLSKMILASEKYSCSEEILTVAAMLSVNNSIFYRPKDKVVHADNARVNFFLPGGDHLVLLNVYTQWAESGYSSQWCYENFVQFRSMRRARDVREQLEGLLERVEVGLSSCQGDYIRVRKAITAGYFYHTARLTRSGYRTVKQQQTVFIHPNSSLFEQQPRWLLYHELVLTTKEFMRQVLEIESSWLLEVAPHYYKAKELEDPHAKKMPKKIGKTREELG

SEQ ID NO: 855653 - protein, 1041 aa, Homo sapiens; identical to SEQ ID NO: 855647

SEQ ID NO: 855654 - protein, 571 aa, Homo sapiens
MATPAGLERWVQDELHSVLGLSERHVAQFLIGTAQRCTSAEEFVQRLRDTDTLDLSGPARDFALRLWNKVPRKAVVEKPARAAEREARALLEKNRSYRLLEDSEESSEETVSRAGSSLQKKRKKRKHLRKKREEEEEEEASEKGKKKTGGSKQQTEKPESEDEWERTERERLQDLEERDAFAERVRQRDKDRTRNVLERSDKKAYEEAQKRLKMAEEDRKAMVPELRKKSRREYLAKREREKLEDLEAELADEEFLFGDVELSRHERQELKYKRRVRDLAREYRAAGEQEKLEATNRYHMPKETRGQPARAVDLVEEESGAPGEEQRRWEEARLGAASLKFGARDAASQEPKYQLVLEEEETIEFVRATQLQGDEEPSAPPTSTQAQQKESIQAVRRSLPVFPFREELLAAIANHQVLIIEGETGSGKTTQIPQYLFEEGYTNKGMKIACTQPRRVAAMSVAARVAREMGVKLGNEVGYSIRFEDCTSERTVLRYMTDGMLLREFLSEPDLASYSVVMVDEAHERTLHTDILFGLIKDVARFRPELKGFVKPPGRAAANLVVVVVVIIRRP

SEQ ID NO: 855655 - protein, 105 aa, Homo sapiens [sequence omitted]

SEQ ID NO: 855656 - protein, 392 aa, Homo sapiens
RGGRTLARVGKSSGGRWRSLPASNRAEPLPWRFSVLRIMSLRGSLSRLLQTRVHSILKKSVHSVAVIGAPFSQGQKRKGVEHGPAAIREAGLMKRLSSLGCHLKDFGDLSFTPVPKDDLYNNLIVNPRSVGLANQELAEVVSRAVSDGYSCVTLGGDHSLAIGTISGHARHCPDLCVVWVDAHADINTPLTTSSGNLHGQPVSFLLRELQDKVPQLPGFSWIKPCISSASIVYIGLRDVDPPEHFILKNYDIQYFSMRDIDRLGIQKVMERTFDLLIGKRQRPIHLSFDIDAFDPTLAPATGTPVVGGLTYREGMYIAEEIHNTGLLSALDLVEVNPQLATSEEEAKTTANLAVDVIASSFGQTREGGHIVYDQLPTPSSPDESENQARVRI

SEQ ID NO: 855657 - protein, 392 aa, Homo sapiens; identical to SEQ ID NO: 855656

SEQ ID NO: 855658 - protein, 244 aa, Homo sapiens
RGGRTLARVGKSSGGRWRSLPASNRAEPLPWRFSVLRIMSLRGSLSRLLQTRVHSILKKSVHSVAVIGAPFSQGQKRKGVEHGPAAIREAGLMKRLSSLGCHLKDFGDLSFTPVPKDDLYNNLIVNPRSVGLANQELAEVVSRAVSDGYSCVTLGGDHSLAIGTISGHARHCPDLCVVWVDAHADINTPLTTSSGNLHGQPVSFLLRELQDKVPQLPGFSWIKPCISSASIVYIGLRDVDPPEQ

SEQ ID NO: 855659 - protein, 383 aa, Homo sapiens
RGGRTLARVGKSSGGRWRSLPASNRAEPLPWRFSVLRIMSLRGSLSRLLQTRVHSILKKSVHSVAVIGAPFSQGQKRKGVEHGPAAIREAGLMKRLSSLGCHLKDFGDLSFTPVPKDDLYNNLIVNPRSVGLANQELAEVVSRAVSDGYSCVTLGGDHSLAIGTISGHARHCPDLCVVWVDAHADINTPLTTSSGNLHGQPVSFLLRELQDKVPQLPGFSWIKPCISSASIVYIGLRDVDPPEHFILKNYDIQYFSMRDIDRLGIQKVMERTFDLLIGKRQRPIHLSFDIDAFDPTLAPATGTPVVGGLTYREGMYIAEEIHNTGLLSALDLVEVNPQLATSEEEAKTTANLAVDVIASSFGQTGRDLVLTTSTPVTDDQISL

SEQ ID NO: 855660 - protein, 136 aa, Homo sapiens
MRDIDRLGIQKVMERTFDLLIGKRQRPIHLSFDIDAFDPTLAPATGTPVVGGLTYREGMYIAEEIHNTGLLSALDLVEVNPQLATSEEEAKTTANLAVDVIASSFGQTREGGHIVYDQLPTPSSPDESENQARVRI

SEQ ID NO: 855661 - protein, 221 aa, Homo sapiens
RGGRTLARVGKSSGGRWRSLPASNRAEPLPWRFSVLRIMSLRGSLSRLLQTRVHSILKKSVHSVAVIGAPFSQGQKRKGVEHGPAAIREAGLMKRLSSLGCHLKDFGDLSFTPVPKDDLYNNLIVNPRSVGLANQELAEVVSRAVSDGYSCVTLGGDHSLAIGTISGHARHCPDLCVVWVDAHADINTPLTTSSGNLHGQPVSFLLRELQDKVSGPKRKER

SEQ ID NO: 855662 - protein, 76 aa, Homo sapiens
RVGAALTEEQAADVVSLRHPGWSAVAQSRLTATSASQVQVILLLQPPRFKRFSCLSLPSSWDYRRSPPCPANFLYF

SEQ ID NO: 855663 - protein, 244 aa, Homo sapiens; identical to SEQ ID NO: 855658

SEQ ID NO: 855664 - protein, 244 aa, Homo sapiens; identical to SEQ ID NO: 855658

SEQ ID NO: 855665 - protein, 300 aa, Homo sapiens
RGGRTLARVGKSSGGRWRSLPASNRAEPLPWRFSVLRIMSLRGSLSRLLQTRVHSILKKSVHSVAVIGAPFSQGQKRKGVEHGPAAIREAGLMKRLSSLGCHLKDFGDLSFTPVPKDDLYNNLIVNPRSVGLANQELAEVVSRAVSDGYSCVTLGGDHSLAIGTISGHARHCPDLCVVWVDAHADINTPLTTSSGNLHGQPVSFLLRELQDKVPQLPGFSWIKPCISSASIVYIGLRDVDPPEHFFVRHLIPDFPENCRLGPEGWTHCRCGHTIPCLLLLTYGPGTCGDPDGIGTTGPTY

SEQ ID NO: 855666 - protein, 89 aa, Homo sapiens
APTFPEDPDSASRPRRACSGLSACRVAFFSSSGAVMAAAKTLNPKAKVAGAQAALAFNISGARGLQDVLRTNLGPKGTIKIKFNTQQLP

SEQ ID NO: 855667 - protein, 86 aa, Homo sapiens
APTFPEDPDSASRPRRACSGLSACRVAFFSSSGAVMAAAKTLNPKAKVAGAQAALAFNISGARGLQDVLRTNLGPKGTIKMAFIPE

SEQ ID NO: 855668 - protein, 89 aa, Homo sapiens; identical to SEQ ID NO: 855666

SEQ ID NO: 855669 - protein, 89 aa, Homo sapiens; identical to SEQ ID NO: 855666

SEQ ID NO: 855670 - protein, 86 aa, Homo sapiens; identical to SEQ ID NO: 855667

SEQ ID NO: 855671 - protein, 105 aa, Homo sapiens
APTFPEDPDSASRPRRACSGLSACRVAFFSSSGAVMAAAKTLNPKAKVAGAQAALAFNISGARGLQDVLRTNLGPKGTIKILVSGAGDIKLTKDTGVDDQPWPTW

SEQ ID NO: 855672 - protein, 390 aa, Homo sapiens
MPPSGLRLLLLLLPLLWLLVLTPGRPAAGLSTCKTIDMELVKRKRIEAIRGQILSKLRLASPPSQGEVPPGPLPEAVLALYNSTRDRVAGESAEPEPEPEADYYAKEVTRVLMVETHNEIYDKFKQSTHSIYMFFNTSELREAVPEPVLLSRAELRLLRLKLKVEQHVELYQKYSNNSWRYLSNRLLAPSDSPEWLSFDVTGVVRQWLSRGGEIEGFRLSAHCSCDSRDNTLQVDINGFTTGRRGDLATIHGMNRPFLLLMATPLERAQHLQSSRHRRALDTNYCFSSTEKNCCVRQLYIDFRKDLGWKWIHEPKGYHANFCLGPCPYIWSLDTQYSKVLALYNQHNPGASAAPCCVPQALEPLPIVYYVGRKPKVEQLSNMIVRSCKCS

SEQ ID NO: 855673 - protein, 659 aa, Homo sapiens
SRSPPPPPFAPWAISLPPPSAEQPDSEGPGRGQGGRPVRGTPPALSRPRGRPRPGAEEGVAEEDELVGRRGKKLLRLFRCRWEPEARGPLGATLPREEAGLGDPRPPPFAAGDACSLPAPYTASLRRPHSGPALGSRRPGLPQRLFPRPRAHPLHAAFIPGLSPEPPRILDPFSSRRRISLRPATDPLFKTTHLLVPDRAHLGYFRGILRHPRSKPPLHHCALLPEDLSFPSRPSYLLPGDPQPLQGRGLPTTPALFALSAVPGGAASPMPPSGLRLLLLLLPLLWLLVLTPGRPAAGLSTCKTIDMELVKRKRIEAIRGQILSKLRLASPPSQGEVPPGPLPEAVLALYNSTRDRVAGESAEPEPEPEADYYAKEVTRVLMVETHNEIYDKFKQSTHSIYMFFNTSELREAVPEPVLLSRAELRLLRLKLKVEQHVELYQKYSNNSWRYLSNRLLAPSDSPEWLSFDVTGVVRQWLSRGGEIEGFRLSAHCSCDSRDNTLQVDINGFTTGRRGDLATIHGMNRPFLLLMATPLERAQHLQSSRHRRALDTNYCFSSTEKNCCVRQLYIDFRKDLGWKWIHEPKGYHANFCLGPCPYIWSLDTQYSKVLALYNQHNPGASAAPCCVPQALEPLPIVYYVGRKPKVEQLSNMIVRSCKCS

SEQ ID NO: 855674 - protein, 436 aa, Homo sapiens
MPPSGLRLLLLLLPLLWLLVLTPGRPAAGLSTCKTIDMELVKRKRIEAIRGQILSKLRLASPPSQGEVPPGPLPEAVLALYNSTRDRVAGESAEPEPEPEADYYAKEVTRVLMVETHNEIYDKFKQSTHSIYMFFNTSELREAVPEPVLLSRAELRLLRLKLKVEQHVELYQKYSNNSWRYLSNRLLAPSDSPEWLSFDVTGVVRQWLSRGGEIEGFRLSAHCSCDSRDNTLQVDINGEACFPGHAQFDVCACVCSHLPHAPLIYPSESVCVCPLSPDSHTKAGFTTGRRGDLATIHGMNRPFLLLMATPLERAQHLQSSRHRRALDTNYCFSSTEKNCCVRQLYIDFRKDLGWKWIHEPKGYHANFCLGPCPYIWSLDTQYSKVLALYNQHNPGASAAPCCVPQALEPLPIVYYVGRKPKVEQLSNMIVRSCKCS

SEQ ID NO: 855675 - protein, 278 aa, Homo sapiens
MVETHYEIYDKFKQSTHSIYMFFNTSELREAVPEPVLLSRAELRLLRLKLKVEQHVELYQKYSNNSWRYLSNRLLAPSDSPEWLSFDVTGVVRQWLSRGGEIEGFRLSAHCSCDSRDNTLQVDINGFTTGRRGDLATIHGMNRPFLLLMATPLERAQHLQSSRHRRALDTNYCFSSTEKNCCVRQLYIDFRKDLGWKWIHEPKGYHANFCLGPCPYIWSLDTQYSKVLALYNQHNPGASAAPCCVPQALEPLPIVYYVGRKPKVEQLSNMIVRSCKCS

SEQ ID NO: 855676 - protein, 332 aa, Homo sapiens
MPPSGLRLLLLLLPLLWLLVLTPGRPAAGLSTCKTIDMELVKRKRIEAIRGQILSKLRLASPPSQGEVPPGPLPEAVLALYNSTRDRVAGESAEPEPEPEADYYAKEVTRVLMVETHNEIYDKFKQSTHSIYMFFNTSELREAVPEPVLLSRAELRLLRLKLKVEQHVELYQKYSNNSWRYLSNRLLAPSDSPEWLSFDVTGVVRQWLSRGGEIEGFRLSAHCSCDSRDNTLQVDINGFTTGRRGDLATIHGMNRPFLLLMATPLERAQHLQSSRHRRALDTNYCFSSTEKNCCVRQLYIDFRKEPPRVGSLQTGIKIPGQEALTQHPYKGV

SEQ ID NO: 855677 - protein, 304 aa, Homo sapiens
MPPSGLRLLLLLLPLLWLLVLTPGRPAAGLSTCKTIDMELVKRKRIEAIRGQILSKLRLASPPSQGEVPPGPLPEAVLALYNSTRDRVAGESAEPEPEPEADYYAKEVTRVLMVETHNEIYDKFKQSTHSIYMFFNTSELREAVPEPVLLSRAELRLLRLKLKVEQHVELYQKYSNNSWRYLSNRLLAPSDSPEWLSFDVTGVVRQWLSRGGEIEGFRLSAHCSCDSRDNTLQVDINGFTTGRRGDLATIHGMNRPFLLLMATPLERAQHLQSSRRRAACRRRWSRCPSCTTWAASPRWSSCPT

SEQ ID NO: 855678 - protein, 316 aa, Homo sapiens
MPPSGLRLLLLLLPLLWLLVLTPGRPAAGLSTCKTIDMELVKRKRIEAIRGQILSKLRLASPPSQGEVPPGPLPEAVLALYNSTRDRVAGESAEPEPEPEADYYAKEVTRVLMVETHNEIYDKFKQSTHSIYMFFNTSELREAVPEPVLLSRAELRLLRLKLKVEQHVELYQKYSNNSWRYLSNRLLAPSDSPEWLSFDVTGVVRQWLSRGGEIEGFRLSAHCSCDSRDNTLQVDINAPRRRTAACGSCTLTSARTSAGSGSTSPRATMPTSASGPAPTFGAWTRSTARYVWPTGLRDALGGSQDGGRGERKRSKV

SEQ ID NO: 855679 - protein, 191 aa, Homo sapiens
SRSPPPPPFAPWAISLPPPSAEQPDSEGPGRGQGGRPVRGTPPALSRPRGRPRPGAEEGVAEEQPEAPESETSRRRPRHCGEEGEEEREEGRAGREKRKKTFETFPLPLGAGGAGTSWRDAAPRGGRTWGPQTASLCRRGRLLPPCPLHGVPQAPPFRTSPRESPTRPPAKTFPQTSGAPPARRLHPRPVS

SEQ ID NO: 855680 - protein, 390 aa, Homo sapiens; identical to SEQ ID NO: 855672

SEQ ID NO: 855681 - protein, 390 aa, Homo sapiens; identical to SEQ ID NO: 855672

SEQ ID NO: 855682 - protein, 357 aa, Homo sapiens
MPPSGLRLLLLLLPLLWLLVLTPGRPAAGLSTCKTIDMELVKRKRIEAIRGQILSKLRLASPPSQGEVPPGPLPEAVLALYNSTRDRVAGESAEPEPEPEADYYAKEVTRVLMVETHNEIYDKFKQSTHSIYMFFNTSELREAVPEPVLLSRAELRLLRLKLKVEQHVELYQKYSNNSWRYLSNRLLAPSDSPEWLSFDVTGVVRQWLSRGGEIEGFRLSAHCSCDSRDNTLQVDINGFTTGRRGDLATIHGMNRPFLLLMATPLERAQHLQSSRHRRALDTNYCFSSTEKNCCVRQLYIDFRKDLGWKWIHEPKGYHANFCLGPCPYIWSLDTQYSKLNEQNLIQEVPNIWQREVG

SEQ ID NO: 855683 - protein, 332 aa, Homo sapiens [sequence omitted]

SEQ ID NO: 855684 - protein, 248 aa, Homo sapiens [sequence omitted]

SEQ ID NO: 855685 - protein, 246 aa, Homo sapiens
MPPSGLRLLLLLLPLLWLLVLTPGRPAAGLSTCKTIDMELVKRKRIEAIRGQILSKLRLASPPSQGEVPPGPLPEAVLALYNSTRDRVAGESAEPEPEPEADYYAKEVTRVLMVETHNEIYDKFKQSTHSIYMFFNTSELREAVPEPVLLSRAELRLLRLKLKVEQHVELYQKYSNNSWRYLSNRLLAPSDSPEWLSFDVTGVVRQWLSRGGKLRAFARADIAHVPAGSSHCQCVECSSAPKHCLA

SEQ ID NO: 855686 - protein, 234 aa, Homo sapiens
MSSEVSARRDAKKLVRSPSGLRMVPEHRAFGSPFGLEEPQWVPDKECRRCMQCDAKFDFLTRKHHCRRCGKCFCDRCCSQKVPLRRMCFVDPVRQCAECALVSLKEAEFYDKQLKVLLSGATFLVTFGNSEKPETMTCRLSNNQRYLFLDGDSHYEIEIVHISTVQILTEGFPPGGGNARATGMFLQYTVPGTEGVTQLKLTVVEDVTVGRRQAVAWLVAMHKAAKLLYESRDQ

SEQ ID NO: 855687 - protein, 296 aa, Homo sapiens
MSSEVSARRDAKKLVRSPSGLRMVPEHRAFGSPFGLEEPQWVPDKECRRCMQCDAKFDFLTRKVRRIPAAWWGAQGWRQEVRVCSGRHRGLAFRRGPGSARPAGATPGAACSLPLLTANPPASAQHHCRRCGKCFCDRCCSQKVPLRRMCFVDPVRQCAECALVSLKEAEFYDKQLKVLLSGATFLVTFGNSEKPETMTCRLSNNQRYLFLDGDSHYEIEIVHISTVQILTEGFPPGGGNARATGMFLQYTVPGTEGVTQLKLTVVEDVTVGRRQAVAWLVAMHKAAKLLYESRDQ

SEQ ID NO: 855688 - protein, 234 aa, Homo sapiens; identical to SEQ ID NO: 855686

SEQ ID NO: 855689 - protein, 252 aa, Homo sapiens
MSSEVSARRDAKKLVRSPSGLRMVPEHRAFGSPFGLEEPQWVPDKECRRCMQCDAKFDFLTRKHHCRRCGKCFCDRCCSQKVPLRRMCFVDPVRQCAECALVSLKEAEFYDKQLKVLLSGATFLVTFGNSEKPETMTCRLSNNQRYLFLDGDSHYEIEIVHISTVQILTEGFPPGEKDIHAYTSLRGSQPASEGGNARATGMFLQYTVPGTEGVTQLKLTVVEDVTVGRRQAVAWLVAMHKAAKLLYESRDQ

SEQ ID NO: 855690 - protein, 189 aa, Homo sapiens
RGPGRGGRCPGLGEGPGAGPLAERLRRRHVLRGVRAPRRQEAGALPERPAHGARTPRLRKPVRPGGAAVGPGQGGATFLVTFGNSEKPETMTCRLSNNQRYLFLDGDSHYEIEIVHISTVQILTEGFPPGGGNARATGMFLQYTVPGTEGVTQLKLTVVEDVTVGRRQAVAWLVAMHKAAKLLYESRDQ

SEQ ID NO: 855691 - protein, 48 aa, Homo sapiens
MVKDTPKDCVHIIINGLFPPCYLLVDVSVTPSWDTGALRRENLLPQAW

SEQ ID NO: 855692 - protein, 103 aa, Homo sapiens
MGSLCCLCGSCWRCVRQALCPTPSPMATTIRYLLWGEGWDGSCARVCEGRLLLLPSLLGDWAGTVCLGPGTTVIHIALLWCLSTYSFSDEAALIPTHDSPAYN

SEQ ID NO: 855693 - protein, 1563 aa, Homo sapiens
MAEERPPRLVDYFVVAGLAGNGAPIPEETWVPEPSGPLRPPRPAEPITDVAVIARALGEEVPQGYTCIQASAGGHPLELSAGLLGGTQPVICYRRGRDKPPLVELGVLYEGKERPKPGFQVLDTTPYSHSANLAPPGPGHPRTYLTYRRAAEGAGLHALGITDLCLVLPSKGEGTPHTYCRLPRNLNPGMWGPAVYLCYKVGLAKANTLVYEAGEWPLYPSNPVTLHPFALVPLGRHLKCPQSLLSLCYSGLLWDPLVHFPWSLMDPAPFGYPNYAGGAELLGRYPEEDNEAFPLPESVPVFCLPMGATIECWPAQTKYPVPVFSTFVLTGAAGDKVYGAALQFYEAFPRARLSERQARALGLLSAVERGRALGGRAVRSRRAIAVLSRWPAFPAFRAFLTFLYRYSVSGPHRLPLEAHISHFIHNVPFPSPQRPRILVQMSPYDNLLLCQPVSSPLPLSGASFLQLLQSLGPELAITLLLAVLTEHKLLVHSLRPDLLTSVCEALVSMIFPLHWQCPYIPLCPLVLADVLSAPVPFIVGIHSSYFDLHDPPADVICVDLDTNTLFQTEEKKLLSPRTLPRRPYKVLLATLTNLYQQLDQTYTGPEEEASLEFLLTDYEAVCGRRARLEREVQGAFLRFMACLLKGYRVFLRPLTQAPSEGARDVDNLFFLQGFLKSRERSSHKLYSQLLHTQMFSQFIEECSFGSARHAALEFFDSCVEKVHPEQEKPEPTPLVELEELSGSELTVFITPPEEPALPEGSESTPQYCYDGFPELRAELFESLQEQPGALPVPGPSRSAPSSPAPRRTKQEMKVAQRMAQKSAAVPELWARCLLGHCYGLWFLCLPAYVRSAPSRVQALHTAYHVLRQMESGKVVLPDEVCYRVLMQLCSHYGQPVLSVRVMLEMRQAGIVPNTITYGYYNKAVLESKWPSGTPGGRLRWAKLRNVVLGAAQFRQPLRERQQQQQQQQQQQQQQQQQEQVSAHQEAGSSQAEPYLERPSPTRPLQRQTTWAGRSLRDPASPPGRLVKSGSLGSARGAQPTVEAGVAHMIEALGVLEPRGSPVPWHDGSLSDLSLTGEEPLPGGSPGGSGSALSAQSTEALEGLSGRGPKAGGRQDEAGTPRRGLGARLQQLLTPSRHSPASRIPPPELPPDLPPPARRSPMDSLLHPRERPGSTASESSASLGSEWDLSESSLSNLSLRRSSERLSDTPGSFQSPSLEILLSSCSLCRACDSLVYDEEIMAGWAPDDSNLNTTCPFCACPFVPLLSVQTLDSRPSVPSPKSAGASGSKDAPVPGGPGPVLSDRRLCLALDEPQLCNGHMGGASRRVESGAWAYLSPLVLRKELESLVENEGSEVLALPELPSAHPIIFWNLLWYFQRLRLPSILPGLVLASCDGPSHSQAPSPWLTPDPASVQVRLLWDVLTPDPNSCPPLYVLWRVHSQIPQRVVWPGPVPASLSLALLESVLRHVGLNEVHKAVGLLLETLGPPPTGLHLQRGIYREILFLTMAALGKDHVDIVAFDKKYKSAFNKLASSMGKEELRHRRAQMPTPKAIDCRKCFGAPPEC

SEQ ID NO: 855694 - protein, 1657 aa, Homo sapiens
MAEERPPRLVDYFVVAGLAGNGAPIPEETWVPEPSGPLRPPRPAEPITDVAVIARALGEEVPQGYTCIQASAGGHPLELSAGLLGGTQPVICYRRGRDKPPLVELGVLYEGKERPKPGFQVLDTTPYSHSANLAPPGPGHPRTYLTYRRAAEGAGLHALGITDLCLVLPSKGEGTPHTYCRLPRNLNPGMWGPAVYLCYKVGLAKANTLVYEAELLGRYPEEDNEAFPLPESVPVFCLPMGATIECWPAQTKYPVPVFSTFVLTGAAGDKVYGAALQFYEAFPRARLSERQARALGLLSAVERGRALGGRAVRSRRAIAVLSRWPAFPAFRAFLTFLYRYSVSGPHRLPLEAHISHFIHNVPFPSPQRPRILVQMSPYDNLLLCQPVSSPLPLRYVIRLWGGEPLMTKDMVGAGQVGAAVEVYAGWVQVVAVPGIWGRVPRVSWGPFPHLGIACSGASFLQLLQSLGPELAITLLLAVLTEHKLLVHSLRPDLLTSVCEALVSVSAAPPGPSSPEPWFFLVPLSLPGLFPFPSLWRILSPFPWAQPAGTHSFHQELFSRAYFQQPLSTGTNSPRPMPSLSLSCASHCCLNPLFTGSHCLVLQMIFPLHWQCPYIPLCPLVLADVLSAPVPFIVGIHSSYFDLHDPPADVICVDLDTNTLFQTEEKKLLSPRTLPRRPYKVLLATLTNLYQQLDQTYTGPEEEASLEFLLTDYEAVCGRRARLEREVQGAFLRFMACLLKGYRVFLRPLTQAPSEGARDVDNLFFLQGFLKSRERSSHKLYSQLLHTQMFSQFIEECSFGSARHAALEFFDSCVEKVHPEQEKPEPTPLVELEELSGSELTVFITPPEEPALPEGSESTPQYCYDGFPELRAELFESLQEQPGALPVPGPSRSAPSSPAPRRTKQEMKVAQRMAQKSAAVPELWARCLLGHCYGLWFLCLPAYVRSAPSRVQALHTAYHVLRQMESGKVVLPDEVCYRVLMQLCSHYGQPVLSVRVMLEMRQAGIVPNTITYGYYNKAVLESKWPSGTPGGRLRWAKLRNVVLGAAQFRQPLRERQQQQQQQQQQQQQQQQQEQVSAHQEAGSSQAEPYLERPSPTRPLQRQTTWAGRSLRDPASPPGRLVKSGSLGSARGAQPTVEAGVAHMIEALGVLEPRGSPVPWHDGSLSDLSLTGEEPLPGGSPGGSGSALSAQSTEALEGLSGRGPKAGGRQDEAGTPRRGLGARLQQLLTPSRHSPASRIPPPELPPDLPPPARRSPMDSLLHPRERPGSTASESSASLGSEWDLSESSLSNLSLRRSSERLSDTPGSFQSPSLEILLSSCSLCRACDSLVYDEEIMAGWAPDDSNLNTTCPFCACPFVPLLSVQTLDSRPSVPSPKSAGASGSKDAPVPGGPGPVLSDRRLCLALDEPQLCNGHMGGASRRVESGAWAYLSPLVLRKELESLVENEGSEVLALPELPSAHPIIFWNLLWYFQRLRLPSILPGLVLASCDGPSHSQAPSPWLTPDPASVQVRLLWDVLTPDPNSCPPLYVLWRVHSQIPQRVVWPGPVPASLSLALLESVLRHVGLNEVHKAVGLLLETLGPPPTGLHLQRGIYREILFLTMAALGKDHVDIVAFDKKYKSAFNKLASSMGKEELRHRRAQMPTPKAIDCRKCFGAPPEC

SEQ ID NO: 855695 - protein, 985 aa, Homo sapiens
MRAELRVTLWEPALTLRLPWPPAYTGPEEEASLEFLLTDYEAVCGRRARLEREVQGAFLRFMACLLKGYRVFLRPLTQAPSEGARDVDNLFFLQGFLKSRERSSHKLYSQLLHTQMFSQFIEECSFGSARHAALEFFDSCVEKVHPEQEKPEPTPLVELEELSGSELTVFITPPEEPALPEGSESTPQYCYDGFPELRAELFESLQEQPGALPVPGPSRSAPSSPAPRRTKQEMKVAQRMAQKSAAVPELWARCLLGHCYGLWFLCLPAYVRSAPSRVQALHTAYHVLRQMESGKVVLPDEVCYRVLMQLCSHYGQPVLSVRVMLEMRQAGIVPNTITYGYYNKAVLESKWPSGTPGGRLRWAKLRNVVLGAAQFRQPLRERQQQQQQQQQQQQQQQQQEQVSAHQEAGSSQAEPYLERPSPTRPLQRQTTWAGRSLRDPASPPGRLVKSGSLGSARGAQPTVEAGVAHMIEALGVLEPRGSPVPWHDGSLSDLSLTGEEPLPGGSPGGSGSALSAQSTEALEGLSGRGPKAGGRQDEAGTPRRGLGARLQQLLTPSRHSPASRIPPPELPPDLPPPARRSPMDSLLHPRERPGSTASESSASLGSEWDLSESSLSNLSLRRSSERLSDTPGSFQSPSLEILLSSCSLCRACDSLVYDEEIMAGWAPDDSNLNTTCPFCACPFVPLLSVQTLDSRPSVPSPKSAGASGSKDAPVPGGPGPVLSDRRLCLALDEPQLCNGHMGGASRRVESGAWAYLSPLVLRKELESLVENEGSEVLALPELPSAHPIIFWNLLWYFQRLRLPSILPGLVLASCDGPSHSQAPSPWLTPDPASVQVRLLWDVLTPDPNSCPPLYVLWRVHSQIPQRVVWPGPVPASLSLALLESVLRHVGLNEVHKAVGLLLETLGPPPTGLHLQRGIYREILFLTMAALGKDHVDIVAFDKKYKSAFNKLASSMGKEELRHRRAQMPTPKAIDCRKCFGAPPEC

SEQ ID NO: 855696 - protein, 1593 aa, Homo sapiens
MAEERPPRLVDYFVVAGLAGNGAPIPEETWVPEPSGPLRPPRPAEPITDVAVIARALGEEVPQGYTCIQASAGGHPLELSAGLLGGTQPVICYRRGRDKPPLVELGVLYEGKERPKPGFQVLDTTPYSHSANLAPPGPGHPRTYLTYRRAAEGAGLHALGITDLCLVLPSKGEGTPHTYCRLPRNLNPGMWGPAVYLCYKVGLAKANTLVYEAGEWPLYPSNPVTLHPFALVPLGRHLKCPQSLLSLCYSGLLWDPLVHFPWSLMDPAPFGYPNYAGGAELLGRYPEEDNEAFPLPESVPVFCLPMGATIECWPAQTKYPVPVFSTFVLTGAAGDKVYGAALQFYEAFPRARLSERQARALGLLSAVERGRALGGRAVRSRRAIAVLSRWPAFPAFRAFLTFLYRYSVSGPHRLPLEAHISHFIHNVPFPSPQRPRILVQMSPYDNLLLCQPVSSPLPLSGASFLQLLQSLGPELAITLLLAVLTEHKLLVHSLRPDLLTSVCEALVSMIFPLHWQCPYIPLCPLVLADVLSAPVPFIVGIHSSYFDLHDPPADVICVDLDTNTLFQTEEKKLLSPRTLPRRPYKVLLATLTNLYQQLDQTYTGPEEEASLEFLLTDYEAVCGRRARLEREVQGAFLRFMACLLKGYRVFLRPLTQAPSEGARDVDNLFFLQGFLKSRERSSHKLYSQLLHTQMFSQFIEECSFGSARHAALEFFDSCVEKVHPEQEKPEPTPLVELEELSGSELTVFITPPEEPALPEGSESTPQYCYDGFPELRAELFESLQEQPGALPVPGPSRSAPSSPAPRRTKQEMKVAQRMAQKSAAVPELWARCLLGHCYGLWFLCLPAYVRSAPSRVQALHTAYHVLRQMESGKVVLPDEVCYRVLMQLCSHYGQPVLSVRVMLEMRQAGIVPNTITYGYYNKAVLESKWPSGTPGGRLRWAKLRNVVLGAAQFRQPLRERQQQQQQQQQQQQQQQQQEQVSAHQEAGSSQAEPYLERPSPTRPLQRQTTWAGRSLRDPASPPGRLVKSGSLGSARGAQPTVEAGVAHMIEALGVLEPRGSPVPWHDGSLSDLSLTGEEPLPGGSPGGSGSALSAQSTEALEGLSGRGPKAGGRQDEAGTPRRGLGARLQQLLTPSRHSPASRIPPPELPPDLPPPARRSPMDSLLHPRERPGSTASESSASLGSEWDLSESSLSNLSLRRSSERLSDTPGSFQSPSLEILLSSCSLCRACDSLVYDEEIMAGWAPDDSNLNTTCPFCACPFVPLLSVQTLDSRPSVPSPKSAGASGSKDAPVPGGPGPVLSDRRLCLALDEPQLCNGHMGGASRRVESGAWAYLSPLVLRKELESLVENEGSEVLALPELPSAHPIIFWNLLWYFQRLRLPSILPGLVLASCDGPSHSQAPSPWLTPDPASVQVRLLWDVLTPDPNSCPPLYVLWRVHSESGIWPGWGGWVPYPEGSVILVAFFPFIQGQIPQRVVWPGPVPASLSLALLESVLRHVGLNEVHKAVGLLLETLGPPPTGLHLQRGIYREILFLTMAALGKDHVDIVAFDKKYKSAFNKLASSMGKEELRHRRAQMPTPKAIDCRKCFGAPPEC

SEQ ID NO: 855697 - protein, 1563 aa, Homo sapiens; identical to SEQ ID NO: 855693

SEQ ID NO: 855698 - protein, 1377 aa, Homo sapiens
MAEERPPRLVDYFVVAGLAGNGAPIPEETWVPEPSGPLRPPRPAEPITDVAVIARALGEEVPQGYTCIQASAGGHPLELSAGLLGGTQPVICYRRGRDKPPLVELGVLYEGKERPKPGFQVLDTTPYSHSANLAPPGPGHPRTYLTYRRAAEGAGLHALGITDLCLVLPSKGEGTPHTYCRLPRNLNPGMWGPAVYLCYKVGLAKANTLVYEAGEWPLYPSNPVTLHPFALVPLGRHLKCPQSLLSLCYSGLLWDPLVHFPWSLMDPAPFGYPNYAGGAELLGRYPEEDNEAFPLPESVPVFCLPMGATIECWPAQTKYPVPVFSTFVLTGAAGDKVYGAALQFYEAFPRARLSERQARALGLLSAVERGRALGGRAVRSRRAIAVLSRWPAFPAFRAFLTFLYRYSVSGPHRLPLEAHISHFIHNVPFPSPQRPRILVQMSPYDNLLLCQPVSSPLPLSGASFLQLLQSLGPELAITLLLAVLTEHKLLVHSLRPDLLTSVCEALVSMIFPLHWQCPYIPLCPLVLADVLSAPVPFIVGIHSSYFDLHDPPADVICVDLDTNTLFQTEEKKLLSPRTLPRRPYKVLLATLTNLYQQLDQTYTGPEEEASLEFLLTDYEAVCGRRARLEREVQGAFLRFMACLLKGYRVFLRPLTQAPSEGARDVDNLFFLQGFLKSRERSSHKLYSQLLHTQMFSQFIEECSFGSARHAALEFFDSCVEKVHPEQEKPEPTPLVELEELSGSELTVFITPPEEPALPEGSESTPQYCYDGFPELRAELFESLQEQPGALPVPGPSRSAPSSPAPRRTKQEMKVAQRMAQKSAAVPELWARCLLGHCYGLWFLCLPAYVRSAPSRVQALHTAYHVLRQMESGKVVLPDEVCYRVLMQLCSHYGQPVLSVRVMLEMRQAGIVPNTITYGYYNKAVLESKWPSGTPGGRLRWAKLRNVVLGAAQFRQPLRERQQQQQQQQQQQQQQQQQEQVSAHQEAGSSQAEPYLERPSPTRPLQRQTTWAGRSLRDPASPPGRLVKSGSLGSARGAQPTVEAGVAHMIEALGVLEPRGSPVPWHDGSLSDLSLTGEEPLPGGSPGGSGSALSAQSTEALEGLSGRGPKAGGRQDEAGTPRRGLGARLQQLLTPSRHSPASRIPPPELPPDLPPPARRSPMDSLLHPRERPGSTASESSASLGSEWDLSESSLSNLSLRRSSERLSDTPGSFQSPSLEILLSSCSLCRACDSLVYDEEIMAGWAPDDSNLNTTCPFCACPFVPLLSVQTLDSRPSVPSPKSAGASGSKDAPVPGGPGPVLSDRRLCLALDEPQLCNGHMGGASRRVESGAWAYLSPLVLRKELESLVENEGSEVLALPELPSAHPIIFWNLLWYLLA

SEQ ID NO: 855699 - protein, 911 aa, Homo sapiens
MAEERPPRLVDYFVVAGLAGNGAPIPEETWVPEPSGPLRPPRPAEPITDVAVIARALGEEVPQGYTCIQASAGGHPLELSAGLLGGTQPVICYRRGRDKPPLVELGVLYEGKERPKPGFQVLDTTPYSHSANLAPPGPGHPRTYLTYRRAAEGAGLHALGITDLCLVLPSKGEGTPHTYCRLPRNLNPGMWGPAVYLCYKVGLAKANTLVYEAGEWPLYPSNPVTLHPFALVPLGRHLKCPQSLLSLCYSGLLWDPLVHFPWSLMDPAPFGYPNYAGGAELLGRYPEEDNEAFPLPESVPVFCLPMGATIECWPAQTKYPVPVFSTFVLTGAAGDKVYGAALQFYEAFPRARLSERQARALGLLSAVERGRALGGRAVRSRRAIAVLSRWPAFPAFRAFLTFLYRYSVSGPHRLPLEAHISHFIHNVPFPSPQRPRILVQMSPYDNLLLCQPVSSPLPLSGASFLQLLQSLGPELAITLLLAVLTEHKLLVHSLRPDLLTSVCEALVSMIFPLHWQCPYIPLCPLVLADVLSAPVPFIVGIHSSYFDLHDPPADVICVDLDTNTLFQTEEKKLLSPRTLPRRPYKVLLATLTNLYQQLDQTYTGPEEEASLEFLLTDYEAVCGRRARLEREVQGAFLRFMACLLKGYRVFLRPLTQAPSEGARDVDNLFFLQGFLKSRERSSHKLYSQLLHTQMFSQFIEECSFGSARHAALEFFDSCVEKVHPEQEKPEPTPLVELEELSGSELTVFITPPEEPALPEGSESTPQYCYDGFPELRAELFESLQEQPGALPVPGPSRSAPSSPAPRRTKQEMKVAQRMAQKSAAVPELWARCLLGHCYGLWFLCLPAYVRSAPSRVQALHTAYHVLRHAFLPKCLYFILNYLFWSHSPLAYEVLMESEKGKGNRAPWSGGL

SEQ ID NO: 855700 - protein, 927 aa, Homo sapiens
MAEERPPRLVDYFVVAGLAGNGAPIPEETWVPEPSGPLRPPRPAEPITDVAVIARALGEEVPQGYTCIQASAGGHPLELSAGLLGGTQPVICYRRGRDKPPLVELGVLYEGKERPKPGFQVLDTTPYSHSANLAPPGPGHPRTYLTYRRAAEGAGLHALGITDLCLVLPSKGEGTPHTYCRLPRNLNPGMWGPAVYLCYKVGLAKANTLVYEAGEWPLYPSNPVTLHPFALVPLGRHLKCPQSLLSLCYSGLLWDPLVHFPWSLMDPAPFGYPNYAGGAELLGRYPEEDNEAFPLPESVPVFCLPMGATIECWPAQTKYPVPVFSTFVLTGAAGDKVYGAALQFYEAFPRARLSERQARALGLLSAVERGRALGGRAVRSRRAIAVLSRWPAFPAFRAFLTFLYRYSVSGPHRLPLEAHISHFIHNVPFPSPQRPRILVQMSPYDNLLLCQPVSSPLPLSGASFLQLLQSLGPELAITLLLAVLTEHKLLVHSLRPDLLTSVCEALVSMIFPLHWQCPYIPLCPLVLADVLSAPVPFIVGIHSSYFDLHDPPADVICVDLDTNTLFQTEEKKLLSPRTLPRRPYKVLLATLTNLYQQLDQTYTGPEEEASLEFLLTDYEAVCGRRARLEREVQGAFLRFMACLLKGYRVFLRPLTQAPSEGARDVDNLFFLQGFLKSRERSSHKLYSQLLHTQMFSQFIEECSFGSARHAALEFFDSCVEKVHPEQEKPEPTPLVELEELSGSELTVFITPPEEPALPEGSESTPQYCYDGFPELRAELFESLQEQPGALPVPGPSRSAPSSPAPRRTKQEMKVAQRMAQKSAAVPELWARCLLGHCYGLWFLCLPAYVRSAPSRVQALHTAYHVLRQMESGKVVLPDEVCYRVLMQLCSHYGQPVLSVRVMLEMRQAGIVPNTITYGYYNKVPTLG

SEQ ID NO: 855701 - protein, 702 aa, Homo sapiens
MAEERPPRLVDYFVVAGLAGNGAPIPEETWVPEPSGPLRPPRPAEPITDVAVIARALGEEVPQGYTCIQASAGGHPLELSAGLLGGTQPVICYRRGRDKPPLVELGVLYEGKERPKPGFQVLDTTPYSHSANLAPPGPGHPRTYLTYRRAAEGAGLHALGITDLCLVLPSKGEGTPHTYCRLPRNLNPGMWGPAVYLCYKVGLAKANTLVYEAELLGRYPEEDNEAFPLPESVPVFCLPMGATIECWPAQTKYPVPVFSTFVLTGAAGDKVYGAALQFYEAFPRARLSERQARALGLLSAVERGRALGGRAVRSRRAIAVLSRWPAFPAFRAFLTFLYRYSVSGPHRLPLEAHISHFIHNVPFPSPQRPRILVQMSPYDNLLLCQPVSSPLPLRYVIRLWGGEPLMTKDMVGAGQVGAAVEVYAGWVQVVAVPGIWGRVPRVSWGPFPHLGIACSGASFLQLLQSLGPELAITLLLAVLTEHKLLVHSLRPDLLTSVCEALVSVSAAPPGPSSPEPWFFLVPLSLPGLFPFPSLWRILSPFPWAQPAGTHSFHQELFSRAYFQQPLSTGTNSPRPMPSLSLSCASHCCLNPLFTGSHCLVLQMIFPLHWQCPYIPLCPLVLADVLSAPVPFIVGIHSSYFDLHDPPADVICVDLDTNTLFQTEEKKLLSPRTLPRRPYKVLLATLTNLYQQLDQRSSRRIPQ

SEQ ID NO: 855702 - protein, 151 aa, Homo sapiens
MAEERPPRLVDYFVVAGLAGNGAPIPEETWVPEPSGPLRPPRPAEPITDVAVIARALGEEVPQGYTCIQASAGGHPLELSAGLLGGTQPVICYRRGRDKPPLVELGVLYEGKERPKPALLRKAAVLRTAVEAEVVEGMHPSVHFRTQASLQ

SEQ ID NO: 855703 - protein, 42 aa, Homo sapiens [sequence omitted]

SEQ ID NO: 855704 - protein, 1433 aa, Homo sapiens
MAEERPPRLVDYFVVAGLAGNGAPIPEETWVPEPSGPLRPPRPAEPITDVAVIARALGEEVPQGYTCIQASAGGHPLELSAGLLGGTQPVICYRRGRDKPPLVELGVLYEGKERPKPGFQVLDTTPYSHSANLAPPGPGHPRTYLTYRRAAEGAGLHALGITDLCLVLPSKGEGTPHTYCRLPRNLNPGMWGPAVYLCYKVGLAKANTLVYEAVLRGVPKGQAIRATGTGTGPAERRGAGSGTGGQAVRSRRAIAVLSRWPAFPAFRAFLTFLYRYSVSGPHRLPLEAHISHFIHNVPFPSPQRPRILVQMSPYDNLLLCQPVSSPLPLSGASFLQLLQSLGPELAITLLLAVLTEHKLLVHSLRPDLLTSVCEALVSMIFPLHWQCPYIPLCPLVLADVLSAPVPFIVGIHSSYFDLHDPPADVICVDLDTNTLFQTEEKKLLSPRTLPRRPYKVLLATLTNLYQQLDQTYTGPEEEASLEFLLTDYEAVCGRRARLEREVQGAFLRFMACLLKGYRVFLRPLTQAPSEGARDVDNLFFLQGFLKSRERSSHKLYSQLLHTQMFSQFIEECSFGSARHAALEFFDSCVEKVHPEQEKPEPTPLVELEELSGSELTVFITPPEEPALPEGSESTPQYCYDGFPELRAELFESLQEQPGALPVPGPSRSAPSSPAPRRTKQEMKVAQRMAQKSAAVPELWARCLLGHCYGLWFLCLPAYVRSAPSRVQALHTAYHVLRQMESGKVVLPDEVCYRVLMQLCSHYGQPVLSVRVMLEMRQAGIVPNTITYGYYNKAVLESKWPSGTPGGRLRWAKLRNVVLGAAQFRQPLRERQQQQQQQQQQQQQQQQQEQVSAHQEAGSSQAEPYLERPSPTRPLQRQTTWAGRSLRDPASPPGRLVKSGSLGSARGAQPTVEAGVAHMIEALGVLEPRGSPVPWHDGSLSDLSLTGEEPLPGGSPGGSGSALSAQSTEALEGLSGRGPKAGGRQDEAGTPRRGLGARLQQLLTPSRHSPASRIPPPELPPDLPPPARRSPMDSLLHPRERPGSTASESSASLGSEWDLSESSLSNLSLRRSSERLSDTPGSFQSPSLEILLSSCSLCRACDSLVYDEEIMAGWAPDDSNLNTTCPFCACPFVPLLSVQTLDSRPSVPSPKSAGASGSKDAPVPGGPGPVLSDRRLCLALDEPQLCNGHMGGASRRVESGAWAYLSPLVLRKELESLVENEGSEVLALPELPSAHPIIFWNLLWYFQRLRLPSILPGLVLASCDGPSHSQAPSPWLTPDPASVQVRLLWDVLTPDPNSCPPLYVLWRVHSQIPQRVVWPGPVPASLSLALLESVLRHVGLNEVHKAVGLLLETLGPPPTGLHLQRGIYREILFLTMAALGKDHVDIVAFDKKYKSAFNKLASSMGKEELRHRRAQMPTPKAIDCRKCFGAPPEC

SEQ ID NO: 855705 - protein, 1497 aa, Homo sapiens
MAEERPPRLVDYFVVAGLAGNGAPIPEETWVPEPSGPLRPPRPAEPITDVAVIARALGEEVPQGYTCIQASAGGHPLELSAGLLGGTQPVICYRRGRDKPPLVELGVLYEGKERPKPGFQVLDTTPYSHSANLAPPGPGHPRTYLTYRRAAEGAGLHALGITDLCLVLPSKGEGTPHTYCRLPRNLNPGMWGPAVYLCYKVGLAKANTLVYEAELLGRYPEEDNEAFPLPESVPVFCLPMGATIECWPAQTKYPVPVFSTFVLTGAAGDKVYGAALQFYEAFPRARLSERQARALGLLSAVERGRALGGRAVRSRRAIAVLSRWPAFPAFRAFLTFLYRYSVSGPHRLPLEAHISHFIHNVPFPSPQRPRILVQMSPYDNLLLCQPVSSPLPLSGASFLQLLQSLGPELAITLLLAVLTEHKLLVHSLRPDLLTSVCEALVSMIFPLHWQCPYIPLCPLVLADVLSAPVPFIVGIHSSYFDLHDPPADVICVDLDTNTLFQTEEKKLLSPRTLPRRPYKVLLATLTNLYQQLDQTYTGPEEEASLEFLLTDYEAVCGRRARLEREVQGAFLRFMACLLKGYRVFLRPLTQAPSEGARDVDNLFFLQGFLKSRERSSHKLYSQLLHTQMFSQFIEECSFGSARHAALEFFDSCVEKVHPEQEKPEPTPLVELEELSGSELTVFITPPEEPALPEGSESTPQYCYDGFPELRAELFESLQEQPGALPVPGPSRSAPSSPAPRRTKQEMKVAQRMAQKSAAVPELWARCLLGHCYGLWFLCLPAYVRSAPSRVQALHTAYHVLRQMESGKVVLPDEVCYRVLMQLCSHYGQPVLSVRVMLEMRQAGIVPNTITYGYYNKAVLESKWPSGTPGGRLRWAKLRNVVLGAAQFRQPLRERQQQQQQQQQQQQQQQQQEQVSAHQEAGSSQAEPYLERPSPTRPLQRQTTWAGRSLRDPASPPGRLVKSGSLGSARGAQPTVEAGVAHMIEALGVLEPRGSPVPWHDGSLSDLSLTGEEPLPGGSPGGSGSALSAQSTEALEGLSGRGPKAGGRQDEAGTPRRGLGARLQQLLTPSRHSPASRIPPPELPPDLPPPARRSPMDSLLHPRERPGSTASESSASLGSEWDLSESSLSNLSLRRSSERLSDTPGSFQSPSLEILLSSCSLCRACDSLVYDEEIMAGWAPDDSNLNTTCPFCACPFVPLLSVQTLDSRPSVPSPKSAGASGSKDAPVPGGPGPVLSDRRLCLALDEPQLCNGHMGGASRRVESGAWAYLSPLVLRKELESLVENEGSEVLALPELPSAHPIIFWNLLWYFQRLRLPSILPGLVLASCDGPSHSQAPSPWLTPDPASVQVRLLWDVLTPDPNSCPPLYVLWRVHSQIPQRVVWPGPVPASLSLALLESVLRHVGLNEVHKAVGLLLETLGPPPTGLHLQRGIYREILFLTMAALGKDHVDIVAFDKKYKSAFNKLASSMGKEELRHRRAQMPTPKAIDCRKCFGAPPEC

SEQ ID NO: 855706 - protein, 1440 aa, Homo sapiens
MAEERPPRLVDYFVVAGLAGNGAPIPEETWVPEPSGPLRPPRPAEPITDVAVIARALGEEVPQGYTCIQASAGGHPLELSAGLLGGTQPVICYRRGRDKPPLVELGVLYEGKERPKPGFQVLDTTPYSHSANLAPPGPGHPRTYLTYRRAAEGAGLHALGITDLCLVLPSKGEGTPHTYCRLPRNLNPGMWGPAVYLCYKVGLAKANTLVYEAGVGAALQFYEAFPRARLSERQARALGLLSAVERGRALGGRAVRSRRAIAVLSRWPAFPAFRAFLTFLYRYSVSGPHRLPLEAHISHFIHNVPFPSPQRPRILVQMSPYDNLLLCQPVSSPLPLSGASFLQLLQSLGPELAITLLLAVLTEHKLLVHSLRPDLLTSVCEALVSMIFPLHWQCPYIPLCPLVLADVLSAPVPFIVGIHSSYFDLHDPPADVICVDLDTNTLFQTEEKKLLSPRTLPRRPYKVLLATLTNLYQQLDQTYTGPEEEASLEFLLTDYEAVCGRRARLEREVQGAFLRFMACLLKGYRVFLRPLTQAPSEGARDVDNLFFLQGFLKSRERSSHKLYSQLLHTQMFSQFIEECSFGSARHAALEFFDSCVEKVHPEQEKPEPTPLVELEELSGSELTVFITPPEEPALPEGSESTPQYCYDGFPELRAELFESLQEQPGALPVPGPSRSAPSSPAPRRTKQEMKVAQRMAQKSAAVPELWARCLLGHCYGLWFLCLPAYVRSAPSRVQALHTAYHVLRQMESGKVVLPDEVCYRVLMQLCSHYGQPVLSVRVMLEMRQAGIVPNTITYGYYNKAVLESKWPSGTPGGRLRWAKLRNVVLGAAQFRQPLRERQQQQQQQQQQQQQQQQQEQVSAHQEAGSSQAEPYLERPSPTRPLQRQTTWAGRSLRDPASPPGRLVKSGSLGSARGAQPTVEAGVAHMIEALGVLEPRGSPVPWHDGSLSDLSLTGEEPLPGGSPGGSGSALSAQSTEALEGLSGRGPKAGGRQDEAGTPRRGLGARLQQLLTPSRHSPASRIPPPELPPDLPPPARRSPMDSLLHPRERPGSTASESSASLGSEWDLSESSLSNLSLRRSSERLSDTPGSFQSPSLEILLSSCSLCRACDSLVYDEEIMAGWAPDDSNLNTTCPFCACPFVPLLSVQTLDSRPSVPSPKSAGASGSKDAPVPGGPGPVLSDRRLCLALDEPQLCNGHMGGASRRVESGAWAYLSPLVLRKELESLVENEGSEVLALPELPSAHPIIFWNLLWYFQRLRLPSILPGLVLASCDGPSHSQAPSPWLTPDPASVQVRLLWDVLTPDPNSCPPLYVLWRVHSQIPQRVVWPGPVPASLSLALLESVLRHVGLNEVHKAVGLLLETLGPPPTGLHLQRGIYREILFLTMAALGKDHVDIVAFDKKYKSAFNKLASSMGKEELRHRRAQMPTPKAIDCRKCFGAPPEC

SEQ ID NO: 855707 - protein, 1457 aa, Homo sapiens
MAEERPPRLVDYFVVAGLAGNGAPIPEETWVPEPSGPLRPPRPAEPITDVAVIARALGEEVPQGYTCIQASAGGHPLELSAGLLGGTQPVICYRRGRDKPPLVELGVLYEGKERPKPGFQVLDTTPYSHSANLAPPGPGHPRTYLTYRRAAEGAGLHALGITDLCLVLPSKGEGTPHTYCRLPRNLNPGMWGPAVYLCYKVGLAKANTLVYEAGEWPLYPSNPVTLHPFALVPLGRHLKCPQSLLSLCYSGLLWDPLVHFPWSLMDPAPFGYPNYAGGAELLGRYPEEDNEAFPLPESVPVFCLPMGATIECWPAQTKYPVPVFSTFVLTGAAGDKVYGAALQFYEAFPRARLSERQARALGLLSAVERGRALGGRAVRSRRAIAVLSRWPAFPAFRAFLTFLYRYSVSGPHRLPLEAHISHFIHNVPFPSPQRPRILVQMSPYDNLLLCQPVSSPLPLSGASFLQLLQSLGPELAITLLLAVLTEHKLLVHSLRPDLLTSVCEALVSMIFPLHWQCPYIPLCPLVLADVLSAPVPFIVGIHSSYFDLHDPPADVICVDLDTNTLFQTEEKKLLSPRTLPRRPYKVLLATLTNLYQQLDQTYTGPEEEASLEFLLTDYEAVCGRRARLEREVQGAFLRFMACLLKGYRVFLRPLTQAPSEGARDVDNLFFLQGFLKSRERSSHKLYSQLLHTQMFSQFIEECSFGSARHAALEFFDSCVEKVHPEQEKPEPTPLVELEELSGSELTVFITPPEEPALPEGSESTPQYCYDGFPELRAELFESLQEQPGALPVPGPSRSAPSSPAPRRTKQEMKVAQRMAQKSAAVPELWARCLLGHCYGLWFLCLPAYVRSAPSRVQALHTAYHVLRQMESGKVVLPDEVCYRVLMQLCSHYGQPVLSVRVMLEMRQAGIVPNTITYGYYNKAVLESKWPSGTPGGRLRWAKLRNVVLGAAQFRQPLRERQQQQQQQQQQQQQQQQQEQVSAHQEAGSSQAEPYLERPSPTRPLQRQTTWAGRSLRDPASPPGRLVKSGSLGSARGAQPTVEAGVAHMIEALGVLEPRGSPVPWHDGSLSDLSLTGEEPLPGGSPGGSGSALSAQSTEALEGLSGRGPKAGGRQDEAGTPRRGLGARLQQLLTPSRHSPASRIPPPELPPDLPPPARRSPMDSLLHPRERPGSTASESSASLGSEWDLSESSLSNLSLRRSSERLSDTPGSFQSPSLEILLSSCSLCRACDSLVYDEEIMAGWAPDDSNLNTTCPFCACPFVPLLSVQTLDSRPSVPSPKSAGASGSKDAPVPGGPGPVLSDRRLCLALDEPQLCNGHMGGASRRVESGAWAYLSPLVLRKELESLVENEGSEVLALPELPSAHPIIFWNLLWYFQRLRLPSILPGLVLASCDGPSHSQAPSPWLTPDPASVQARSPSGWYGQALYLHPLVWHCWSQCCAMLDSMKCTRLWGSCWKL

SEQ ID NO: 855708 - protein, 1453 aa, Homo sapiens
MAEERPPRLVDYFVVAGLAGNGAPIPEETWVPEPSGPLRPPRPAEPITDVAVIARALGEEVPQGYTCIQASAGGHPLELSAGLLGGTQPVICYRRGRDKPPLVELGVLYEGKERPKPGFQVLDTTPYSHSANLAPPGPGHPRTYLTYRRAAEGAGLHALGITDLCLVLPSKGEGTPHTYCRLPRNLNPGMWGPAVYLCYKVGLAKANTLVYEAGEWPLYPSNPVTLHPFALVPLGRHLKCPQSLLSLCYSGLLWDPLVHFPWSLMDPAPFGYPNYAGGAELLGRYPEEDNEAFPLPESVPVFCLPMGATIECWPAQTKYPVPVFSTFVLTGAAGDKVYGAALQFYEAFPRARLSERQARALGLLSAVERGRALGGRAVRSRRAIAVLSRWPAFPAFRAFLTFLYRYSVSGPHRLPLEAHISHFIHNVPFPSPQRPRILVQMSPYDNLLLCQPVSSPLPLSGASFLQLLQSLGPELAITLLLAVLTEHKLLVHSLRPDLLTSVCEALVSMIFPLHWQCPYIPLCPLVLADVLSAPVPFIVGIHSSYFDLHDPPADVICVDLDTNTLFQTEEKKLLSPRTLPRRPYKVLLATLTNLYQQLDQTYTGPEEEASLEFLLTDYEAVCGRRARLEREVQGAFLRFMACLLKGYRVFLRPLTQAPSEGARDVDNLFFLQGFLKSRERSSHKLYSQLLHTQMFSQFIEECSFGSARHAALEFFDSCVEKVHPEQEKPEPTPLVELEELSGSELTVFITPPEEPALPEGSESTPQYCYDGFPELRAELFESLQEQPGALPVPGPSRSAPSSPAPRRTKQEMKVAQRMAQKSAAVPELWARCLLGHCYGLWFLCLPAYVRSAPSRVQALHTAYHVLRQMESGKVVLPDEVCYRVLMQLCSHYGQPVLSVRVMLEMRQAGIVPNTITYGYYNKAVLESKWPSGTPGGRLRWAKLRNVVLGAAQFRQPLRERQQQQQQQQQQQQQQQQQEQVSAHQEAGSSQAEPYLERPSPTRPLQRQTTWAGRSLRDPASPPGRLVKSGSLGSARGAQPTVEAGVAHMIEALGVLEPRGSPVPWHDGSLSDLSLTGEEPLPGGSPGGSGSALSAQSTEALEGLSGRGPKAGGRQDEAGTPRRGLGARLQQLLTPSRHSPASRIPPPELPPDLPPPARRSPMDSLLHPRERPGSTASESSASLGSEWDLSESSLSNLSLRRSSERLSDTPGSFQSPSLEILLSSCSLCRACDSLVYDEEIMAGWAPDDSNLNTTCPFCACPFVPLLSVQTLDSRPSVPSPKSAGASGSKDAPVPGGPGPVLSDRRLCLALDEPQLCNGHMGGASRRVESGAWAYLSPLVLRKELESLVENEGSEVLALPELPSAHPIIFWNLLWYFQRLRLPSILPGLVLASCDGPSHSQVSAPMWPLFPKCLPHLSAICPLCPWHCRKSIDWPGTVAHACNPSTLGGRGGRIT

SEQ ID NO: 855709 - protein, 1252 aa, Homo sapiens
MAEERPPRLVDYFVVAGLAGNGAPIPEETWVPEPSGPLRPPRPAEPITDVAVIARALGEEVPQGYTCIQASAGGHPLELSAGLLGGTQPVICYRRGRDKPPLVELGVLYEGKERPKPGFQVLDTTPYSHSANLAPPGPGHPRTYLTYRRAAEGAGLHALGITDLCLVLPSKGEGTPHTYCRLPRNLNPGMWGPAVYLCYKVGLAKANTLVYEAGEWPLYPSNPVTLHPFALVPLGRHLKCPQSLLSLCYSGLLWDPLVHFPWSLMDPAPFGYPNYAGGAELLGRYPEEDNEAFPLPESVPVFCLPMGATIECWPAQTKYPVPVFSTFVLTGAAGDKVYGAALQFYEAFPRARLSERQARALGLLSAVERGRALGGRAVRSRRAIAVLSRWPAFPAFRAFLTFLYRYSVSGPHRLPLEAHISHFIHNVPFPSPQRPRILVQMSPYDNLLLCQPVSSPLPLSGASFLQLLQSLGPELAITLLLAVLTEHKLLVHSLRPDLLTSVCEALVSMIFPLHWQCPYIPLCPLVLADVLSAPVPFIVGIHSSYFDLHDPPADVICVDLDTNTLFQTEEKKLLSPRTLPRRPYKVLLATLTNLYQQLDQTYTGPEEEASLEFLLTDYEAVCGRRARLEREVQGAFLRFMACLLKGYRVFLRPLTQAPSEGARDVDNLFFLQGFLKSRERSSHKLYSQLLHTQMFSQFIEECSFGSARHAALEFFDSCVEKVHPEQEKPEPTPLVELEELSGSELTVFITPPEEPALPEGSESTPQYCYDGFPELRAELFESLQEQPGALPVPGPSRSAPSSPAPRRTKQEMKVAQRMAQKSAAVPELWARCLLGHCYGLWFLCLPAYVRSAPSRVQALHTAYHVLRQMESGKVVLPDEVCYRVLMQLCSHYGQPVLSVRVMLEMRQAGIVPNTITYGYYNKAVLESKWPSGTPGGRLRWAKLRNVVLGAAQFRQPLRERQQQQQQQQQQQQQQQQQEQVSAHQEAGSSQAEPYLERPSPTRPLQRQTTWAGRSLRDPASPPGRLVKSGSLGSARGAQPTVEAGVAHMIEALGVLEPRGSPVPWHDGSLSDLSLTGEEPLPGGSPGGSGSALSAQSTEALEGLSGRGPKAGGRQDEAGTPRRGLGARLQQLLTPSRHSPASRIPPPELPPDLPPPARRSPMDSLLHPRERPGSTASESSASLGSEWDLSESSLSNLSLRRSSERLSDTPGSFQSPSLEILLSSCSLCRACDSLVYDEEVRWFVVPSKSGTGS

SEQ ID NO: 855710 - protein, 706 aa, Homo sapiens
MAEERPPRLVDYFVVAGLAGNGAPIPEETWVPEPSGPLRPPRPAEPITDVAVIARALGEEVPQGYTCIQASAGGHPLELSAGLLGGTQPVICYRRGRDKPPLVELGVLYEGKERPKPGFQVLDTTPYSHSANLAPPGPGHPRTYLTYRRAAEGAGLHALGITDLCLVLPSKGEGTPHTYCRLPRNLNPGMWGPAVYLCYKVGLAKANTLVYEAELLGRYPEEDNEAFPLPESVPVFCLPMGATIECWPAQTKYPVPVFSTFVLTGAAGDKVYGAALQFYEAFPRARLSERQARALGLLSAVERGRALGGRAVRSRRAIAVLSRWPAFPAFRAFLTFLYRYSVSGPHRLPLEAHISHFIHNVPFPSPQRPRILVQMSPYDNLLLCQPVSSPLPLRYVIRLWGGEPLMTKDMVGAGQVGAAVEVYAGWVQVVAVPGIWGRVPRVSWGPFPHLGIACSGASFLQLLQSLGPELAITLLLAVLTEHKLLVHSLRPDLLTSVCEALVSVSAAPPGPSSPEPWFFLVPLSLPGLFPFPSLWRILSPFPWAQPAGTHSFHQELFSRAYFQQPLSTGTNSPRPMPSLSLSCASHCCLNPLFTGSHCLVLQMIFPLHWQCPYIPLCPLVLADVLSAPVPFIVGIHSSYFDLHDPPADVICVDLDTNTLFQTEEKKLLSPRTLPRRPYKVLLATLTNLYQQLDQTMPFYLSVCILF

SEQ ID NO: 855711 - protein, 373 aa, Homo sapiens
MAEERPPRLVDYFVVAGLAGNGAPIPEETWVPEPSGPLRPPRPAEPITDVAVIARALGEEVPQGYTCIQASAGGHPLELSAGLLGGTQPVICYRRGRDKPPLVELGVLYEGKERPKPGFQVLDTTPYSHSANLAPPGPGHPRTYLTYRRAAEGAGLHALGITDLCLVLPSKGEGTPHTYCRLPRNLNPGMWGPAVYLCYKVGLAKANTLVYEAGEWPLYPSNPVTLHPFALVPLGRHLKCPQSLLSLCYSGLLWDPLVHFPWSLMDPAPFGYPNYAGGAELLGRYPEEDNEAFPLPESVPVFCLPMGATIECWPAQTKYPVPVFSTFVLTGAAGDKVYGAALQFYEAFPRARLSERQARVRWFVVPSKSGTGS

SEQ ID NO: 855712 - protein, 108 aa, Homo sapiens
SPKSAGASGSKDAPVPGGPGPVLSDRRLCLALDEPQLCNGHMGVRAGPKGHEERECCPVWGLWGARERWAHLLPLRARGIPKAVGCGGSVGGKALGMYMPSTALPLCA

SEQ ID NO: 855713 - protein, 167 aa, Homo sapiens
AGEPGRPHSPQPPRPWQEPKPGAAEAQRSAGAEGRGGWERRSPTHRPPPAQRAPRGADLPLLQETQPLVTMTSLLTTPSPREELMTTPILQPTEALSPEDGASTALIAVVITVVFLTLLSVVILIFFYLYKNKGSYVTYEPTEGEPSAIVQMESDLAKGSEKEEYFI

SEQ ID NO: 855714 - protein, 72 aa, Homo sapiens
EDTEDSGGDLPLLQETQPLVTMTSLLTTPSPREELMTTPILQPTEALSPEDGASTALIAVVSPPGFWDPLDH

SEQ ID NO: 855715 - protein, 80 aa, Homo sapiens
PAFAGASRISGARGAGWGPVRLGRLCADRALDGESRPGGGGQSGVPASEASQKAAHGRRLPVPARLLRCAHSALEPGRGS

SEQ ID NO: 855716 - protein, 158 aa, Homo sapiens
ARHPRLPPLGVLARPLLASATPRCPPPLSSKGRAERRRPFTSSPSDWKDLPLLQETQPLVTMTSLLTTPSPREELMTTPILQPTEALSPEDGASTALIAVVITVVFLTLLSVVILIFFYLYKNKGSYVTYEPTEGEPSAIVQMESDLAKGSEKEEYFI

SEQ ID NO: 855717 - protein, 51 aa, Homo sapiens
MTSLLTTPSPREELMTTPILQPTEALSPEDGASTALIAVVITTRILGSSRS

SEQ ID NO: 855718 - protein, 158 aa, Homo sapiens; identical to SEQ ID NO: 855716

SEQ ID NO: 855719 - protein, 80 aa, Homo sapiens; identical to SEQ ID NO: 855715

SEQ ID NO: 855720 - protein, 80 aa, Homo sapiens; identical to SEQ ID NO: 855715

SEQ ID NO: 855721 - protein, 80 aa, Homo sapiens; identical to SEQ ID NO: 855715

SEQ ID NO: 855722 - protein, 73 aa, Homo sapiens
AVVPVVRVRIEGLGGSRGEPALSPAGSTPDQGGLGPGRSLRPPPPTPCLEPPRGSGLFDLEDGAVPKSLRAKA

SEQ ID NO: 855723 - protein, 171 aa, Homo sapiens
ADLTREDLAPSSVDSGQAGFGGCCESGLPNTMPSAFSVSSFPVSIPAVLTQTDWTEPWLMGLATFHALCVLLTCLSSRSYRLQIGHFLCLVILVYCAEYINEAAAMNWRLFSKYQYFDSRGMFISIVFSAPLLVNAMIIVVMWVWKTLNVMTDLKNAQERRKEKKRRRKED

SEQ ID NO: 855724 - protein, 346 aa, Homo sapiens
  misc_feature (8)..(8): Xaa can be any naturally occurring amino acid
QAGTGPRXKMGSLGTGRRGRAGSMNNPIPSNLKSEAKKAAKILREFTEITSRNGPDKIIPAHVIAKAKGLAILSVIKAGFLVTARGGSGIVVARLPDGKWSAPSAIGIAGLGGGFEIGIEVSDLVIILNYDRAVEAFAKGGNLTLGGNLTVAVGPLGRNLEGNVALRSSAAVFTYCKSRGLFAGVSLEGSCLIERKETNRKFYCQDIRAYDILFGDTPRPAQAEDLYEILDSFTEKYENEGQRINARKAAREQRKSSAKELPPKPLSRPQQSSAPVQLNSGSQSNLNQPIEVTALYSFEGQQPGDLNFQAGDRITVISKTDSHFDWWEGKLRGQTGIFPANYVTMN

SEQ ID NO: 855725 - protein, 370 aa, Homo sapiens
RTNANRAARVRATPAQSAPVRLRRRSYDVNNPIPSNLKSEAKKAAKILREFTEITSRNGPDKIIPAHVIAKAKGLAILSVIKAGFLVTARGGSGIVVARLPDGKWSAPSAIGIAGLGGGFEIGIEVSDLVIILNYDRAVEAFAKGGNLTLGGNLTVAVGPLGRNLEGNVALRSSAAVFTYCKSRGLFAGVSLEGSCLIERKETNRKFYCQDIRAYDILFGDTPRPAQAEDLYEILDSFTEKYENEGQRINARKAAREQRKSSAKELPPKPLSRPQQSSAPVQLNSGSQSNRNEYKLYPGLSSYHERVGNLNQPIEVTALYSFEGQQPGDLNFQAGDRITVISKTDSHFDWWEGKLRGQTGIFPANYVTMN

SEQ ID NO: 855726 - protein, 121 aa, Homo sapiens
GGEGAAGVNNPIPSNLKSEAKKAAKILREFTEITSRNGPDKIIPAHVIAKAKGLAILSVIKAGFLVTARGGSGIVVARLPDGKWSAPSAIGIAGLGGGFEIGIETHLQLHIPSEHCPGCLP

SEQ ID NO: 855727 - protein, 280 aa, Homo sapiens
MNNPIPSNLKSEAKKAAKILREFTEITSRNGPDKIIPAHVIAKAKGLAILSVIKAGFLVTARGGSGIVVARLPDGKWSAPSAIGIAGLGGGFEIGIEVSDLVIILNYDRAVEAFAKGGNLTLGGNLTVAVGPLGRFYCQDIRAYDILFGDTPRPAQAEDLYEILDSFTEKYENEGQRINARKAAREQRKSSAKELPPKPLSRPQQSSAPVQLNSGSQSNLNQPIEVTALYSFEGQQPGDLNFQAGDRITVISKTDSHFDWWEGKLRGQTGIFPANYVTMN

SEQ ID NO: 855728 - protein, 216 aa, Homo sapiens
  misc_feature (8)..(8): Xaa can be any naturally occurring amino acid
QAGTGPRXKMGSLGTGRRGRAGSMNNPIPSNLKSEAKKAAKILREFTEITSRNGPDKIIPAHVIAKAKGLAILSVIKAGFLVTARGGSGIVVARLPDGKWSAPSAIGIAGLGGGFEIGIEVSDLVIILNYDRAVEAFAKGGNLTLGGNLTVAVGPLGRNLEGNVALRSSAAVFTYCKSRGLFAGVSLEGSCLIERKETNRKSVQVKVILIESVMRK

SEQ ID NO: 855729 - protein, 127 aa, Homo sapiens
MLSGYLQTDWTEPWLMGLATFHALCVLLTCLSSRSYRLQIGHFLCLVILVYCAEYINEAAAMNWRLFSKYQYFDSRGMFISIVFSAPLLVNAMIIVVMWVWKTLNVMTDLKNAQERRKEKKRRRKED

SEQ ID NO: 855730 - protein, 231 aa, Homo sapiens
  misc_feature (8)..(8): Xaa can be any naturally occurring amino acid
QAGTGPRXKMGSLGTGRRGRAGSMNNPIPSNLKSEAKKAAKILREFTEITSRNGPDKIIPAHVIAKAKGLAILSVIKAGFLVTARGGSGIVVARLPDGKWSAPSAIGIAGLGGGFEIGIEVSDLVIILNYDRAVEAFAKGGNLTLGGNLTVAVGPLGRFYCQDIRAYDILFGDTPRPAQAEDLYEILDSFTEKYENEGQRINARKAAREQRKSSVPFGFMFHSVFSENLFL

SEQ ID NO: 855731 - protein, 226 aa, Homo sapiens
MNNPIPSNLKSEAKKAAKILREFTEITSRNGPDKIIPAHVIAKAKGLAILSVIKAGFLVTARGGSGIVVARLPDGKWSAPSAIGIAGLGGGFEIGIEVSDLVIILNYDRAVEAFAKGGNLTLGGNLTVAVGPLGRFYCQDIRAYDILFGDTPRPAQAEDLYEILDSFTEKYENEGQRINARKAAREQRKSSAKELPPKPLSRPQQSSAPVQLNSGSQSKYFCCNSN

SEQ ID NO: 855732 - protein, 164 aa, Homo sapiens
VPGSSDRSQGSPRPTWPPRGDMGTRWGLGRKPCSPHLRASGLLQTDWTEPWLMGLATFHALCVLLTCLSSRSYRLQIGHFLCLVILVYCAEYINEAAAMNWRLFSKYQYFDSRGMFISIVFSAPLLVNAMIIVVMWVWKTLNVMTDLKNAQERRKEKKRRRKED

SEQ ID NO: 855733 - protein, 246 aa, Homo sapiens
MVSDLVIILNYDRAVEAFAKGGNLTLGGNLTVAVGPLGRNLEGNVALRSSAAVFTYCKSRGLFAGVSLEGSCLIERKETNRKFYCQDIRAYDILFGDTPRPAQAEDLYEILDSFTEKYENEGQRINARKAAREQRKSSAKELPPKPLSRPQQSSAPVQLNSGSQSNRNEYKLYPGLSSYHERVGNLNQPIEVTALYSFEGQQPGDLNFQAGDRITVISKTDSHFDWWEGKLRGQTGIFPANYVTMN

SEQ ID NO: 855734 - protein, 114 aa, Homo sapiens
MNNPIPSNLKSEAKKAAKILREFTEITSRNGPDKIIPAHVIAKAKGLAILSVIKAGFLVTARGGSGIVVARLPDGKWSAPSAIGIAGLGGGFEIGIETHLQLHIPSEHCPGCLP

SEQ ID NO: 855735 - protein, 365 aa, Homo sapiens
  misc_feature (8)..(8): Xaa can be any naturally occurring amino acid
QAGTGPRXKMGSLGTGRRGRAGSMNNPIPSNLKSEAKKAAKILREFTEITSRNGPDKIIPAHVIAKAKGLAILSVIKAGFLVTARGGSGIVVARLPDGKWSAPSAIGIAGLGGGFEIGIEVSDLVIILNYDRAVEAFAKGGNLTLGGNLTVAVGPLGRNLEGNVALRSSAAVFTYCKSRGLFAGVSLEGSCLIERKETNRKFYCQDIRAYDILFGDTPRPAQAEDLYEILDSFTEKYENEGQRINARKAAREQRKSSAKELPPKPLSRPQQSSAPVQLNSGSQSNRNEYKLYPGLSSYHERVGNLNQPIEVTALYSFEGQQPGDLNFQAGDRITVISKTDSHFDWWEGKLRGQTGIFPANYVTMN

SEQ ID NO: 855736 - protein, 349 aa, Homo sapiens
GGEGAAGVNNPIPSNLKSEAKKAAKILREFTEITSRNGPDKIIPAHVIAKAKGLAILSVIKAGFLVTARGGSGIVVARLPDGKWSAPSAIGIAGLGGGFEIGIEVSDLVIILNYDRAVEAFAKGGNLTLGGNLTVAVGPLGRNLEGNVALRSSAAVFTYCKSRGLFAGVSLEGSCLIERKETNRKFYCQDIRAYDILFGDTPRPAQAEDLYEILDSFTEKYENEGQRINARKAAREQRKSSAKELPPKPLSRPQQSSAPVQLNSGSQSNRNEYKLYPGLSSYHERVGNLNQPIEVTALYSFEGQQPGDLNFQAGDRITVISKTDSHFDWWEGKLRGQTGIFPANYVTMN

SEQ ID NO: 855737 - protein, 274 aa, Homo sapiens
  misc_feature (8)..(8): Xaa can be any naturally occurring amino acid
QAGTGPRXKMGSLGTGRRGRAGSMNNPIPSNLKSEAKKAAKILREFTEITSRNGPDKIIPAHVIAKAKGLAILSVIKAGFLVTARGGSGIVVARLPDGKWSAPSAIGIAGLGGGFEIGIEVSDLVIILNYDRAVEAFAKGGNLTLGGNLTVAVGPLGRNLEGNVALRSSAAVFTYCKSRGLFAGVSLEGSCLIERKETNRKFYCQDIRAYDILFGDTPRPAQAEDLYEILDSFTEKYENEGQRINARKAAREQRKSSVPFGFMFHSVFSENLFL

SEQ ID NO: 855738 - protein, 127 aa, Homo sapiens; identical to SEQ ID NO: 855729

SEQ ID NO: 855739 - protein, 144 aa, Homo sapiens
MGLATFHALCVLLTCLSSRSYRLQIGHFLCLVILVYCAEYINEAAAMNWRLFSKYQYFDSRGMFISIVFSAPLLVNAMIIVVMWVWKTLNVMTDLKNAQERRKEKKRRRKEDSGAPRGWISGPFPTTQAAPKAWRWGGCAHPPA

SEQ ID NO: 855740 - protein, 122 aa, Homo sapiens
MQTDWTEPWLMGLATFHALCVLLTCLSSRSYRLQIGHFLCLVILVYCAEYINEAAAMNWRLFSKYQYFDSRGMFISIVFSAPLLVNAMIIVVMWVWKTLNVMTDLKNAQERRKEKKRRRKED

SEQ ID NO: 855741 - protein, 129 aa, Homo sapiens
MKRNTCDLLSRSKSASEETLHSSNEEEDPFRGMEPYLVRRLSCRNIQLPPLAFRQLEQADLKSESENIQRPTSLPLKILPLIAITSAESSGRRHFSEIVLHGRAENVLVNANKHLPKGSCTWKINIGHM

SEQ ID NO: 855742 - protein, 559 aa, Homo sapiens
RSGIMRESALEPGPVPEAPAGGPVHAVTVVTLLEKLASMLETLRERQGGLARRQGGLAGSVRRIQSGLGALSRSHDTTSNTLAQLLAKAERVSSHANAAQERAVRRAAQVQRLEANHGLLVARGKLHVLLFKEEGEVPASAFQKAPEPLGPADQSELGPEQLEAEVGESSDEEPVESRAQRLRRTGLQKDAIRSHSESASPSALSSSPNNLSPTGWSQPKTPVPAQRERAPVSGTQEKNKIRPRGQRDSSYYWEIEASEVMLSTRIGSGSFGTVYKGKWHGDVAVKILKVVDPTPEQFQAFRNEVAVLRKTRHVNILLFMGYMTKDNLAIVTQWCEGSSLYKHLHVQETKFQMFQLIDIARQTAQGMDYLHAKNIIHRDMKSNNIFLHEGLTVKIGDFGLATVKSRWSGSQQVEQPTGSVLWMAPEVIRMQDNNPFSFQSDVYSYGIVLYELMTGELPYSHINNRDQIIFMVGRGYASPDLSKLYKNCPKAMKRLVADCVKKVKEERPLFPQILSSIELLQHSLPKINRSASEPSLHRAAHTEDINACTLTTSPRLPVF

SEQ ID NO: 855743 - protein, 113 aa, Homo sapiens
  misc_feature (2)..(2): Xaa can be any naturally occurring amino acid
  misc_feature (27)..(27): Xaa can be any naturally occurring amino acid
AXGVRSAGSPQGSHELVSCTELSPHGXSQPRCSFALRRTQWCEGSSLYKHLHVQETKFQMFQLIDIARQTAQGMDYLHAKNIIHRDMKSNSILWLLSSFDCSVLNLGKQKGGF

SEQ ID NO: 855744 - protein, 59 aa, Homo sapiens
MEHIQGAWKTISNGFGFKDAVFDGSSCISPTIVQQFGSQLRRTASVYLHEYNMRRYRAD

SEQ ID NO: 855745 - protein, 530 aa, Homo sapiens
MEHIQGAWKTISNGFGFKDAVFDGSSCISPTIVQQFGYQRRASDDGKLTDPSKTSNTIRVFLPNKQRTVVNVRNGMSLHDCLMKALKVRGLQPECCAVFRLLHEHKGKKARLDWNTDAASLIGEELQVDFLDHVPLTTHNFARKTFLKLAFCDICQKFLLNGFRCQTCGYKFHEHCSTKVPTMCVDWSNIRQLLLFPNSTIGDSGVPALPSLTMRRMRESVSRMPVSSQHRYSTPHAFTFNTSSPSSEGSLSQRQRSTSTPNVHMVSTTLPVDSRMIEDAIRSHSESASPSALSSSPNNLSPTGWSQPKTPVPAQRERAPVSGTQEKNKIRPRGQRDSSYYWEIEASEVMLSTRIGSGSFGTVYKGKWHGDVAVKILKVVDPTPEQFQAFRNEVAVLRKTRHVNILLFMGYMTKDNLAIVTQWCEGSSLYKHLHVQETKFQMFQLIDIARQTAQGMDYLHAKNIIHRDMKSNNIFLHEGLTVQVEQPTGSVLWMVRIWAPTSSLWYRAKGMPWRFMCKLKAFLYISPKST

SEQ ID NO: 855746 - protein, 615 aa, Homo sapiens
MEHIQGAWKTISNGFGFKDAVFDGSSCISPTIVQQFGYQRRASDDGKLTDPSKTSNTIRVFLPNKQRTVVNVRNGMSLHDCLMKALKVRGLQPECCAVFRLLHEHKGKKARLDWNTDAASLIGEELQVDFLDHVPLTTHNFARKTFLKLAFCDICQKFLLNGFRCQTCGYKFHEHCSTKVPTMCVDWSNIRQLFSQHRYSTPHAFTFNTSSPSSEGSLSQRQRSTSTPNVHMVSTTLPVDSRMIEDAIRSHSESASPSALSSSPNNLSPTGWSQPKTPVPAQRERAPVSGTQEKNKIRPRGQRDSSYYWEIEASEVMLSTRIGSGSFGTVYKGKWHGDVAVKILKVVDPTPEQFQAFRNEVAVLRKTRHVNILLFMGYMTKDNLAIVTQWCEGSSLYKHLHVQETKFQMFQLIDIARQTAQGMDYLHAKNIIHRDMKSNNIFLHEGLTVKIGDFGLATVKSRWSGSQQVEQPTGSVLWMAPEVIRMQDNNPFSFQSDVYSYGIVLYELMTGELPYSHINNRDQIIFMVGRGYASPDLSKLYKNCPKAMKRLVADCVKKVKEERPLFPQILSSIELLQHSLPKINRSASEPSLHRAAHTEDINACTLTTSPRLPVF

SEQ ID NO: 855747 - protein, 648 aa, Homo sapiens [sequence omitted]

SEQ ID NO: 855748 - protein, 130 aa, Homo sapiens
MQDNNPFSFQSDVYSYGIVLYELMTGELPYSHINNRDQIIFMVGRGYASPDLSKLYKNCPKAMKRLVADCVKKVKEERPLFPQILSSIELLQHSLPKINRSASEPSLHRAAHTEDINACTLTTSPRLPVF

SEQ ID NO: 855749 - protein, 648 aa, Homo sapiens [sequence omitted]

SEQ ID NO: 855750 - protein, 648 aa, Homo sapiens [sequence omitted]

SEQ ID NO: 855751 - protein, 648 aa, Homo sapiens [sequence omitted]

SEQ ID NO: 855752 - protein, 107 aa, Homo sapiens [sequence omitted]

SEQ ID NO: 855753 - protein, 112 aa, Homo sapiens
FLLMPLKLIFNNFFSLHSYLHAKNIIHRDMKSNSILWLLSSFDCSVLNLGKQKGGFLSQVALGARGYLFKERGRGQENRKVRKLVGLACPSAAYASPGLMRAMFRLGSFLSL

SEQ ID NO: 855754 - protein, 107 aa, Homo sapiens [sequence omitted]

SEQ ID NO: 855755 - protein, 648 aa, Homo sapiens [sequence omitted]

SEQ ID NO: 855756 - protein, 630 aa, Homo sapiens
MEHIQGAWKTISNGFGFKDAVFDGSSCISPTIVQQFGYQRRASDDGKLTDPSKTSNTIRVFLPNKQRTVVNVRNGMSLHDCLMKALKVRGLQPECCAVFRLLHEHKGKKARLDWNTDAASLIGEELQVDFLDHVPLTTHNFARKTFLKLAFCDICQKFLLNGFRCQTCGYKFHEHCSTKVPTMCVDWSNIRQLLLFPNSTIGDSGVPALPSLTMRRMRESVSRMPVSSQHRYSTPHAFTFNTSSPSSEGSLSQRQRSTSTPNVHMVSTTLPVDSRMIEDAIRSHSESASPSALSSSPNNLSPTGWSQPKTPVPAQRERAPVSGTQEKNKIRPRGQRDSSYYWEIEASEVMLSTRIGSGSFGTVYKGKWHGDVAVKILKVVDPTPEQFQAFRNEVAVLRKTRHVNILLFMGYMTKDNLAIVTQWCEGSSLYKHLHVQETKFQMFQLIDIARQTAQGMDYLHAKNIIHRDMKSNNIFLHEGLTVQVEQPTGSVLWMAPEVIRMQDNNPFSFQSDVYSYGIVLYELMTGELPYSHINNRDQIIFMVGRGYASPDLSKLYKNCPKAMKRLVADCVKKVKEERPLFPQILSSIELLQHSLPKINRSASEPSLHRAAHTEDINACTLTTSPRLPVF

SEQ ID NO: 855757 - protein, 648 aa, Homo sapiens [sequence omitted]

SEQ ID NO: 855758 - protein, 566 aa, Homo sapiens
MANSQILLRQATLSVFSCRTSKEQCKKARLDWNTDAASLIGEELQVDFLDHVPLTTHNFARKTFLKLAFCDICQKFLLNGFRCQTCGYKFHEHCSTKVPTMCVDWSNIRQLLLFPNSTIGDSGVPALPSLTMRRMRESVSRMPVSSQHRYSTPHAFTFNTSSPSSEGSLSQRQRSTSTPNVHMVSTTLPVDSRMIEDAIRSHSESASPSALSSSPNNLSPTGWSQPKTPVPAQRERAPVSGTQEKNKIRPRGQRDSSYYWEIEASEVMLSTRIGSGSFGTVYKGKWHGDVAVKILKVVDPTPEQFQAFRNEVAVLRKTRHVNILLFMGYMTKDNLAIVTQWCEGSSLYKHLHVQETKFQMFQLIDIARQTAQGMDYLHAKNIIHRDMKSNNIFLHEGLTVKIGDFGLATVKSRWSGSQQVEQPTGSVLWMAPEVIRMQDNNPFSFQSDVYSYGIVLYELMTGELPYSHINNRDQIIFMVGRGYASPDLSKLYKNCPKAMKRLVADCVKKVKEERPLFPQILSSIELLQHSLPKINRSASEPSLHRAAHTEDINACTLTTSPRLPVF

SEQ ID NO: 855759 - protein, 240 aa, Homo sapiens
MGYMTKDNLAIVTQWCEGSSLYKHLHVQETKFQMFQLIDIARQTAQGMDYLHAKNIIHRDMKSNNIFLHEGLTVKIGDFGLATVKSRWSGSQQVEQPTGSVLWMAPEVIRMQDNNPFSFQSDVYSYGIVLYELMTGELPYSHINNRDQIIFMVGRGYASPDLSKLYKNCPKAMKRLVADCVKKVKEERPLFPQILSSIELLQHSLPKINRSASEPSLHRAAHTEDINACTLTTSPRLPVF

SEQ ID NO: 855760 - protein, 117 aa, Homo sapiens
  misc_feature (47)..(47): Xaa can be any naturally occurring amino acid
  misc_feature (62)..(62): Xaa can be any naturally occurring amino acid
  misc_feature (117)..(117): Xaa can be any naturally occurring amino acid
FFVSWWFLEGFDDQGRGRRHHLNLGLSVLNGQFHCNPQALPVTPLPXNCHHQLFLETDPGAXSWGPGQKWHRLHLRSPQVYDFDLVGVELRRHGGGGWCRMNPDSGRPKKVLVPNSX

SEQ ID NO: 855761 - protein, 648 aa, Homo sapiens [sequence omitted]

SEQ ID NO: 855762 - protein, 530 aa, Homo sapiens; identical to SEQ ID NO: 855745

SEQ ID NO: 855763 - protein, 444 aa, Homo sapiens
MGPLQFRDVAIEFSLEEWHCLDAAQRNLYRDVMLENYRNLIFLGIVVSKPNLITCLEQGKKPLTMKRHEMIAKPPVMYSHFAQDLWSEQSIKDSFQKVILRRYEKCRHDNLQLKKGCESVDECPVHKRGYNGLKQCLATTQRKIFQCDEYVKFLHKFSNSNKHKIRDTGKKSFKCIEYGKTFNQSSTRTTYKKIDAGEKRYKCEECGKAYKQSSHLTTHKKIHTGEKPYKCEECGKAYKQSCNLTTHKIIHTGEKPYRCRECGKAFNHPATLFSHKKIHTGEKPYKCDKCGKAFISSSTLTKHEIIHTGEKPYKCEECGKAFNRSSNLTKHKRIHTGDVPYKCDECGKTFTWYSSLSKHKRAHTGEKPYKCEECGKAFTAFSTLTEHKIIHTGEKPYKCEECGKAFNWSSALNKHKKIHIRQKPCIVKNVENLLNVPQPLISIR

SEQ ID NO: 855764 - protein, 444 aa, Homo sapiens; identical to SEQ ID NO: 855763

SEQ ID NO: 855765 - protein, 444 aa, Homo sapiens; identical to SEQ ID NO: 855763

SEQ ID NO: 855766 - protein, 368 aa, Homo sapiens [sequence omitted]

SEQ ID NO: 855767 - protein, 444 aa, Homo sapiens; identical to SEQ ID NO: 855763

SEQ ID NO: 855768 - protein, 444 aa, Homo sapiens; identical to SEQ ID NO: 855763

SEQ ID NO: 855769 - protein, 444 aa, Homo sapiens; identical to SEQ ID NO: 855763

SEQ ID NO: 855770 - protein, 444 aa, Homo sapiens; identical to SEQ ID NO: 855763

SEQ ID NO: 855771 - protein, 107 aa, Homo sapiens
MGPLQFRDVAIEFSLEEWHCLDAAQRNLYRDVMLENYRNLIFLGIVVSKPNLITCLEQGKKPLTMKRHEMIAKPPDGVSVFHPGWSAVARSRLTATSTSARHGGSCL

SEQ ID NO: 855772 - protein, 111 aa, Homo sapiens
MGPLQFRDVAIEFSLEEWHCLDAAQRNLYRDVMLENYRNLIFLGIVVSKPNLITCLEQGKKPLTMKRHEMIAKPPDGVSVFHPGWSAVARSRLTATSTSQVHTILLPQLPE

SEQ ID NO: 855773 - protein, 136 aa, Homo sapiens
MGPLQFRDVAIEFSLEEWHCLDAAQRNLYRDVMLENYRNLIFLGIVVSKPNLITCLEQGKKPLTMKRHEMIAKPPDGVKFTRLGLPKCWGNRHEPPHPAKFISTSACSRVYCIISIYLKIYQLFILLSYTLIPFLS

SEQ ID NO: 855774 - protein, 444 aa, Homo sapiens; identical to SEQ ID NO: 855763

SEQ ID NO: 855775 - protein, 444 aa, Homo sapiens; identical to SEQ ID NO: 855763

SEQ ID NO: 855776 - protein, 444 aa, Homo sapiens; identical to SEQ ID NO: 855763

SEQ ID NO: 855777 - protein, 695 aa, Homo sapiens
RPRVAAGAAGRMGLSAAAPLWGPPGLLLAIALHPALSVPPRRDYCVLGAGPAGLQMAYFLQRAGRDYAVFERAPRPGSFFTRYPRHRKLISINKRYTGKANAEFNLRHDWNSLLSHDPRLLFRHYSRAYFPDARDMVRYLGDFADTLGLRVQYNTTIAHVTLDKDRQAWNGHYFILTDQKGQVHQCSVLFVATGLSVPNQVDFPGSEYAEGYESVSVDPEDFVGQNVLILGRGNSAFETAENILGVTNFIHMLSRSRVRLSWATHYVGDLRAINNGLLDTYQLKSLDGLLESDLTDLAILKDSKGKFHVTPKFFLEEANTNQSADSITLPQDDNDNFAMRVPYDRVIRCLGWNFDFSIFNKSLRLNSGNAFGKKYPLIRASYESKGSRGLFILGTASHSVDYRKSAGGFIHGFRYTVRAVHRLLEHRHHSVTWPATELPITQLTSSIVRRVNEASGLYQMFGVLADVILLKENSTAFEYLEEFPIQMLAQLETLTGRKAKHGLFVINMEYGRNFSGPDKDVFFDDRSVGHTEDAWQSNFLHPVIYYYRYLPTEQEVRFRPAHWPLPRPTAIHHIVEDFLTDWTAPIGHILPLRRFLENCLDTDLRSFYAESCFLFALTRQKLPPFCQQGYLRMQGLVSTESLWQHRVESRLLRDYAPTGRRLEDSSQQLGDQEPLGSPLAPGPLAQSVDSNKEEL

SEQ ID NO: 855778 - protein, 695 aa, Homo sapiens; identical to SEQ ID NO: 855777

SEQ ID NO: 855779 - protein, 203 aa, Homo sapiens
CSVPFLPLAVPVRAVHRLLEHRHHSVTWPATELPITQLTSSIVRRVNEASGLYQMFGVLADVILLKETGGEVPPCTLAPASAHGHPSHRGRLLNRLDCPDRAHPTSEALPGELFGHRFAKLLCRVLLPVRPHAPEVATLLPAGVPEDAGTREYREPLAAQSGEQAPAGLCPHRQAPGGQQPAAWRPRATRFPPGSRASGSVRR

SEQ ID NO: 855780 - protein, 666 aa, Homo sapiens
RPRVAAGAAGRMGLSAAAPLWGPPGLLLAIALHPALSVPPRRDYCVLGAGPAGLQMAYFLQRAGRDYAVFERAPRPGSFFTRYPRHRKLISINKRYTGKANAEFNLRHDWNSLLSHDPRLLFRHYSRAYFPDARDMVRYLGDFADTLGLRVQYNTTIAHVTLDKDRQAWNGHYFILTDQKGQVHQCSVLFVATGLSVPNQVDFPGSEYAEGYESVSVDPEDFVGQNVLILGRGNSAFETAENILGVTNFIHMLSRSRVRLSWATHYVGDLRAINNGLLDTYQLKSLDGLLESDLTDLAILKDSKGKFHVTPKFFLEEANTNQSADSITLPQDDNDNFAMRVPYDRVIRCLGWNFDFSIFNKSLRLNSGNAFGKKYPLIRASYESKGSRGLFILGTASHSVDYRKSAGGFIHGFRYTVRAVHRLLEHRHHSVTWPATELPITQLTSSIVRRVNEASGLYQMFGVLADVILLKENSTAFEYLEEFPIQMLAQLETLTGRKAKHGLFVINMEYGRNFSGPDKDVFFDDRSVGHTEDAWQSNFLHPVIYYYRYLPTEQEVRFRPAHWPLPRPTAIHHIVEDFLTDWTAPIGHILPLRRFLENCLDTDLRSFYAESCFLFALTRQKLPPFCQQGYLRMQGLMAQRLLLRRFLASVISRKPSQGQWPPLTSR

SEQ ID NO: 855781 - protein, 383 aa, Homo sapiens
MSPEVALNRISPMLSPFISSVVRNGKVGLDATNCLRITDLKSGCTSLTPGPNCDRFKLHIPYAGETLKWDIIFNAQYPELPPDFIFGEDAEFLPDPSALQNLASWNPSNPECLLLVVKELVQQYHQFQCSRLRESSRLMFEYQTLLEEPQYGENMEIYAGKKNNWTGEFSARFLLKLPVDFSNIPTYLLKDVNEDPGEDVALLSVSFEDTEATQVYPKLYLSPRIEHALGGSSALHIPAFPGGGCLIDYVPQVCHLLTNKVQYVIQGYHKRREYIAAFLSHFGTGVVEYDAEGFTKLTLLLMWKDFCFLVHIDLPLFFPRDQPTLTFQSVYHFTNSGQLYSQAQKNYPYSPRWDGNEMAKRAKAYFKTFVPQFQEAAFANGKL

SEQ ID NO: 855782 - protein, 383 aa, Homo sapiens; identical to SEQ ID NO: 855781

SEQ ID NO: 855783 - protein, 383 aa, Homo sapiens; identical to SEQ ID NO: 855781

SEQ ID NO: 855784 - protein, 383 aa, Homo sapiens; identical to SEQ ID NO: 855781

SEQ ID NO: 855785 - protein, 383 aa, Homo sapiens; identical to SEQ ID NO: 855781

SEQ ID NO: 855786 - protein, 383 aa, Homo sapiens; identical to SEQ ID NO: 855781

SEQ ID NO: 855787 - protein, 383 aa, Homo sapiens; identical to SEQ ID NO: 855781

SEQ ID NO: 855788 - protein, 383 aa, Homo sapiens
MFEYQTLLEEPQYGENMEIYAGKKNNWTGEFSARFLLKLPVDFSNIPTYLLKDVNEDPGEDVALLSVSFEDTEATQVYPKLYLSPRIEHALGGSSALHIPAFPGGGCLIDYVPQVCHLLTNKVQYVIQGYHKRREYIAAFLSHFGTGVVEYDAEGFTKLTLLLMWKDFCFLVHIDLPLFFPRDQPTLTFQSVYHFTNSGQLYSQAQKNYPYSPRWDGNEMAKRAKGCQGSRDACSPWEQVLAFAVAKTGCKLLQPQRKLAKLQRASLEGLRGRENCSVILITLGLFQNLCPSVPGGSICQWKALGNTSLERWPARLPVHMRVSTYSRFLEAAWNVFTAAFCSHSSFCTPQAAPTAEIQLELAGGPWILEPFTSGYSLFLASIS

SEQ ID NO: 855789 - protein, 383 aa, Homo sapiens; identical to SEQ ID NO: 855788

SEQ ID NO: 855790 - protein, 177 aa, Homo sapiens
MSPEVALNRISPMLSPFISSVVRNGKVGLDATNCLRITDLKSGCTSLTPGPNCDRFKLHIPYAGETLKWDIIFNAQYPELPPDFIFGEDAEFLPDPSALQNLASWNPSNPECLLLVVKELVQQYHQFQCSRLRESSRLMFEYQTLLEEPQYGENMEIYAGKKNNWISAISPHTFSRM

SEQ ID NO: 855791 - protein, 318 aa, Homo sapiens
MSPEVALNRISPMLSPFISSVVRNGKVGLDATNCLRITDLKSGCTSLTPGPNCDRFKLHIPYAGETLKWDIIFNAQYPELPPDFIFGEDAEFLPDPSALQTGEFSARFLLKLPVDFSNIPTYLLKDVNEDPGEDVALLSVSFEDTEATQVYPKLYLSPRIEHALGGSSALHIPAFPGGGCLIDYVPQVCHLLTNKVQYVIQGYHKRREYIAAFLSHFGTGVVEYDAEGFTKLTLLLMWKDFCFLVHIDLPLFFPRDQPTLTFQSVYHFTNSGQLYSQAQKNYPYSPRWDGNEMAKRAKAYFKTFVPQFQEAAFANGKL

SEQ ID NO: 855792 - protein, 369 aa, Homo sapiens
  misc_feature (6)..(6): Xaa can be any naturally occurring amino acid
  misc_feature (21)..(21): Xaa can be any naturally occurring amino acid
  misc_feature (24)..(24): Xaa can be any naturally occurring amino acid
  misc_feature (53)..(53): Xaa can be any naturally occurring amino acid
  misc_feature (60)..(60): Xaa can be any naturally occurring amino acid
  misc_feature (70)..(70): Xaa can be any naturally occurring amino acid
  misc_feature (80)..(80): Xaa can be any naturally occurring amino acid
  misc_feature (83)..(84): Xaa can be any naturally occurring amino acid
  misc_feature (86)..(93): Xaa can be any naturally occurring amino acid
  misc_feature (95)..(95): Xaa can be any naturally occurring amino acid
  misc_feature (97)..(98): Xaa can be any naturally occurring amino acid
  misc_feature (101)..(101): Xaa can be any naturally occurring amino acid
  misc_feature (111)..(111): Xaa can be any naturally occurring amino acid
  misc_feature (118)..(118): Xaa can be any naturally occurring amino acid
  misc_feature (120)..(120): Xaa can be any naturally occurring amino acid
  misc_feature (123)..(123): Xaa can be any naturally occurring amino acid
  misc_feature (125)..(126): Xaa can be any naturally occurring amino acid
NPEVKXLDPGTTSQLKWISAXGAXWGVQKLLCEQKRCREDIPGGFQEAAVCAXTHVQQAXWLATSQDWCXLELTIGKSCXLEXXKXXXXXXXXSXGXXIAXPSGAVRIIFXGLGVKLXTXGKXIXXLKCESWLFSREKQRQVNVYKKTTSTTGEFSARFLLKLPVDFSNIPTYLLKDVNEDPGEDVALLSVSFEDTEATQVYPKLYLSPRIEHALGGSSALHIPAFPGGGCLIDYVPQVCHLLTNKVQYVIQGYHKRREYIAAFLSHFGTGVVEYDAEGFTKLTLLLMWKDFCFLVHIDLPLFFPRDQPTLTFQSVYHFTNSGQLYSQAQKNYPYSPRWDGNEMAKRAKAYFKTFVPQFQEAAFANGKL

SEQ ID NO: 855793 - protein, 114 aa, Homo sapiens
ASSGPHTPPARRLKGLFQNLCPSVPGGSICQWKALGNTSLERWPARLPVHMRVSTYSRFLEAAWNVFTAAFCSHSSFCTPQAAPTAEIQLELAGGPWILEPFTSGYSLFLASIS

SEQ ID NO: 855794 - protein, 166 aa, Homo sapiens
MSPEVALNRISPMLSPFISSVVRNGKVGLDATNCLRITDLKSGCTSLTPGPNCDRFKLHIPYAGETLKWDIIFNAQYPELPPDFIFGEDAEFLPDPSALQNLASWNPSNPECLLLVVKELVQQYHQFQCSRLRESSRLMFEYQTLLEEPQYGENMEIYAGKKNNWG

SEQ ID NO: 855795 - protein, 112 aa, Homo sapiens
RTLRLSNHTEASGLFQNLCPSVPGGSICQWKALGNTSLERWPARLPVHMRVSTYSRFLEAAWNVFTAAFCSHSSFCTPQAAPTAEIQLELAGGPWILEPFTSGYSLFLASIS

SEQ ID NO: 855796 - protein, 521 aa, Homo sapiens
MSPEVALNRISPMLSPFISSVVRNGKVGLDATNCLRITDLKSGCTSLTPGPNCDRFKLHIPYAGETLKWDIIFNAQYPELPPDFIFGEDAEFLPDPSALQNLASWNPSNPECLLLVVKELVQQYHQFQCSRLRESSRLMFEYQTLLEEPQYGENMEIYAGKKNNWTGEFSARFLLKLPVDFSNIPTYLLKDVNEDPGEDVALLSVSFEDTEATQVYPKLYLSPRIEHALGGSSALHIPAFPGGGCLIDYVPQVCHLLTNKVQYVIQGYHKRREYIAAFLSHFGTGVVEYDAEGFTKLTLLLMWKDFCFLVHIDLPLFFPRDQPTLTFQSVYHFTNSGQLYSQAQKNYPYSPRWDGNEMAKRAKGCQGSRDACSPWEQVLAFAVAKTGCKLLQPQRKLAKLQRASLEGLRGRENCSVILITLGLFQNLCPSVPGGSICQWKALGNTSLERWPARLPVHMRVSTYSRFLEAAWNVFTAAFCSHSSFCTPQAAPTAEIQLELAGGPWILEPFTSGYSLFLASIS

SEQ ID NO: 855797 - protein, 383 aa, Homo sapiens; identical to SEQ ID NO: 855781

SEQ ID NO: 855798 - protein, 521 aa, Homo sapiens; identical to SEQ ID NO: 855796

SEQ ID NO: 855799 - protein, 383 aa, Homo sapiens; identical to SEQ ID NO: 855781

SEQ ID NO: 855800 - protein, 363 aa, Homo sapiens
MSPEVALNRISPMLSPFISSVVRNGKVGLDATNCLRITDLKSGCTSLTPGPNCDRFKLHIPYAGETLKWDIIFNAQYPELPPDFIFGEDAEFLPDPSALQNLASWNPSNPECLLLVVKELVQQYHQFQCSRLRESSRLMFEYQTLLEEPQYGENMEIYAGKKNNWTGEFSARFLLKLPVDFSNIPTYLLKDVNEDPGEDVALLSVSFEDTEATQVYPKLYLSPRIEHALGGSSALHIPAFPGGGCLIDYVPQVCHLLTNKVQYVIQGYHKRREYIAAFLSHFGTGVVEYDAEGFTKLTLLLMWKDFCFLVHIDLPLFFPRDQPTLTFQSVYHFTNSGQLYSQAQKNYPYSPRWDGNEMAKRAK

SEQ ID NO: 855801 - protein, 468 aa, Homo sapiens
QKQMLAPCFLYSLQNWDIIFNAQYPELPPDFIFGEDAEFLPDPSALQNLASWNPSNPECLLLVVKELVQQYHQFQCSRLRESSRLMFEYQTLLEEPQYGENMEIYAGKKNNWTGEFSARFLLKLPVDFSNIPTYLLKDVNEDPGEDVALLSVSFEDTEATQVYPKLYLSPRIEHALGGSSALHIPAFPGGGCLIDYVPQVCHLLTNKVQYVIQGYHKRREYIAAFLSHFGTGVVEYDAEGFTKLTLLLMWKDFCFLVHIDLPLFFPRDQPTLTFQSVYHFTNSGQLYSQAQKNYPYSPRWDGNEMAKRAKGCQGSRDACSPWEQVLAFAVAKTGCKLLQPQRKLAKLQRASLEGLRGRENCSVILITLGLFQNLCPSVPGGSICQWKALGNTSLERWPARLPVHMRVSTYSRFLEAAWNVFTAAFCSHSSFCTPQAAPTAEIQLELAGGPWILEPFTSGYSLFLASIS

SEQ ID NO: 855802 - protein, 358 aa, Homo sapiens
MSPEVALNRISPMLSPFISSVVRNGKVGLDATNCLRITDLKSGCTSLTPGPNCDRFKLHIPYAGETLKWDIIFNAQYPELPPDFIFGEDAEFLPDPSALQNLASWNPSNPECLLLVVKELVQQYHQFQCSRLRESSRLMFEYQTLLEEPQYGENMEIYAGKKNNWDVNEDPGEDVALLSVSFEDTEATQVYPKLYLSPRIEHALGGSSALHIPAFPGGGCLIDYVPQVCHLLTNKVQYVIQGYHKRREYIAAFLSHFGTGVVEYDAEGFTKLTLLLMWKDFCFLVHIDLPLFFPRDQPTLTFQSVYHFTNSGQLYSQAQKNYPYSPRWDGNEMAKRAKAYFKTFVPQFQEAAFANGKL

SEQ ID NO: 855803 - protein, 271 aa, Homo sapiens
MSPEVALNRISPMLSPFISSVVRNGKVGLDATNCLRITDLKSGCTSLTPGPNCDRFKLHIPYAGETLKWDIIFNAQYPELPPDFIFGEDAEFLPDPSALQNLASWNPSNPECLLLVVKELVQQYHQFQCSRLRESSRLMFEYQTLLEEPQYGENMEIYAGKKNNWTGEFSARFLLKLPVDFSNIPTYLLKDVNEDPGEDVALLSVSFEDTEATQVYPKLYLSPRIEQDGISLCVYAQAGLKLLSSHNHQPTPPEVLGIAGPRPHTCPDLAL

SEQ ID NO: 855804 - protein, 166 aa, Homo sapiens; identical to SEQ ID NO: 855794

SEQ ID NO: 855805 - protein, 172 aa, Homo sapiens
MSPEVALNRISPMLSPFISSVVRNGKVGLDATNCLRITDLKSGCTSLTPGPNCDRFKLHIPYAGETLKWDIIFNAQYPELPPDFIFGEDAEFLPDPSALQMESCSVAQARVEWLNLGSLQAPPPGFTPFSCLSLPSSWDYRRPPPHLASFFIFLVEMGFHHVSQDGLHLLTS

SEQ ID NO: 855806 - protein, 430 aa, Homo sapiens
MVAPNDLVFDGWDISSLNLAEAMRRAKVLDWGLQEQLWPHMEALRPRPSVYIPEFIAANQSARADNLIPGSRAQQLEQIRRDIRDFRSSAGLDKVIVLWTANTERFCEVIPGLNDTAENLLRTIELGLEVSPSTLFAVASILEGCAFLNGSPQNTLVPGALELAWQHRVFVGGDDFKSGQTKVKSVLVDFLIGSGLKTMSIVSYNHLGNNDGENLSAPLQFRSKEVSKSNVVDDMVQSNPVLYTPGEEPDHCVVIKYVPYVGDSKRALDEYTSELMLGGTNTLVLHNTCEDSLLAAPIMLDLALLTELCQRVSFCTDMDPEPQTFHPVLSLLSFLFKAPLVPPGSPVVNALFRQRSCIENILRACVGLPPQNHMLLEHKMERPGPSLKRVGPVAATYPMLNKKGPVPAATNGCTGDANGHLQEEPPMPTT

SEQ ID NO: 855807 - protein, 86 aa, Homo sapiens
QLVPACAVGQRSCIENILRACVGLPPQNHMLLEHKMERPGPSLKRVGPVAATYPMLNKKGPVPAATNGCTGDANGHLQEEPPMPTT

SEQ ID NO: 855808 - protein, 558 aa, Homo sapiens
MEAAAQFFVESPDVVYGPEAIEAQYEYRTTRVSREGGVLKVHPTSTRFTFRTARQVPRLGVMLVGWGGNNGSTLTAAVLANRLRLSWPTRSGRKEANYYGSLTQAGTVSLGLDAEGQEVFVPFSAVLPMVAPNDLVFDGWDISSLNLAEAMRRAKVLDWGLQEQLWPHMEALRPRPSVYIPEFIAANQSARADNLIPGSRAQQLEQIRRDIRDFRSSAGLDKVIVLWTANTERFCEVIPGLNDTAENLLRTIELGLEVSPSTLFAVASILEGCAFLNGSPQNTLVPGALELAWQHRVFVGGDDFKSGQTKVKSVLVDFLIGSGLKTMSIVSYNHLGNNDGENLSAPLQFRSKEVSKSNVVDDMVQSNPVLYTPGEEPDHCVVIKYVPYVGDSKRALDEYTSELMLGGTNTLVLHNTCEDSLLAAPIMLDLALLTELCQRVSFCTDMDPEPQTFHPVLSLLSFLFKAPLVPPGSPVVNALFRQRSCIENILRACVGLPPQNHMLLEHKMERPGPSLKRVGPVAATYPMLNKKGPVPAATNGCTGDANGHLQEEPPMPTT

SEQ ID NO: 855809 - protein, 504 aa, Homo sapiens
MEAAAQFFVESPDVVYGPEAIEAQYEYRTTRVSREGGVLKEANYYGSLTQAGTVSLGLDAEGQEVFVPFSAVLPMVAPNDLVFDGWDISSLNLAEAMRRAKVLDWGLQEQLWPHMEALRPRPSVYIPEFIAANQSARADNLIPGSRAQQLEQIRRDIRDFRSSAGLDKVIVLWTANTERFCEVIPGLNDTAENLLRTIELGLEVSPSTLFAVASILEGCAFLNGSPQNTLVPGALELAWQHRVFVGGDDFKSGQTKVKSVLVDFLIGSGLKTMSIVSYNHLGNNDGENLSAPLQFRSKEVSKSNVVDDMVQSNPVLYTPGEEPDHCVVIKYVPYVGDSKRALDEYTSELMLGGTNTLVLHNTCEDSLLAAPIMLDLALLTELCQRVSFCTDMDPEPQTFHPVLSLLSFLFKAPLVPPGSPVVNALFRQRSCIENILRACVGLPPQNHMLLEHKMERPGPSLKRVGPVAATYPMLNKKGPVPAATNGCTGDANGHLQEEPPMPTT

SEQ ID NO: 855810 - protein, 589 aa, Homo sapiens
MEAAAQFFVESPDVVYGPEAIEAQYEYRTTRVSREGGVLKVHPTSTRFTFRTARQVPRLGVMLVGWGGNNGSTLTAAVLANRLRLSWPTRSGRKEANYYGSLTQAGTVSLGLDAEGQEVFVPFSAVLPMVAPNDLVFDGAEPWAGVGRDGRWGLEGPRIRAGPSVRVPPGWDISSLNLAEAMRRAKVLDWGLQEQLWPHMEALRPRPSVYIPEFIAANQSARADNLIPGSRAQQLEQIRRDIRDFRSSAGLDKVIVLWTANTERFCEVIPGLNDTAENLLRTIELGLEVSPSTLFAVASILEGCAFLNGSPQNTLVPGALELAWQHRVFVGGDDFKSGQTKVKSVLVDFLIGSGLKTMSIVSYNHLGNNDGENLSAPLQFRSKEVSKSNVVDDMVQSNPVLYTPGEEPDHCVVIKYVPYVGDSKRALDEYTSELMLGGTNTLVLHNTCEDSLLAAPIMLDLALLTELCQRVSFCTDMDPEPQTFHPVLSLLSFLFKAPLVPPGSPVVNALFRQRSCIENILRACVGLPPQNHMLLEHKMERPGPSLKRVGPVAATYPMLNKKGPVPAATNGCTGDANGHLQEEPPMPTT

SEQ ID NO: 855811 - protein, 541 aa, Homo sapiens
MEAAAQFFVESPDVVYGPEAIEAQYEYRTTRVSREGGVLKVHPTSTRFTFRTARQVPRLGVMLVGWGGNNGSTLTAAVLANRLRLSWPTRSGRKEANYYGSLTQAGTVSLGLDAEGQEVFVPFSAVLPMVAPNDLVFDGWDISSLNLAEAMRRAKVLDWGLQEQLWPHMEALRPRPSVYIPEFIAANQSARADNLIPGSRAQQLEQIRRDIRDFRSSAGLDKVIVLWTANTERFCELGLEVSPSTLFAVASILEGCAFLNGSPQNTLVPGALELAWQHRVFVGGDDFKSGQTKVKSVLVDFLIGSGLKTMSIVSYNHLGNNDGENLSAPLQFRSKEVSKSNVVDDMVQSNPVLYTPGEEPDHCVVIKYVPYVGDSKRALDEYTSELMLGGTNTLVLHNTCEDSLLAAPIMLDLALLTELCQRVSFCTDMDPEPQTFHPVLSLLSFLFKAPLVPPGSPVVNALFRQRSCIENILRACVGLPPQNHMLLEHKMERPGPSLKRVGPVAATYPMLNKKGPVPAATNGCTGDANGHLQEEPPMPTT

SEQ ID NO: 855812 - protein, 634 aa, Homo sapiens
MGLPGRCCCPRRGSRWQCGSEEILALEFWSSACFPCSVSDPDPLPTPPEAQLPCPAPPPGLWLGSCVASLSSCKGGKAAMSPWGLRSERGEPIRAALVDAWPLPPGGDPMATVALGCRASNRVSRRWAPPSQRGRGGEGGGAGEGPQRFSPEVARPRARAVRRRCLSRLCAARRDGGRRPVLRREPGRGLRPRGHRGAIRVPDDARQPRGWRSQGWDISSLNLAEAMRRAKVLDWGLQEQLWPHMEALRPRPSVYIPEFIAANQSARADNLIPGSRAQQLEQIRRDIRDFRSSAGLDKVIVLWTANTERFCEVIPGLNDTAENLLRTIELGLEVSPSTLFAVASILEGCAFLNGSPQNTLVPGALELAWQHRVFVGGDDFKSGQTKVKSVLVDFLIGSGLKTMSIVSYNHLGNNDGENLSAPLQFRSKEVSKSNVVDDMVQSNPVLYTPGEEPDHCVVIKYVPYVGDSKRALDEYTSELMLGGTNTLVLHNTCEDSLLAAPIMLDLALLTELCQRVSFCTDMDPEPQTFHPVLSLLSFLFKAPLVPPGSPVVNALFRQRSCIENILRACVGLPPQNHMLLEHKMERPGPSLKRVGPVAATYPMLNKKGPVPAATNGCTGDANGHLQEEPPMPTT

SEQ ID NO: 855813 - protein, 558 aa, Homo sapiens; identical to SEQ ID NO: 855808

SEQ ID NO: 855814 - protein, 453 aa, Homo sapiens
  misc_feature (8)..(8): Xaa can be any naturally occurring amino acid
TLRLGTRXRVYQEVFVPFSAVLPMVAPNDLVFDGWDISSLNLAEAMRRAKVLDWGLQEQLWPHMEALRPRPSVYIPEFIAANQSARADNLIPGSRAQQLEQIRRDIRDFRSSAGLDKVIVLWTANTERFCEVIPGLNDTAENLLRTIELGLEVSPSTLFAVASILEGCAFLNGSPQNTLVPGALELAWQHRVFVGGDDFKSGQTKVKSVLVDFLIGSGLKTMSIVSYNHLGNNDGENLSAPLQFRSKEVSKSNVVDDMVQSNPVLYTPGEEPDHCVVIKYVPYVGDSKRALDEYTSELMLGGTNTLVLHNTCEDSLLAAPIMLDLALLTELCQRVSFCTDMDPEPQTFHPVLSLLSFLFKAPLVPPGSPVVNALFRQRSCIENILRACVGLPPQNHMLLEHKMERPGPSLKRVGPVAATYPMLNKKGPVPAATNGCTGDANGHLQEEPPMPTT

SEQ ID NO: 855815 - protein, 256 aa, Homo sapiens
MEAAAQFFVESPDVVYGPEAIEAQYEYRTTRVSREGGVLKVHPTSTRFTFRTARQVPRLGVMLVGWGGNNGSTLTAAVLANRLRLSWPTRSGRKEANYYGSLTQAGTVSLGLDAEGQEVFVPFSAVLPMVAPNDLVFDGAEPWAGVGRDGRWGLEGPRIRAGPSVRVPPGWDISSLNLAEAMRRAKVLDWGLQEQLWPHMEALRPRPSVYIPEFIAANQSARADNLIPGSRAQQVLSHPASLASCHLFFATWFPLF

SEQ ID NO: 855816 - protein, 205 aa, Homo sapiens
MGLPGRCCCPRRGSRWQCGSEEILALEFWSSACFPCSVSDPDPLPTPPEAQLPCPAPPPGLWLGSCVASLSSCKGGKAAMSPWGLRSERGEPIRAALVDAWPLPPGGDPMATVALGCRASNRVSRRWAPPSQRGRGGEGGGAGEGPQRFSPEVARPRARAVRRRCLSRLCAGECGSGQGRPPWGPRLAWPRPLRVPADPPPTTLP

SEQ ID NO: 855817 - protein, 558 aa, Homo sapiens; identical to SEQ ID NO: 855808

SEQ ID NO: 855818 - protein, 558 aa, Homo sapiens; identical to SEQ ID NO: 855808

SEQ ID NO: 855819 - protein, 767 aa, Homo sapiens
MGLPGRCCCPRRGSRWQCGSEEILALEFWSSACFPCSVSDPDPLPTPPEAQLPCPAPPPGLWLGSCVASLSSCKGGKAAMSPWGLRSERGEPIRAALVDAWPLPPGGDPMATVALGCRASNRVSRRWAPPSQRGRGGEGGGAGEGPQRFSPEVARPRARAVRRRCLSRLCAGECGSGQGRPPWGPRLAWPRPLRVPADPLLTPGPQPAAMEAAAQFFVESPDVVYGPEAIEAQYEYRTTRVSREGGVLKVHPTSTRFTFRTARQVPRLGVMLVGWGGNNGSTLTAAVLANRLRLSWPTRSGRKEANYYGSLTQAGTVSLGLDAEGQEVFVPFSAVLPMVAPNDLVFDGWDISSLNLAEAMRRAKVLDWGLQEQLWPHMEALRPRPSVYIPEFIAANQSARADNLIPGSRAQQLEQIRRDIRDFRSSAGLDKVIVLWTANTERFCEVIPGLNDTAENLLRTIELGLEVSPSTLFAVASILEGCAFLNGSPQNTLVPGALELAWQHRVFVGGDDFKSGQTKVKSVLVDFLIGSGLKTMSIVSYNHLGNNDGENLSAPLQFRSKEVSKSNVVDDMVQSNPVLYTPGEEPDHCVVIKYVPYVGDSKRALDEYTSELMLGGTNTLVLHNTCEDSLLAAPIMLDLALLTELCQRVSFCTDMDPEPQTFHPVLSLLSFLFKAPLVPPGSPVVNALFRQRSCIENILRACVGLPPQNHMLLEHKMERPGPSLKRVGPVAATYPMLNKKGPVPAATNGCTGDANGHLQEEPPMPTT

SEQ ID NO: 855820 - protein, 558 aa, Homo sapiens; identical to SEQ ID NO: 855808

SEQ ID NO: 855821 - protein, 232 aa, Homo sapiens
MSIVSYNHLGNNDGENLSAPLQFRSKEVSKSNVVDDMVQSNPVLYTPGEEPDHCVVIKYVPYVGDSKRALDEYTSELMLGGTNTLVLHNTCEDSLLAAPIMLDLALLTELCQRVSFCTDMDPEPQTFHPVLSLLSFLFKAPLVPPGSPVVNALFRQRSCIENILRACVGLPPQNHMLLEHKMERPGPSLKRVGPVAATYPMLNKKGPVPAATNGCTGDANGHLQEEPPMPTT

SEQ ID NO: 855822 - protein, 558 aa, Homo sapiens; identical to SEQ ID NO: 855808

SEQ ID NO: 855823 - protein, 460 aa, Homo sapiens
YKRDPLSVVWAEPWAGVGRDGRWGLEGPRIRAGPSVRVPPGWDISSLNLAEAMRRAKVLDWGLQEQLWPHMEALRPRPSVYIPEFIAANQSARADNLIPGSRAQQLEQIRRDIRDFRSSAGLDKVIVLWTANTERFCEVIPGLNDTAENLLRTIELGLEVSPSTLFAVASILEGCAFLNGSPQNTLVPGALELAWQHRVFVGGDDFKSGQTKVKSVLVDFLIGSGLKTMSIVSYNHLGNNDGENLSAPLQFRSKEVSKSNVVDDMVQSNPVLYTPGEEPDHCVVIKYVPYVGDSKRALDEYTSELMLGGTNTLVLHNTCEDSLLAAPIMLDLALLTELCQRVSFCTDMDPEPQTFHPVLSLLSFLFKAPLVPPGSPVVNALFRQRSCIENILRACVGLPPQNHMLLEHKMERPGPSLKRVGPVAATYPMLNKKGPVPAATNGCTGDANGHLQEEPPMPTT

SEQ ID NO: 855824 - protein, 230 aa, Homo sapiens
MEAAAQFFVESPDVVYGPEAIEAQYEYRTTRVSREGGVLKVHPTSTRFTFRTARQVPRLGVMLVGWGGNNGSTLTAAVLANRLRLSWPTRSGRKEANYYGSLTQAGTVSLGLDAEGQEVFVPFSAVLPMVAPNDLVFDDILDRLKPWPRRMRAARKVPWDLGGLARKANLVSPAPIGTAPCGPRALTGYTIRPEISIRGPEAEGAAPRNKPSIPVPRRCRRQRGKAGIPE

SEQ ID NO: 855825 - protein, 125 aa, Homo sapiens
RSCIENILRCTPASRFPPGAQIPPWLSYAQGLGGCGGRDTPPFSLWVSGSAKLCDLSRACVGLPPQNHMLLEHKMERPGPSLKRVGPVAATYPMLNKKGPVPAATNGCTGDANGHLQEEPPMPTT

SEQ ID NO: 855826 - protein, 308 aa, Homo sapiens
MWKRWLALALALVAVAWVRAEEELRSKSKICANVFCGAGRECAVTEKGEPTCLCIEQCKPHKRPVCGSNGKTYLNHCELHRDACLTGSKIQVDYDGHCKEKKSVSPSASPVVCYQSNRDELRRRIIQWLEAEIIPDGWFSKGSNYSEILDKYFKNFDNGDSRLDSSEFLKFVEQNETAINITTYPDQENNKLLRGLCVDALIELSDENADWKLSFQEFLKCLNPSFNPPEKKCALEDETYADGAETEVDCNRCVCACGNWVCTAMTCDGKNQKGAQTQTEEEMTRYVQELQKHQETAEKTKRVSTKEI

SEQ ID NO: 855827 - protein, 367 aa, Homo sapiens
GGEWGGAGGAGRRGRRGLKGRRGEVAFPPRLAIGGAPTSAYSSLPPSCPAPPGDLDQTTMWKRWLALALALVAVAWVRAEEELRSKSKICANVFCGAGRECAVTEKGEPTCLCIEQCKPHKRPVCGSNGKTYLNHCELHRDACLTGSKIQVDYDGHCKEKKSVSPSASPVVCYQSNRDELRRRIIQWLEAEIIPDGWFSKGSNYSEILDKYFKNFDNGDSRLDSSEFLKFVEQNETAINITTYPDQENNKLLRGLCVDALIELSDENADWKLSFQEFLKCLNPSFNPPEKKCALEDETYADGAETEVDCNRCVCACGNWVCTAMTCDGKNQKGAQTQTEEEMTRYVQELQKHQETAEKTKRVSTKEI

SEQ ID NO: 855828 - protein, 367 aa, Homo sapiens; identical to SEQ ID NO: 855827

SEQ ID NO: 855829 - protein, 367 aa, Homo sapiens; identical to SEQ ID NO: 855827

SEQ ID NO: 855830 - protein, 214 aa, Homo sapiens
GGEWGGAGGAGRRGRRGLKGRRGEVAFPPRLAIGGAPTSAYSSLPPSCPAPPGDLDQTTMWKRWLALALALVAVAWVRAEEELRSKSKICANVFCGAGRECAVTEKGEPTCLCIEQCKPHKRPVCGSNGKTYLNHCELHRDACLTGSKIQVDYDGHCKEKKSVSPSASPVVCYQSNRDELRRRIIQWLEAEIIPDGWFSKGSNYSEILDKYFKI

SEQ ID NO: 855831 - protein, 367 aa, Homo sapiens; identical to SEQ ID NO: 855827

SEQ ID NO: 855832 - protein, 367 aa, Homo sapiens; identical to SEQ ID NO: 855827

SEQ ID NO: 855833 - protein, 367 aa, Homo sapiens; identical to SEQ ID NO: 855827

SEQ ID NO: 855834 - protein, 367 aa, Homo sapiens; identical to SEQ ID NO: 855827

SEQ ID NO: 855835 - protein, 249 aa, Homo sapiens
GGEWGGAGGAGRRGRRGLKGRRGEVAFPPRLAIGGAPTSAYSSLPPSCPAPPGDLDQTTMWKRWLALALALVAVAWVRAEEELRSKSKICANVFCGAGRECAVTEKGEPTCLCIEQCKPHKRPVCGSNGKTYLNHCELHRDACLTGSKIQVDYDGHCKEKKSVSPSASPGECLFFLLCASQGGHSFHDRNFVFHNPCQAHKIFYASELCPRTGHSSTQLRKAAKLHLCMCLPIEAAGWVRMLAVFSHFS

SEQ ID NO: 855836 - protein, 84 aa, Homo sapiens
GGEWGGAGGAGRRGRRGLKGRRGEVAFPPRLAIGGAPTSAYSSLPPSCPAPPGDLDQTTMWKRWLALALALVAVAWVRAEAFIK

SEQ ID NO: 855837 - protein, 367 aa, Homo sapiens; identical to SEQ ID NO: 855827

SEQ ID NO: 855838 - protein, 417 aa, Homo sapiens
GGEWGGAGGAGRRGRRGLKGRRGEVAFPPRLAIGGAPTSAYSSLPPSCPAPPGDLDQTTMWKRWLALALALVAVAWVRAEEELRSKSKICANVFCGAGRECAVTEKGEPTCLCIEQCKPHKRPVCGSNGKTYLNHCELHRDACLTGSKIQVDYDGHCKEKKSVSPSASPVVCYQSNRDELRRRIIQWLEAEIIPDGWFSKGSNYSEILDKYFKNFDNGDSRLDSSEFLKFVEQNETAINITTYPDQENNKLLRGLCVDALIELSDENADWKLSFQEFLKCLNPSFNPPEKKCALEDETYADGAETEVDCNRCVCACGNWVCTAMTCDGKNQKGAQTQTEEEMTRYVQELQKHQCLDPSIFSTSALSSVYTSVCYSRQITSICLYSNEFYFVYLFCNKGYEGGWLGREGPQPSFLGVL

SEQ ID NO: 855839 - protein, 367 aa, Homo sapiens; identical to SEQ ID NO: 855827

SEQ ID NO: 855840 - protein, 289 aa, Homo sapiens
GGEWGGAGGAGRRGRRGLKGRRGEVAFPPRLAIGGAPTSAYSSLPPSCPAPPGDLDQTTMWKRWLALALALVAVAWVRAEEELRSKSKICANVFCGAGRECAVTEKGEPTCLCIEQCKPHKRPVCGSNGKTYLNHCELHRDACLTGSKIQVDYDGHCKEKKSVSPSASPVVCYQSNRDELRRRIIQWLEAEIIPDGWFSKGSNYSEILDKYFKNFDNGDSRLDSSEFLKFVEQNETAINITTYPDQENHPTLSSYLHFMFNLRLEIESIPLEMRIKESFRFNRGKKMEI

SEQ ID NO: 855841 - protein, 146 aa, Homo sapiens
  misc_feature (8)..(8): Xaa can be any naturally occurring amino acid
KKKKKKYXEILDKYFKNFDNGDSRLDSSEFLKFVEQNETAINITTYPDQENNKLLRGLCVDALIELSDENADWKLSFQEFLKCLNPSFNPPEKKCALEDETYADGAETEVDCNRCVCACGNWVCTAMTCDGKNQKGAQTQTEEEMT

SEQ ID NO: 855842 - protein, 367 aa, Homo sapiens; identical to SEQ ID NO: 855827

SEQ ID NO: 855843 - protein, 367 aa, Homo sapiens; identical to SEQ ID NO: 855827

SEQ ID NO: 855844 - protein, 393 aa, Homo sapiens
GGEWGGAGGAGRRGRRGLKGRRGEVAFPPRLAIGGAPTSAYSSLPPSCPAPPGDLDQTTMWKRWLALALALVAVAWVRAEEELRSKSKICANVFCGAGRECAVTEKGEPTCLCIEQCKPHKRPVCGSNGKTYLNHCELHRDACLTGSKIQVDYDGHCKEKKSVSPSASPVVCYQSNRDELRRRIIQWLEAEIIPDGWFSKGSNYSEILDKYFKNFDNGDSRLDSSEFLKFVEQNETAINITTYPDQENNKLLRGLCVDALIELSDENADWKLSFQEFLKCLNPSFNPPEKKCALEDETYADGAETEVDCNRCVCACGNWVCTAMTCDGKNQKGAQTQTEEEMTRYVQELQKHQKLTKRRTENLDIQLAIVKNISFLSYIPSKPSKISVGVTLA

SEQ ID NO: 855845 - protein, 108 aa, Homo sapiens
GGEWGGAGGAGRRGRRGLKGRRGEVAFPPRLAIGGAPTSAYSSLPPSCPAPPGDLDQTTMWKRWLALALALVAVAWVRAEEEIEVLMEHLLCRGSRMGSQHRFSLKVE

SEQ ID NO: 855846 - protein, 124 aa, Homo sapiens
MSNNGADLTFGYISCFVAILLFGSNFVPLKKFDTGDGMFLQWVLCAAIWLVALVVNLILHCPKFWPFAMLGGCIWATGNIAVVPIIKTIGLGLGILIWGSIRPTGGRPRLVWLAATIPPGKHED

SEQ ID NO: 855847 - protein, 345 aa, Homo sapiens
MSNNGADLTFGYISCFVAILLFGSNFVPLKKFDTGDGMFLQWVLCAAIWLVALVVNLILHCPKFWPFAMLGGCIWATGNIAVVPIIKTVGLGLGILIWGSFNALTGWASSRFGWFGLDAEEVSNPLLNYIGAGLSVVSAFIFLFIKSEIPNNTCSMDTTPLITEHVINTTQDPCSWVDKLSTVHHRIVGCSLAVISGVLYGSTFVPIIYIKDHSKRNDSIYAGASQYDLDYVFAHFSGIFLTSTVYFLAYCIAMKNSPKLYPEAVLPGFLSGVLWAIATCCWFIANHSLSAVVSFPIITAGPGFIAAMWGIFMFKEIKGLQNYLLMILAFCIILTGALCTAFSEI

SEQ ID NO: 855848 - protein, 160 aa, Homo sapiens
MSNNGADLTFGYISCFVAILLFGSNFVPLKKFDTGDGMFLQWVLCAAIWLVALVVNLILHCPKFWPFAMLGGCIWATGNIAVVPIIKTIGLGLGILIWGSFNALTGWASSRFGWFGLDAEEVSNPLLNYIGAGLSVVSAFIFCSSKVKYQITRVPWIPLH

SEQ ID NO: 855849 - protein, 160 aa, Homo sapiens; identical to SEQ ID NO: 855848

SEQ ID NO: 855850 - protein, 160 aa, Homo sapiens; identical to SEQ ID NO: 855848

SEQ ID NO: 855851 - protein, 160 aa, Homo sapiens; identical to SEQ ID NO: 855848

SEQ ID NO: 855852 - protein, 160 aa, Homo sapiens; identical to SEQ ID NO: 855848

SEQ ID NO: 855853 - protein, 160 aa, Homo sapiens; identical to SEQ ID NO: 855848

SEQ ID NO: 855854 - protein, 827 aa, Homo sapiens
MTKLSAQVKGSLNITTPGLQIWRIEAMQMVPVPSSTFGSFFDGDCYIILAIHKTASSLSYDIHYWIGQDSSLDEQGAAAIYTTQMDDFLKGRAVQHREVQGNESEAFRGYFKQGLVIRKGGVASGMKHVETNSYDVQRLLHVKGKRNVVAGEVEMSWKSFNRGDVFLLDLGKLIIQWNGPESTRMERLRGMTLAKEIRDQERGGRTYVGVVDGENELASPKLMEVMNHVLGKRRELKAAVPDTVVEPALKAALKLYHVSDSEGNLVVREVATRPLTQDLLSHEDCYILDQGGLKIYVWKGKKANEQEKKGAMSHALNFIKAKQYPPSTQVEVQNDGAESAVFQQLFQKWTASNRTSGLGKTHTVGSVAKVEQVKFDATSMHVKPQVAAQQKMVDDGSGEVQVWRIENLELVPVDSKWLGHFYGGDCYLLLYTYLIGEKQHYLLYVWQGSQASQDEITASAYQAVILDQKYNGEPVQIRVPMGKEPPHLMSIFKGRMVVYQGGTSRTNNLETGPSTRLFQVQGTGANNTKAFEVPARANFLNSNDVFVLKTQSCCYLWCGKGCSGDEREMAKMVADTISRTEKQVVVEGQEPANFWMALGGKAPYANTKRLQEENLVITPRLFECSNKTGRFLATEIPDFNQDDLEEDDVFLLDVWDQVFFWIGKHANEEEKKAAATTAQEYLKTHPSGRDPETPIIVVKQGHEPPTFTGWFLAWDPFKWSNTKSYEDLKAELGNSRDWSQITAEVTSPKVDVFNANSNLSSGPLPIFPLEQLVNKPVEELPEGVDPSRKEEHLSIEDFTQAFGMTPAAFSALPRWKQQNLKKEKGLF

SEQ ID NO: 855855 - protein, 827 aa, Homo sapiens; identical to SEQ ID NO: 855854

SEQ ID NO: 855856 - protein, 780 aa, Homo sapiens
MTKLSAQVKGSLNITTPGLQIWRIEAMQMVPVPSSTFGSFFDGDCYIILAIHKTASSLSYDIHYWIGQDSSLDEQGAAAIYTTQMDDFLKGRAVQHREVQGNESEAFRGYFKQGLVIRKGGVASGMKHVETNSYDVQRLLHVKGKRNVVAGEVEMSWKSFNRGDVFLLDLGKLIIQWNGPESTRMERLRGMTLAKEIRDQERGGRTYVGVVDGENELASPKLMEVMNHVLGKRRELKAAVPDTVVEPALKAALKLYHVSDSEGNLVVREVATRPLTQDLLSHEDCYILDQGGLKIYVWKGKKANEQEKKGAMSHALNFIKAKQYPPSTQVEVQNDGAESAVFQQLFQKWTASNRTSGLGKTHTVGSVAKVEQVKFDATSMHVKPQVAAQQKMVDDGSGEVQVWRIENLELVPVDSKWLGHFYGGDCYLLLYTYLIGEKQHYLLYVWQGSQASQDEITASAYQAVILDQKYNGEPVQIRVPMGKEPPHLMSIFKGRMVVYQGGTSRTNNLETGPSTRLFQVQGTGANNTKAFEVPARANFLNSNDVFVLKTQSCCYLWCGKGCSGDEREMAKMVADTISRTEKQVVVEGQEPANFWMALGGKAPYANTKRLQEENLVITPRLFECSNKTGRFLATEIPDFNQDDLEEDDVFLLDVWDQVFFWIGKHANEEEKKAAATTAQEYLKTHPSGRDPETPIIVVKQGHEPPTFTGWFLAWDPFKWSNTKSYEDLKAELGNSRDWSQITAEHLSIEDFTQAFGMTPAAFSALPRWKQQNLKKEKGLF

SEQ ID NO: 855857 - protein, 72 aa, Homo sapiens
CSSGKMGRGPELRLLLALNTSTLGLPEGVDPSRKEEHLSIEDFTQAFGMTPAAFSALPRWKQQNLKKEKGLF

SEQ ID NO: 855858 - protein, 345 aa, Homo sapiens
MTKLSAQVKGSLNITTPGLQIWRIEAMQMVPVPSSTFGSFFDGDCYIILAIHKTASSLSYDIHYWIGQDSSLDEQGAAAIYTTQMDDFLKGRAVQHREVQGNESEAFRGYFKQGLVIRKGGVASGMKHVETNSYDVQRLLHVKGKRNVVAGEVEMSWKSFNRGDVFLLDLGKLIIQWNGPESTRMERLRGMTLAKEIRDQERGGRTYVGVVDGENELASPKLMEVMNHVLGKRRELKAAVPDTVVEPALKAALKLYHVSDSEGNLVVREVATRPLTQDLLSHEDCYILDQGGLKIYVWKGKKANARFTNLPRSLCKASQAPQMKITGINGDYGQTLVCHSVPFKK

SEQ ID NO: 855859 - protein, 376 aa, Homo sapiens
MTKLSAQVKGSLNITTPGLQIWRIEAMQMVPVPSSTFGSFFDGDCYIILAIHKTASSLSYDIHYWIGQDSSLDEQGAAAIYTTQMDDFLKGRAVQHREVQGNESEAFRGYFKQGLVIRKGGVASGMKHVETNSYDVQRLLHVKGKRNVVAGEVEMSWKSFNRGDVFLLDLGKLIIQWNGPESTRMERLRGMTLAKEIRDQERGGRTYVGVVDGENELASPKLMEVMNHVLGKRRELKAAVPDTVVEPALKAALKLYHVSDSEGNLVVREVATRPLTQDLLSHEDCYILDQGGLKIYVWKGKKANEQEKKGAMSHALNFIKAKQYPPSTQVEVQNDGAESAVFQQLFQKWTASNRTSGLGKTHTVGSVGEGQAGAVR

SEQ ID NO: 855860 - protein, 73 aa, Homo sapiens
QGTGANNTKAFEVPARANFLNSNDVFVLKTQSCCYLWCGKVCSGSRGLPIRKWVLGVPQFRSSPRSGQEPLAN

SEQ ID NO: 855861 - protein, 827 aa, Homo sapiens; identical to SEQ ID NO: 855854

SEQ ID NO: 855862 - protein, 824 aa, Homo sapiens
MTKLSAQVKGSLNITTPGLQIWRIEAMQMVPVPSSTFGSFFDGDCYIILAIHKTASSLSYDIHYWIGQDSSLDEQGAAAIYTTQMDDFLKGRAVQHREVQGNESEAFRGYFKQGLVIRKGGVASGMKHVETNSYDVQRLLHVKGKRNVVAGEVEMSWKSFNRGDVFLLDLGKLIIQWNGPESTRMERLRGMTLAKEIRDQERGGRTYVGVVDGENELASPKLMEVMNHVLGKRRELKAAVPDTVVEPALKAALKLYHVSDSEGNLVVREVATRPLTQDLLSHEDCYILDQGGLKIYVWKGKKANEQEKKGAMSHALNFIKAKQYPPSTQVEVQNDGAESAVFQQLFQKWTASNRTSGLGKTHTVGSVAKVEQVKFDATSMHVKPQVAAQQKMVDDGSGEVQVWRIENLELVPVDSKWLGHFYGGDCYLLLYTYLIGEKQHYLLYVWQGSQASQDEITASAYQAVILDQKYNGEPVQIRVPMGKEPPHLMSIFKGRMVVYQGGTSRTNNLETGPSTRLFQVQGTGANNTKAFEVPARANFLNSNDVFVLKTQSCCYLWCGKGCSGDEREMAKMVADTISRTEKQVVVEGQEPANFWMALGGKAPYANTKRLQEENLVITPRLFECSNKTGRFLATEIPDFNQDDLEEDDVFLLDVWDQVFFWIGKHANEEEKKAAATTAQEYLKTHPSGRDPETPIIVVKQGHEPPTFTGWFLAWDPFKWSNTKSYEDLKAELGNSRDWSQITAEVTSPKVDVFNANSNLSSGPLPIFPLEQLVNKPVEELPEGVDPSRKEEHLSIEDFTQAFGMTPAAFSALPRWKQQNLKKEL

SEQ ID NO: 855863 - protein, 560 aa, Homo sapiens
MTKLSAQVKGSLNITTPGLQIWRIEAMQMVPVPSSTFGSFFDGDCYIILAIHKTASSLSYDIHYWIGQDSSLDEQGAAAIYTTQMDDFLKGRAVQHREVQGNESEAFRGYFKQGLVIRKGGVASGMKHVETNSYDVQRLLHVKGKRNVVAGEVEMSWKSFNRGDVFLLDLGKLIIQWNGPESTRMERLRGMTLAKEIRDQERGGRTYVGVVDGENELASPKLMEVMNHVLGKRRELKAAVPDTVVEPALKAALKLYHVSDSEGNLVVREVATRPLTQDLLSHEDCYILDQGGLKIYVWKGKKANEQEKKGAMSHALNFIKAKQYPPSTQVEVQNDGAESAVFQQLFQKWTASNRTSGLGKTHTVGSVAKVEQVKFDATSMHVKPQVAAQQKMVDDGSGEVQVWRIENLELVPVDSKWLGHFYGGDCYLLLYTYLIGEKQHYLLYVWQGSQASQDEITASAYQAVILDQKYNGEPVQIRVPMGKEPPHLMSIFKGRMVVYQHSLSQPLIMRQSKSLVKANARFTNLPRSLCKASQAPQMKITGINGDYGQTLVCHSVPFKK

SEQ ID NO: 855864 - protein, 780 aa, Homo sapiens; identical to SEQ ID NO: 855856

SEQ ID NO: 855865 - protein, 108 aa, Homo sapiens
MKLQHQLIKPSSWTRSTMVNQSRSGSQWARSHLILCPSSRDAWWSTSVAAELRCLAVTTVARQASGRWRRGWVVGAGLEVKPILHRRLPWRFYHLCGTGNRNNPFGYF

SEQ ID NO: 855866 - protein, 71 aa, Homo sapiens
LQEENLVITPRLFECSNKTGRFLATEIPDFNQDDLEEDDVFLLDVWDQVGPRAWGPLFPATSIPRAKKEWL

SEQ ID NO: 855867 - protein, 247 aa, Homo sapiens
MSGKDRIEIFPSRMAQTIMKARLKGAQTGRNLLKKKSDALTLRFRQILKKIIETKMLMGEVMREAAFSLAEAKFTAGDFSTTVIQNVNKAQVKIRAKKDNVAGVTLPVFEHYHEGTDSYELTGLARGGEQLAKLKRNYAKAVELLVELASLQTSFVTLDEAIKITNRRVNAIEHVIIPRIERTLAYIITELDEREREEFYRLKKIQEKKKILKEKSEKDLEQRRAAGEVLEPANLLAEEKDEDLLFE

SEQ ID NO: 855868 - protein, 247 aa, Homo sapiens; identical to SEQ ID NO: 855867

SEQ ID NO: 855869 - protein, 247 aa, Homo sapiens; identical to SEQ ID NO: 855867

SEQ ID NO: 855870 - protein, 247 aa, Homo sapiens; identical to SEQ ID NO: 855867

SEQ ID NO: 855871 - protein, 229 aa, Homo sapiens
MSGKDRIEIFPSRMAQTIMKARLKGAQTGRNLLKKKSDALTLRFRQILKKIIETKMLMGEVMREAAFSLAEAKFTAGDFSTTVIQNVNKAQVKIRAKKDNVAGVTLPVFEHYHEGTDSYELTGLARGGEQLAKLKRNYAKAVELLVELASLQTSFVTLDEAIKITNRRVNAIEHVIIPRIERTLAYIITELDEREREEFYRLKKIQEKKKILKDANLLAEEKDEDLLFE

SEQ ID NO: 855872 - protein, 253 aa, Homo sapiens
YQRRVAITGPGRIEIFPSRMAQTIMKARLKGAQTGRNLLKKKSDALTLRFRQILKKIIETKMLMGEVMREAAFSLAEAKFTAGDFSTTVIQNVNKAQVKIRAKKDNVAGVTLPVFEHYHEGTDSYELTGLARGGEQLAKLKRNYAKAVELLVELASLQTSFVTLDEAIKITNRRVNAIEHVIIPRIERTLAYIITELDEREREEFYRLKKIQEKKKILKEKSEKDLEQRRAAGEVLEPANLLAEEKDEDLLFE

SEQ ID NO: 855873 - protein, 229 aa, Homo sapiens
MSGKDRIEIFPSRMAQTIMKARLKGAQTGRNLLKKKSDALTLRFRQILKKIIETKMLMGEVMREAAFSLAEAKFTAGDFSTTVIQNVNKAQVKIRAKKDNVAGVTLPVFEHYHEGTDSYELTGLARGGEQLAKLKRNYAKAVELLVELASLQTSFVTLDEAIKITNRRVNAIEHVIIPRIERTLAYIITELDEREREEFYRLRKPREEKFLRILLKEERDSFDNFLSWP

SEQ ID NO: 855874 - protein, 126 aa, Homo sapiens
MSGKDRIEIFPSRMAQTIMKARLKGAQTGRNLLKKKSDALTLRFRQILKKIIETKMLMGEVMREAAFSLAEAKFTAGDFSTTVIQNVNKAQVKIRAKKDNVAGVTLPVFEHYHEGTDTKQWNYWWN

SEQ ID NO: 855875 - protein, 247 aa, Homo sapiens; identical to SEQ ID NO: 855867

SEQ ID NO: 855876 - protein, 247 aa, Homo sapiens; identical to SEQ ID NO: 855867

SEQ ID NO: 855877 - protein, 247 aa, Homo sapiens; identical to SEQ ID NO: 855867

SEQ ID NO: 855878 - protein, 247 aa, Homo sapiens; identical to SEQ ID NO: 855867

SEQ ID NO: 855879 - protein, 183 aa, Homo sapiens
MSGKDRIEIFPSRMAQTIMKARLKGAQTGRNLLKKKSDALTLRFRQILKKIIETKMLMGEVMREAAFSLAEAKFTAGDFSTTVIQNVNKAQVKIRAKKDNVAGVTLPVFEHYHEGTDSYELTGLARGGEQLAKLKRNYAKAVELLVELASLQTSFVTLDEAIKITNRRVNAIEHVIIHFNGML

SEQ ID NO: 855880 - protein, 126 aa, Homo sapiens; identical to SEQ ID NO: 855874

SEQ ID NO: 855881 - protein, 69 aa, Homo sapiens
TSRPITEKTTRRKGGSSVPHGGGDWSDVNRKPRNAYSHQKLEESKDTFSPQAPVGARPSWILDFWPPEL

SEQ ID NO: 855882 - protein, 838 aa, Homo sapiens
MQEQEIGFISKYNEGLCVNTDPVSILTSILDMSLHRQMGSDRDLQSSASSVSLPSVKKAPKKRRISIGSLFRRKKDNKRKSRELNGGVDGIASIESIHSEMCTDKNSIFSTNTSSDNGLTSISKQIGDFIECPLCLLRHSKDRFPDIMTCHHRSCVDCLRQYLRIEISESRVNISCPECTERFNPHDIRLILSDDVLMEKYEEFMLRRWLVADPDCRWCPAPDCGYAVIAFGCASCPKLTCGREGCGTEFCYHCKQIWHPNQTCDAARQERAQSLRLRTIRSSSISYSQESGAAADDIKPCPRCAAYIIKMNDGSCNHMTCAVCGCEFCWLCMKEISDLHYLSPSGCTFWGKKPWSRKKKILWQLGTLVGAPVGIALIAGIAIPAMIIGIPVYVGRKIHNRYEGKDVSKHKRNLAIAGGVTLSVIVSPVVAAVTVGIGVPIMLAYVYGVVPISLCRSGGCGVSAGNGKGVRIEFDDENDINVGGTNTAVDTTSVAEARHNPSIGEGSVGGLTGSLSASGSHMDRIGAIRDNLSETASTMALAGASITGSLSGSAMVNCFNRLEVQADVQKERYSLSGESGTVSLGTVSDNASTKAMAGSILNSYIPLDKEGNSMEVQVDIESKPSKFRHNSGSSSVDDGSATRSHAGGSSSGLPEGKSSATKWSKEATAGKKSKSGKLRKKGNMKINETREDMDAQLLEQQSTNSSEFEAPSLSDSMPSVADSHSSHFSEFSCSDLESMKTSCSHGSSDYHTRFATVNILPEVENDRLENSPHQCSISVVTQTASCSEVSQLNHIAEEHGNNGIKPNVDLYFGDALKETNNNHSHQTMELKVAIQTEI

SEQ ID NO: 855883 - protein, 838 aa, Homo sapiens; identical to SEQ ID NO: 855882

SEQ ID NO: 855884 - protein, 838 aa, Homo sapiens; identical to SEQ ID NO: 855882

SEQ ID NO: 855885 - protein, 838 aa, Homo sapiens; identical to SEQ ID NO: 855882

SEQ ID NO: 855886 - protein, 838 aa, Homo sapiens; identical to SEQ ID NO: 855882

SEQ ID NO: 855887 - protein, 838 aa, Homo sapiens; identical to SEQ ID NO: 855882

SEQ ID NO: 855888 - protein, 838 aa, Homo sapiens; identical to SEQ ID NO: 855882

SEQ ID NO: 855889 - protein, 838 aa, Homo sapiens; identical to SEQ ID NO: 855882

SEQ ID NO: 855890 - protein, 417 aa, Homo sapiens [sequence omitted]

SEQ ID NO: 855891 - protein, 838 aa, Homo sapiens; identical to SEQ ID NO: 855882

SEQ ID NO: 855892 - protein, 838 aa, Homo sapiens; identical to SEQ ID NO: 855882

SEQ ID NO: 855893 - protein, 838 aa, Homo sapiens; identical to SEQ ID NO: 855882

SEQ ID NO: 855894 - protein, 838 aa, Homo sapiens; identical to SEQ ID NO: 855882

SEQ ID NO: 855895 - protein, 503 aa, Homo sapiens
MQEQEIGFISKYNEGLCVNTDPVSILTSILDMSLHRQMGSDRDLQSSASSVSLPSVKKAPKKRRISIGSLFRRKKDNKRKSRELNGGVDGIASIESIHSEMCTDKNSIFSTNTSSDNGLTSISKQIGDFIECPLCLLRHSKDRFPDIMTCHHRSCVDCLRQYLRIEISESRVNISCPECTERFNPHDIRLILSDDVLMEKYEEFMLRRWLVADPDCRWCPAPDCGYAVIAFGCASCPKLTCGREGCGTEFCYHCKQIWHPNQTCDAARQERAQSLRLRTIRSSSISYSQESGAAADDIKPCPRCAAYIIKMNDGSCNHMTCAVCGCEFCWLCMKEISDLHYLSPSGCTFWGKKPWSRKKKILWQLGTLVGAPVGIALIAGIAIPAMIIGIPVYVGRKIHNRYEGKDVSKHKRNLAIAGGVTLSVIVSPVVAAVTVGIGVPIMLAYVYGVVPISLCRSGGCGVSAGNGKGVRIEFDDENDINVGGTNTAVGWKYKQMYRKNGTV

SEQ ID NO: 855896 - protein, 838 aa, Homo sapiens; identical to SEQ ID NO: 855882

SEQ ID NO: 855897 - protein, 591 aa, Homo sapiens
MQEQEIGFISKYNEGLCVNTDPVSILTSILDMSLHRQMGSDRDLQSSASSVSLPSVKKAPKKRRISIGSLFRRKKDNKRKSRELNGGVDGIASIESIHSEMCTDKNSIFSTNTSSDNGLTSISKQIGDFIECPLCLLRHSKDRFPDIMTCHHRSCVDCLRQYLRIEISESRVNISCPECTERFNPHDIRLILSDDVLMEKYEEFMLRRWLVADPDCRWCPAPDCGYAVIAFGCASCPKLTCGREGCGTEFCYHCKQIWHPNQTCDAARQERAQSLRLRTIRSSSISYSQESGAAADDIKPCPRCAAYIIKMNDGSCNHMTCAVCGCEFCWLCMKEISDLHYLSPSGCTFWGKKPWSRKKKILWQLGTLVGAPVGIALIAGIAIPAMIIGIPVYVGRKIHNRYEGKDVSKHKRNLAIAGGVTLSVIVSPVVAAVTVGIGVPIMLAYVYGVVPISLCRSGGCGVSAGNGKGVRIEFDDENDINVGGTNTAVDTTSVAEARHNPSIGEGSVGGLTGSLSASGSHMDRIGAIRDNLSETASTMALAGASITGSLSGSAMVNCFNSGSTSRCTERGCCRRCWEMGLLARHPALPPL

SEQ ID NO: 855898 - protein, 634 aa, Homo sapiens
MQEQEIGFISKYNEGLCVNTDPVSILTSILDMSLHRQMGSDRDLQSSASSVSLPSVKKAPKKRRISIGSLFRRKKDNKRKSRELNGGVDGIASIESIHSEMCTDKNSIFSTNTSSDNGLTSISKQIGDFIECPLCLLRHSKDRFPDIMTCHHRSCVDCLRQYLRIEISESRVNISCPECTERFNPHDIRLILSDDVLMEKYEEFMLRRWLVADPDCRWCPAPDCGYAVIAFGCASCPKLTCGREGCGTEFCYHCKQIWHPNQTCDAARQERAQSLRLRTIRSSSISYSQESGAAADDIKPCPRCAAYIIKMNDGSCNHMTCAVCGCEFCWLCMKEISDLHYLSPSGCTFWGKKPWSRKKKILWQLGTLVGAPVGIALIAGIAIPAMIIGIPVYVGRKIHNRYEGKDVSKHKRNLAIAGGVTLSVIVSPVVAAVTVGIGVPIMLAYVYGVVPISLCRSGGCGVSAGNGKGVRIEFDDENDINVGGTNTAVDTTSVAEARHNPSIGEGSVGGLTGSLSASGSHMDRIGAIRDNLSETASTMALAGASITGSLSGSAMVNCFNRLEVQADVQKERYSLSGESGTVSLGTVSDNASTKARAAEIDDKLNKINDRWQHLFDVIGSRVKKLKETFAFIQQ

SEQ ID NO: 855899 - protein, 225 aa, Homo sapiens
MQEQEIGFISKYNEGLCVNTDPVSILTSILDMSLHRQMGSDRDLQSSASSVSLPSVKKAPKKRRISIGSLFRRKKDNKRKSRELNGGVDGIASIESIHSEMCTDKNSIFSTNTSSDNGLTSISKQIGDFIECPLCLLRHSKDRFPDIMTCHHRSCVDCLRQYLRIEISESRVNISCPECTERFNPHDIRLILSDDVLMEKYEEFMLRRWLVADPDCRWCPAPDCG

SEQ ID NO: 855900 - protein, 34 aa, Homo sapiens
MRDDKLAQLITRTQARCRGFKVYRYLFTPDPSTF

SEQ ID NO: 855901 - protein, 1909 aa, Homo sapiens
MSSDSELAVFGEAAPFLRKSERERIEAQNRPFDAKTSVFVAEPKESFVKGTIQSREGGKVTVKTEGGATLTVKDDQVFPMNPPKYDKIEDMAMMTHLHEPAVLYNLKERYAAWMIYTYSGLFCVTVNPYKWLPVYKPEVVTAYRGKKRQEAPPHIFSISDNAYQFMLTDRENQSILITGESGAGKTVNTKRVIQYFATIAVTGEKKKEEITSGKIQGTLEDQIISANPLLEAFGNAKTVRNDNSSRFGKFIRIHFGTTGKLASADIETYLLEKSRVVFQLKAERSYHIFYQITSNKKPELIEMLLITTNPYDYPFVSQGEISVASIDDQEELMATDSAIDILGFTNEEKVSIYKLTGAVMHYGNLKFKQKQREEQAEPDGTEVADKAAYLQSLNSADLLKALCYPRVKVGNEYVTKGQTVEQVSNAVGALAKAVYEKMFLWMVARINQQLDTKQPRQYFIGVLDIAGFEIFDFNSLEQLCINFTNEKLQQFFNHHMFVLEQEEYKKEGIEWTFIDFGMDLAACIELIEKVGPMGIFSILEEECMFPKATDTSFKNKLYDQHLGKSANFQKPKVVKGKAEAHFALIHYAGVVDYNITGWLEKNKDPLNETVVGLYQKSAMKTLAQLFSGAQTAEGEGAGGGAKKGGKKKGSSFQTVSALFRENLNKLMTNLRSTHPHFVRCIIPNETKTPGAMEHELVLHQLRCNGVLEGIRICRKGFPSRILYADFKQRYKVLNASAIPEGQFIDSKKASEKLLASIDIDHTQYKFGHTKVFFKAGLLGLLEEMRDDKLAQLITRTQARCRGFLARVEYQRMVERREAIFCIQYNIRSFMNVKHWPWMKLFFKIKPLLKSAETEKEMATMKEEFQKIKDELAKSEAKRKELEEKMVTLLKEKNDLQLQVQAEAEGLADAEERCDQLIKTKIQLEAKIKEVTERAEDEEEINAELTAKKRKLEDECSELKKDIDDLELTLAKVEKEKHATENKVKNLTEEMAGLDETIAKLTKEKKALQEAHQQTLDDLQAEEDKVNTLTKAKIKLEQQVDDLEGSLEQEKKLRMDLERAKRKLEGDLKLAQESIMDIENEKQQLDEKLKKKEFEISNLQSKIEDEQALGIQLQKKIKELQARIEELEEEIEAERASRAKAEKQRSDLSRELEEISERLEEAGGATSAQIEMNKKREAEFQKMRRDLEEATLQHEATAATLRKKHADSVAELGEQIDNLQRVKQKLEKEKSEMKMEIDDLASNVETVSKAKGNLEKMCRTLEDQLSELKSKEEEQQRLINDLTAQRGRLQTESGEFSRQLDEKEALVSQLSRGKQAFTQQIEELKRQLEEEIKAKNALAHALQSSRHDCDLLREQYEEEQESKAELQRALSKANTEVAQWRTKYETDAIQRTEELEEAKKKLAQRLQAAEEHVEAVNAKCASLEKTKQRLQNEVEDLMLDVERTNAACAALDKKQRNFDKILAEWKQKCEETHAELEASQKEARSLGTELFKIKNAYEESLDQLETLKRENKNLQQEISDLTEQIAEGGKRIHELEKIKKQVEQEKCELQAALEEAEASLEHEEGKILRIQLELNQVKSEVDRKIAEKDEEIDQLKRNHIRIVESMQSTLDAEIRSRNDAIRLKKKMEGDLNEMEIQLNHANRMAAEALRNYRNTQGILKDTQIHLDDALRSQEDLKEQLAMVERRANLLQAEIEELRATLEQTERSRKIAEQELLDASERVQLLHTQNTSLINTKKKLETDISQMQGEMEDILQEARNAEEKAKKAITDAAMMAEELKKEQDTSAHLERMKKNMEQTVKDLQLRLDEAEQLALKGGKKQIQKLEARVRELEGEVESEQKRNAEAVKGLRKHERRVKELTYQTEEDRKNILRLQDLVDKLQAKVKSYKRQAEEAEEQSNTNLAKFRKAPA

SEQ ID NO: 855902 - protein, 394 aa, Homo sapiens
MAAASGYTDLREKLKSMTSRDNYKAGSREAAAAAAAAVAAAAAAAAAAEPYPVSGAKRKYQEDSDPERSDYEEQQLQKEEEARKVKSGIRQMRLFSQDECAKIEARIDEVVSRAEKGLYNEHTVDRAPLRNKYFFGEGYTYGAQLQKRGPGQERLYPPGDVDEIPEWVHQLVIQKLVEHRVIPEGFVNSAVINDYQPGGCIVSHVDPIHIFERPIVSVSFFSDSALCFGCKFQFKPIRVSEPVLSLPVRRGSVTVLSGYAADEITHCIRPQDIKERRAVIILRKTRLDAPRLETKSLSSSVLPPSYASDRLSGNNRDPALKPKRSHRKADPDAAHRPRILEMDKEENRRSVLLPTHRRRGSFSSENYWRKSYESSEDCSEAAGSPARKVKMRRH

SEQ ID NO: 855903 - protein, 380 aa, Homo sapiens
  misc_feature (9)..(9): Xaa can be any naturally occurring amino acid
GPPAKSIPXAIPGGTAAAAAAAAVAAAAAAAAAAEPYPVSGAKRKYQEDSDPERSDYEEQQLQKEEEARKVKSGIRQMRLFSQDECAKIEARIDEVVSRAEKGLYNEHTVDRAPLRNKYFFGEGYTYGAQLQKRGPGQERLYPPGDVDEIPEWVHQLVIQKLVEHRVIPEGFVNSAVINDYQPGGCIVSHVDPIHIFERPIVSVSFFSDSALCFGCKFQFKPIRVSEPVLSLPVRRGSVTVLSGYAADEITHCIRPQDIKERRAVIILRKTRLDAPRLETKSLSSSVLPPSYASDRLSGNNRDPALKPKRSHRKADPDAAHRPRILEMDKEENRRSVLLPTHRRRGSFSSENYWRKSYESSEDCSEAAGSPARKVKMRRH

SEQ ID NO: 855904 - protein, 1218 aa, Homo sapiens
MEHELVLHQLRCNGVLEGIRICRKGFPSRILYADFKQRYKVLNASAIPEGQFIDSKKASEKLLASIDIDHTQYKFGHTKVFFKAGLLGLLEEMRDDKLAQLITRTQARCRGFLARVEYQRMVERREAIFCIQYNIRSFMNVKHWPWMKLFFKIKPLLKSAETEKEMATMKEEFQKIKDELAKSEAKRKELEEKMVTLLKEKNDLQLQVQAEAEGLADAEERCDQLIKTKIQLEAKIKEVTERAEDEEEINAELTAKKRKLEDECSELKKDIDDLELTLAKVEKEKHATENKVKNLTEEMAGLDETIAKLTKEKKALQEAHQQTLDDLQAEEDKVNTLTKAKIKLEQQVDDLEGSLEQEKKLRMDLERAKRKLEGDLKLAQESIMDIENEKQQLDEKLKKKEFEISNLQSKIEDEQALGIQLQKKIKELQARIEELEEEIEAERASRAKAEKQRSDLSRELEEISERLEEAGGATSAQIEMNKKREAEFQKMRRDLEEATLQHEATAATLRKKHADSVAELGEQIDNLQRVKQKLEKEKSEMKMEIDDLASNVETVSKAKGNLEKMCRTLEDQLSELKSKEEEQQRLINDLTAQRGRLQTESGEFSRQLDEKEALVSQLSRGKQAFTQQIEELKRQLEEEIKAKNALAHALQSSRHDCDLLREQYEEEQESKAELQRALSKANTEVAQWRTKYETDAIQRTEELEEAKKKLAQRLQAAEEHVEAVNAKCASLEKTKQRLQNEVEDLMLDVERTNAACAALDKKQRNFDKILAEWKQKCEETHAELEASQKEARSLGTELFKIKNAYEESLDQLETLKRENKNLQQEISDLTEQIAEGGKRIHELEKIKKQVEQEKCELQAALEEAEASLEHEEGKILRIQLELNQVKSEVDRKIAEKDEEIDQLKRNHIRIVESMQSTLDAEIRSRNDAIRLKKKMEGDLNEMEIQLNHANRMAAEALRNYRNTQGILKDTQIHLDDALRSQEDLKEQLAMVERRANLLQAEIEELRATLEQTERSRKIAEQELLDASERVQLLHTQNTSLINTKKKLETDISQMQGEMEDILQEARNAEEKAKKAITDAAMMAEELKKEQDTSAHLERMKKNMEQTVKDLQLRLDEAEQLALKGGKKQIQKLEARVRELEGEVESEQKRNAEAVKGLRKHERRVKELTYQTEEDRKNILRLQDLVDKLQAKVKSYKRQAEEAEEQSNTNLAKFRKAPA

SEQ ID NO: 855905 - protein, 138 aa, Homo sapiens
MMAEELKKEQDTSAHLERMKKNMEQTVKDLQLRLDEAEQLALKGGKKQIQKLEARVRELEGEVESEQKRNAEAVKGLRKHERRVKELTYQTEEDRKNILRLQDLVDKLQAKVKSYKRQAEEAEEQSNTNLAKFRKAPA

SEQ ID NO: 855906 - protein, 394 aa, Homo sapiens; identical to SEQ ID NO: 855902

SEQ ID NO: 855907 - protein, 248 aa, Homo sapiens
LPPAKVLGQPRVDMWKGAVEGSLSTNLLQAEIEELRATLEQTERSRKIAEQELLDASERVQLLHTQNTSLINTKKKLETDISQMQGEMEDILQEARNAEEKAKKAITDAAMMAEELKKEQDTSAHLERMKKNMEQTVKDLQLRLDEAEQLALKGGKKQIQKLEARVRELEGEVESEQKRNAEAVKGLRKHERRVKELTYQTEEDRKNILRLQDLVDKLQAKVKSYKRQAEEAEEQSNTNLAKFRKAPA

SEQ ID NO: 855908 - protein, 138 aa, Homo sapiens; identical to SEQ ID NO: 855905

SEQ ID NO: 855909 - protein, 153 aa, Homo sapiens
QRWSSAIMKAITDAAMMAEELKKEQDTSAHLERMKKNMEQTVKDLQLRLDEAEQLALKGGKKQIQKLEARVRELEGEVESEQKRNAEAVKGLRKHERRVKELTYQTEEDRKNILRLQDLVDKLQAKVKSYKRQAEEAEEQSNTNLAKFRKAPA

SEQ ID NO: 855910 - protein, 394 aa, Homo sapiens; identical to SEQ ID NO: 855902

SEQ ID NO: 855911 - protein, 1573 aa, Homo sapiens
MSSDSELAVFGEAAPFLRKSERERIEAQNRPFDAKTSVFVAEPKESFVKGTIQSREGGKVTVKTEGGATLTVKDDQVFPMNPPKYDKIEDMAMMTHLHEPAVLYNLKERYAAWMIYTYSGLFCVTVNPYKWLPVYKPEVVTAYRGKKRQEAPPHIFSISDNAYQFMLTDRENQSILITGESGAGKTVNTKRVIQYFATIAVTGEKKKEEITSGKIQGTLEDQIISANPLLEAFGNAKTVRNDNSSRFGKFIRIHFGTTGKLASADIETYLLEKSRVVFQLKAERSYHIFYQITSNKKPELIEMLLITTNPYDYPFVSQGEISVASIDDQEELMATDSAIDILGFTNEEKVSIYKLTGAVMHYGNLKFKQKQREEQAEPDGTEVADKAAYLQSLNSADLLKALCYPRVKVGNEYVTKGQTVEQVSNAVGALAKAVYEKMFLWMVARINQQLDTKQPRQYFIGVLDIAGFEIFDFNSLEQLCINFTNEKLQQFFNHHMFVLEQEEYKKEGIEWTFIDFGMDLAACIELIEKVGPMGIFSILEEECMFPKATDTSFKNKLYDQHLGKSANFQKPKVVKGKAEAHFALIHYAGVVDYNITGWLEKNKDPLNETVVGLYQKSAMKTLAQLFSGAQTAEGEGAGGGAKKGGKKKGSSFQTVSALFRENLNKLMTNLRSTHPHFVRCIIPNETKTPGAMEHELVLHQLRCNGVLEGIRICRKGFPSRILYADFKQRYKVLNASAIPEGQFIDSKKASEKLLASIDIDHTQYKFGHTKVFFKAGLLGLLEEMRDDKLAQLITRTQARCRGFLARVEYQRMVERREAIFCIQYNIRSFMNVKHWPWMKLFFKIKPLLKSAETEKEMATMKEEFQKIKDELAKSEAKRKELEEKMVTLLKEKNDLQLQVQAEAEGLADAEERCDQLIKTKIQLEAKIKEVTERAEDEEEINAELTAKKRKLEDECSELKKDIDDLELTLAKVEKEKHATENKVKNLTEEMAGLDETIAKLTKEKKALQEAHQQTLDDLQAEEDKVNTLTKAKIKLEQQVDDLEGSLEQEKKLRMDLERAKRKLEGDLKLAQESIMDIENEKQQLDEKLKKKEFEISNLQSKIEDEQALGIQLQKKIKELQARIEELEEEIEAERASRAKAEKQRSDLSRELEEISERLEEAGGATSAQIEMNKKREAEFQKMRRDLEEATLQHEATAATLRKKHADSVAELGEQIDNLQRVKQKLEKEKSEMKMEIDDLASNVETVSKAKGNLEKMCRTLEDQLSELKSKEEEQQRLINDLTAQRGRLQTESGEFSRQLDEKEALVSQLSRGKQAFTQQIEELKRQLEEEIKAKNALAHALQSSRHDCDLLREQYEEEQESKAELQRALSKANTEVAQWRTKYETDAIQRTEELEEAKKKLAQRLQAAEEHVEAVNAKCASLEKTKQRLQNEVEDLMLDVERTNAACAALDKKQRNFDKILAEWKQKCEETHAELEASQKEARSLGTELFKIKNAYEESLDQLETLKRENKNLQQEISDLTEQIAEGGKRIHELEKIKKQVEQEKCELQAALEEAEVTIITSQVWYIFGSDVT

SEQ ID NO: 855912 - protein, 1909 aa, Homo sapiens; identical to SEQ ID NO: 855901

SEQ ID NO: 855913 - protein, 394 aa, Homo sapiens; identical to SEQ ID NO: 855902

SEQ ID NO: 855914 - protein, 1571 aa, Homo sapiens
HVGQAGLELLTSDEPPTLASQSAGTTSMSHRAWQNIKFLIYFNQIADKAAYLQSLNSADLLKALCYPRVKVGNEYVTKGQTVEQVSNAVGALAKAVYEKMFLWMVARINQQLDTKQPRQYFIGVLDIAGFEIFDFNSLEQLCINFTNEKLQQFFNHHMFVLEQEEYKKEGIEWTFIDFGMDLAACIELIEKVGPMGIFSILEEECMFPKATDTSFKNKLYDQHLGKSANFQKPKVVKGKAEAHFALIHYAGVVDYNITGWLEKNKDPLNETVVGLYQKSAMKTLAQLFSGAQTAEGEGAGGGAKKGGKKKGSSFQTVSALFRENLNKLMTNLRSTHPHFVRCIIPNETKTPGAMEHELVLHQLRCNGVLEGIRICRKGFPSRILYADFKQRYKVLNASAIPEGQFIDSKKASEKLLASIDIDHTQYKFGHTKVFFKAGLLGLLEEMRDDKLAQLITRTQARCRGFLARVEYQRMVERREAIFCIQYNIRSFMNVKHWPWMKLFFKIKPLLKSAETEKEMATMKEEFQKIKDELAKSEAKRKELEEKMVTLLKEKNDLQLQVQAEAEGLADAEERCDQLIKTKIQLEAKIKEVTERAEDEEEINAELTAKKRKLEDECSELKKDIDDLELTLAKVEKEKHATENKVKNLTEEMAGLDETIAKLTKEKKALQEAHQQTLDDLQAEEDKVNTLTKAKIKLEQQVDDLEGSLEQEKKLRMDLERAKRKLEGDLKLAQESIMDIENEKQQLDEKLKKKEFEISNLQSKIEDEQALGIQLQKKIKELQARIEELEEEIEAERASRAKAEKQRSDLSRELEEISERLEEAGGATSAQIEMNKKREAEFQKMRRDLEEATLQHEATAATLRKKHADSVAELGEQIDNLQRVKQKLEKEKSEMKMEIDDLASNVETVSKAKGNLEKMCRTLEDQLSELKSKEEEQQRLINDLTAQRGRLQTESGEFSRQLDEKEALVSQLSRGKQAFTQQIEELKRQLEEEIKAKNALAHALQSSRHDCDLLREQYEEEQESKAELQRALSKANTEVAQWRTKYETDAIQRTEELEEAKKKLAQRLQAAEEHVEAVNAKCASLEKTKQRLQNEVEDLMLDVERTNAACAALDKKQRNFDKILAEWKQKCEETHAELEASQKEARSLGTELFKIKNAYEESLDQLETLKRENKNLQQEISDLTEQIAEGGKRIHELEKIKKQVEQEKCELQAALEEAEASLEHEEGKILRIQLELNQVKSEVDRKIAEKDEEIDQLKRNHIRIVESMQSTLDAEIRSRNDAIRLKKKMEGDLNEMEIQLNHANRMAAEALRNYRNTQGILKDTQIHLDDALRSQEDLKEQLAMVERRANLLQAEIEELRATLEQTERSRKIAEQELLDASERVQLLHTQNTSLINTKKKLETDISQMQGEMEDILQEARNAEEKAKKAITDAAMMAEELKKEQDTSAHLERMKKNMEQTVKDLQLRLDEAEQLALKGGKKQIQKLEARVRELEGEVESEQKRNAEAVKGLRKHERRVKELTYQTEEDRKNILRLQDLVDKLQAKVKSYKRQAEEAEEQSNTNLAKFRKAPA

SEQ ID NO: 855915 - protein, 467 aa, Homo sapiens
  misc_feature (3)..(3): Xaa can be any naturally occurring amino acid
ALXKFIETYRRLLAEKIILAEWKQKCEETHAELEASQKEARSLGTELFKIKNAYEESLDQLETLKRENKNLQQEISDLTEQIAEGGKRIHELEKIKKQVEQEKCELQAALEEAEASLEHEEGKILRIQLELNQVKSEVDRKIAEKDEEIDQLKRNHIRIVESMQSTLDAEIRSRNDAIRLKKKMEGDLNEMEIQLNHANRMAAEALRNYRNTQGILKDTQIHLDDALRSQEDLKEQLAMVERRANLLQAEIEELRATLEQTERSRKIAEQELLDASERVQLLHTQNTSLINTKKKLETDISQMQGEMEDILQEARNAEEKAKKAITDAAMMAEELKKEQDTSAHLERMKKNMEQTVKDLQLRLDEAEQLALKGGKKQIQKLEARVRELEGEVESEQKRNAEAVKGLRKHERRVKELTYQTEEDRKNILRLQDLVDKLQAKVKSYKRQAEEAEEQSNTNLAKFRKAPA

SEQ ID NO: 855916 - protein, 394 aa, Homo sapiens; identical to SEQ ID NO: 855902

SEQ ID NO: 855917 - protein, 138 aa, Homo sapiens; identical to SEQ ID NO: 855905

SEQ ID NO: 855918 - protein, 394 aa, Homo sapiens; identical to SEQ ID NO: 855902

SEQ ID NO: 855919 - protein, 1558 aa, Homo sapiens
MSSDSELAVFGEAAPFLRKSERERIEAQNRPFDAKTSVFVAEPKESFVKGTIQSREGGKVTVKTEGGATLTVKDDQVFPMNPPKYDKIEDMAMMTHLHEPAVLYNLKERYAAWMIYTYSGLFCVTVNPYKWLPVYKPEVVTAYRGKKRQEAPPHIFSISDNAYQFMLTDRENQSILITGESGAGKTVNTKRVIQYFATIAVTGEKKKEEITSGKIQGTLEDQIISANPLLEAFGNAKTVRNDNSSRFGKFIRIHFGTTGKLASADIETYLLEKSRVVFQLKAERSYHIFYQITSNKKPELIEMLLITTNPYDYPFVSQGEISVASIDDQEELMATDSAIDILGFTNEEKVSIYKLTGAVMHYGNLKFKQKQREEQAEPDGTEVADKAAYLQSLNSADLLKALCYPRVKVGNEYVTKGQTVEQVSNAVGALAKAVYEKMFLWMVARINQQLDTKQPRQYFIGVLDIAGFEIFDFNSLEQLCINFTNEKLQQFFNHHMFVLEQEEYKKEGIEWTFIDFGMDLAACIELIEKVGPMGIFSILEEECMFPKATDTSFKNKLYDQHLGKSANFQKPKVVKGKAEAHFALIHYAGVVDYNITGWLEKNKDPLNETVVGLYQKSAMKTLAQLFSGAQTAEGEGAGGGAKKGGKKKGSSFQTVSALFRENLNKLMTNLRSTHPHFVRCIIPNETKTPGAMEHELVLHQLRCNGVLEGIRICRKGFPSRILYADFKQRYKVLNASAIPEGQFIDSKKASEKLLASIDIDHTQYKFGHTKVFFKAGLLGLLEEMRDDKLAQLITRTQARCRGFLARVEYQRMVERREAIFCIQYNIRSFMNVKHWPWMKLFFKIKPLLKSAETEKEMATMKEEFQKIKDELAKSEAKRKELEEKMVTLLKEKNDLQLQVQAEAEGLADAEERCDQLIKTKIQLEAKIKEVTERAEDEEEINAELTAKKRKLEDECSELKKDIDDLELTLAKVEKEKHATENKVKNLTEEMAGLDETIAKLTKEKKALQEAHQQTLDDLQAEEDKVNTLTKAKIKLEQQVDDLEGSLEQEKKLRMDLERAKRKLEGDLKLAQESIMDIENEKQQLDEKLKKKEFEISNLQSKIEDEQALGIQLQKKIKELQARIEELEEEIEAERASRAKAEKQRSDLSRELEEISERLEEAGGATSAQIEMNKKREAEFQKMRRDLEEATLQHEATAATLRKKHADSVAELGEQIDNLQRVKQKLEKEKSEMKMEIDDLASNVETVSKAKGNLEKMCRTLEDQLSELKSKEEEQQRLINDLTAQRGRLQTESGEFSRQLDEKEALVSQLSRGKQAFTQQIEELKRQLEEEIKAKNALAHALQSSRHDCDLLREQYEEEQESKAELQRALSKANTEVAQWRTKYETDAIQRTEELEEAKKKLAQRLQAAEEHVEAVNAKCASLEKTKQRLQNEVEDLMLDVERTNAACAALDKKQRNFDKILAEWKQKCEETHAELEASQKEARSLGTELFKIKNAYEESLDQLETLKRENKNLQQEISDLTEQIAEGGKRIHELEKIKKQVEQEKCELQAALEEAECG

SEQ ID NO: 855920 - protein, 924 aa, Homo sapiens
MSSDSELAVFGEAAPFLRKSERERIEAQNRPFDAKTSVFVAEPKESFVKGTIQSREGGKVTVKTEGGATLTVKDDQVFPMNPPKYDKIEDMAMMTHLHEPAVLYNLKERYAAWMIYTYSGLFCVTVNPYKWLPVYKPEVVTAYRGKKRQEAPPHIFSISDNAYQFMLTDRENQSILITGESGAGKTVNTKRVIQYFATIAVTGEKKKEEITSGKIQGTLEDQIISANPLLEAFGNAKTVRNDNSSRFGKFIRIHFGTTGKLASADIETYLLEKSRVVFQLKAERSYHIFYQITSNKKPELIEMLLITTNPYDYPFVSQGEISVASIDDQEELMATDSAIDILGFTNEEKVSIYKLTGAVMHYGNLKFKQKQREEQAEPDGTEVADKAAYLQSLNSADLLKALCYPRVKVGNEYVTKGQTVEQVSNAVGALAKAVYEKMFLWMVARINQQLDTKQPRQYFIGVLDIAGFEIFDFNSLEQLCINFTNEKLQQFFNHHMFVLEQEEYKKEGIEWTFIDFGMDLAACIELIEKVGPMGIFSILEEECMFPKATDTSFKNKLYDQHLGKSANFQKPKVVKGKAEAHFALIHYAGVVDYNITGWLEKNKDPLNETVVGLYQKSAMKTLAQLFSGAQTAEGEGAGGGAKKGGKKKGSSFQTVSALFRENLNKLMTNLRSTHPHFVRCIIPNETKTPGAMEHELVLHQLRCNGVLEGIRICRKGFPSRILYADFKQRYKVLNASAIPEGQFIDSKKASEKLLASIDIDHTQYKFGHTKVFFKAGLLGLLEEMRDDKLAQLITRTQARCRGFLARVEYQRMVERREAIFCIQYNIRSFMNVKHWPWMKLFFKIKPLLKSAETEKEMATMKEEFQKIKDELAKSEAKRKELEEKMVTLLKEKNDLQLQVQAEAEGLADAEESWTSIANHSHAEP

SEQ ID NO: 855921 - protein, 142 aa, Homo sapiens
LTSTPSPHHLNEKQTALHSFHLKDVLTTIGEKVCLEVSSCLSLCGSSPFTTDKETVLKGQIQAVASPDDPIRRIMESRILTFLETYLASGHQKPLPTVPGGLSPVQRELEEVAIKFARLVNYNKMVFCPYYDAILSKILVRS

SEQ ID NO: 855922 - protein, 595 aa, Homo sapiens
MSENLDKSNVNEAGKSKSNDSEEGLEDAVEGADEALQKAIKSDSSSPQRVQRPHSSPPRFVTVEELLETARGVTNMALAHEIVVNGDFQIKPVELPENSLKKRVKEIVHKAFWDCLSVQLSEDPPAYDHAIKLVGEIKETLLSFLLPGHTRLRNQITEVLDLDLIKQEAENGALDISKLAEFIIGMMGTLCAPARDEEVKKLKDIKEIVPLFREIFSVLDLMKVDMANFAISSIRPHLMQQSVEYERKKFQEILERQPNSLDFVTQWLEEASEDLMTQKYKHALPVGGMAAGSGDMPRLSPVAVQNYAYLKLLKWDHLQRPFPETVLMDQSRFHELQLQLEQLTILGAVLLVTFSMAAPGISSQADFAEKLKMIVKILLTDMHLPSFHLKDVLTTIGEKVCLEVSSCLSLCGSSPFTTDKETVLKGQIQAVASPDDPIRRIMESRILTFLETYLASGHQKPLPTVPGGLSPVQRELEEVAIKFARLVNYNKMVFCPYYDAILRKRWISFGNFFGSSNTDMSPWNCRTDYPMSLHIRFPKNHVIEAPMTIQLCFQEPCNKALSLLNIPLEAKGILDRSFLQRRLKPYRIRFCCRAL

SEQ ID NO: 855923 - protein, 409 aa, Homo sapiens
MGTLCAPARDEEVKKLKDIKEIVPLFREIFSVLDLMKVDMANFAISSIRPHLMQQSVEYERKKFQEILERQPNSLDFVTQWLEEASEDLMTQKYKHALPVGGMAAGSGDMPRLSPVAVQNYAYLKLLKWDHLQRPFPETVLMDQSRFHELQLQLEQLTILGAVLLVTFSMAAPGISSQADFAEKLKMIVKILLTDMHLPSFHLKDVLTTIGEKVCLEVSSCLSLCGSSPFTTDKETVLKGQIQAVASPDDPIRRIMESRILTFLETYLASGHQKPLPTVPGGLSPVQRELEEVAIKFARLVNYNKMVFCPYYDAILRKRWISFGNFFGSSNTDMSPWNCRTDYPMSLHIRFPKNHVIEAPMTIQLCFQEPCNKALSLLNIPLEAKGILDRSFLQRRLKPYRIRFCCRAL

SEQ ID NO: 855924 - protein, 259 aa, Homo sapiens [sequence omitted]

SEQ ID NO: 855925 - protein, 509 aa, Homo sapiens
MSENLDKSNVNEAGKSKSNDSEEGLEDAVEGADEALQKAIKSDSSSPQRVQRPHSSPPRFVTVEELLETARGVTNMALAHEIVVNGDFQIKPVELPENSLKKRVKEIVHKAFWDCLSVQLSEDPPAYDHAIKLVGEIKETLLSFLLPGHTRLRNQITEVLDLDLIKQEAENGALDISKLAEFIIGMMGTLCAPARDEEVKKLKDIKEIVPLFREIFSVLDLMKVDMANFAISSIRPHLMQQSVEYERKKFQEILERQPNSLDFVTQWLEEASEDLMTQKYKHALPVGGMAAGSGDMPRLSPVAVQNYAYLKLLKWDHLQRPFPETVLMDQSRFHELQLQLEQLTILGAVLLVTFSMAAPGISSQADFAEKLKMIVKILLTDMHLPSFHLKDVLTTIGEKVCLEVSSCLSLCGSSPFTTDKETVLKGQIQAVASPDDPIRRIMESRILTFLETYLASGHQKPLPTVPGGLSPVQRELEEVAIKFARLVNYNKMVFCPYYDAILSKILVRS

SEQ ID NO: 855926 - protein, 595 aa, Homo sapiens; identical to SEQ ID NO: 855922

SEQ ID NO: 855927 - protein, 206 aa, Homo sapiens
DRPPRGEGCGLGGAEAEPPLPAAHPSGFRRGASPRLIRGGSGRRENADSVAGESGSWGGGWRGPSGRRAVQVARISSPLPVGSHPGMSGAGEEEAGSAGGWSSPLEAVLSARPRPPLLPALPLPRWPEQLFTTESGRRARVELSARGGDSRRRGTEPLFFFCRKTLSAGEPLVSSLGPRAAPTDDRLLGKCEDPPPLGSLFRHSGG

SEQ ID NO: 855928 - protein, 153 aa, Homo sapiens
MNVGVAHSEVNPNTRVMNSRGMWLTYALGVGLLHIVLLSIPFFSVPVAWTLTNIIHNLGMYVFLHAVKGTPFETPDQGKARLLTHWEQLDYGVQFTSSRKFFTISPIILYFLASFYTKYDPTHFILNTASLLSVLIPKMPQLHGVRIFGINKY

SEQ ID NO: 855929 - protein, 153 aa, Homo sapiens; identical to SEQ ID NO: 855928

SEQ ID NO: 855930 - protein, 153 aa, Homo sapiens; identical to SEQ ID NO: 855928

SEQ ID NO: 855931 - protein, 153 aa, Homo sapiens; identical to SEQ ID NO: 855928

SEQ ID NO: 855932 - protein, 153 aa, Homo sapiens; identical to SEQ ID NO: 855928

SEQ ID NO: 855933 - protein, 153 aa, Homo sapiens; identical to SEQ ID NO: 855928

SEQ ID NO: 855934 - protein, 109 aa, Homo sapiens
MNVGVAHSEVNPNTRVMNSRGMWLTYALGVGLLHIVLLSIPFFSVPVAWTLTNIIHNLGMYVFLHAVKGTPFETPDQGKARLLTHWEQLDYGVQFTSSRKFFTISPIIL

SEQ ID NO: 855935 - protein, 113 aa, Homo sapiens
TRPRTRGAWTLTNIIHNLGMYVFLHAVKGTPFETPDQGKARLLTHWEQLDYGVQFTSSRKFFTISPIILYFLASFYTKYDPTHFILNTASLLSVLIPKMPQLHGVRIFGINKY

SEQ ID NO: 855936 - protein, 182 aa, Homo sapiens
MVFVCYFKVTRKLPVVSVLIHFITSYRANMNVGVAHSEVNPNTRVMNSRGMWLTYALGVGLLHIVLLSIPFFSVPVAWTLTNIIHNLGMYVFLHAVKGTPFETPDQGKARLLTHWEQLDYGVQFTSSRKFFTISPIILYFLASFYTKYDPTHFILNTASLLSVLIPKMPQLHGVRIFGINKY

SEQ ID NO: 855937 - protein, 153 aa, Homo sapiens; identical to SEQ ID NO: 855928

SEQ ID NO: 855938 - protein, 153 aa, Homo sapiens; identical to SEQ ID NO: 855928

SEQ ID NO: 855939 - protein, 284 aa, Homo sapiens
MATSGDCPRSESQGEEPAECSEAGLLQEGVQPEEFVAIADYAATDETQLSFLRGEKILILRQTTADWWWGERAGCCGYIPANHVGKHVDEYDPEDTWQDEEYFGSYGTLKLHLEMLADQPRTTKYHSVILQNKESLTDKVILDVGCGTGIISLFCAHYARPRAVYAVEASEMAQHTGQLVLQNGFADIITVYQQKVEDVVLPEKVDVLVSEWMGTCLLAAPLLSCRILPCTCASGPLHVLLACCLPLPCTCASVPLHVLLACCLPVLRAPQPSGLHLSWPIFLL

SEQ ID NO: 855940 - protein, 277 aa, Homo sapiens
MATSGDCPRSESQGEEPAECSEAGLLQEGVQPEEFVAIADYAATDETQLSFLRGEKILILRQTTADWWWGERAGCCGYIPANHVGKHVDEYDPEDTWQDEEYFGSYGTLKLHLEMLADQPRTTKYHSVILQNKESLTDKVILDVGCGTGIISLFCAHYARPRAVYAVEASEMAQHTGQLVLQNGFADIITVYQQKVEDVVLPEKVDVLVSEWMGTCLLFEFMIESILYARDAWLKEDGVIWPTMAALHLVPCSADKDYRSKVLFWDNAYEFNLSALK

SEQ ID NO: 855941 - protein, 433 aa, Homo sapiens
MATSGDCPRSESQGEEPAECSEAGLLQEGVQPEEFVAIADYAATDETQLSFLRGEKILILRQTTADWWWGERAGCCGYIPANHVGKHVDEYDPEDTWQDEEYFGSYGTLKLHLEMLADQPRTTKYHSVILQNKESLTDKVILDVGCGTGIISLFCAHYARPRAVYAVEASEMAQHTGQLVLQNGFADIITVYQQKVEDVVLPEKVDVLVSEWMGTCLLFEFMIESILYARDAWLKEDGVIWPTMAALHLVPCSADKDYRSKVLFWDNAYEFNLSALKSLAVKEFFSKPKYNHILKPEDCLSEPCTILQLDMRTVQISDLETLRGELRFDIRKAGTLHGFTAWFSVHFQSLQEGQPPQVLSTGPFHPTTHWKQTLFMMDDPVPVHTGDVVTGSVVLQRNPVWRRHMSVALSWAVTSRQDPTSQKVGEKVFPIWR

SEQ ID NO: 855942 - protein, 277 aa, Homo sapiens; identical to SEQ ID NO: 855940

SEQ ID NO: 855943 - protein, 277 aa, Homo sapiens; identical to SEQ ID NO: 855940

SEQ ID NO: 855944 - protein, 277 aa, Homo sapiens; identical to SEQ ID NO: 855940

SEQ ID NO: 855945 - protein, 277 aa, Homo sapiens; identical to SEQ ID NO: 855940

SEQ ID NO: 855946 - protein, 277 aa, Homo sapiens; identical to SEQ ID NO: 855940

SEQ ID NO: 855947 - protein, 227 aa, Homo sapiens
  misc_feature (3)..(3): Xaa can be any naturally occurring amino acid
  misc_feature (7)..(7): Xaa can be any naturally occurring amino acid
  misc_feature (12)..(12): Xaa can be any naturally occurring amino acid
GQXCLRXMGGGXFPFPLVWGERAGCCGYIPANHVGKHVDEYDPEDTWQDEEYFGSYGTLKLHLEMLADQPRTTKYHSVILQNKESLTDKVILDVGCGTGIISLFCAHYARPRAVYAVEASEMAQHTGQLVLQNGFADIITVYQQKVEDVVLPEKVDVLVSEWMGTCLLFEFMIESILYARDAWLKEDGVIWPTMAALHLVPCSADKDYRSKVLFWDNAYEFNLSALK

SEQ ID NO: 855948 - protein, 324 aa, Homo sapiens
MATSGDCPRSESQGEEPAECSEAGLLQEGVQPEEFVAIADYAATDETQLSFLRGEKILILRQTTADWWWGERAGCCGYIPANHVGKHVDEYDPEDTWQDEEYFGSYGTLKLHLEMLADQPRTTKYHSVILQNKESLTDKVILDVGCGTGIISLFCAHYARPRAVYAVEASEMAQHTGQLVLQNGFADIITVYQQKVEDVVLPEKVDVLVSEWMGTCLLFEFMIESILYARDAWLKEDGVIWPTMAALHLVPCSADKDYRSKVLFWDNAYEFNLSALKSLAVKEFFSKPKYNHILKPEDCLSEPCTILQLDMRTVQISDLEVRKR

SEQ ID NO: 855949 - protein, 571 aa, Homo sapiens
  misc_feature (571)..(571): Xaa can be any naturally occurring amino acid
MATSGDCPRSESQGEEPAECSEAGLLQEGVQPEEFVAIADYAATDETQLSFLRGEKILILRQTTADWWWGERAGCCGYIPANHVGKHVDEYDPEDTWQDEEYFGSYGTLKLHLEMLADQPRTTKYHSVILQNKESLTDKVILDVGCGTGIISLFCAHYARPRAVYAVEASEMAQHTGQLVLQNGFADIITVYQQKVEDVVLPEKVDVLVSEWMGTCLLFEFMIESILYARDAWLKEDGVIWPTMAALHLVPCSADKDYRSKVLFWDNAYEFNLSALKSLAVKEFFSKPKYNHILKPEDCLSEPCTILQLDMRTVQISDLETLRGELRFDIRKAGTLHGFTAWFSGTVDIVAINEPFIDLKLHGFYMFHIDSTHGKFHGTDKAENGKLVINGHPSPSSKERDPSQNHVGAEMLALSTSVGVNWESSAAWEKAEVICRGEAKRVIHICPLLECPSRHGCEQWNGCTKALQRHEKAHGKHNREANTDQAKQDKQGEGKGQDPQARKKGRHKESKGPRKRESRTGEHRNNTQHWRQRGDVQTRRMRQQPTKMRSSRNNKAESQTQSTLAGTKRLX

SEQ ID NO: 855950 - protein, 234 aa, Homo sapiens
MATSGDCPRSESQGEEPAECSEAGLLQEGVQPEEFVAIADYAATDETQLSFLRGEKILILRQTTADWWWGERAGCCGYIPANHVGKHVDEYDPEDTWQDEEYFGSYGTLKLHLEMLADQPRTTKYHSVILQNKESLTDKVILDVGCGTGIISLFCAHYARPRAVYAVEASEMAQHTGQLVLQNGFADIITVYQQKVEDVVLPEKVDVLVSEWMGTCLLGEGGRAGSWGPELGGF

SEQ ID NO: 855951 - protein, 234 aa, Homo sapiens; identical to SEQ ID NO: 855950

SEQ ID NO: 855952 - protein, 115 aa, Homo sapiens
SNSLTGRAERRKDSAESGVENWAQEAQMLETFLTEASELTMRVLGVVSPGWGAFLRFLTHSASARGAWRGPPQPGPCGATRCPRVPCHLLDPDPEGRAALRHQEGGDPARLHGLV

SEQ ID NO: 855953 - protein, 146 aa, Homo sapiens
MATSGDCPRSESQGEEPAECSEAGLLQEGVQPEEFVAIADYAATDETQLSFLRGEKILILRQTTADWWWGERAGCCGYIPANHVGKHVDEYDPEDTWQDEEYFGSYGTLRNPVWRRHMSVALSWAVTSRQDPTSQKVGEKVFPIWR

SEQ ID NO: 855954 - protein, 113 aa, Homo sapiens
MATSGDCPRSESQGEEPAECSEAGLLQEGVQPEEFVAIADYAATDETQLSFLRGEKILILRQTTADWWWGERAGCCGYIPANHVGKSRLCFQVFTRGAHSADPWLGRSSMFLS

SEQ ID NO: 855955 - protein, 433 aa, Homo sapiens; identical to SEQ ID NO: 855941

SEQ ID NO: 855956 - protein, 277 aa, Homo sapiens; identical to SEQ ID NO: 855940

SEQ ID NO: 855957 - protein, 433 aa, Homo sapiens; identical to SEQ ID NO: 855941

SEQ ID NO: 855958 - protein, 433 aa, Homo sapiens; identical to SEQ ID NO: 855941

SEQ ID NO: 855959 - protein, 277 aa, Homo sapiens; identical to SEQ ID NO: 855940

SEQ ID NO: 855960 - protein, 277 aa, Homo sapiens; identical to SEQ ID NO: 855940

SEQ ID NO: 855961 - protein, 334 aa, Homo sapiens
GAPGPGRGLPGWRPACTALARVEGGGSGSWKGPSTPPRWRCGRGTQRRNAIESSVWITLSLEKYELRRRKGEEPAECSEAGLLQEGVQPEEFVAIADYAATDETQLSFLRGEKILILRQTTADWWWGERAGCCGYIPANHVGKHVDEYDPEDTWQDEEYFGSYGTLKLHLEMLADQPRTTKYHSVILQNKESLTDKVILDVGCGTGIISLFCAHYARPRAVYAVEASEMAQHTGQLVLQNGFADIITVYQQKVEDVVLPEKVDVLVSEWMGTCLLFEFMIESILYARDAWLKEDGVIWPTMAALHLVPCSADKDYRSKVLFWDNAYEFNLSALK

SEQ ID NO: 855962 - protein, 257 aa, Homo sapiens
MATSGDCPRSESQGEEPAECSEAGLLQEGVQPEEFVAIADYAATDETQWGERAGCCGYIPANHVGKHVDEYDPEDTWQDEEYFGSYGTLKLHLEMLADQPRTTKYHSVILQNKESLTDKVILDVGCGTGIISLFCAHYARPRAVYAVEASEMAQHTGQLVLQNGFADIITVYQQKVEDVVLPEKVDVLVSEWMGTCLLFEFMIESILYARDAWLKEDGVIWPTMAALHLVPCSADKDYRSKVLFWDNAYEFNLSALK

SEQ ID NO: 855963 - protein, 228 aa, Homo sapiens
MATSGDCPRSESQGEEPAECSEAGLLQEGVQPEEFVAIADYAATDETQLSFLRGEKILILRQTTADWWWGERAGCCGYIPANHVGKHVDEYDPEDTWQDEEYFGSYGTLKLHLEMLADQPRTTKYHSVILQNKESLTDKVILDVGCGTGIISLFCAHYARPRAVYAVEASEMAQHTGQLVLQNGFADIITVYQQKVEDVVLPEKVDVLVSEWMGTCLLVGEKVFPIWR

SEQ ID NO: 855964 - protein, 217 aa, Homo sapiens [sequence omitted]

SEQ ID NO: 855965 - protein, 284 aa, Homo sapiens; identical to SEQ ID NO: 855939

SEQ ID NO: 855966 - protein, 74 aa, Homo sapiens
HAPLSCSTTHWKQTLFMMDDPVPVHTGDVVTGSVVLQRNPVWRRHMSVALSWAVTSRQDPTSQKVGEKVFPIWR

SEQ ID NO: 855967 - protein, 126 aa, Homo sapiens
MATSGDCPRSESQGEEPAECSEAGLLQEGVQPEEFVAIADYAATDETQLSFLRGEKILILRQTTADWWWGERAGCCGYIPANHVGKHVDEYDPEDTWQDEEYFGSYGTLWAGCPRVMVLGKRCWLG

SEQ ID NO: 855968 - protein, 495 aa, Homo sapiens
MKKRKELNALIGLAGDSRRKKPKKGPSSHRLLRTEPPDSDSESSSEEEEEFGVVGNRSRFAKGDYLRCCKICYPLCGFVILAACVVACVGLVWMQVALKEDLDALKEKFRTMESNQKSSFQEIPKLNEELLSKQKQLEKIESGEMGLNKVWINITEMNKQISLLTSAVNHLKANVKSAADLISLPTTVEGLQKSVASIGNTLNSVHLAVEALQKTVDEHKKTMELLQSDMNQHFLKETPGSNQIIPSPSATSELDNKTHSENLKQDILYLHNSLEEVNSALVGYQRQNDLKLEGMNETVSNLTQRVNLIESDVVAMSKVEKKANLSFSMMGDRSATLKRQSLDQVTNRTDTVKIQSIKKEDSSNSQVSKLREKLQLISALTNKPESNRPPETADEEQVESFTSKPSALPKFSQFLGDPVEKAAQLRPISLPGVSSTEDLQDLFRKTGQDVDGKLTYQEIWTSLGSAMPEPESLRAFDSDGDGRYSFLELRVALGI

SEQ ID NO: 855969 - protein, 495 aa, Homo sapiens; identical to SEQ ID NO: 855968

SEQ ID NO: 855970 - protein, 495 aa, Homo sapiens; identical to SEQ ID NO: 855968

SEQ ID NO: 855971 - protein, 273 aa, Homo sapiens
MELLQSDMNQHFLKETPGSNQIIPSPSATSELDNKTHSENLKQDILYLHNSLEEVNSALVGYQRQNDLKLEGMNETVSNLTQRVNLIESDVVAMSKVEKKANLSFSMMGDRSATLKRQSLDQVTNRTDTVKIQSIKKEDSSNSQVSKLREKLQLISALTNKPESNRPPETADEEQVESFTSKPSALPKFSQFLGDPVEKAAQLRPISLPGVSSTEDLQDLFRKTGQDVDGKLTYQEIWTSLGSAMPEPESLRAFDSDGDGRYSFLELRVALGI

SEQ ID NO: 855972 - protein, 443 aa, Homo sapiens
THASALSLAKGDYLRCCKICYPLCGFVILAACVVACVGLVWMQVALKEDLDALKEKFRTMESNQKSSFQEIPKLNEELLSKQKQLEKIESGEMGLNKVWINITEMNKQISLLTSAVNHLKANVKSAADLISLPTTVEGLQKSVASIGNTLNSVHLAVEALQKTVDEHKKTMELLQSDMNQHFLKETPGSNQIIPSPSATSELDNKTHSENLKQDILYLHNSLEEVNSALVGYQRQNDLKLEGMNETVSNLTQRVNLIESDVVAMSKVEKKANLSFSMMGDRSATLKRQSLDQVTNRTDTVKIQSIKKEDSSNSQVSKLREKLQLISALTNKPESNRPPETADEEQVESFTSKPSALPKFSQFLGDPVEKAAQLRPISLPGVSSTEDLQDLFRKTGQDVDGKLTYQEIWTSLGSAMPEPESLRAFDSDGDGRYSFLELRVALGI

SEQ ID NO: 855973 - protein, 332 aa, Homo sapiens
SFSRITQEQFRTMESNQKSSFQEIPKLNEELLSKQKQLEKIESGEMGLNKVWINITEMNKQISLLTSAVNHLKANVKSAADLISLPTTVEGLQKSVASIGNTLNSVHLAVEALQKTVDEHKKTMELLQSDMNQHFLKETPGSNQIIPSPSATSELDNKTHSENLKQMGDRSATLKRQSLDQVTNRTDTVKIQSIKKEDSSNSQVSKLREKLQLISALTNKPESNRPPETADEEQVESFTSKPSALPKFSQFLGDPVEKAAQLRPISLPGVSSTEDLQDLFRKTGQDVDGKLTYQEIWTSLGSAMPEPESLRAFDSDGDGRYSFLELRVALGI

SEQ ID NO: 855974 - protein, 495 aa, Homo sapiens; identical to SEQ ID NO: 855968

SEQ ID NO: 855975 - protein, 77 aa, Homo sapiens
RVISRERVIPRERVISRERVIPRERVITRERVIPRERVISRKRVYPRKPYPLRFYLEANQEPNMFLWGMTKAKKAVR

SEQ ID NO: 855976 - protein, 495 aa, Homo sapiens; identical to SEQ ID NO: 855968

SEQ ID NO: 855977 - protein, 425 aa, Homo sapiens
MKKRKELNALIGLAGDSRRKKPKKGPSSHRLLRTEPPDSDSESSSEEEEEFGVVGNRSRFAKGDYLRCCKICYPLCGFVILAACVVACVGLVWMQVALKEDLDALKEKFRTMESNQKSSFQEIPKLNEELLSKQKQLEKIESGEMGLNKVWINITEMNKQISLLTSAVNHLKANVKSAADLISLPTTVEGLQKSVASIGNTLNSVHLAVEALQKTVDEHKKTMELLQSDMNQHFLKETPGSNQIIPSPSATSELDNKTHSENLKQDILYLHNSLEEVNSALVGYQRQNDLKLEGMNETVSNLTQRVNLIESDVVAMSKVEKKANLSFSMMGDRSATLKRQSLDQVTNRTDTVKIQSIKKEDSSNSQVSKLREKLQLISALTNKPESNRPPETADEGESRAGFLIFHGGLSSLPLTWGAGKVFQQY

SEQ ID NO: 855978 - protein, 33 aa, Homo sapiens
MNETVSNLTQRVNLIESDVVAMSKVEKKANLSF

SEQ ID NO: 855979 - protein, 495 aa, Homo sapiens; identical to SEQ ID NO: 855968

SEQ ID NO: 855980 - protein, 539 aa, Homo sapiens
RPPPPQPPPPTLTLEGSSKAGRELGIGYEPGSSGVGAPLTPHKKMKKRKELNALIGLAGDSRRKKPKKGPSSHRLLRTEPPDSDSESSSEEEEEFGVVGNRSRFAKGDYLRCCKICYPLCGFVILAACVVACVGLVWMQVALKEDLDALKEKFRTMESNQKSSFQEIPKLNEELLSKQKQLEKIESGEMGLNKVWINITEMNKQISLLTSAVNHLKANVKSAADLISLPTTVEGLQKSVASIGNTLNSVHLAVEALQKTVDEHKKTMELLQSDMNQHFLKETPGSNQIIPSPSATSELDNKTHSENLKQDILYLHNSLEEVNSALVGYQRQNDLKLEGMNETVSNLTQRVNLIESDVVAMSKVEKKANLSFSMMGDRSATLKRQSLDQVTNRTDTVKIQSIKKEDSSNSQVSKLREKLQLISALTNKPESNRPPETADEEQVESFTSKPSALPKFSQFLGDPVEKAAQLRPISLPGVSSTEDLQDLFRKTGQDVDGKLTYQEIWTSLGSAMPEPESLRAFDSDGDGRYSFLELRVALGI

SEQ ID NO: 855981 - protein, 431 aa, Homo sapiens
MKKRKELNALIGLAGDSRRKKPKKGPSSHRLLRTEPPDSDSESSSEEEEEFGVVGNRSRFAKGDYLRCCKICYPLCGFVILAACVVACVGLVWMQVALKEDLDALKEKFRTMESNQKSSFQEIPKLNEELLSKQKQLEKIESGEMGLNKVWINITEMNKQISLLTSAVNHLKANVKSAADLISLPTTVEGLQKSVASIGNTLNSVHLAVEALQKTVDEHKKTMELLQSDMNQHFLKETPGSNQIIPSPSATSELDNKTHSENLKQMGDRSATLKRQSLDQVTNRTDTVKIQSIKKEDSSNSQVSKLREKLQLISALTNKPESNRPPETADEEQVESFTSKPSALPKFSQFLGDPVEKAAQLRPISLPGVSSTEDLQDLFRKTGQDVDGKLTYQEIWTSLGSAMPEPESLRAFDSDGDGRYSFLELRVALGI

SEQ ID NO: 855982 - protein, 477 aa, Homo sapiens
MKKRKELNALIGLAGDSRRKKPKKGPSSHRLLRTEPPDSDSESSSEEEEEFGVVGNRSRFAKGDYLRCCKICYPLCGFVILAACVVACVGLVWMQVALKEDLDALKEKFRTMESNQKSSFQEIPKLNEELLSKQKQLEKIESGEMGLNKVWINITEMNKQISLLTSAVNHLKANVKSAADLISLPTTVEGLQKSVASIGNTLNSVHLAVEALQKTVDEHKKTMELLQSDMNQHFLKETPGSNQIIPSPSATSELDNKTHSENLKQDILYLHNSLEEVNSALVGYQRQNDLKLEGMNETVSNLTQRVNLIESDVVAMSKVEKKANLSFSMMGDRSATLKRQSLDQVTNRTDTVKIQSIKKEDSSNSQVSKLREKLQLISALTNKPESNRPPETADEEQVESFTSKPSALPISLPGVSSTEDLQDLFRKTGQDVDGKLTYQEIWTSLGSAMPEPESLRAFDSDGDGRYSFLELRVALGI

SEQ ID NO: 855983 - protein, 166 aa, Homo sapiens [sequence omitted]

SEQ ID NO: 855984 - protein, 495 aa, Homo sapiens; identical to SEQ ID NO: 855968

SEQ ID NO: 855985 - protein, 455 aa, Homo sapiens
MKKRKELNALIGLAGDSRRKKPKKGPSSHRLLRTEPPDSDSESSSEEEEEFGVVGNRSRFAKGDYLRCCKICYPLCGFVILAACVVACVGLVWMQVALKEDLDALKEKFRTMESNQKSSFQEIPKLNEELLSKQKQLEKIESGEMGLNKVWINITEMNKQISLLTSAVNHLKANVKSAADLISLPTTVEGLQKSVASIGNTLNSVHLAVEALQKTVDEHKKTMELLQSDMNQHFLKETPGSNQIIPSPSATSELDNKTHSENLKQDILYLHNSLEEVNSALVGYQRQNDLKLEGMNETVSNLTQRVNLIESDVVAMSKVEKKANLSFSMMGDRSATLKRQSLDQVTNRTDTVKIQSIKKEDSSNSQVSKLREKLQLISALTNKPESNRPPETADEEQVESFTSKPSALPKFSQFLGDPVEKAAQLRPISLPGVSSTEGKFLYHGVVMGMFKVITF

SEQ ID NO: 855986 - protein, 121 aa, Homo sapiens
SAAYWQAAQAAAAKGEVIWGWSDGPGLELAAAAAAAAATNANNNVSGAAAAEAGAGAGVAAGVGPARVSGRELPVPETSNSGRERFRSAEPPSPAAPCPQGPDSGAGVYQARDWLLSGRPF

SEQ ID NO: 855987 - protein, 281 aa, Homo sapiens
MSAQESCLSLIKYFLFVFNLFFFVLGSLIFCFGIWILIDKTSFVSFVGLAFVPLQIWSKVLAISGIFTMGIALLGCVGALKELRCLLGLYFGMLLLLFATQITLGILISTQRAQLERSLRDVVEKTIQKYGTNPEETAAEESWDYVQFQLRCCGWHYPQDWFQVLILRGNGSEAHRVPCSCYNLSATNDSTILDKVILPQLSRLGHLARSRHSADICAVPAESHIYREGCAQGLQKWLHNNLISIVGICLGVGLLELGFMTLSIFLCRNLDHVYNRLARYR

SEQ ID NO: 855988 - protein, 281 aa, Homo sapiens; identical to SEQ ID NO: 855987

SEQ ID NO: 855989 - protein, 281 aa, Homo sapiens; identical to SEQ ID NO: 855987

SEQ ID NO: 855990 - protein, 281 aa, Homo sapiens; identical to SEQ ID NO: 855987

SEQ ID NO: 855991 - protein, 281 aa, Homo sapiens; identical to SEQ ID NO: 855987

SEQ ID NO: 855992 - protein, 446 aa, Homo sapiens
MSAQESCLSLIKYFLFVFNLFFFVLGSLIFCFGIWILIDKTSFVSFVGLAFVPLQIWSKVLAISGIFTMGIALLGCVGALKELRCLLGLYFGMLLLLFATQITLGILISTQRAQLERSLRDVVEKTIQKYGTNPEETAAEESWDYVQFQLRCCGWHYPQDWFQVLILRGNGSEAHRVPCSCYNLSATNDSTILDKVILPQLSRLGHLARSRHSADICAVPAESHIYREGCAQGLQKWLHNNLISIVGICLGVGLLEVIWPRPHPRTGLNPYMALPFISRPSVAWEGRAQGGRSPPRPSRRSTQHRRVGAAQLQGALIGCTQGKPPAIGCDLPPLSPQMTVMVLSVQLQRRALRRKCEPHVPGAGDSSPGPSLIADGGGGHSGSLWGGWGMAGACPNWGDKAPQGKLPMALGLWPLWVQDEDQPDTGSAGAELEEAQLEAEAEGEDR

SEQ ID NO: 855993 - protein, 394 aa, Homo sapiens
FLSLSALRLSFSLSLFLSPCLPHCQHLFCVVSGPLTPLGEDVSPGELPQPHQVLGSLIFCFGIWILIDKTSFVSFVGLAFVPLQIWSKVLAISGIFTMGIALLGCVGALKELRCLLGLYFGMLLLLFATQITLGILISTQRAQLERSLRDVVEKTIQKYGTNPEETAAEESWDYVQFQLRCCGWHYPQDWFQVLILRGNGSEAHRVPCSCYNLSATNDSTILDKVILPQLSRLGHLARSRHSADICAVPAESHIYREGCAQGLQKWLHNNLISIVGICLGVGLLEMTVMVLSVQLQRRALRRKCEPHVPGAGDSSPGPSLIADGGGGHSGSLWGGWGMAGACPNWGDKAPQGKLPMALGLWPLWVQDEDQPDTGSAGAELEEAQLEAEAEGEDR

SEQ ID NO: 855994 - protein, 51 aa, Homo sapiens
IDKTSFVSFVGEGGWGRWEGLPQPKQLPGVSLVSGRPTVPYSAGRLQAPIH

SEQ ID NO: 855995 - protein, 281 aa, Homo sapiens; identical to SEQ ID NO: 855987

SEQ ID NO: 855996 - protein, 281 aa, Homo sapiens; identical to SEQ ID NO: 855987

SEQ ID NO: 855997 - protein, 446 aa, Homo sapiens; identical to SEQ ID NO: 855992

SEQ ID NO: 855998 - protein, 310 aa, Homo sapiens
FLSLSALRLSFSLSLFLSPCLPHCQHLFCVVSGPLTPLGEDVSPGELPQPHQVLGSLIFCFGIWILIDKTSFVSFVGLAFVPLQIWSKVLAISGIFTMGIALLGCVGALKELRCLLGLYFGMLLLLFATQITLGILISTQRAQLERSLRDVVEKTIQKYGTNPEETAAEESWDYVQFQLRCCGWHYPQDWFQVLILRGNGSEAHRVPCSCYNLSATNDSTILDKVILPQLSRLGHLARSRHSADICAVPAESHIYREGCAQGLQKWLHNNLISIVGICLGVGLLELGFMTLSIFLCRNLDHVYNRLARYR

SEQ ID NO: 855999 - protein, 253 aa, Homo sapiens
MSAQESCLSLIKYFLFVFNLFFFVLGSLIFCFGIWILIDKTSFVSFVGLAFVPLQIWSKVLAISGIFTMGIALLGCVGALKELRCLLGLYFGMLLLLFATQITLGILISTQRAQLERSLRDVVEKTIQKYGTNPEETAAEESWDYVQFQLRCCGWHYPQDWFQVLILRGNGSEAHRVPCSCYNLSATNDSTILDKVILPQLSRLGHLARSRHSADICAVPAESHIYRELGFMTLSIFLCRNLDHVYNRLARYR

SEQ ID NO: 856000 - protein, 251 aa, Homo sapiens
MPEDGEGWPEKNAGPGLESPRKNPFNFSLHPPGLRAGPPEVAAQQPYFHSGHLPGRRPTRGDLAPPPPANGPKSLDGPALHFSVLRLPGKDELRAERSPPRPSRRSTQHRRVGAAQLQGALIGCTQGKPPAIGCDLPPLSPQMTVMVLSVQLQRRALRRKCEPHVPGAGDSSPGPSLIADGGGGHSGSLWGGWGMAGACPNWGDKAPQGKLPMALGLWPLWVQDEDQPDTGSAGAELEEAQLEAEAEGEDR

SEQ ID NO: 856001 - protein, 747 aa, Homo sapiens
METQELRGALALLLLCFFTSASQDLQVIDLLTVGESRQMVAVAEKIRTALLTAGDIYLLSTFRLPPKQGGVLFGLYSRQDNTRWLEASVVGKINKVLVRYQREDGKVHAVNLQQAGLADGRTHTVLLRLRGPSRPSPALHLYVDCKLGDQHAGLPALAPIPPAEVDGLEIRTGQKAYLRMQGFVESMKIILGGSMARVGALSECPFQGDESIHSAVTNALHSILGEQTKALVTQLTLFNQILVELRDDIRDQVKEMSLIRNTIMECQVCGFHEQRSHCSPNPCFRGVDCMEVYEYPGYRCGPCPPGLQGNGTHCSDINECAHADPCFPGSSCINTMPGFHCEACPRGYKGTQVSGVGIDYARASKQVCNDIDECNDGNNGGCDPNSICTNTVGSFKCGPCRLGFLGNQSQGCLPARTCHSPAHSPCHIHAHCLFERNGAVSCQCNVGWAGNGNVCGTDTDIDGYPDQALPCMDNNKHCKQDNCLLTPNSGQEDADNDGVGDQCDDDADGDGIKNVEDNCRLFPNKDQQNSDTDSFGDACDNCPNVPNNDQKDTDGNGEGDACDNDVDGDGIPNGLDNCPKVPNPLQTDRDEDGVGDACDSCPEMSNPTQTDADSDLVGDVCDTNEDRLISDGDGHQDTKDNCPQLPNSSQLDSDNDGLGDECDGDDDNDGIPDYVPPGPDNCRLVPNPNQKDSDGNGVGDVCEDDFDNDAVVDPLDVCPESAEVTLTDFLAYQTVVLDPEMGSSRSP

SEQ ID NO: 856002 - protein, 582 aa, Homo sapiens
METQELRGALALLLLCFFTSASQDLQVIDLLTVGESRQMVAVAEKIRTALLTAGDIYLLSTFRLPPKQGGVLFGLYSRQDNTRWLEASVVGKINKVLVRYQREDGKVHAVNLQQAGLADGRTHTVLLRLRGPSRPSPALHLYVDCKLGDQHAGLPALAPIPPAEVDGLEIRTGQKAYLRMQGFVESMKIILGGSMARVGALSECPFQGDESIHSAVTNALHSILGEQTKALVTQLTLFNQILVELRDDIRDQVKEMSLIRNTIMECQVCGFHEQRSHCSPNPCFRGVDCMEVYEYPGYRCGPCPPGLQGNGTHCSDINECAHADPCFPGSSCINTMPGFHCEACPRGYKGTQVSGVGIDYARASKQVCNDIDECNDGNNGGCDPNSICTNTVGSFKCGPCRLGFLGNQSQGCLPARTCHSPAHSPCHIHAHCLFERNGAVSCQCNVGWAGNGNVCGTDTDIDGYPDQALPCMDNNKHCKQDNCLLTPNSGQEDADNDGVGDQCDDDADGDGIKNVEDNCRLFPNKDQQNSDTDSFGDACDNCPNVPNNDQKDTDGNGEGDACDNDVDGDGAGLGLKGWLGDL

SEQ ID NO: 856003 - protein, 768 aa, Homo sapiens
PSRGGPRSGTALSARRASECHGASSKWSPEPLKARQVWRAGSCAPGPVIDLLTVGESRQMVAVAEKIRTALLTAGDIYLLSTFRLPPKQGGVLFGLYSRQDNTRWLEASVVGKINKVLVRYQREDGKVHAVNLQQAGLADGRTHTVLLRLRGPSRPSPALHLYVDCKLGDQHAGLPALAPIPPAEVDGLEIRTGQKAYLRMQGFVESMKIILGGSMARVGALSECPFQGDESIHSAVTNALHSILGEQTKALVTQLTLFNQILVELRDDIRDQVKEMSLIRNTIMECQVCGFHEQRSHCSPNPCFRGVDCMEVYEYPGYRCGPCPPGLQGNGTHCSDINECAHADPCFPGSSCINTMPGFHCEACPRGYKGTQVSGVGIDYARASKQVCNDIDECNDGNNGGCDPNSICTNTVGSFKCGPCRLGFLGNQSQGCLPARTCHSPAHSPCHIHAHCLFERNGAVSCQCNVGWAGNGNVCGTDTDIDGYPDQALPCMDNNKHCKQDNCLLTPNSGQEDADNDGVGDQCDDDADGDGIKNVEDNCRLFPNKDQQNSDTDSFGDACDNCPNVPNNDQKDTDGNGEGDACDNDVDGDGIPNGLDNCPKVPNPLQTDRDEDGVGDACDSCPEMSNPTQTDADSDLVGDVCDTNEDRLISDGDGHQDTKDNCPQLPNSSQLDSDNDGLGDECDGDDDNDGIPDYVPPGPDNCRLVPNPNQKDSDGNGVGDVCEDDFDNDAVVDPLDVCPESAEVTLTDFLAYQTVVLDPEMGSSRSP

SEQ ID NO: 856004 - protein, 647 aa, Homo sapiens
METQELRGALALLLLCFFTSASQDLQVIDLLTVGESRQMVAVAEKIRTALLTAGDIYLLSTFRLPPKQGGVLFGLYSRQDNTRWLEASVVGKINKVLVRYQREDGKVHAVNLQQAGLADGRTHTVLLRLRGPSRPSPALHLYVDCKLGDQHAGLPALAPIPPAEVDGLEIRTGQKAYLRMQGFVESMKIILGGSMARVGALSECPFQGDESIHSAVTNALHSILGEQTKALVTQLTLFNQILVELRDDIRDQVKEMSLIRNTIMECQVCGFHEQRSHCSPNPCFRGVDCMEVYEYPGYRCGPCPPGLQGNGTHCSDINECAHADPCFPGSSCINTMPGFHCEACPRGYKGTQVSGVGIDYARASKQVCNDIDECNDGNNGGCDPNSICTNTVGSFKCGPCRLGFLGNQSQGCLPARTCHSPAHSPCHIHAHCLFERNGAVSCQCNVGWAGNGNVCGTDTDIDGYPDQALPCMDNNKHCKQDNCLLTPNSGQEDADNDGVGDQCDDDADGDGIKNVEDNCRLFPNKDQQNSDTDSFGDACDNCPNVPNNDQKDTDGNGEGDACDNDVDGDGIPNGLDNCPKVPNPLQTDRDEDGVGDACDSCPEMSNPTQVQGDGKDRGGMRVLMDEAPALWMESGQITLFRVIKRRW

SEQ ID NO: 856005 - protein, 233 aa, Homo sapiens
METQELRGALALLLLCFFTSASQDLQVIDLLTVGESRQMVAVAEKIRTALLTAGDIYLLSTFRLPPKQGGVLFGLYSRQDNTRWLEASVVGKINKVLVRYQREDGKVHAVNLQQAGLADGRTHTVLLRLRGPSRPSPALHLYVDCKLGDQHAGLPALAPIPPAEVDGLEIRTGQKAYLRMQGFVESMKIILGGSMARVGALSECPFQGDESIHSAGNTETCLLTLDHGSCGLW

SEQ ID NO: 856006 - protein, 737 aa, Homo sapiens
METQELRGALALLLLCFFTSASQDLQVIDLLTVGESRQMVAVAEKIRTALLTAGDIYLLSTFRLPPKQGGVLFGLYSRQDNTRWLEASVVGKINKVLVRYQREDGKVHAVNLQQAGLADGRTHTVLLRLRGPSRPSPALHLYVDCKLGDQHAGLPALAPIPPAEVDGLEIRTGQKAYLRMQGFVESMKIILGGSMARVGALSECPFQGDESIHSAVTNALHSILGEQTKALVTQLTLFNQILVELRDDIRDQVKEMSLIRNTIMECQVCGFHEQRSHCSPNPCFRGVDCMEVYEYPGYRCGPCPPGLQGNGTHCSDINECAHADPCFPGSSCINTMPGFHCEACPRGYKGTQVSGVGIDYARASKQVCNDIDECNDGNNGGCDPNSICTNTVGSFKCGPCRLGFLGNQSQGCLPARTCHSPAHSPCHIHAHCLFERNGAVSCQCNVGWAGNGNVCGTDTDIDGYPDQALPCMDNNKHCKQDNCLLTPNSGQEDADNDGVGDQCDDDADGDGIKNVEDNCRLFPNKDQQNSDTDSFGDACDNCPNVPNNDQKDTDGNGEGDACDNDVDGDGIPNGLDNCPKVPNPLQTDRDEDGVGDACDSCPEMSNPTQTDADSDLVGDVCDTNEDRLISDGDGHQDTKDNCPQLPNSSQLDSDNDGLGDECDGDDDNDGIPDYVPPGPDNCRLVPNPNQKDSDVARAFLSTQPHSAQAMALVMCVRMTLTMMLWSTPWMCVLKVQR

SEQ ID NO: 856007 - protein, 648 aa, Homo sapiens
METQELRGALALLLLCFFTSASQDLQVIDLLTVGESRQMVAVAEKIRTALLTAGDIYLLSTFRLPPKQGGVLFGLYSRQDNTRWLEASVVGKINKVLVRYQREDGKVHAVNLQQAGLADGRTHTVLLRLRGPSRPSPALHLYVDCKLGDQHAGLPALAPIPPAEVDGLEIRTGQKAYLRMQGFVESMKIILGGSMARVGALSECPFQGDESIHSAVTNALHSILGEQTKALVTQLTLFNQILVELRDDIRDQVKEMSLIRNTIMECQVCGFHEQRSHCSPNPCFRGVDCMEVYEYPGYRCGPCPPGLQGNGTHCSDINECAHADPCFPGSSCINTMPGFHCEACPRGYKGTQVSGVGIDYARASKQVCNDIDECNDGNNGGCDPNSICTNTVGSFKCGPCRLGFLGNQSQGCLPARTCHSPAHSPCHIHAHCLFERNGAVSCQCNVGWAGNGNVCGTDTDIDGYPDQALPCMDNNKHCKQDNCLLTPNSGQEDADNDGVGDQCDDDADGDGIKNVEDNCRLFPNKDQQNSDTDSFGDACDNCPNVPNNDQKDTDGNGEGDACDNDVDGDGIPNGLDNCPKVPNPLQTDRDEDGVGDACDSCPEMSNPTQTDADSDLVGDVCDTNEDRMLFVSPSRVEPGKVQPIKAMG

SEQ ID NO: 856008 - protein, 550 aa, Homo sapiens
METQELRGALALLLLCFFTSASQDLQVIDLLTVGESRQMVAVAEKIRTALLTAGDIYLLSTFRLPPKQGGVLFGLYSRQDNTRWLEASVVGKINKVLVRYQREDGKVHAVNLQQAGLADGRTHTVLLRLRGPSRPSPALHLYVDCKLGDQHAGLPALAPIPPAEVDGLEIRTGQKAYLRMQGFVESMKIILGGSMARVGALSECPFQGDESIHSAVTNALHSILGEQTKALVTQLTLFNQILVELRDDIRDQVKEMSLIRNTIMECQVCGFHEQRSHCSPNPCFRGVDCMEVYEYPGYRCGPCPPGLQGNGTHCSDINECAHADPCFPGSSCINTMPGFHCEACPRGYKGTQVSGVGIDYARASKQVCNDIDECNDGNNGGCDPNSICTNTVGSFKCGPCRLGFLGNQSQGCLPARTCHSPAHSPCHIHAHCLFERNGAVSCQCNVGWAGNGNVCGTDTDIDGYPDQALPCMDNNKHCKQDNCLLTPNSGQEDADNDGVGDQCDDDADGDGIKNVEASPMDWTIALKSPTHYRQTGMRTGWEMLATAALK

SEQ ID NO: 856009 - protein, 116 aa, Homo sapiens
VSRAPAASTPCPASTVRPVLEGTRAHRCLVWALTMPGPANRSDWVVCVDKGSWPCRGQGLLGWTWDPCDEWDMDGFASALGLGLMLMFTDKAIPVSSAVSEETHHRSGSTQSLPLQ

SEQ ID NO: 856010 - protein, 320 aa, Homo sapiens
MPMYQVKPYHGGGAPLRVELPTCMYRLPNVHGRSYGPAPGAGHVQEESNLSLQALESRQDDILKRLYELKAAVDGLSKMIQTPDADLDVTNIIQADEPTTLTTNALDLNSVLGKDYGALKDIVINANPASPPLSLLVLHRLLCEHFRVLSTVHTHSSVKSVPENLLKCFGEQNKKQPRQDYQLGFTLIWKNVPKTQMKFSIQTMCPIEGEGNIARFLFSLFGQKHNAVNATLIDSWVDIAIFQLKEGSSKEKAAVFRSMNSALGKSPWLAGNELTVADVVLWSVLQQIGGCSVTVPANVQRWMRSCENLAPFNTALKLLK

SEQ ID NO: 856011 - protein, 280 aa, Homo sapiens
MPMYQEESNLSLQALESRQDDILKRLYELKAAVDGLSKMIQTPDADLDVTNIIQADEPTTLTTNALDLNSVLGKDYGALKDIVINANPASPPLSLLVLHRLLCEHFRVLSTVHTHSSVKSVPENLLKCFGEQNKKQPRQDYQLGFTLIWKNVPKTQMKFSIQTMCPIEGEGNIARFLFSLFGQKHNAVNATLIDSWVDIAIFQLKEGSSKEKAAVFRSMNSALGKSPWLAGNELTVADVVLWSVLQQIGGCSVTVPANVQRWMRSCENLAPFNTALKLLK

SEQ ID NO: 856012 - protein, 242 aa, Homo sapiens
MIQTPDADLDVTNIIQADEPTTLTTNALDLNSVLGKDYGALKDIVINANPASPPLSLLVLHRLLCEHFRVLSTVHTHSSVKSVPENLLKCFGEQNKKQPRQDYQLGFTLIWKNVPKTQMKFSIQTMCPIEGEGNIARFLFSLFGQKHNAVNATLIDSWVDIAIFQLKEGSSKEKAAVFRSMNSALGKSPWLAGNELTVADVVLWSVLQQIGGCSVTVPANVQRWMRSCENLAPFNTALKLLK

SEQ ID NO: 856013 - protein, 242 aa, Homo sapiens; identical to SEQ ID NO: 856012

SEQ ID NO: 856014 - protein, 320 aa, Homo sapiens; identical to SEQ ID NO: 856010

SEQ ID NO: 856015 - protein, 251 aa, Homo sapiens
MPMYQVKPYHGGGAPLRVELPTCMYRLPNVHGRSYGPAPGAGHVQDYGALKDIVINANPASPPLSLLVLHRLLCEHFRVLSTVHTHSSVKSVPENLLKCFGEQNKKQPRQDYQLGFTLIWKNVPKTQMKFSIQTMCPIEGEGNIARFLFSLFGQKHNAVNATLIDSWVDIAIFQLKEGSSKEKAAVFRSMNSALGKSPWLAGNELTVADVVLWSVLQQIGGCSVTVPANVQRWMRSCENLAPFNTALKLLK

SEQ ID NO: 856016 - protein, 349 aa, Homo sapiens
MPMYQVKPYHGGGAPLRVELPTCMYRLPNVHGRSYGPAPGAGHVQKWSFIMLSSRTPDLKVIHPPRPSKVLRLQEESNLSLQALESRQDDILKRLYELKAAVDGLSKMIQTPDADLDVTNIIQADEPTTLTTNALDLNSVLGKDYGALKDIVINANPASPPLSLLVLHRLLCEHFRVLSTVHTHSSVKSVPENLLKCFGEQNKKQPRQDYQLGFTLIWKNVPKTQMKFSIQTMCPIEGEGNIARFLFSLFGQKHNAVNATLIDSWVDIAIFQLKEGSSKEKAAVFRSMNSALGKSPWLAGNELTVADVVLWSVLQQIGGCSVTVPANVQRWMRSCENLAPFNTALKLLK

SEQ ID NO: 856017 - protein, 567 aa, Homo sapiens
MHGRLKVKTSEEQAEAKRLEREQKLKLYQSATQAVFQKRQAGELDESVLELTSQILGANPDFATLWNCRREVLQQLETQKSPEELAALVKAELGFLESCLRVNPKSYGTWHHRCWLLGRLPEPNWTRELELCARFLEVDERNFHCWDYRRFVATQAAVPPAEELAFTDSLITRNFSNYSSWHYRSCLLPQLHPQPDSGPQGRLPEDVLLKELELVQNAFFTDPNDQSAWFYHRWLLGRADPQDALRCLHVSRDEACLTVSFSRPLLVGSRMEILLLMVDDSPLIVEWRTPDGRNRPSHVWLCDLPAASLNDQLPQHTFRVIWTAGDVQKECVLLKGRQEGWCRDSTTDEQLFRCELSVEKSTVLQSELESCKELQELEPENKWCLLTIILLMRALDPLLYEKETLQYFQTLKAVDPMRATYLDDLRSKFLLENSVLKMEYAEVRVLHLAHKDLTVLCHLEQLLLVTHLDLSHNRLRTLPPALAALRCLEVLQASDNAIESLDGVTNLPRLQELLLCNNRLQQPAVLQPLASCPRLVLLNLQGNPLCQAVGILEQLAELLPSVSSVLT

SEQ ID NO: 856018 - protein, 156 aa, Homo sapiens
MHGRLKVKTSEEQAEAKRLEREQKLKLYQSATQAVFQKRQAGELDESVLELTSQILGANPDFATLWNCRREVLQQLETQKSPEELAALVKAELGFLESCLRVNPKSYGTWHHRCWLLGRLPEPNWTRELELCARFLEVDERNSAPPAGFWTTGAPP

SEQ ID NO: 856019 - protein, 567 aa, Homo sapiens; identical to SEQ ID NO: 856017

SEQ ID NO: 856020 - protein, 624 aa, Homo sapiens
MHGRLKVKTSEEQAEAKRLEREQKLKLYQSATQAVFQKRQAGELDESVLELTSQILGANPDFATLWNCRREVLQQLETQKSPEELAALVKAELGFLESCLRVNPKSYGTWHHRCWLLGRLPEPNWTRELELCARFLEVDERNFHCWDYRRFVATQAAVPPAEELAFTDSLITRNFSNYSSWHYRSCLLPQLHPQPDSGPQGRLPEDVLLKELELVQNAFFTDPNDQSAWFYHRWLLGRADPQDALRCLHVSRDEACLTVSFSRPLLVGSRMEILLLMVDDSPLIVEWRTPDGRNRPSHVWLCDLPAASLNDQLPQHTFRVIWTAGDVQKECVLLKGRQEGWCRDSTTDEQLFSVVIGKHKTRRGALDSGHQAARAGGWGLKELFQSRYWECCPVLQGCGPQLLPTLPTLRCELSVEKSTVLQSELESCKELQELEPENKWCLLTIILLMRALDPLLYEKETLQYFQTLKAVDPMRATYLDDLRSKFLLENSVLKMEYAEVRVLHLAHKDLTVLCHLEQLLLVTHLDLSHNRLRTLPPALAALRCLEVLQASDNAIESLDGVTNLPRLQELLLCNNRLQQPAVLQPLASCPRLVLLNLQGNPLCQAVGILEQLAELLPSVSSVLT

SEQ ID NO: 856021 - protein, 599 aa, Homo sapiens
MVAPYEPRAPQCGVFAGQLLQGNLHSSNPFILVHGRLKVKTSEEQAEAKRLEREQKLKLYQSATQAVFQKRQAGELDESVLELTSQILGANPDFATLWNCRREVLQQLETQKSPEELAALVKAELGFLESCLRVNPKSYGTWHHRCWLLGRLPEPNWTRELELCARFLEVDERNFHCWDYRRFVATQAAVPPAEELAFTDSLITRNFSNYSSWHYRSCLLPQLHPQPDSGPQGRLPEDVLLKELELVQNAFFTDPNDQSAWFYHRWLLGRADPQDALRCLHVSRDEACLTVSFSRPLLVGSRMEILLLMVDDSPLIVEWRTPDGRNRPSHVWLCDLPAASLNDQLPQHTFRVIWTAGDVQKECVLLKGRQEGWCRDSTTDEQLFRCELSVEKSTVLQSELESCKELQELEPENKWCLLTIILLMRALDPLLYEKETLQYFQTLKAVDPMRATYLDDLRSKFLLENSVLKMEYAEVRVLHLAHKDLTVLCHLEQLLLVTHLDLSHNRLRTLPPALAALRCLEVLQASDNAIESLDGVTNLPRLQELLLCNNRLQQPAVLQPLASCPRLVLLNLQGNPLCQAVGILEQLAELLPSVSSVLT

SEQ ID NO: 856022 - protein, 584 aa, Homo sapiens
MVSFCKATCTLPTRSSLEHGRLKVKTSEEQAEAKRLEREQKLKLYQSATQAVFQKRQAGELDESVLELTSQILGANPDFATLWNCRREVLQQLETQKSPEELAALVKAELGFLESCLRVNPKSYGTWHHRCWLLGRLPEPNWTRELELCARFLEVDERNFHCWDYRRFVATQAAVPPAEELAFTDSLITRNFSNYSSWHYRSCLLPQLHPQPDSGPQGRLPEDVLLKELELVQNAFFTDPNDQSAWFYHRWLLGRADPQDALRCLHVSRDEACLTVSFSRPLLVGSRMEILLLMVDDSPLIVEWRTPDGRNRPSHVWLCDLPAASLNDQLPQHTFRVIWTAGDVQKECVLLKGRQEGWCRDSTTDEQLFRCELSVEKSTVLQSELESCKELQELEPENKWCLLTIILLMRALDPLLYEKETLQYFQTLKAVDPMRATYLDDLRSKFLLENSVLKMEYAEVRVLHLAHKDLTVLCHLEQLLLVTHLDLSHNRLRTLPPALAALRCLEVLQASDNAIESLDGVTNLPRLQELLLCNNRLQQPAVLQPLASCPRLVLLNLQGNPLCQAVGILEQLAELLPSVSSVLT

SEQ ID NO: 856023 - protein, 540 aa, Homo sapiens [sequence omitted]

SEQ ID NO: 856024 - protein, 541 aa, Homo sapiens
MHGRLKVKTSEEQAEAKRLEREQKLKLYQSATQAVFQKRQAGELDESVLELTSQILGANPDFATLWNCRREVLQQLETQKSPEELAALVKAELGFLESCLRVNPKSYGTWHHRCWLLGRLPEPNWTRELELCARFLEVDERNFHCWDYRRFVATQAAVPPAEELAFTDSLITRNFSNYSSWHYRSCLLPQLHPQPDSGPQGRLPEDVLLKELELVQNAFFTDPNDQSAWFYHRWLLGRADPQDALRCLHVSRDEACLTVSFSRPLLVGSRMEILLLMVDDSPLIVEWRTPDGRNRPSHVWLCDLPAASLNDQLPQHTFRVIWTAGDVQKECVLLKGRQEGWCRDSTTDEQLFRCELSVEKSTVLQSELESCKELQELEPENKWCLLTIILLMRALDPLLYEKETLQYFQTLKAVDPMRATYLDDLRSKFLLENSVLKMEYAEVRVLHLAHKVWAAMHAFPWPSSRWPPHVPDFAPSLRCLCGLPIKIEFIPASQLAPLPGLSVTQPILLLATHFQIPSHQDLLVLFLPQAGHSFIFLQSDR

SEQ ID NO: 856025 - protein, 176 aa, Homo sapiens
MRALDPLLYEKETLQYFQTLKAVDPMRATYLDDLRSKFLLENSVLKMEYAEVRVLHLAHKDLTVLCHLEQLLLVTHLDLSHNRLRTLPPALAALRCLEVLQASDNAIESLDGVTNLPRLQELLLCNNRLQQPAVLQPLASCPRLVLLNLQGNPLCQAVGILEQLAELLPSVSSVLT

SEQ ID NO: 856026 - protein, 224 aa, Homo sapiens
MHGRLKVKTSEEQAEAKRLEREQKLKLYQSATQAVFQKRQAGELDESVLELTSQILGANPDFATLWNCRREVLQQLETQKSPEELAALVKAELGFLESCLRVNPKSYGTWHHRCWLLGRLPEPNWTRELELCARFLEVDERNFHCWDYRRFVATQAAVPPAEELAFTDSLITRNFSNYSSWHYRSCLLPQLHPQPDSGPQGRLPEDVLLKGLLSTYFMRGSRGA

SEQ ID NO: 856027 - protein, 133 aa, Homo sapiens
MHGRLKVKTSEEQAEAKRLEREQKLKLYQSATQAVFQKRQAGELDESVLELTSQILGANPDFATLWNCRREVLQQLETQKSPEELAALVKAELGFLESCLRVNPKSYGTWPPAACSAPASCLLPQAGPPQPAG

SEQ ID NO: 856028 - protein, 98 aa, Homo sapiens
SVAEPSLADSACPASLPSLPVLQASDNAIESLDGVTNLPRLQELLLCNNRLQQPAVLQPLASCPRLVLLNLQGNPLCQAVGILEQLAELLPSVSSVLT

SEQ ID NO: 856029 - protein, 567 aa, Homo sapiens; identical to SEQ ID NO: 856017

SEQ ID NO: 856030 - protein, 567 aa, Homo sapiens; identical to SEQ ID NO: 856017

SEQ ID NO: 856031 - protein, 584 aa, Homo sapiens; identical to SEQ ID NO: 856022

SEQ ID NO: 856032 - protein, 567 aa, Homo sapiens; identical to SEQ ID NO: 856017

SEQ ID NO: 856033 - protein, 369 aa, Homo sapiens
MCAKGAPEDVLLKLELVQNAFFTDPNDQSAWFYHRWLLGRADPQDALRCLHVSRDEACLTVSFSRPLLVGSRMEILLLMVDDSPLIVEWRTPDGRNRPSHVWLCDLPAASLNDQLPQHTFRVIWTAGDVQKECVLLKGRQEGWCRDSTTDEQLFRCELSVEKSTVLQSELESCKELQELEPENKWCLLTIILLMRALDPLLYEKETLQYFQTLKAVDPMRATYLDDLRSKFLLENSVLKMEYAEVRVLHLAHKDLTVLCHLEQLLLVTHLDLSHNRLRTLPPALAALRCLEVLQASDNAIESLDGVTNLPRLQELLLCNNRLQQPAVLQPLASCPRLVLLNLQGNPLCQAVGILEQLAELLPSVSSVLT

SEQ ID NO: 856034 - protein, 273 aa, Homo sapiens
MHGRLKVKTSEEQAEAKRLEREQKLKLYQSATQAVFQKRQAGELDESVLELTSQILGANPDFATLWNCRREVLQQLETQKSPEELAALVKAELGFLESCLRVNPKSYGTWHHRCWLLGRLPEPNWTRELELCARFLEVDERNFHCWDYRRFVATQAAVPPAEELAFTDSLITRNFSNYSSWHYRSCLLPQLHPQPDSGPQGRLPEDVLLKELELVQNAFFTDPNDQSAWFYHRWLLGRVTPGSLAADVTGQAAAALFGLYGSDELVYVYLLWE

SEQ ID NO: 856035 - protein, 211 aa, Homo sapiens
MHGRLKVKTSEEQAEAKRLEREQKLKLYQSATQAVFQKRQAGELDESVLELTSQILGANPDFATLWNCRREVLQQLETQKSPEELAALVKAELGFLESCLRVNPKSYGTWHHRCWLLGRLPEPNWTRELELCARFLEVDERNFHCWDYRRFVATQAAVPPAEELAFTDSLITRNFSNYSSWHYRSCLLPQLHPQPDSGPQGRLPEDVLLKG

SEQ ID NO: 856036 - protein, 217 aa, Homo sapiens
MSGGLAPSKSTVYVSNLPFSLTNNDLYRIFSKYGKVVKVTIMKDKDTRKSKGVAFILFLDKDSAQNCTRAINNKQLFGRVIKASIAIDNGRAAEFIRRRNYFDKSKCYECGESGHLSYACPKNMLGEREPPKKKEKKKKKKAPEPEEEIEEVEESEDEGEDPALDSLSQAIAFQQAKIEEEQKKWKPSSGVPSTSDDSRRPRIKKSTYFSDEEELSD

SEQ ID NO: 856037 - protein, 217 aa, Homo sapiens; identical to SEQ ID NO: 856036

SEQ ID NO: 856038 - protein, 217 aa, Homo sapiens; identical to SEQ ID NO: 856036

SEQ ID NO: 856039 - protein, 176 aa, Homo sapiens
MKDKDTRKSKGVAFILFLDKDSAQNCTRAINNKQLFGRVIKASIAIDNGRAAEFIRRRNYFDKSKCYECGESGHLSYACPKNMLGEREPPKKKEKKKKKKAPEPEEEIEEVEESEDEGEDPALDSLSQAIAFQQAKIEEEQKKWKPSSGVPSTSDDSRRPRIKKSTYFSDEEELSD

SEQ ID NO: 856040 - protein, 250 aa, Homo sapiens
MSGGLAPSKSTVYVSNLPFSLTNNDLYRIFSKYGKVVKVTIMKDKDTRKSKGVAFILFLDKDSAQNCTRAINNKQLFGRVIKASIAIDNGRAAEFIRRRNYFDKSKCYECGGHLSYACPKQYARQNVSLHRRNYFDKSKCYECGESGHLSYACPKNMLGEREPPKKKEKKKKKKAPEPEEEIEEVEESEDEGEDPALDSLSQAIAFQQAKIEEEQKKWKPSSGVPSTSDDSRRPRIKKSTYFSDEEELSD

SEQ ID NO: 856041 - protein, 146 aa, Homo sapiens
MSGGLAPSKSTVYVSNLPFSLTNNDLYRIFSKYGKVVKVTIMKDKDTRKSKGVAFILFLDKDSAQNCTRAINNKQLFGRVIKASIAIDNGRAAEFIRRRNYFDKSKCYECGESGHLSYACPKNMLGEREPPKKKEKKKKTSNPIKK

SEQ ID NO: 856042 - protein, 176 aa, Homo sapiens; identical to SEQ ID NO: 856039

SEQ ID NO: 856043 - protein, 176 aa, Homo sapiens; identical to SEQ ID NO: 856039

SEQ ID NO: 856044 - protein, 784 aa, Homo sapiens
MLVSRELLAEDPRPCRRLVGAVCRVLTQSACVMRIPVDASTSRRFTPPSTALSPGKMSEALPLGAPDAGAALAGKLRSGDRSMVEVLADHPGELVRTDSPNFLCSVLPTHWRCNKTLPIAFKVVALGDVPDGTLVTVMAGNDENYSAELRNATAAMKNQVARFNDLRFVGRSGRGKSFTLTITVFTNPPQVATYHRAIKITVDGPREPRNRTEKHSTMPDSPVDVKTQSRLTPPTMPPPPTTQGAPRTSSFTPTTLTNGTSHSPTALNGAPSPPNGFSNGPSSSSSSSLANQQLPPACGARQLSKLKRFLTTLQQFGNDISPEIGERVRTLVLGLVNSTLTIEEFHSKLQEATNFPLRPFVIPFLKANLPLLQRELLHCARLAKQNPAQYLAQHEQLLLDASTTSPVDSSELLLDVNENGKRRTPDRTKENGFDREPLHSEHPSKRPCTISPGQRYSPNNGLSYQPNGLPHPTPPPPQHYRLDDMAIAHHYRDSYRHPSHRDLRDRNRPMGLHGTRQEEMIDHRLTDREWAEEWKHLDHLLNCIMDMVEKTRRSLTVLRRCQEADREELNYWIRRYSDAEDLKKGGGSSSSHSRQQSPVNPDPVALDAHREFLHRPASGYVPEEIWKKAEEAVNEVKRQAMTELQKAVSEAERKAHDMITTERAKMERTVAEAKRQAAEDALAVINQQEDSSESCWNCGRKASETCSGCNTARYCGSFCQHKDWEKHHHICGQTLQAQQQGDTPAVSSSVTPNSGAGSPMDTPPAATPRSTTPGTPSTIETTPR

SEQ ID NO: 856045 - protein, 643 aa, Homo sapiens
ANSARGRRSEDVTCYLSLLLAGGENLHLKISRVRKRNLPFVVWGEEEASTPGLDAISHHLCYPDRTHRDRTEKHSTMPDSPVDVKTQSRLTPPTMPPPPTTQGAPRTSSFTPTTLTNGTSHSPTALNGAPSPPNGFSNGPSSSSSSSLANQQLPPACGARQLSKLKRFLTTLQQFGNDISPEIGERVRTLVLGLVNSTLTIEEFHSKLQEATNFPLRPFVIPFLKANLPLLQRELLHCARLAKQNPAQYLAQHEQLLLDASTTSPVDSSELLLDVNENGKRRTPDRTKENGFDREPLHSEHPSKRPCTISPGQRYSPNNGLSYQPNGLPHPTPPPPQHYRLDDMAIAHHYRDSYRHPSHRDLRDRNRPMGLHGTRQEEMIDHRLTDREWAEEWKHLDHLLNCIMDMVEKTRRSLTVLRRCQEADREELNYWIRRYSDAEDLKKGGGSSSSHSRQQSPVNPDPVALDAHREFLHRPASGYVPEEIWKKAEEAVNEVKRQAMTELQKAVSEAERKAHDMITTERAKMERTVAEAKRQAAEDALAVINQQEDSSESCWNCGRKASETCSGCNTARYCGSFCQHKDWEKHHHICGQTLQAQQQGDTPAVSSSVTPNSGAGSPMDTPPAATPRSTTPGTPSTIETTPR

SEQ ID NO: 856046 - protein, 604 aa, Homo sapiens
MISVKRNTWRALSLVIGDCRKKGNFEYCQDRTEKHSTMPDSPVDVKTQSRLTPPTMPPPPTTQGAPRTSSFTPTTLTNGTSHSPTALNGAPSPPNGFSNGPSSSSSSSLANQQLPPACGARQLSKLKRFLTTLQQFGNDISPEIGERVRTLVLGLVNSTLTIEEFHSKLQEATNFPLRPFVIPFLKANLPLLQRELLHCARLAKQNPAQYLAQHEQLLLDASTTSPVDSSELLLDVNENGKRRTPDRTKENGFDREPLHSEHPSKRPCTISPGQRYSPNNGLSYQPNGLPHPTPPPPQHYRLDDMAIAHHYRDSYRHPSHRDLRDRNRPMGLHGTRQEEMIDHRLTDREWAEEWKHLDHLLNCIMDMVEKTRRSLTVLRRCQEADREELNYWIRRYSDAEDLKKGGGSSSSHSRQQSPVNPDPVALDAHREFLHRPASGYVPEEIWKKAEEAVNEVKRQAMTELQKAVSEAERKAHDMITTERAKMERTVAEAKRQAAEDALAVINQQEDSSESCWNCGRKASETCSGCNTARYCGSFCQHKDWEKHHHICGQTLQAQQQGDTPAVSSSVTPNSGAGSPMDTPPAATPRSTTPGTPSTIETTPR

SEQ ID NO: 856047 - protein, 383 aa, Homo sapiens
MLVSRELLAEDPRPCRRLVGAVCRVLTQSACVMRIPVDASTSRRFTPPSTALSPGKMSEALPLGAPDAGAALAGKLRSGDRSMVEVLADHPGELVRTDSPNFLCSVLPTHWRCNKTLPIAFKVVALGDVPDGTLVTVMAGNDENYSAELRNATAAMKNQVARFNDLRFVGRSGRGKSFTLTITVFTNPPQVATYHRAIKITVDGPREPRNRTEKHSTMPDSPVDVKTQSRLTPPTMPPPPTTQGAPRTSSFTPTTLTNGTSHSPTALNGAPSPPNGFSNGPSSSSSSSLANQQLPPACGARQLSKLKRFLTTLQQFGNDISPEIGERVRTLVLGLVNSTLTIEEFHSKLQEATNFPLRPFVIPFLKRYCTVHWSVKYFKPYCC

SEQ ID NO: 856048 - protein, 643 aa, Homo sapiens; identical to SEQ ID NO: 856045

SEQ ID NO: 856049 - protein, 807 aa, Homo sapiens
MLVSRELLAEDPRPCRRLVGAVCRVLTQSACVMRIPVDASTSRRFTPPSTALSPGKMSEALPLGAPDAGAALAGKLRSGDRSMVEVLADHPGELVRTDSPNFLCSVLPTHWRCNKTLPIAFKVVALGDVPDGTLVTVMAGNDENYSAELRNATAAMKNQVARFNDLRFVGRSGRGKSFTLTITVFTNPPQVATYHRAIKITVDGPREPRNETPLEKLRCLRSKIICSWWHPPDRTEKHSTMPDSPVDVKTQSRLTPPTMPPPPTTQGAPRTSSFTPTTLTNGTSHSPTALNGAPSPPNGFSNGPSSSSSSSLANQQLPPACGARQLSKLKRFLTTLQQFGNDISPEIGERVRTLVLGLVNSTLTIEEFHSKLQEATNFPLRPFVIPFLKANLPLLQRELLHCARLAKQNPAQYLAQHEQLLLDASTTSPVDSSELLLDVNENGKRRTPDRTKENGFDREPLHSEHPSKRPCTISPGQRYSPNNGLSYQPNGLPHPTPPPPQHYRLDDMAIAHHYRDSYRHPSHRDLRDRNRPMGLHGTRQEEMIDHRLTDREWAEEWKHLDHLLNCIMDMVEKTRRSLTVLRRCQEADREELNYWIRRYSDAEDLKKGGGSSSSHSRQQSPVNPDPVALDAHREFLHRPASGYVPEEIWKKAEEAVNEVKRQAMTELQKAVSEAERKAHDMITTERAKMERTVAEAKRQAAEDALAVINQQEDSSESCWNCGRKASETCSGCNTARYCGSFCQHKDWEKHHHICGQTLQAQQQGDTPAVSSSVTPNSGAGSPMDTPPAATPRSTTPGTPSTIETTPR

SEQ ID NO: 856050 - protein, 567 aa, Homo sapiens
MPDSPVDVKTQSRLTPPTMPPPPTTQGAPRTSSFTPTTLTNGTSHSPTALNGAPSPPNGFSNGPSSSSSSSLANQQLPPACGARQLSKLKRFLTTLQQFGNDISPEIGERVRTLVLGLVNSTLTIEEFHSKLQEATNFPLRPFVIPFLKANLPLLQRELLHCARLAKQNPAQYLAQHEQLLLDASTTSPVDSSELLLDVNENGKRRTPDRTKENGFDREPLHSEHPSKRPCTISPGQRYSPNNGLSYQPNGLPHPTPPPPQHYRLDDMAIAHHYRDSYRHPSHRDLRDRNRPMGLHGTRQEEMIDHRLTDREWAEEWKHLDHLLNCIMDMVEKTRRSLTVLRRCQEADREELNYWIRRYSDAEDLKKGGGSSSSHSRQQSPVNPDPVALDAHREFLHRPASGYVPEEIWKKAEEAVNEVKRQAMTELQKAVSEAERKAHDMITTERAKMERTVAEAKRQAAEDALAVINQQEDSSESCWNCGRKASETCSGCNTARYCGSFCQHKDWEKHHHICGQTLQAQQQGDTPAVSSSVTPNSGAGSPMDTPPAATPRSTTPGTPSTIETTPR

SEQ ID NO: 856051 - protein, 604 aa, Homo sapiens; identical to SEQ ID NO: 856046

SEQ ID NO: 856052 - protein, 721 aa, Homo sapiens
ANSARGRRSEDVTCYLSLLLAGGENLHLKISRVRKRNLPFVVWGEEEASTPGLDAISHHLCYPDRTHRDRTEKHSTMPDSPVDVKTQSRLTPPTMPPPPTTQGAPRTSSFTPTTLTNGTSHSPTALNGAPSPPNGFSNGPSSSSSSSLANQQLPPACGARQLSKLKRFLTTLQQFGNDISPEIGERVRTLVLGLVNSTLTIEEFHSKLQEATNFPLRPFVIPFLKANLPLLQRELLHCARLAKQNPAQYLAQHEQLLLDASTTSPVDSSELLLDVNENGKRRTPDSYFPTSSFQYFIFECIVTFDYPCTVLRTKENGFDREPLHSEHPSKRPCTISPGQRYSPNNGLSYQPNGLPHPTPPPPQHYRLDDMAIAHHYRDSYRHPSHRDLRDRNRPMGLHGTRQEEMIDHRLTDREWAEEWKHLDHLLNCIMDMVEKTRRSLTVLRRCQEADREELNYWIRRYSDAEDLKKGGGSSSSHSRQQSPVNPDPVALEMKAIPRCCPALSIAVLGHMRSHCFSKGYQLIPSCILMAALAVSSIQWSPSCHAHREFLHRPASGYVPEEIWKKAEEAVNEVKRQAMTELQKAVSEAERKAHDMITTERAKMERTVAEAKRQAAEDALAVINQQEDSSESCWNCGRKASETCSGCNTARYCGSFCQHKDWEKHHHICGQTLQAQQQGDTPAVSSSVTPNSGAGSPMDTPPAATPRSTTPGTPSTIETTPR

SEQ ID NO: 856053 - protein, 427 aa, Homo sapiens
MFIFECIVTFDYPCTVLRTKENGFDREPLHSEHPSKRPCTISPGQRYSPNNGLSYQPNGLPHPTPPPPQHYRLDDMAIAHHYRDSYRHPSHRDLRDRNRPMGLHGTRQEEMIDHRLTDREWAEEWKHLDHLLNCIMDMVEKTRRSLTVLRRCQEADREELNYWIRRYSDAEDLKKGGGSSSSHSRQQSPVNPDPVALEMKAIPRCCPALSIAVLGHMRSHCFSKGYQLIPSCILMAALAVSSIQWSPSCHAHREFLHRPASGYVPEEIWKKAEEAVNEVKRQAMTELQKAVSEAERKAHDMITTERAKMERTVAEAKRQAAEDALAVINQQEDSSESCWNCGRKASETCSGCNTARYCGSFCQHKDWEKHHHICGQTLQAQQQGDTPAVSSSVTPNSGAGSPMDTPPAATPRSTTPGTPSTIETTPR

SEQ ID NO: 856054 - protein, 352 aa, Homo sapiens
MAIAHHYRDSYRHPSHRDLRDRNRPMGLHGTRQEEMIDHRLTDREWAEEWKHLDHLLNCIMDMVEKTRRSLTVLRRCQEADREELNYWIRRYSDAEDLKKGGGSSSSHSRQQSPVNPDPVALEMKAIPRCCPALSIAVLGHMRSHCFSKGYQLIPSCILMAALAVSSIQWSPSCHAHREFLHRPASGYVPEEIWKKAEEAVNEVKRQAMTELQKAVSEAERKAHDMITTERAKMERTVAEAKRQAAEDALAVINQQEDSSESCWNCGRKASETCSGCNTARYCGSFCQHKDWEKHHHICGQTLQAQQQGDTPAVSSSVTPNSGAGSPMDTPPAATPRSTTPGTPSTIETTPR

SEQ ID NO: 856055 - protein, 184 aa, Homo sapiens
MRIPVDASTSRRFTPPSTALSPGKMSEALPLGAPDAGAALAGKLRSGDRSMVEVLADHPGELVRTDSPNFLCSVLPTHWRCNKTLPIAFKVVALGDVPDGTLVTVMAGNDENYSAELRNATAAMKNQVARFNDLRFVGRSGRGKSFTLTITVFTNPPQVATYHRAIKITVDGPREPRNKPHLKN

SEQ ID NO: 856056 - protein, 577 aa, Homo sapiens
MPDRTEKHSTMPDSPVDVKTQSRLTPPTMPPPPTTQGAPRTSSFTPTTLTNGTSHSPTALNGAPSPPNGFSNGPSSSSSSSLANQQLPPACGARQLSKLKRFLTTLQQFGNDISPEIGERVRTLVLGLVNSTLTIEEFHSKLQEATNFPLRPFVIPFLKANLPLLQRELLHCARLAKQNPAQYLAQHEQLLLDASTTSPVDSSELLLDVNENGKRRTPDRTKENGFDREPLHSEHPSKRPCTISPGQRYSPNNGLSYQPNGLPHPTPPPPQHYRLDDMAIAHHYRDSYRHPSHRDLRDRNRPMGLHGTRQEEMIDHRLTDREWAEEWKHLDHLLNCIMDMVEKTRRSLTVLRRCQEADREELNYWIRRYSDAEDLKKGGGSSSSHSRQQSPVNPDPVALDAHREFLHRPASGYVPEEIWKKAEEAVNEVKRQAMTELQKAVSEAERKAHDMITTERAKMERTVAEAKRQAAEDALAVINQQEDSSESCWNCGRKASETCSGCNTARYCGSFCQHKDWEKHHHICGQTLQAQQQGDTPAVSSSVTPNSGAGSPMDTPPAATPRSTTPGTPSTIETTPR

SEQ ID NO: 856057 - protein, 567 aa, Homo sapiens; identical to SEQ ID NO: 856050

SEQ ID NO: 856058 - protein, 395 aa, Homo sapiens
MRIPVDASTSRRFTPPSTALSPGKMSEALPLGAPDAGAALAGKLRSGDRSMVEVLADHPGELVRTDSPNFLCSVLPTHWRCNKTLPIAFKVVALGDVPDGTLVTVMAGNDENYSAELRNATAAMKNQVARFNDLRFVGRSGRGKSFTLTITVFTNPPQVATYHRAIKITVDGPREPRNRTEKHSTMPDSPVDVKTQSRLTPPTMPPPPTTQGAPRTSSFTPTTLTNGTSHSPTALNGAPSPPNGFSNGPSSSSSSSLANQQLPPACGARQLSKLKRFLTTLQQFGNDISPEIGERVRTLVLGLVNSTLTIEEFHSKLQEATNFPLRPFVIPFLKANLPLLQRELLHCARLAKQNPAQYLAQHEQLLLDASTTSPVDSSELLLDVNENGKRRTPDR

SEQ ID NO: 856059 - protein, 242 aa, Homo sapiens
ANSARGRRSEDVTCYLSLLLAGGENLHLKISRVRKRNLPFVVWGEEEASTPGLDAISHHLCYPDRTHRDRTEKHSTMPDSPVDVKTQSRLTPPTMPPPPTTQGAPRTSSFTPTTLTNGTSHSPTALNGAPSPPNGFSNGPSSSSSSSLANQQLPPACGARQLSKLKRFLTTLQQFGNDISPEIGERVRTLVLGLVNSTLTIEEFHSKLQEATNFPLRPFVIPFLKRYCTVHWSVKYFKPYCC

SEQ ID NO: 856060 - protein, 830 aa, Homo sapiens
MRIPVDASTSRRFTPPSTALSPGKMSEALPLGAPDAGAALAGKLRSGDRSMVEVLADHPGELVRTDSPNFLCSVLPTHWRCNKTLPIAFKVVALGDVPDGTLVTVMAGNDENYSAELRNATAAMKNQVARFNDLRFVGRSGRGKSFTLTITVFTNPPQVATYHRAIKITVDGPREPRSARAQHPASGDAAPAPLMALLICCHSFQNRRHEPGTRLLLGDSHFLCGTLDSRMPDETPLEKLRCLRSKIICSWWHPPDRTEKHSTMPDSPVDVKTQSRLTPPTMPPPPTTQGAPRTSSFTPTTLTNGTSHSPTALNGAPSPPNGFSNGPSSSSSSSLANQQLPPACGARQLSKLKRFLTTLQQFGNDISPEIGERVRTLVLGLVNSTLTIEEFHSKLQEATNFPLRPFVIPFLKANLPLLQRELLHCARLAKQNPAQYLAQHEQLLLDASTTSPVDSSELLLDVNENGKRRTPDRTKENGFDREPLHSEHPSKRPCTISPGQRYSPNNGLSYQPNGLPHPTPPPPQHYRLDDMAIAHHYRDSYRHPSHRDLRDRNRPMGLHGTRQEEMIDHRLTDREWAEEWKHLDHLLNCIMDMVEKTRRSLTVLRRCQEADREELNYWIRRYSDAEDLKKGGGSSSSHSRQQSPVNPDPVALDAHREFLHRPASGYVPEEIWKKAEEAVNEVKRQAMTELQKAVSEAERKAHDMITTERAKMERTVAEAKRQAAEDALAVINQQEDSSESCWNCGRKASETCSGCNTARYCGSFCQHKDWEKHHHICGQTLQAQQQGDTPAVSSSVTPNSGAGSPMDTPPAATPRSTTPGTPSTIETTPR

SEQ ID NO: 856061 - protein, 567 aa, Homo sapiens; identical to SEQ ID NO: 856050

SEQ ID NO: 856062 - protein, 695 aa, Homo sapiens
ANSARGRRSEDVTCYLSLLLAGGENLHLKISRVRKRNLPFVVWGEEEASTPGLDAISHHLCYPDRTHRDRTEKHSTMPDSPVDVKTQSRLTPPTMPPPPTTQGAPRTSSFTPTTLTNGTSHSPTALNGAPSPPNGFSNGPSSSSSSSLANQQLPPACGARQLSKLKRFLTTLQQFGNDISPEIGERVRTLVLGLVNSTLTIEEFHSKLQEATNFPLRPFVIPFLKANLPLLQRELLHCARLAKQNPAQYLAQHEQLLLDASTTSPVDSSELLLDVNENGKRRTPDRTKENGFDREPLHSEHPSKRPCTISPGQRYSPNNGLSYQPNGLPHPTPPPPQHYRLDDMAIAHHYRDSYRHPSHRDLRDRNRPMGLHGTRQEEMIDHRLTDREWAEEWKHLDHLLNCIMDMVEKTRRSLTVLRRCQEADREELNYWIRRYSDAEDLKKGGGSSSSHSRQQSPVNPDPVALEMKAIPRCCPALSIAVLGHMRSHCFSKGYQLIPSCILMAALAVSSIQWSPSCHAHREFLHRPASGYVPEEIWKKAEEAVNEVKRQAMTELQKAVSEAERKAHDMITTERAKMERTVAEAKRQAAEDALAVINQQEDSSESCWNCGRKASETCSGCNTARYCGSFCQHKDWEKHHHICGQTLQAQQQGDTPAVSSSVTPNSGAGSPMDTPPAATPRSTTPGTPSTIETTPR

SEQ ID NO: 856063 - protein, 583 aa, Homo sapiens
MTVTNGTSHSPTALNGAPSPPNGFSNGPSSSSSSSLANQQLPPACGARQLSKLKRFLTTLQQFGNDISPEIGERVRTLVLGLVNSTLTIEEFHSKLQEATNFPLRPFVIPFLKANLPLLQRELLHCARLAKQNPAQYLAQHEQLLLDASTTSPVDSSELLLDVNENGKRRTPDRTKENGFDREPLHSEHPSKRPCTISPGQRYSPNNGLSYQPNGLPHPTPPPPQHYRLDDMAIAHHYRDSYRHPSHRDLRDRNRPMGLHGTRQEEMIDHRLTDREWAEEWKHLDHLLNCIMDMVEKTRRSLTVLRRCQEADREELNYWIRRYSDAEDLKKGGGSSSSHSRQQSPVNPDPVALEMKAIPRCCPALSIAVLGHMRSHCFSKGYQLIPSCILMAALAVSSIQWSPSCHAHREFLHRPASGYVPEEIWKKAEEAVNEVKRQAMTELQKAVSEAERKAHDMITTERAKMERTVAEAKRQAAEDALAVINQQEDSSESCWNCGRKASETCSGCNTARYCGSFCQHKDWEKHHHICGQTLQAQQQGDTPAVSSSVTPNSGAGSPMDTPPAATPRSTTPGTPSTIETTPR

SEQ ID NO: 856064 - protein, 689 aa, Homo sapiens
ANSARGRRSEDVTCYLSLLLAGGENLHLKISRVRKRNLPFVVWGEEEASTPGLDAISHHLCYPDRTHRDRTEKHSTMPDSPVDVKTQSRLTPPTMPPPPTTQGAPRTSSFTPTTLTNGTSHSPTALNGAPSPPNGFSNGPSSSSSSSLANQQLPPACGARQLSKLKRFLTTLQQFGNDISPEIGERVRTLVLGLVNSTLTIEEFHSKLQEATNFPLRPFVIPFLKANLPLLQRELLHCARLAKQNPAQYLAQHEQLLLDASTTSPVDSSELLLDVNENGKRRTPDRMNKLRSRELSDLTKVTQLVMEEPGLDLRSLDSQSSALFHYTTMPVRTKENGFDREPLHSEHPSKRPCTISPGQRYSPNNGLSYQPNGLPHPTPPPPQHYRLDDMAIAHHYRDSYRHPSHRDLRDRNRPMGLHGTRQEEMIDHRLTDREWAEEWKHLDHLLNCIMDMVEKTRRSLTVLRRCQEADREELNYWIRRYSDAEDLKKGGGSSSSHSRQQSPVNPDPVALDAHREFLHRPASGYVPEEIWKKAEEAVNEVKRQAMTELQKAVSEAERKAHDMITTERAKMERTVAEAKRQAAEDALAVINQQEDSSESCWNCGRKASETCSGCNTARYCGSFCQHKDWEKHHHICGQTLQAQQQGDTPAVSSSVTPNSGAGSPMDTPPAATPRSTTPGTPSTIETTPR

SEQ ID NO: 856065 - protein, 117 aa, Homo sapiens
MMKQTLVFSPFRTKENGFDREPLHSEHPSKRPCTISPGQRYSPNNGLSYQPNGLPHPTPPPPQHYRLDDMAIAHHYRDSYRHPSHRDLRDRNRPMGKTEGPVHFLRDWVLEDLHHYF

SEQ ID NO: 856066 - protein, 175 aa, Homo sapiens
ENCGYKFCGRTHMYKHAQHHDRVDNLVLDDFKRFKASLSCHFADCPFSGTSTHFHCLRCRFRCTDSTKVTAHRKHHGKQDVISAAGFCQFSSSADCAVPDCKYKLKCSHFHCTFPGCRHTVVGMSQMDSHKRKHEKQERGEPAAEGPAPGPPISLDGSLSLGAEPGSLLFLQSAA

SEQ ID NO: 856067 - protein, 174 aa, Homo sapiens
NAGLAWLRQRHQHQRAQPGVLFFADDDNTYSLELFQEMRTTRKVSVWPVGLVGGRRYERPLVENGKVVGWYTGWRADRPFAIDMAGFAVSLQVILSNPKAVFKRRGSQPGMQESDFLKQITTVEELEPKANNCTKVFITLVLPDLECHHEECATQAISFPFRFSCGTLGQRRLI

SEQ ID NO: 856068 - protein, 283 aa, Homo sapiens
GSPCPPACTPCRSSLREPAAPPRPGSEPRGSRSLQRPRPHGQRTHHHSLSAGAAAVQAAHWGPSARPSLGCPRGQGACTMKSALFTRFFILLPWILIVIIMLDVDTRRPVPPLTPRPYFSPYAVGRGGARLPLRRGGPAHGTQKRNQSRPQPQPEPQLPTIYAITPTYSRPVQKAELTRLANTFRQVAQLHWILVEDAAARSELVSRFLARAGLPSTHLHVPTPRRYKRPGLPRATEQRNAGLAWLRQRHQHQRAQPGVLFFADDDNTYSLELFQEVKASLPR

SEQ ID NO: 856069 - protein, 163 aa, Homo sapiens
NAGLAWLRQRHQHQRAQPGVLFFADDDNTYSLELFQEMRTTRKVSVWPVGLVGGRRYERPLVENGKVVGWYTGWRADRPFAIDMAGFAVSLQVILSNPKAVFKRRGSQPGMQESDFLKQITTVEELEPKANNCTKVLVWHTRTEKVNLANEPKYHLDTVKIEV

SEQ ID NO: 856070 - protein, 90 aa, Homo sapiens
KGFAVSLQVILSNPKAVFKRRGSQPGMQESDFLKQITTVEELEPKANNCTKVFITLVLPDLECHHEECATQAISFPFRFSCGTLGQRRLI

SEQ ID NO: 856071 - protein, 581 aa, Homo sapiens
PQAHTESMSIQENISSLQLRSWVSKSQRDLAKSILIGAPGGPAGYLRRASVAQLTQELGTAFFQQQQLPAAMADTFLEHLCLLDIDSEPVAARSTSIIATIGPASRSVERLKEMIKAGMNIARLNFSHGSHEYHAESIANVREAVESFAGSPLSYRPVAIALDTKGPEIRTGILQGGPESEVELVKGSQVLVTVDPAFRTRGNANTVWVDYPNIVRVVPVGGRIYIDDGLISLVVQKIGPEGLVTQVENGGVLGSRKGVNLPGAQVDLPGLSEQDVRDLRFGVEHGVDIVFASFVRKASDVAAVRAALGPEGHGIKIISKIENHEGVKRFDEILEVSDGIMVARGDLGIEIPAEKVFLAQKMMIGRCNLAGKPVVCATQMLESMITKPRPTRAETSDVANAVLDGADCIMLSGETAKGNFPVEAVKMQHAIAREAEAAVYHRQLFEELRRAAPLSRDPTEVTAIGAVEAAFKCCAAAIIVLTTTGRSAQLLSRYRPRAAVIAVTRSAQAARQVHLCRGVFPLLYREPPEAIWADDVDRRVQFGIESGKLRGFLRVGDLVIVVTGWRPGSGYTNIMRVLSIS

SEQ ID NO: 856072 - protein, 581 aa, Homo sapiens; identical to SEQ ID NO: 856071

SEQ ID NO: 856073 - protein, 565 aa, Homo sapiens
PLTTQQCGADPQRGRPREVCSGMEGPAGYLRRASVAQLTQELGTAFFQQQQLPAAMADTFLEHLCLLDIDSEPVAARSTSIIATIGPASRSVERLKEMIKAGMNIARLNFSHGSHEYHAESIANVREAVESFAGSPLSYRPVAIALDTKGPEIRTGILQGGPESEVELVKGSQVLVTVDPAFRTRGNANTVWVDYPNIVRVVPVGGRIYIDDGLISLVVQKIGPEGLVTQVENGGVLGSRKGVNLPGAQVDLPGLSEQDVRDLRFGVEHGVDIVFASFVRKASDVAAVRAALGPEGHGIKIISKIENHEGVKRFDEILEVSDGIMVARGDLGIEIPAEKVFLAQKMMIGRCNLAGKPVVCATQMLESMITKPRPTRAETSDVANAVLDGADCIMLSGETAKGNFPVEAVKMQHAIAREAEAAVYHRQLFEELRRAAPLSRDPTEVTAIGAVEAAFKCCAAAIIVLTTTGRSAQLLSRYRPRAAVIAVTRSAQAARQVHLCRGVFPLLYREPPEAIWADDVDRRVQFGIESGKLRGFLRVGDLVIVVTGWRPGSGYTNIMRVLSIS

SEQ ID NO: 856074 - protein, 581 aa, Homo sapiens; identical to SEQ ID NO: 856071

SEQ ID NO: 856075 - protein, 556 aa, Homo sapiens
MSIQENISSLQLRSWVSKSQRDLAKSILIGAPGGPAGYLRRASVAQLTQELGTAFFQQQQLPAAMADTFLEHLCLLDIDSEPVAARSTSIIATIGPASRSVERLKEMIKAGMNIARLNFSHGSHEYHAESIANVREAVESFAGSPLSYRPVAIALDTKGPEIRTGILQGGPESEVELVKGSQVLVTVDPAFRTRGNANTVWVDYPNIVRVVPVGGRIYIDDGLISLVVQKIGPEGLVTQVENGGVLGSRKGVNLPGAQVDLPGLSEQDVRDLRFGVEHGVDIVFASFVRKASDVAAVQGCSGSGRTRHQDHHDGIMVARGDLGIEIPAEKVFLAQKMMIGRCNLAGKPVVCATQMLESMITKPRPTRAETSDVANAVLDGADCIMLSGETAKGNFPVEAVKMQHAIAREAEAAVYHRQLFEELRRAAPLSRDPTEVTAIGAVEAAFKCCAAAIIVLTTTGRSAQLLSRYRPRAAVIAVTRSAQAARQVHLCRGVFPLLYREPPEAIWADDVDRRVQFGIESGKLRGFLRVGDLVIVVTGWRPGSGYTNIMRVLSIS

SEQ ID NO: 856076 - protein, 145 aa, Homo sapiens
AAVAFGSGALMLGMFVLQLGVLSTFLSEPVVKALTSGAALHVLLSQLPSLLGLSLPRQIGCFSLFKTLASLLTALPRSSPAELTISALSLALLVPVKELNVRFRDRLPTPIPGEVVLVLLASVLCFTSSVDTRYQVQIVGLLPGG

SEQ ID NO: 856077 - protein, 88 aa, Homo sapiens
MSPGTGPSAHRPCPQTLASLLTALPRSSPAELTISALSLALLVPVKELNVRFRDRLPTPIPGEVVLVRMAVRAGPLPAQTLRSCGNWP

SEQ ID NO: 856078 - protein, 136 aa, Homo sapiens
LYGFRGSLEGVRSTGGLPTFFLHYLTASGGCWDTGDSGPGSTQSSSRPGNTSSSSRPPPPPPRRFLLRLPASFAPPRPRSASGPPAGQLLSGASTQAHGSMKQEEEAERERSRPPQPRLGQEKSKTIFLLLSVLMH

SEQ ID NO: 856079 - protein, 136 aa, Homo sapiens; identical to SEQ ID NO: 856078

SEQ ID NO: 856080 - protein, 136 aa, Homo sapiens; identical to SEQ ID NO: 856078

SEQ ID NO: 856081 - protein, 136 aa, Homo sapiens; identical to SEQ ID NO: 856078

SEQ ID NO: 856082 - protein, 136 aa, Homo sapiens; identical to SEQ ID NO: 856078

SEQ ID NO: 856083 - protein, 136 aa, Homo sapiens; identical to SEQ ID NO: 856078

SEQ ID NO: 856084 - protein, 136 aa, Homo sapiens; identical to SEQ ID NO: 856078

SEQ ID NO: 856085 - protein, 96 aa, Homo sapiens
MNHNKFVKCKKTSAVLGSINPVYNETFSFKADATKLDTASLSLTAVQNMEGDSKATPYPGLLGWGPRGAAECSGRVSASCPDLKKELYELPPWLRK

SEQ ID NO: 856086 - protein, 104 aa, Homo sapiens
MFQPPRQRVGPSGASQKTEGFLLRLLYSGLIIAHCSLEILGRNDPPASASKVAETTDSSSLMKVSIPPIKSVSDNTNIWVISGSVLLCLFSPPSCFVVCLITYC

SEQ ID NO: 856087 - protein, 136 aa, Homo sapiens; identical to SEQ ID NO: 856078

SEQ ID NO: 856088 - protein, 172 aa, Homo sapiens
PGCQVSLMNHNKLSSARRLQLQRVGPSGASQKTEGFLLRLLYSGLIIAHCSLEILGRNDPPASASKVAETTGVFVKVSLMNHNKFVKCKKTSAVLGSINPVYNETFSFKADATKLDTASLSLTAVQNMEGDSKATPYPGLLGWGPRGAAECSGRVSASCPDLRRSCTSSLPG

SEQ ID NO: 856089 - protein, 136 aa, Homo sapiens; identical to SEQ ID NO: 856078

SEQ ID NO: 856090 - protein, 136 aa, Homo sapiens; identical to SEQ ID NO: 856078

SEQ ID NO: 856091 - protein, 136 aa, Homo sapiens; identical to SEQ ID NO: 856078

SEQ ID NO: 856092 - protein, 136 aa, Homo sapiens; identical to SEQ ID NO: 856078

SEQ ID NO: 856093 - protein, 869 aa, Homo sapiens
AAQRLPLPLPQPRPAPTRGSEPEPSLRLGEDHAAVAAMLPFLLATLGTTALNNSNPKDYCYSARIRSTVLQGLPFGGVPTVLALDFMCFLALLFLFSILRKVAWDYGRLALVTDADRLRRQERDRVEQEYVASAMHGDSHDRYERLTSVSSSVDFDQRDNGFCSWLTAIFRIKDDEIRDKCGGDAVHYLSFQRHIIGLLVVVGVLSVGIVLPVNFSGDLLENNAYSFGRTTIANLKSGNNLLWLHTSFAFLYLLLTVYSMRRHTSKMRYKEDDLVKRTLFINGISKYAESEKIKKHFEEAYPNCTVLEARPCYNVARLMFLDAERKKAERGKLYFTNLQSKENVPTMINPKPCGHLCCCVVRGCEQVEAIEYYTKLEQKLKEDYKREKEKVNEKPLGMAFVTFHNETITAIILKDFNVCKCQGCTCRGEPRPSSCSESLHISNWTVSYAPDPQNIYWEHLSIRGFIWWLRCLVINVVLFILLFFLTTPAIIITTMDKFNVTKPVEYLNNPIITQFFPTLLLWCFSALLPTIVYYSAFFEAHWTRSGENRTTMHKCYTFLIFMVLLLPSLGLSSLDLFFRWLFDKKFLAEAAIRFECVFLPDNGAFFVNYVIASAFIGNAMDLLRIPGLLMYMIRLCLARSAAERRNVKRHQAYEFQFGAAYAWMMCVFTVVMTYSITCPIIVPFGLMYMLLKHLVDRYNLYYAYLPAKLDKKIHSGAVNQVVAAPILCLFWLLFFSTMRTGFLAPTSMFTFVVLVITIVICLCHVCFGHFKYLSAHNYKIEHTETDTVDPRSNGRPPTAAAVPKSAKYIAQVLQDSEVDGDGDGAPGSSGDEPPSSSSQDEELLMPPDALTDTDFQSCEDSLIENEIHQ

SEQ ID NO: 856094 - protein, 768 aa, Homo sapiens
AAQRLPLPLPQPRPAPTRGSEPEPSLRLGEDHAAVAAMLPFLLATLGTTALNNSNPKDYCYSARIRSTVLQGLPFGGVPTVLALDFMCFLALLFLFSILRKVAWDYGRLALVTDADRLRRQERDRVEQEYVASAMHGDSHDRYERLTSVSSSVDFDQRDNGFCSWLTAIFKDKVKRTLFINGISKYAESEKIKKHFEEAYPNCTVLEARPCYNVARLMFLDAERKKAERGKLYFTNLQSKENVPTMINPKPCGHLCCCVVRGCEQVEAIEYYTKLEQKLKEDYKREKEKVNEKPLGMAFVTFHNETITAIILKDFNVCKCQGCTCRGEPRPSSCSESLHISNWTVSYAPDPQNIYWEHLSIRGFIWWLRCLVINVVLFILLFFLTTPAIIITTMDKFNVTKPVEYLNNPIITQFFPTLLLWCFSALLPTIVYYSAFFEAHWTRSGENRTTMHKCYTFLIFMVLLLPSLGLSSLDLFFRWLFDKKFLAEAAIRFECVFLPDNGAFFVNYVIASAFIGNAMDLLRIPGLLMYMIRLCLARSAAERRNVKRHQAYEFQFGAAYAWMMCVFTVVMTYSITCPIIVPFGLMYMLLKHLVDRYNLYYAYLPAKLDKKIHSGAVNQVVAAPILCLFWLLFFSTMRTGFLAPTSMFTFVVLVITIVICLCHVCFGHFKYLSAHNYKIEHTETDTVDPRSNGRPPTAAAVPKSAKYIAQVLQDSEVDGDGDGAPGSSGDEPPSSSSQDEELLMPPDALTDTDFQSCEDSLIENEIHQ

SEQ ID NO: 856095 - protein, 869 aa, Homo sapiens; identical to SEQ ID NO: 856093

SEQ ID NO: 856096 - protein, 869 aa, Homo sapiens; identical to SEQ ID NO: 856093

SEQ ID NO: 856097 - protein, 847 aa, Homo sapiens
AAQRLPLPLPQPRPAPTRGSEPEPSLRLGEDHAAVAAMLPFLLATLGTTALNNSNPKDYCYSARIRSTVLQGLPFGGVPTVLALDFMCFLALLFLFSILRKVAWDYGRLALVTDADRLRRQERDRVEQEYVASAMHGDSHDRYERLTSVSSSVDFDQRDNGFCSWLTAIFRIKDDEIRDKCGGDAVHYLSFQRHIIGLLVVVGVLSVGIVLPVNFSGDLLENNAYSFGRTTIANLKSGNNLLWLHTSFAFLYLLLTVYSMRRHTSKMRYKEDDLVKRTLFINGISKYAESEKIKKHFEEAYPNCTVLEARPCYNVARLMFLDAERKKAERGKLYFTNLQSKENVPTMINPKPCGHLCCCVVRGCEQVEAIEYYTKLEQKLKEDYKREKEKVNEKPLGMAFVTFHNETITAIILKDFNVCKCQGCTCRGEPRPSSCSESLHISNWTVSYAPDPQNIYWEHLSIRGFIWWLRCLVINVVLFILLFFLTTPAIIITTMDKFNVTKPVEYLNNPIITQFFPTLLLWCFSALLPTIVYYSAFFEAHWTRSGENRTTMHKCYTFLIFMVLLLPSLGLSSLDLFFRWLFDKKFLAEAAIRFECVFLPDNGAFFVNYVIASAFIGNAMDLLRIPGLLMYMIRLCLARSAAERRNVKRHQAYEFQFGAAYAWMMCVFTVVMTYSITCPIIVPFGLMYMLLKHLVDRYNLYYAYLPAKLDKKIHSGAVNQVVAAPILCLFWLLFFSTMRTGFLAPTSMFTFVVLVITIVICLCHVCFGHFKYLSAHNYKIEHTETDTVDPRSNGRPPTAAAVPKSAKYIAQVLQDSEVDGDGDGAPGSSGDEPPSSSSQDEELLMPP

SEQ ID NO: 856098 - protein, 595 aa, Homo sapiens
AAQRLPLPLPQPRPAPTRGSEPEPSLRLGEDHAAVAAMLPFLLATLGTTALNNSNPKDYCYSARIRSTVLQGLPFGGVPTVLALDFMCFLALLFLFSILRKVAWDYGRLALVTDADRLRRQERDRVEQEYVASAMHGDSHDRYERLTSVSSSVDFDQRDNGFCSWLTAIFRIKDDEIRDKCGGDAVHYLSFQRHIIGLLVVVGVLSVGIVLPVNFSGDLLENNAYSFGRTTIANLKSGNNLLWLHTSFAFLYLLLTVYSMRRHTSKMRYKEDDLVKRTLFINGISKYAESEKIKKHFEEAYPNCTVLEARPCYNVARLMFLDAERKKAERGKLYFTNLQSKENVPTMINPKPCGHLCCCVVRGCEQVEAIEYYTKLEQKLKEDYKREKEKVNEKPLGMAFVTFHNETITAIILKDFNVCKCQGCTCRGEPRPSSCSESLHISNWTVSYAPDPQNIYWEHLSIRGFIWWLRCLVINVVLFILLFFLTTPAIIITTMDKFNVTKPVEYLNNPIITQFFPTLLLWCFSALLPTIVYYSAFFEAHWTRSGENRTTMHKCYTFLIFMVLLLPSLGLSSLDLFFRWLFDKKFLAEAAIRFE

SEQ ID NO: 856099 - protein, 183 aa, Homo sapiens
MYMLLKHLVDRYNLYYAYLPAKLDKKIHSGAVNQVVAAPILCLFWLLFFSTMRTGFLAPTSMFTFVVLVITIVICLCHVCFGHFKYLSAHNYKIEHTETDTVDPRSNGRPPTAAAVPKSAKYIAQVLQDSEVDGDGDGAPGSSGDEPPSSSSQDEELLMPPDALTDTDFQSCEDSLIENEIHQ

SEQ ID NO: 856100 - protein, 134 aa, Homo sapiens
IHPGSLVICPHCPLPTPTLLGHEGDGGKAQLTAPPSAQEDHAAVAAMLPFLLATLGTTALNNSNPKDYCYSARIRSTVLQGLPFGGVPTVLALDFMCFLVSACCHPLPWHPCPVHTWQTLPALTTLPPAPVSQA

SEQ ID NO: 856101 - protein, 871 aa, Homo sapiens
PKEKTWTQLRVPSLQPPAGPRGARARGTQGWRALPPTPHHPEPNEDHAAVAAMLPFLLATLGTTALNNSNPKDYCYSARIRSTVLQGLPFGGVPTVLALDFMCFLALLFLFSILRKVAWDYGRLALVTDADSVASAMHGDSHDRYERLTSVSSSVDFDQRDNGFCSWLTAIFRIKDDEIRDKCGGDAVHYLSFQRHIIGLLVVVGVLSVGIVLPVNFSGDLLENNAYSFGRTTIANLKSGNNLLWLHTSFAFLYLLLTVYSMRRHTSKMRYKEDDLVKRTLFINGISKYAESEKIKKHFEEAYPNCTVLEARPCYNVARLMFLDAERKKAERGKLYFTNLQSKENVPTMINPKPCGHLCCCVVRGCEQVEAIEYYTKLEQKLKEDYKREKEKVNEKPLGMAFVTFHNETITAIILKDFNVCKCQGCTCRGEPRPSSCSESLHISNWTVSYAPDPQNIYWEHLSIRGFIWWLRCLVINVVLFILLFFLTTPAIIITTMDKFNVTKPVEYLNNPIITQFFPTLLLWCFSALLPTIVYYSAFFEAHWTRSGENRTTMHKCYTFLIFMVLLLPSLGLSSLDLFFRWLFDKKFLAEAAIRFECVFLPDNGAFFVNYVIASAFIGNAMDLLRIPGLLMYMIRLCLARSAAERRNVKRHQAYEFQFGAAYAWMMCVFTVVMTYSITCPIIVPFGLMYMLLKHLVDRYNLYYAYLPAKLDKKIHSGAVNQVVAAPILCLFWLLFFSTMRTGFLAPTSMFTFVVLVITIVICLCHVCFGHFKYLSAHNYKIEHTETDTVDPRSNGRPPTAAAVPKSAKYIAQVLQDSEVDGDGDGAPGSSGDEPPSSSSQDEELLMPPDALTDTDFQSCEDSLIENEIHQ

SEQ ID NO: 856102 - protein, 1201 aa, Homo sapiens
AAQRLPLPLPQPRPAPTRGSEPEPSLRLGEDHAAVAAMLPFLLATLGTTALNNSNPKDYCYSARIRSTVLQGLPFGGVPTVLALDFMCFLALLFLFSILRKVAWDYGRLALVTDADRLRRQERDRVEQEYVASAMHGDSHDRYERLTSVSSSVDFDQRDNGFCSWLTAIFRIKDDEIRDKCGGDAVHYLSFQRHIIGLLVVVGVLSVGIVLPVNFSGDLLENNAYSFGRTTIANLKSGNNLLWLHTSFAFLYLLLTVYSMRRHTSKMRYKEDDLVKRTLFINGISKYAESEKIKKHFEEAYPNCTVLEARPCYNVARLMFLDAERKKAERGKLYFTNLQSKENVPTMINPKPCGHLCCCVVRGCEQVEAIEYYTKLEQKLKEDYKREKEKVNEKPLGMAFVTFHNETITAIILKDFNVCKCQGCTCRGEPRPSSCSESLHISNWTVSYAPDPQNIYWEHLSIRGFIWWLRCLVINVVLFILLFFLTTPAIIITTMDKFNVTKPVEYLNNPIITQFFPTLLLWCFSALLPTIVYYSAFFEAHWTRPMGEVQQSFQLLEGAEERGSGGVTPKAPTRCLGCVYMVEVPGVCVGVHSLVTCLDAKITLKVYLGLGAPHSGSFYGGVLCPYSGTNCGRLWSSTWEVWGTISREVLVILRECLGGYYGVSLKVSRAHIFGYVYEALDLITLGVSVGGEAKGLTLWDDLAVQVLGTSLKFQAFIQRCNCGVLYGHLLWESCEDILKVMHHGCGHKLYGFCCRPSVVIFEITLGASQALIKVPGLPQRCCGKGLKACLWRYLRLMSHSGGNSSYGLSGGIFWVFLGLSAFGFFEGLIGLSLGVLDSSPLNILAALGGLEHSLHGSLWGTVLGAVCCHSVCLWGEQGTGAWGAKLGVSTWKKHVGGGGVGCCSSGSGRAATGSPQGCSAGAPGARRCVFLPDNGAFFVNYVIASAFIGNAMDLLRIPGLLMYMIRLCLARSAAERRNVKRHQAYEFQFGAAYAWMMCVFTVVMTYSITCPIIVPFGLMYMLLKHLVDRYNLYYAYLPAKLDKKIHSGAVNQVVAAPILCLFWLLFFSTMRTGFLAPTSMFTFVVLVITIVICLCHVCFGHFKYLSAHNYKIEHTETDTVDPRSNGRPPTAAAVPKSAKYIAQVLQDSEVDGDGDGAPGSSGDEPPSSSSQDEELLMPPDALTDTDFQSCEDSLIENEIHQ

SEQ ID NO: 856103 - protein, 472 aa, Homo sapiens
MAFVTFHNETITAIILKDFNVCKCQGCTCRGEPRPSSCSESLHISNWTVSYAPDPQNIYWEHLSIRGFIWWLRCLVINVVLFILLFFLTTPAIIITTMDKFNVTKPVEYLNNPIITQFFPTLLLWCFSALLPTIVYYSAFFEAHWTRSGENRTTMHKCYTFLIFMVLLLPSLGLSSLDLFFRWLFDKKFLAEAAIRFECVFLPDNGAFFVNYVIASAFIGNAMDLLRIPGLLMYMIRLCLARSAAERRNVKRHQAYEFQFGAAYAWMMCVFTVVMTYSITCPIIVPFGLMYMLLKHLVDRYNLYYAYLPAKLDKKIHSGAVNQVVAAPILCLFWLLFFSTMRTGFLAPTSMFTFVVLVITIVICLCHVCFGHFKYLSAHNYKIEHTETDTVDPRSNGRPPTAAAVPKSAKYIAQVLQDSEVDGDGDGAPGSSGDEPPSSSSQDEELLMPPDALTDTDFQSCEDSLIENEIHQ

SEQ ID NO: 856104 - protein, 869 aa, Homo sapiens; identical to SEQ ID NO: 856093

SEQ ID NO: 856105 - protein, 347 aa, Homo sapiens
MGLYGAQVLGAVCCHSVCLWGEQGTGAWGAKLGVSTWKKHVGGGGVGCCSSGSGRAATGSPQGCSAGAPGARRCVFLPDNGAFFVNYVIASAFIGNAMDLLRIPGLLMYMIRLCLARSAAERRNVKRHQAYEFQFGAAYAWMMCVFTVVMTYSITCPIIVPFGLMYMLLKHLVDRYNLYYAYLPAKLDKKIHSGAVNQVVAAPILCLFWLLFFSTMRTGFLAPTSMFTFVVLVITIVICLCHVCFGHFKYLSAHNYKIEHTETDTVDPRSNGRPPTAAAVPKSAKYIAQVLQDSEVDGDGDGAPGSSGDEPPSSSSQDEELLMPPDALTDTDFQSCEDSLIENEIHQ

SEQ ID NO: 856106 - protein, 298 aa, Homo sapiens
AAQRLPLPLPQPRPAPTRGSEPEPSLRLGEDHAAVAAMLPFLLATLGTTALNNSNPKDYCYSARIRSTVLQGLPFGGVPTVLALDFMCFLALLFLFSILRKVAWDYGRLALVTDADRLRRQERDRVEQEYVASAMHGDSHDRYERLTSVSSSVDFDQRDNGFCSWLTAIFRIKDDEIRDKCGGDAVHYLSFQRHIIGLLVVVGVLSVGIVLPVNFSGDLLENNAYSFGRTTIANLKSGNNLLWLHTSFAFLYLLLTVYSMRRHTSKMRYKEDDLVKRTLFINGISKYAESEKIKKHFE

SEQ ID NO: 856107 - protein, 122 aa, Homo sapiens
GVGMLERHCQPHGRVQQSFQLLEGAEERGSGGVTPKAPTRCLGCVYMVEVPGVCVGVHSLVTCLDAKITLKVYLGLGAPHSGSFYGGVLCPYSGTNCGRLWSSTWEVWGTISREVLVILREC

SEQ ID NO: 856108 - protein, 167 aa, Homo sapiens
TLAVFVPTLAGFSVALGGPAWGRRRRSVSGVGVWLQWQCFLFCSRGPAQAGGQPALAATSVAMGAQDRPQCHFDIEINREPVGRIMFQLFSDICPKTCKNFLCLCSGEKGLGKTTGKKLCYKGSTFHRVVKNFMIQGGDFSEGNGKGGESIYGGYFKENVVFCKMKR

SEQ ID NO: 856109 - protein, 1524 aa, Homo sapiens
TLAVFVPTLAGFSVALGGPAWGRRRRSVSGVGVWLQWQCFLFCSRGPAQAGGQPALAATSVAMGAQDRPQCHFDIEINREPVGRIMFQLFSDICPKTCKNFLCLCSGEKGLGKTTGKKLCYKGSTFHRVVKNFMIQGGDFSEGNGKGGESIYGGYFKDENFILKHDRAFLLSMANRGKHTNGSQFFITTKPAPHLDGVHVVFGLVISGFEVIEQIENLKTDAASRPYADVRVIDCGVLATKSIKDVFEKKRKKPTHSEGSDSSSNSSSSSESSSESELEHERSRRRKHKRRPKVKRSKKRRKEASSSEEPRNKHAMNPKGHSERSDTNEKRSVDSSAKREKPVVRPEEIPPVPENRFLLRRDMPVVTAEPEPKIPDVAPIVSDQKPSVSKSGRKIKGRGTIRYHTPPRSRSCSESDDDDSSETPPHWKEEMQRLRAYRPPSGEKWSKGDKLSDPCSSRWDERSLSQRSRSWSYNGYYSDLSTARHSGHHKKRRKEKKVKHKKKGKKQKHCRRHKQTKKRRILIPSDIESSKSSTRRMKSSCDRERSSRSSSLSSHHSSKRDWSKSDKDVQSSLTHSSRDSYRSKSHSQSYSRGSSRSRTASKSSSHSRSRSKSRSSSKSGHRKRASKSPRKTASQLSENKPVKTEPLRATMAQNENVVVQPVVAENIPVIPLSDSPPPSRWKPGQKPWKPSYERIQEMKAKTTHLLPIQSTYSLANIKETGSSSSYHKREKNSESDQSTYSKYSDRSSESSPRSRSRSSRSRSYSRSYTRSRSLASSHSRSRSPSSRSHSRNKYSDHSQCSRSSSYTSISSDDGRRAKRRLRSSGKKNSVSHKKHSSSSEKTLHSKYVKGRDRSSCVRKYSESRSSLDYSSDSEQSSVQATQSAQEKEKQGQMERTHNKQEKNRGEEKSKSERECPHSKKRTLKENLSDHLRNGSKPKRKNYAGSKWDSESNSERDVTKNSKNDSHPSSDKEEGEATSDSESEVSEIHIKVKPTTKSSTNTSLPDDNGAWKSSKQRTSTSDSEGSCSNSENNRGKPQKHKHGSKENLKREHTKKVKEKLKGKKDKKHKAPKRKQAFHWQPPLEFGEEEEEEIDDKQVTQESKEKKVSENNETIKDNILKTEKSSEEDLSGKHDTVTVSSDLDQFTKDDSKLSISPTALNTEENVACLQNIQHVEESVPNGVEDVLQTDDNMEICTPDRSSPAKVEETSPLGNARLDTPDINIVLKQDMATEHPQAEVVKQESSMSESKVLGEVGKQDSSSASLASAGESTGKKEVAEKSQINLIDKKWKPLQGVGNLAAPNAATSSAVEVKVLTTVPEMKPQGLRIEIKSKNKVRPGSLFDEVRKTARLNRRPRNQESSSDEQTPSRDDDSQSRSPSRSRSKSETKSRHRTRSVSYSHSRSRSRSSTSSYRSRSYSRSRSRGWYSRGRTRSRSSSYRSYKSHRTSSRSRSRSSSYDPHSRSRSYTYDSYYSRSRSRSRSQRSDSYHRGRSYNRRSRSCRSYGSDSESDRSYSHHRSPSESSRYS

SEQ ID NO: 856110 - protein, 1209 aa, Homo sapiens
MNPKGHSERSDTNEKRSVDSSAKREKPVVRPEEIPPVPENRFLLRRDMPVVTAEPEPKIPDVAPIVSDQKPSVSKSGRKIKGRGTIRYHTPPRSRSCSESDDDDSSETPPHWKEEMQRLRAYRPPSGEKWSKGDKLSDPCSSRWDERSLSQRSRSWSYNGYYSDLSTARHSGHHKKRRKEKKVKHKKKGKKQKHCRRHKQTKKRRILIPSDIESSKSSTRRMKSSCDRERSSRSSSLSSHHSSKRDWSKSDKDVQSSLTHSSRDSYRSKSHSQSYSRGSSRSRTASKSSSHSRSRSKSRSSSKSGHRKRASKSPRKTASQLSENKPVKTEPLRATMAQNENVVVQPVVAENIPVIPLSDSPPPSRWKPGQKPWKPSYERIQEMKAKTTHLLPIQSTYSLANIKETGSSSSYHKREKNSESDQSTYSKYSDRSSESSPRSRSRSSRSRSYSRSYTRSRSLASSHSRSRSPSSRSHSRNKYSDHSQCSRSSSYTSISSDDGRRAKRRLRSSGKKNSVSHKKHSSSSEKTLHSKYVKGRDRSSCVRKYSESRSSLDYSSDSEQSSVQATQSAQEKEKQGQMERTHNKQEKNRGEEKSKSERECPHSKKRTLKENLSDHLRNGSKPKRKNYAGSKWDSESNSERDVTKNSKNDSHPSSDKEEGEATSDSESEVSEIHIKVKPTTKSSTNTSLPDDNGAWKSSKQRTSTSDSEGSCSNSENNRGKPQKHKHGSKENLKREHTKKVKEKLKGKKDKKHKAPKRKQAFHWQPPLEFGEEEEEEIDDKQVTQESKEKKVSENNETIKDNILKTEKSSEEDLSGKHDTVTVSSDLDQFTKDDSKLSISPTALNTEENVACLQNIQHVEESVPNGVEDVLQTDDNMEICTPDRSSPAKVEETSPLGNARLDTPDINIVLKQDMATEHPQAEVVKQESSMSESKVLGEVGKQDSSSASLASAGESTGKKEVAEKSQINLIDKKWKPLQGVGNLAAPNAATSSAVEVKVLTTVPEMKPQGLRIEIKSKNKVRPGSLFDEVRKTARLNRRPRNQESSSDEQTPSRDDDSQSRSPSRSRSKSETKSRHRTRSVSYSHSRSRSRSSTSSYRSRSYSRSRSRGWYSRGRTRSRSSSYRSYKSHRTSSRSRSRSSSYDPHSRSRSYTYDSYYSRSRSRSRSQRSDSYHRGRSYNRRSRSCRSYGSDSESDRSYSHHRSPSESSRYS

SEQ ID NO: 856111 - protein, 979 aa, Homo sapiens
MNPKGHSERSDTNEKRSVDSSAKREKPVVRPEEIPPVPENRFLLRRDMPVVTAEPEPKIPDVAPIVSDQKPSVSKSGRKIKGRGTIRYHTPPRSRSCSESDDDDSSETPPHWKEEMQRLRAYRPPSGEKWSKGDKLSDPCSSRWDERSLSQRSRSWSYNGYYSDLSTARHSGHHKKRRKEKKVKHKKKGKKQKHCRRHKQTKKRRILIPSDIESSKSSTRRMKSSCDRERSSRSSSLSSHHSSKRDWSKSDKDVQSSLTHSSRDSYRSKSHSQSYSRGSSRSRTASKSSSHSRSRSKSRSSSKSGHRKRASKSPRKTASQLSENKPVKTEPLRATMAQNENVVVQPVVAENIPVIPLSDSPPPSRWKPGQKPWKPSYERIQEMKAKTTHLLPIQSTYSLANIKETGSSSSYHKREKNSESDQSTYSKYSDRSSESSPRSRSRSSRSRSYSRSYTRSRSLASSHSRSRSPSSRSHSRNKYSDHSQCSRSSSYTSISSDDGRRAKRRLRSSGKKNSVSHKKHSSSSEKTLHSKYVKGRDRSSCVRKYSESRSSLDYSSDSEQSSVQATQSAQEKEKQGQMERTHNKQEKNRGEEKSKSERECPHSKKRTLKENLSDHLRNGSKPKRKNYAGSKWDSESNSERDVTKNSKNDSHPSSDKEEGEATSDSESEVSEIHIKVKPTTKSSTNTSLPDDNGAWKSSKQRTSTSDSEGSCSNSENNRGKPQKHKHGSKENLKREHTKKVKEKLKGKKDKKHKAPKRKQAFHWQPPLEFGEEEEEEIDDKQVTQESKEKKVSENNETIKDNILKTEKSSEEDLSGKHDTVTVSSDLDQFTKDDSKLSISPTALNTEENVACLQNIQHVEESVPNGVEDVLQTDDNMEICTPDRSSPAKVEETSPLGNARLDTPDINIVLKQDMATEHPQAEVRTAALLAWLVLEKVPGRRRWLRRARSTSLIRNGSPCKVWGTWQHLMLPHPVLWKLRC

SEQ ID NO: 856112 - protein, 1209 aa, Homo sapiens; identical to SEQ ID NO: 856110

SEQ ID NO: 856113 - protein, 1352 aa, Homo sapiens [sequence omitted]

SEQ ID NO: 856114 - protein, 1352 aa, Homo sapiens [sequence omitted]

SEQ ID NO: 856115 - protein, 1209 aa, Homo sapiens; identical to SEQ ID NO: 856110

SEQ ID NO: 856116 - protein, 1209 aa, Homo sapiens; identical to SEQ ID NO: 856110

SEQ ID NO: 856117 - protein, 1162 aa, Homo sapiens [sequence omitted]

SEQ ID NO: 856118 - protein, 988 aa, Homo sapiens [sequence omitted]

SEQ ID NO: 856119 - protein, 1209 aa, Homo sapiens; identical to SEQ ID NO: 856110

SEQ ID NO: 856120 - protein, 202 aa, Homo sapiens
SEIGRSRKQQKQEAAEAGSKQKQEAGRSRKQAEAGSKASPGVQVDLEVNLKPNQDTEQGLSPIVTQEVDREVPHHLIDQEATLEVGAEDGTAEAEPEAGAVPTGVTKVTGRPAGADPGAAHMIPTVDPGPTPTIATIAGVGVEVEAREVTVTTEAEVIIGGPGVVDLMALTVKVTEVTLITGAPVRAADTVENVRIQIISYL

SEQ ID NO: 856121 - protein, 1209 aa, Homo sapiens; identical to SEQ ID NO: 856110

SEQ ID NO: 856122 - protein, 1209 aa, Homo sapiens; identical to SEQ ID NO: 856110

SEQ ID NO: 856123 - protein, 1209 aa, Homo sapiens; identical to SEQ ID NO: 856110

SEQ ID NO: 856124 - protein, 1076 aa, Homo sapiens
MNPKGHSERSDTNEKRSVDSSAKREKPVVRPEEIPPVPENRFLLRRDMPVVTAEPEPKIPDVAPIVSDQKPSVSKSGRKIKGRGTIRYHTPPRSRSCSESDDDDSSETPPHWKEEMQRLRAYRPPSGEKWSKGDKLSDPCSSRWDERSLSQRSRSWSYNGYYSDLSTARHSGHHKKRRKEKKVKHKKKGKKQKHCRRHKQTKKRRILIPSDIESSKSSTRRMKSSCDRERSSRSSSLSSHHSSKRDWSKSDKDVQSSLTHSSRDSYRSKSHSQSYSRGSSRSRTASKSSSHSRSRSKSRSSSKSGHRKRASKSPRKTASQLSENKPVKTEPLRATMAQNENVVVQPVVAENIPVIPLSDSPPPSRWKPGQKPWKPSYERIQEMKAKTTHLLPIQSTYSLANIKETGSSSSYHKREKNSESDQSTYSKYSDRSSESSPRSRSRSSRSRSYSRSYTRSRSLASSHSRSRSPSSRSHSRNKYSDHSQCSRSSSYTSISSDDGRRAKRRLRSSGKKNSVSHKKHSSSSEKTLHSKYVKGRDRSSCVRKYSESRSSLDYSSDSEQSSVQATQSAQEKEKQGQMERTHNKQEKNRGEEKSKSERECPHSKKRTLKENLSDHLRNGSKPKRKNYAGSKWDSESNSERDVTKNSKNDSHPSSDKEEGEATSDSESEVSEIHIKVKPTTKSSTNTSLPDDNGAWKSSKQRTSTSDSEGSCSNSENNRGKPQKHKHGSKENLKREHTKKVKEKLKGKKDKKHKAPKRKQAFHWQPPLEFGEEEEEEIDDKQVTQESKEKKVSENNETIKDNILKTEKSSEEDLSGKHDTVTVSSDLDQFTKDDSKLSISPTALNTEENVACLQNIQHVEESVPNGVEDVLQTDDNMEICTPDRSSPAKVEETSPLGNARLDTPDINIVLKQDMATEHPQAEVVKQESSMSESKVLGEVGKQDSSSASLASAGESTGKKEVAEKSQINLIDKKWKPLQGVGNLAAPNAATSSAVEVKVLTTVPEMKPQGLRIEIKSKNKVRPGSSQPPPSSRYFLQHYPSLQSSGPVSPLTHTLLFDICFPVYYLCLRCSVHIPHNS

SEQ ID NO: 856125 - protein, 160 aa, Homo sapiens
TLAVFVPTLAGFSVALGGPAWGRRRRSVSGVGVWLQWQCFLFCSRGPAQAGGQPALAATSVAMGAQDRPQCHFDIEINREPVGRIMFQLFSDICPKTCKNFLCLCSGEKGLGKTTGKKLCYKGSTFHRVVKNFMIQGGDFSEGNGKGGESIYGGYFKGKA

SEQ ID NO: 856126 - protein, 1524 aa, Homo sapiens; identical to SEQ ID NO: 856109

SEQ ID NO: 856127 - protein, 1524 aa, Homo sapiens; identical to SEQ ID NO: 856109

SEQ ID NO: 856128 - protein, 1209 aa, Homo sapiens; identical to SEQ ID NO: 856110

SEQ ID NO: 856129 - protein, 1352 aa, Homo sapiens [sequence omitted]

SEQ ID NO: 856130 - protein, 1209 aa, Homo sapiens; identical to SEQ ID NO: 856110

SEQ ID NO: 856131 - protein, 1209 aa, Homo sapiens; identical to SEQ ID NO: 856110

SEQ ID NO: 856132 - protein, 1209 aa, Homo sapiens; identical to SEQ ID NO: 856110

SEQ ID NO: 856133 - protein, 1209 aa, Homo sapiens; identical to SEQ ID NO: 856110

SEQ ID NO: 856134 - protein, 794 aa, Homo sapiens
CYPWDPEGRRGPGVPRGLGHPGKSRSRSSRSRSYSRSYTRSRSLASSHSRSRSPSSRSHSRNKYSDHSQCSRSSSYTSISSDDGRRAKRRLRSSGKKNSVSHKKHSSSSEKTLHSKYVKGRDRSSCVRKYSESRSSLDYSSDSEQSSVQATQSAQEKEKQGQMERTHNKQEKNRGEEKSKSERECPHSKKRTLKENLSDHLRNGSKPKRKNYAGSKWDSESNSERDVTKNSKNDSHPSSDKEEGEATSDSESEVSEIHIKVKPTTKSSTNTSLPDDNGAWKSSKQRTSTSDSEGSCSNSENNRGKPQKHKHGSKENLKREHTKKVKEKLKGKKDKKHKAPKRKQAFHWQPPLEFGEEEEEEIDDKQVTQESKEKKVSENNETIKDNILKTEKSSEEDLSGKHDTVTVSSDLDQFTKDDSKLSISPTALNTEENVACLQNIQHVEESVPNGVEDVLQTDDNMEICTPDRSSPAKVEETSPLGNARLDTPDINIVLKQDMATEHPQAEVVKQESSMSESKVLGEVGKQDSSSASLASAGESTGKKEVAEKSQINLIDKKWKPLQGVGNLAAPNAATSSAVEVKVLTTVPEMKPQGLRIEIKSKNKVRPGSLFDEVRKTARLNRRPRNQESSSDEQTPSRDDDSQSRSPSRSRSKSETKSRHRTRSVSYSHSRSRSRSSTSSYRSRSYSRSRSRGWYSRGRTRSRSSSYRSYKSHRTSSRSRSRSSSYDPHSRSRSYTYDSYYSRSRSRSRSQRSDSYHRGRSYNRRSRSCRSYGSDSESDRSYSHHRSPSESSRYS

SEQ ID NO: 856135 - protein, 632 aa, Homo sapiens [sequence omitted]

SEQ ID NO: 856136 - protein, 160 aa, Homo sapiens; identical to SEQ ID NO: 856125

SEQ ID NO: 856137 - protein, 1209 aa, Homo sapiens; identical to SEQ ID NO: 856110

SEQ ID NO: 856138 - protein, 1209 aa, Homo sapiens; identical to SEQ ID NO: 856110

SEQ ID NO: 856139 - protein, 1209 aa, Homo sapiens; identical to SEQ ID NO: 856110

SEQ ID NO: 856140 - protein, 1209 aa, Homo sapiens; identical to SEQ ID NO: 856110

SEQ ID NO: 856141 - protein, 108 aa, Homo sapiens
TLAVFVPTLAGFSVALGGPAWGRRRRSVSGVGVWLQWQCFLFCSRGPAQAGGQPALAATSVAMGAQDRPQCHFDIEINREPVGRIMFQLFSDICPKTCKNFLCLCSGK

SEQ ID NO: 856142 - protein, 106 aa, Homo sapiens
TAALPPPRDARMAAASSYCRSSASERSTLLGAIACLSHVSGGSWKASFSFPSSPACPPCFQAGSGLVFPRKEMAGELQGGPRRRRFGGAWADQPGQRGKPEQFCAR

SEQ ID NO: 856143 - protein, 253 aa, Homo sapiens
MASGSNWLSGVNVVLVMAYGSLVFVLLFIFVKRQIMRFAMKSRRGPHVPVGHNAPKDLKEEIDIRLSRVQDIKYEPQLLADDDARLLQLETQGNQSCYNYLYRMKALDAIRTSEIPFHSEGRHPRSLMGKNFRSYLLDLRNTSTPFKGVRKALIDTLLDGYETARYGTGVFGQNEYLRYQEALSELATAVKARIGSSQRHHQSAAKDLTQSPEVSPTTIQVTYLPSSQKSKRAKHFLELKSFKDNYNTLESTL

SEQ ID NO: 856144 - protein, 219 aa, Homo sapiens
MASGSNWLSGVNVVLVMAYGSLDLKEEIDIRLSRVQDIKYEPQLLADDDARLLQLETQGNQSCYNYLYRMKALDAIRTSEIPFHSEGRHPRSLMGKNFRSYLLDLRNTSTPFKGVRKALIDTLLDGYETARYGTGVFGQNEYLRYQEALSELATAVKARIGSSQRHHQSAAKDLTQSPEVSPTTIQVTYLPSSQKSKRAKHFLELKSFKDNYNTLESTL

SEQ ID NO: 856145 - protein, 253 aa, Homo sapiens; identical to SEQ ID NO: 856143

SEQ ID NO: 856146 - protein, 322 aa, Homo sapiens
GALVCCHWWWYGRYSGIHVFRPGLAWSSPVRKWPGSSRGDPGAVASAEPGLTSQDSGVNPNNSARGREAMASGSNWLSGVNVVLVMAYGSLVFVLLFIFVKRQIMRFAMKSRRGPHVPVGHNAPKDLKEEIDIRLSRVQDIKYEPQLLADDDARLLQLETQGNQSCYNYLYRMKALDAIRTSEIPFHSEGRHPRSLMGKNFRSYLLDLRNTSTPFKGVRKALIDTLLDGYETARYGTGVFGQNEYLRYQEALSELATAVKARIGSSQRHHQSAAKDLTQSPEVSPTTIQVTYLPSSQKSKRAKHFLELKSFKDNYNTLESTL

SEQ ID NO: 856147 - protein, 218 aa, Homo sapiens
MRFAMKSRRGPHVPVGHNAPKDLKEEIDIRLSRVQDIKYEPQLLADDDARLLQLETQGNQSCYNYLYRMKALDAIRTSEIPFHSEGRHPRSLMGKNFRSYLLDLRNTSTPFKGVRKALIDTLLDGYETARYGTGVFGQNEYLRYQEALSELATAVKARIGSSQRHHQSAAKDLTQSPEVSPTTIQVTYLPSSQKSKRAKHFLELKSFKDNYNTLESTL

SEQ ID NO: 856148 - protein, 235 aa, Homo sapiens
MASGSNWLSGVNVVLVMAYGSLVFVLLFIFVKRQIMRFAMKSRRGPHVPVGHNAPKDLKEEIDIRLSRVQDIKYEPQLLADDDARLLQLETQGNQKIPFHSEGRHPRSLMGKNFRSYLLDLRNTSTPFKGVRKALIDTLLDGYETARYGTGVFGQNEYLRYQEALSELATAVKARIGSSQRHHQSAAKDLTQSPEVSPTTIQVTYLPSSQKSKRAKHFLELKSFKDNYNTLESTL

SEQ ID NO: 856149 - protein, 150 aa, Homo sapiens
MKALDAIRTSEIPFHSEGRHPRSLMGKNFRSYLLDLRNTSTPFKGVRKALIDTLLDGYETARYGTGVFGQNEYLRYQEALSELATAVKARIGSSQRHHQSAAKDLTQSPEVSPTTIQVTYLPSSQKSKRAKHFLELKSFKDNYNTLESTL

SEQ ID NO: 856150 - protein, 201 aa, Homo sapiens
MASGSNWLSGVNVVLVMAYGSLDLKEEIDIRLSRVQDIKYEPQLLADDDARLLQLETQGNQKIPFHSEGRHPRSLMGKNFRSYLLDLRNTSTPFKGVRKALIDTLLDGYETARYGTGVFGQNEYLRYQEALSELATAVKARIGSSQRHHQSAAKDLTQSPEVSPTTIQVTYLPSSQKSKRAKHFLELKSFKDNYNTLESTL

SEQ ID NO: 856151 - protein, 150 aa, Homo sapiens; identical to SEQ ID NO: 856149

SEQ ID NO: 856152 - protein, 126 aa, Homo sapiens
MGKNFRSYLLDLRNTSTPFKGVRKALIDTLLDGYETARYGTGVFGQNEYLRYQEALSELATAVKARIGSSQRHHQSAAKDLTQSPEVSPTTIQVTYLPSSQKSKRAKHFLELKSFKDNYNTLESTL

SEQ ID NO: 856153 - protein, 201 aa, Homo sapiens; identical to SEQ ID NO: 856150

SEQ ID NO: 856154 - protein, 210 aa, Homo sapiens
MASGSNWLSGVNVVLVMAYGSLVFVLLFIFVKRQIMRFAMKSRRGPHVPVGHNAPKDLKEEIDIRLSRVQDIKYEPQLLADDDARLLQLETQGNQSCYNYLYRMKALDAIRTSEIPFHSEGRHPRSLMGKNFRSYYQEALSELATAVKARIGSSQRHHQSAAKDLTQSPEVSPTTIQVTYLPSSQKSKRAKHFLELKSFKDNYNTLESTL

SEQ ID NO: 856155 - protein, 106 aa, Homo sapiens; identical to SEQ ID NO: 856142

SEQ ID NO: 856156 - protein, 230 aa, Homo sapiens
MASGSNWLSGVNVVLVMAYGSLVFVLLFIFVKRQIMRFAMKSRRGPHVPVGHNAPKDLKEEIDIRLSRVQDIKYEPQLLADDDARLLQLETQGNQSCYNYLYRMKALDAIRTSEIPFHSEGRHPRSLMGKNFRSYLLDLRNTSTPFKGVRKALIDTLLDGYETARYGTGVFGQNEYLRYQEALSELATAVSLEGNVSEGAGTVVLDCCHSAVTFIKHINKIHDTIRVVRF

SEQ ID NO: 856157 - protein, 196 aa, Homo sapiens
MASGSNWLSGVNVVLVMAYGSLDLKEEIDIRLSRVQDIKYEPQLLADDDARLLQLETQGNQSCYNYLYRMKALDAIRTSEIPFHSEGRHPRSLMGKNFRSYLLDLRNTSTPFKGVRKALIDTLLDGYETARYGTGVFGQNEYLRYQEALSELATAVSLEGNVSEGAGTVVLDCCHSAVTFIKHINKIHDTIRVVRF

SEQ ID NO: 856158 - protein, 150 aa, Homo sapiens; identical to SEQ ID NO: 856149

SEQ ID NO: 856159 - protein, 103 aa, Homo sapiens
MGKNFRSYLLDLRNTSTPFKGVRKALIDTLLDGYETARYGTGVFGQNEYLRYQEALSELATAVSLEGNVSEGAGTVVLDCCHSAVTFIKHINKIHDTIRVVRF

SEQ ID NO: 856160 - protein, 219 aa, Homo sapiens; identical to SEQ ID NO: 856144

SEQ ID NO: 856161 - protein, 253 aa, Homo sapiens; identical to SEQ ID NO: 856143

SEQ ID NO: 856162 - protein, 253 aa, Homo sapiens; identical to SEQ ID NO: 856143

SEQ ID NO: 856163 - protein, 253 aa, Homo sapiens; identical to SEQ ID NO: 856143

SEQ ID NO: 856164 - protein, 150 aa, Homo sapiens; identical to SEQ ID NO: 856149

SEQ ID NO: 856165 - protein, 253 aa, Homo sapiens; identical to SEQ ID NO: 856143

SEQ ID NO: 856166 - protein, 150 aa, Homo sapiens; identical to SEQ ID NO: 856149

SEQ ID NO: 856167 - protein, 126 aa, Homo sapiens; identical to SEQ ID NO: 856152

SEQ ID NO: 856168 - protein, 190 aa, Homo sapiens
MASGSNWLSGVNVVLVMAYGSLVFVLLFIFVKRQIMRFAMKSRRGPHVPVGHNAPKDLKEEIDIRLSRVQDIKYEPQLLADDDARLLQLETQGNQSCYNYLYRMKALDAIRTSEIPFHSEGRHPRSLMGKNFRSYLLDLRNTSTPFKGVRKALIDTLLDGYETARYGTGVFGQNEYLRHPGDIPPLQSEE

SEQ ID NO: 856169 - protein, 243 aa, Homo sapiens
MASGSNWLSGVNVVLVMAYGSLVFVLLFIFVKRQIMRFAMKSRRGPHVPVGHNAPKDLKEEIDIRLSRVQDIKYEPQLLADDDARLLQLETQGNQSCYNYLYRMKALDAIRTSEIPFHSEGRHPRSLMGKNFRSYLLDLRNTSTPFKGVRKALIDTLLDGYETARYGTGVFGQNEYLRYQEALSELATAVKARIGSSQRHHQSAAKDLTQSPEVSPTTTSGGYSLGRNKGPVLMGAWDLTGDR

SEQ ID NO: 856170 - protein, 230 aa, Homo sapiens; identical to SEQ ID NO: 856156

SEQ ID NO: 856171 - protein, 238 aa, Homo sapiens
MASGSNWLSGVNVVLVMAYGSLVFVLLFIFVKRQIMRFAMKSRRGPHVPVGHNAPKDLKEEIDIRLSRVQDIKYEPQLLADDDARLLQLETQGNQKIPFHSEGRHPRSLMGKNFRSYLLDLRNTSTPFKGVRKALIDTLLDGYETARYGTGVFGQNEYLRYQEALSELATAVKARIGSSQRHHQSAAKDLTQSPEVSPTTPDSPSGKRMQASDEVGPNLGLGGRCENLVEGWAHCERV

SEQ ID NO: 856172 - protein, 106 aa, Homo sapiens; identical to SEQ ID NO: 856142

SEQ ID NO: 856173 - protein, 538 aa, Homo sapiens
RGTYYPPYFWVGPSGKMAAVQAAEVKVDGSEPKLSKNELKRRLKAEKKVAEKEAKQKELSEKQLSQATAAATNHTTDNGVGPEEESVDPNQYYKIRSQAIHQLKVNGEDPYPHKFHVDISLTDFIQKYSHLQPGDHLTDITLKVAGRIHAKRASGGKLIFYDLRGEGVKLQVMANSRNYKSEEEFIHINNKLRRGDIIGVQGNPGKTKKGELSIIPYEITLLSPCLHMLPHLHFGLKDKETRYRQRYLDLILNDFVRQKFIIRSKIITYIRSFLDELGFLEIETPMMNIIPGGAVAKPFITYHNELDMNLYMRIAPELYHKMLVVGGIDRVYEIGRQFRNEGIDLTHNPEFTTCEFYMAYADYHDLMEITEKMVSGMVKHITGSYKVTYHPDGPEGQAYDVDFTPPFRRINMVEELEKALGMKLPETNLFETEETRKILDDICVAKAVECPPPRTTARLLDKLVGEFLEVTCINPTFICDHPQIMSPLAKWHRSKEGLTERFELFVMKKEICNAYTELNDPMRQRQLFEEPGQGQGCR

SEQ ID NO: 856174 - protein, 259 aa, Homo sapiens
SAATEDAKMDARQPGERSQPHPRRYPRGPALSLLTPAIRGLRVLLRLPLELLGGGAHRRVPQQVLMLLAPQVLEVAVLQGLPRVLRERALLHRFPQGVTGDGAGRAGIFLHVGKDGYVVRIREGDPPGVPLRLRLRGALGQGPGLCFRAGVRRRGGAQPIGLQLQPLVALHAVQDVLRGDEITRGLGQRLPGLGQQHGPGLLHSAHGAAAVQDERRQPTLGRAGPHVEGHGAAVVPHEQSRGMGGPVGVFAQIHRLRHV

SEQ ID NO: 856175 - protein, 102 aa, Homo sapiens
  misc_feature (3)..(3): Xaa can be any naturally occurring amino acid
GNXRTCETFAKLVDPPPRTTARLLDKLVGEFLEVTCINPTFICDHPQIMSPLAKWHRSKEGLTERFELFVMKKEICNAYTELNDPMRQRQLFEETGQGQGCR

SEQ ID NO: 856176 - protein, 112 aa, Homo sapiens
RGTYYPPYFWVGPSGKMAAVQAAEVKVDGSEPKLSKNELKRRLKAEKKVAEKEAKQKELSEKQLSQATAAATNHTTDNGVGPEEESVDPNVGSMPKELLGESSSSMIFEERG

SEQ ID NO: 856177 - protein, 550 aa, Homo sapiens
MLTQAAVRLVRGSLRKTSWAEWGHRELRLGQLAPFTAPHKDKSFSDQRSELKRRLKAEKKVAEKEAKQKELSEKQLSQATAAATNHTTDNGVGPEEESVDPNQYYKIRSQAIHQLKVNGEDPYPHKFHVDISLTDFIQKYSHLQPGDHLTDITLKVAGRIHAKRASGGKLIFYDLRGEGVKLQVMANSRNYKSEEEFIHINNKLRRGDIIGVQGNPGKTKKGELSIIPYEITLLSPCLHMLPHLHFGLKDKETRYRQRYLDLILNDFVRQKFIIRSKIITYIRSFLDELGFLEIETPMMNIIPGGAVAKPFITYHNELDMNLYMRIAPELYHKMLVVGGIDRVYEIGRQFRNEGIDLTHNPEFTTCEFYMAYADYHDLMEITEKMVSGMVKHITGSYKVTYHPDGPEGQAYDVDFTPPFRRINMVEELEKALGMKLPETNLFETEETRKILDDICVAKAVECPPPRTTARLLDKLVGEFLEVTCINPTFICDHPQIMSPLAKWHRSKEGLTERFELFVMKKEICNAYTELNDPMRQRQLFEEPGQGQGCR

SEQ ID NO: 856178 - protein, 550 aa, Homo sapiens; identical to SEQ ID NO: 856177

SEQ ID NO: 856179 - protein, 564 aa, Homo sapiens
ALLPKMPRWTPGSQEKDPNPTRADIREAPRSASSPPLSAASGSSSAFRLSFWEEGLTGASPSSELKRRLKAEKKVAEKEAKQKELSEKQLSQATAAATNHTTDNGVGPEEESVDPNQYYKIRSQAIHQLKVNGEDPYPHKFHVDISLTDFIQKYSHLQPGDHLTDITLKVAGRIHAKRASGGKLIFYDLRGEGVKLQVMANSRNYKSEEEFIHINNKLRRGDIIGVQGNPGKTKKGELSIIPYEITLLSPCLHMLPHLHFGLKDKETRYRQRYLDLILNDFVRQKFIIRSKIITYIRSFLDELGFLEIETPMMNIIPGGAVAKPFITYHNELDMNLYMRIAPELYHKMLVVGGIDRVYEIGRQFRNEGIDLTHNPEFTTCEFYMAYADYHDLMEITEKMVSGMVKHITGSYKVTYHPDGPEGQAYDVDFTPPFRRINMVEELEKALGMKLPETNLFETEETRKILDDICVAKAVECPPPRTTARLLDKLVGEFLEVTCINPTFICDHPQIMSPLAKWHRSKEGLTERFELFVMKKEICNAYTELNDPMRQRQLFEEPGQGQGCR

SEQ ID NO: 856180 - protein, 449 aa, Homo sapiens
MQYYKIRSQAIHQLKVNGEDPYPHKFHVDISLTDFIQKYSHLQPGDHLTDITLKVAGRIHAKRASGGKLIFYDLRGEGVKLQVMANSRNYKSEEEFIHINNKLRRGDIIGVQGNPGKTKKGELSIIPYEITLLSPCLHMLPHLHFGLKDKETRYRQRYLDLILNDFVRQKFIIRSKIITYIRSFLDELGFLEIETPMMNIIPGGAVAKPFITYHNELDMNLYMRIAPELYHKMLVVGGIDRVYEIGRQFRNEGIDLTHNPEFTTCEFYMAYADYHDLMEITEKMVSGMVKHITGSYKVTYHPDGPEGQAYDVDFTPPFRRINMVEELEKALGMKLPETNLFETEETRKILDDICVAKAVECPPPRTTARLLDKLVGEFLEVTCINPTFICDHPQIMSPLAKWHRSKEGLTERFELFVMKKEICNAYTELNDPMRQRQLFEEPGQGQGCR

SEQ ID NO: 856181 - protein, 366 aa, Homo sapiens
MANSRNYKSEEEFIHINNKLRRGDIIGVQGNPGKTKKGELSIIPYEITLLSPCLHMLPHLHFGLKDKETRYRQRYLDLILNDFVRQKFIIRSKIITYIRSFLDELGFLEIETPMMNIIPGGAVAKPFITYHNELDMNLYMRIAPELYHKMLVVGGIDRVYEIGRQFRNEGIDLTHNPEFTTCEFYMAYADYHDLMEITEKMVSGMVKHITGSYKVTYHPDGPEGQAYDVDFTPPFRRINMVEELEKALGMKLPETNLFETEETRKILDDICVAKAVECPPPRTTARLLDKLVGEFLEVTCINPTFICDHPQIMSPLAKWHRSKEGLTERFELFVMKKEICNAYTELNDPMRQRQLFEETGQGQGCR

SEQ ID NO: 856182 - protein, 422 aa, Homo sapiens
  misc_feature (2)..(2): Xaa can be any naturally occurring amino acid
IXTLGSLYDMTITTPSLAEDLTDITLKVAGRIHAKRASGGKLIFYDLRGEGVKLQVMANSRNYKSEEEFIHINNKLRRGDIIGVQGNPGKTKKGELSIIPYEITLLSPCLHMLPHLHFGLKDKETRYRQRYLDLILNDFVRQKFIIRSKIITYIRSFLDELGFLEIETPMMNIIPGGAVAKPFITYHNELDMNLYMRIAPELYHKMLVVGGIDRVYEIGRQFRNEGIDLTHNPEFTTCEFYMAYADYHDLMEITEKMVSGMVKHITGSYKVTYHPDGPEGQAYDVDFTPPFRRINMVEELEKALGMKLPETNLFETEETRKILDDICVAKAVECPPPRTTARLLDKLVGEFLEVTCINPTFICDHPQIMSPLAKWHRSKEGLTERFELFVMKKEICNAYTELNDPMRQRQLFEETGQGQGCR

SEQ ID NO: 856183 - protein, 538 aa, Homo sapiens; identical to SEQ ID NO: 856173

SEQ ID NO: 856184 - protein, 538 aa, Homo sapiens; identical to SEQ ID NO: 856173

SEQ ID NO: 856185 - protein, 538 aa, Homo sapiens; identical to SEQ ID NO: 856173

SEQ ID NO: 856186 - protein, 526 aa, Homo sapiens
RGTYYPPYFWVGPSGKMAAVQAAEVKVDGSEPKLSKNELKRRLKAEKKVAEKEAKQKELSEKQLSQATAAATNHTTDNGVGPEEESVDPNQYYKIRSQAIHQLKVNGEDPYPHKFHVDISLTDFIQKYSHLQPGDHLTDITLKVAGRIHAKRASGGKLIFYDLRGEGVKLQVMANSRNYKSEEEFIHINNKLRRGDIIGVQGNPGKTKKGELSIIPYEITLLSPCLHMLPHLHFGLKDKETRYRQRYLDLILNDFVRQKFIIRSKIITYIRSFLDELGFLEIETPMMNIIPGGAVAKPFITYHNELDMNLYMRIAPELYHKMLVVGGIDRVYEIGRQFRNEGIDLTHNPEFTTCEFYMAYADYHDLMEITEKMVSGMVKHITGSYKVTYHPDGPEGQAYDVDFTPPFRRINMVEELEKALGMKLPETNLFETEETRKILDDICVAKAVECPPPRTTARLLDKLVGEFLEVTCINPTFICDHPQIMSPLAKWHRSKEGLTERFELFVMKKEICNAYTELGTKLDSIM

SEQ ID NO: 856187 - protein, 515 aa, Homo sapiens
RGTYYPPYFWVGPSGKMAAVQAAEVKVDGSEPKLSKNELKRRLKAEKKVAEKEAKQKELSEKQLSQATAAATNHTTDNGVGPEEESVDPNQYYKIRSQAIHQLKVNGEDPYPHKFHVDISLTDFIQKYSHLQPGDHLTDITLKVAGRIHAKRASGGKLIFYDLRGEGVKLQVMANSRNYKSEEEFIHINNKLRRGDIIGVQGNPGKTKKGELSIIPYEITLLSPCLHMLPHLHFGLKDKETRYRQRYLDLILNDFVRQKFIIRSKIITYIRSFLDELGFLEIETPMMNIIPGGAVAKPFITYHNELDMNLYMRIAPELYHKMLVVGGIDRVYEIGRQFRNEGIDLTHNPEFTTCEFYMAYADYHDLMEITEKMVSGMVKHITGSYKVTYHPDGPEGQAYDVDFTPPFRRINMVEELEKALGMKLPETNLFETEETRKILDDICVAKAVECPSNFGETPKQRAPKGSFDKLVGEFLGSDLHSIPFNNFPNFLGWENSKTPPKTKGAHLLTLWTRSP

SEQ ID NO: 856188 - protein, 102 aa, Homo sapiens; identical to SEQ ID NO: 856175
  misc_feature (3)..(3): Xaa can be any naturally occurring amino acid

SEQ ID NO: 856189 - protein, 301 aa, Homo sapiens
RGTYYPPYFWVGPSGKMAAVQAAEVKVDGSEPKLSKNELKRRLKAEKKVAEKEAKQKELSEKQLSQATAAATNHTTDNGVGPEEESVDPNQYYKIRSQAIHQLKVNGEDPYPHKFHVDISLTDFIQKYSHLQPGDHLTDITLKVAGRIHAKRASGGKLIFYDLRGEGVKLQVMANSRNYKSEEEFIHINNKLRRGDIIGVQGNPGKTKKGELSIIPYEITLLSPCLHMLPHLHFGLKDKETRYRQRYLDLILNDFVRQKFIIRSKIITYIRSFLDELGFLEIETSLMNIIPAGANKVGEKK

SEQ ID NO: 856190 - protein, 177 aa, Homo sapiens
MLTQAAVRLVRGSLRKTSWAEWGHRELRLGQLAPFTAPHKDKSFSDQRSELKRRLKAEKKVAEKEAKQKELSEKQLSQATAAATNHTTDNGVGPEEESVDPNQYYKIRSQAIHQLKVNGEDPYPHKFHVDISLTDFIQKYSHLQPGDHLTDITLKVAGRNSPWQITELPQQVGLRLQ

SEQ ID NO: 856191 - protein, 252 aa, Homo sapiens
VSCLYVLPSFLVNCFFYVGFPSIVRNECSFWFPSRLVCSLPLELLGGGAHRRVPQQVLMLLAPQVLEVAVLQGLPRVLRERALLHRFPQGVTGDGAGRAGIFLHVGKDGYVVRIREGDPPGVPLRLRLRGALGQGPGLCFRAGVRRRGGAQPIGLQLQPLVALHAVQDVLRGDEITRGLGQRLPGLGQQHGPGLLHSAHGAAAVQDERRQPTLGRAGPHVEGHGAAVVPHEQSRGMGGPVGVFAQIHRLRHV

SEQ ID NO: 856192 - protein, 157 aa, Homo sapiens
RGTYYPPYFWVGPSGKMAAVQAAEVKVDGSEPKLSKNELKRRLKAEKKVAEKEAKQKELSEKQLSQATAAATNHTTDNGVGPEEESVDPNQYYKIRSQAIHQLKVNGEDPYPRVAMFLTDSNNIKEVLLFPAMKPEDKKENVATTDTLESTTVGTSV

SEQ ID NO: 856193 - protein, 235 aa, Homo sapiens
LYCDSRRAVVKQTEILGARCGPRRAGGPQILRGTPPKPGTNWRFLPGSPQVRNRSNPVRIPPRSLPFRELERAHRRVPQQVLMLLAPQVLEVAVLQGLPRVLRERALLHRFPQGVTGDGAGRAGIFLHVGKDGYVVRIREGDPPGVPLRLRLRGALGQGPGLCFRAGVRRRGGAQPIGLQLQPLVALHAVQDVLRGDEITRGVEGHGAAVVPHEQSRGMGGPVGVFAQIHRLRHV

SEQ ID NO: 856194 - protein, 498 aa, Homo sapiens
RGTYYPPYFWVGPSGKMAAVQAAEVKVDGSEPKLSKNELKRRLKAEKKVAEKEAKQKELSEKQLSQATAAATNHTTDNGVGPEEESVDPNQYYKIRSQAIHQLKVNGEDPYPHKFHVDISLTDFIQKYSHLQPGDHLTDITLKVAGRIHAKRASGGKLIFYDLRGEGVKLQVMANSRNYKSEEEFIHINNKLRRGDIIGVQGNPGKTKKGELSIIPYEITLLSPCLHMLPHLHFGLKDKETRYRQRYLDLILNDFVRQKFIIRSKIITYIRSFLDELGFLEMLVVGGIDRVYEIGRQFRNEGIDLTHNPEFTTCEFYMAYADYHDLMEITEKMVSGMVKHITGSYKVTYHPDGPEGQAYDVDFTPPFRRINMVEELEKALGMKLPETNLFETEETRKILDDICVAKAVECPPPRTTARLLDKLVGEFLEVTCINPTFICDHPQIMSPLAKWHRSKEGLTERFELFVMKKEICNAYTELNDPMRQRQLFEEPGQGQGCR

SEQ ID NO: 856195 - protein, 564 aa, Homo sapiens
MLTQAAVRLVRGSLRKTSWAEWGHRELRLGQLAPFTAPHKDKSFSDQRSELKRRLKAEKKVAEKEAKQKELSEKQLSQATAAATNHTTDNGVGPEEESVDPNQYYKIRSQAIHQLKVNGEDPYPHKFHVDISLTDFIQKYSHLQPGDHLTDITLKVAGRIHAKRASGGKLIFYDLRGEGVKLQVMANSRNYKSEEEFIHINNKLCLPEQFVINMNNKLRRGDIIGVQGNPGKTKKGELSIIPYEITLLSPCLHMLPHLHFGLKDKETRYRQRYLDLILNDFVRQKFIIRSKIITYIRSFLDELGFLEIETPMMNIIPGGAVAKPFITYHNELDMNLYMRIAPELYHKMLVVGGIDRVYEIGRQFRNEGIDLTHNPEFTTCEFYMAYADYHDLMEITEKMVSGMVKHITGSYKVTYHPDGPEGQAYDVDFTPPFRRINMVEELEKALGMKLPETNLFETEETRKILDDICVAKAVECPPPRTTARLLDKLVGEFLEVTCINPTFICDHPQIMSPLAKWHRSKEGLTERFELFVMKKEICNAYTELNDPMRQRQLFEEPGQGQGCR

SEQ ID NO: 856196 - protein, 532 aa, Homo sapiens
MLTQAAVRLVRGSLRKTSWAEWGHRELRLGQLAPFTAPHKDKSFSDQRSELKRRLKAEKKVAEKEAKQKELSEKQLSQATAAATNHTTDNGVGPEEESVDPNQYYKIRSQAIHQLKVNGEDPYPHKFHVDISLTDFIQKYSHLQPGDHLTDITLKVAGRIHAKRASGGKLIFYDLRGEGVKLQVMANSRNYKSEEEFIHINNKLRRGDIIGVQGNPAPCLHMLPHLHFGLKDKETRYRQRYLDLILNDFVRQKFIIRSKIITYIRSFLDELGFLEIETPMMNIIPGGAVAKPFITYHNELDMNLYMRIAPELYHKMLVVGGIDRVYEIGRQFRNEGIDLTHNPEFTTCEFYMAYADYHDLMEITEKMVSGMVKHITGSYKVTYHPDGPEGQAYDVDFTPPFRRINMVEELEKALGMKLPETNLFETEETRKILDDICVAKAVECPPPRTTARLLDKLVGEFLEVTCINPTFICDHPQIMSPLAKWHRSKEGLTERFELFVMKKEICNAYTELNDPMRQRQLFEEPGQGQGCR

SEQ ID NO: 856197 - protein, 520 aa, Homo sapiens
RGTYYPPYFWVGPSGKMAAVQAAEVKVDGSEPKLSKNELKRRLKAEKKVAEKEAKQKELSEKQLSQATAAATNHTTDNGVGPEEESVDPNQYYKIRSQAIHQLKVNGEDPYPHKFHVDISLTDFIQKYSHLQPGDHLTDITLKVAGRIHAKRASGGKLIFYDLRGEGVKLQVMANSRNYKSEEEFIHINNKLRRGDIIGVQGNPAPCLHMLPHLHFGLKDKETRYRQRYLDLILNDFVRQKFIIRSKIITYIRSFLDELGFLEIETPMMNIIPGGAVAKPFITYHNELDMNLYMRIAPELYHKMLVVGGIDRVYEIGRQFRNEGIDLTHNPEFTTCEFYMAYADYHDLMEITEKMVSGMVKHITGSYKVTYHPDGPEGQAYDVDFTPPFRRINMVEELEKALGMKLPETNLFETEETRKILDDICVAKAVECPPPRTTARLLDKLVGEFLEVTCINPTFICDHPQIMSPLAKWHRSKEGLTERFELFVMKKEICNAYTELNDPMRQRQLFEEPGQGQGCR

SEQ ID NO: 856198 - protein, 538 aa, Homo sapiens; identical to SEQ ID NO: 856173

SEQ ID NO: 856199 - protein, 538 aa, Homo sapiens; identical to SEQ ID NO: 856173

SEQ ID NO: 856200 - protein, 499 aa, Homo sapiens
RGTYYPPYFWVGPSGKMAAVQAAEVKVDGSEPKLSKNELKRRLKAEKKVAEKEAKQKELSEKQLSQATAAATNHTTDNGVGPEEESVDPNQYYKIRSQAIHQLKVNGEDPYPHKFHVDISLTDFIQKYSHLQPGDHLTDITLKVAGRIHAKRASGGKLIFYDLRGEGVKLQVMANSRNYKSEEEFIHINNKLRRGDIIGVQGNPGKTKKGELSIIPYEITLLSPCLHMLPHLHFGLKDKETRYRQRYLDLILNDFVRQKFIIRSKIITYIRSFLDELGFLEIETPMMNIIPGGAVAKPFITYHNELDMNLYMRIAPELYHKMLVVGGIDRVYEIGRQFRNEGIDLTHNPEFTTCEFYMAYADYHDLMEITEKMVSGMVKHITGSYKVTYHPDGPEGQAYDVDFTPPFRRINMVEELEKALGMKLPETNLFETEETRKILDDICVAKAVECPPPRTTARLLDKLVGEFLEVTCINPTFICDHPQIMSPLAKWRSRSRAAA

SEQ ID NO: 856201 - protein, 422 aa, Homo sapiens
SGTYYPPYFWVGPSGKMAAVQAAEVKVDGSEPKLSKNELKRRLKAEKKVAEKEAKQKELSEKQLSQATAAATNHTTDNGVGPEEESVDPNQYYKIRSQAIHQLKVNGEDPYPHKFHVDISLTDFIQKYSHLQPGDHLTDITLKVAGRIHAKRASGGKLIFYDLRGEGVKLQVMANSRNYKSEEEFIHINNKLRRGDIIGVQGNPGKTKKGELSIIPYEITLLSPCLHMLPHLHFGLKDKETRYRQRYLDLILNDFVRQKFIIRSKIITYIRSFLDELGFLEIETPMMNIIPGGAVAKPFITYHNELDMNLYMRIAPELYHKMLVVGGLDPGYELWPAVRDAGFVGANSWVSHPVSSMGYGISRSLGIPGNWPGGGSTLGGKGPTPLPGPLMFFPTSAGHGKHVTRGEPAHPYTDTSFFSVRT

SEQ ID NO: 856202 - protein, 284 aa, Homo sapiens
MLTQAAVRLVRGSLRKTSWAEWGHRELRLGQLAPFTAPHKDKSFSDQRSELKRRLKAEKKVAEKEAKQKELSEKQLSQATAAATNHTTDNGVGPEEESVDPNQYYKIRSQAIHQLKVNGEDPYPHKFHVDISLTDFIQKYSHLQPGDHLTDITLKVAGRIHAKRASGGKLIFYDLRGEGVKLQVMANSRNYKSEEEFIHINNKLRRGDIIGVQGNPGKTKKGELSIIPYEITLLSPCLHMLPHLHFGLKDKSSRHVSHGLQQHQGSTSVSCHETRRQEGECSNH

SEQ ID NO: 856203 - protein, 211 aa, Homo sapiens
VSCLYVLPSFLVNCFFYVGFPSIVRNECSFWFPSRLVCSLPLELLGGGAHRRVPQQVLMLLAPQVLEVAVLQGLPRVLRERALLHRFPQGVTGDGAGRAGIFLHVGKDGYVVRIREGDPPGVPLRLRLRGALGQGPGLCFRAGVRRRGGAQPIGLQLQPLVALHAVQDVLRGDEITRGVEGHGAAVVPHEQSRGMGGPVGVFAQIHRLRHV

SEQ ID NO: 856204 - protein, 421 aa, Homo sapiens
MPFLHGFRRIIFEYQPLVDAILGSLGIQDPERQESLDRPSYVASEESRILVLTELLERKAHSPFYQEGVSNALLKMAELGLTRAADVLLRHGANLNFEDPVTYYTALHIAVLRNQPDMVELLVHHGADVNRRDRIHESSPLDLASEEPERLPCLQRLLDLGADVNAADKHGKTALLHALASSDGVQIHNTENIRLLLEGGADVKATTKDGDTVFTCIIFLLGETVGGDKEEAQMINRFCFQVTRLLLAHGADPSECPAHESLTHICLKSFKLHFPLLRFLLESGAAYNCSLHGASCWSGFHIIFERLCSHPGCTEDESHADLLRKAETVLDLMVTNSQKLQLPENFDIHPVGSLAEKIQALHFSLRQLESYPPPLKHLCRVAIRLYLQPWPVDVKVKALPLPDRLKWYLLSEHSGSVEDDI

SEQ ID NO: 856205 - protein, 385 aa, Homo sapiens
MPFLHGFRRIIFEYQPLVDAILGSLGIQDPERQESLDRPSYVASEESRILVLTELLERKAHSPFYQEGVSNALLKMAELGLTRAADVLLRHGANLNFEDPVTYYTALHIAVLRNQPDMVELLVHHGADVNRRDREKLLCSMLWPAATGCRSTILRTFVSYWKEGQTSRPPPKMGTQCSPASSSCLVRPWEGTEEEAQMINRFCFQVTRLLLAHGADPSECPAHESLTHICLKSFKLHFPLLRFLLESGAAYNCSLHGASCWSGFHIIFERLCSHPGCTEDESHADLLRKAETVLDLMVTNSQKLQLPENFDIHPVGSLAEKIQALHFSLRQLESYPPPLKHLCRVAIRLYLQPWPVDVKVKALPLPDRLKWYLLSEHSGSVEDDI

SEQ ID NO: 856206 - protein, 439 aa, Homo sapiens
GFMDLDESATDPLRGPAETPILHRYEGSRSFTIRWCKPYSKKVGIQDPERQESLDRPSYVASEESRILVLTELLERKAHSPFYQEGVSNALLKMAELGLTRAADVLLRHGANLNFEDPVTYYTALHIAVLRNQPDMVELLVHHGADVNRRDRIHESSPLDLASEEPERLPCLQRLLDLGADVNAADKHGKTALLHALASSDGVQIHNTENIRLLLEGGADVKATTKDGDTVFTCIIFLLGETVGGDKEEAQMINRFCFQVTRLLLAHGADPSECPAHESLTHICLKSFKLHFPLLRFLLESGAAYNCSLHGASCWSGFHIIFERLCSHPGCTEDESHADLLRKAETVLDLMVTNSQKLQLPENFDIHPVGSLAEKIQALHFSLRQLESYPPPLKHLCRVAIRLYLQPWPVDVKVKALPLPDRLKWYLLSEHSGSVEDDI

SEQ ID NO: 856207 - protein, 421 aa, Homo sapiens; identical to SEQ ID NO: 856204

SEQ ID NO: 856208 - protein, 189 aa, Homo sapiens
SVPVGVWASRPRQKARPPCCAGPAAMPFLHGFRRIIFEYQPLVDAILGSLGIQDPERQESLDRYSPPPVSWPRPLRPRSVPLYHHKPGGVDASPLTEEGTGGSRGCVARSARCPARIPLLPLAWRRRRAGRARGRRPAGCRRACASAPPCRLPVLCHPPAWQRSRVESVRPQMLPQSSVKVGFCSRVCV

SEQ ID NO: 856209 - protein, 1093 aa, Homo sapiens
MSWFNASQLSSFAKQALSQAQKSIDRVLDIQEEEPSIWAETIPYGEPGISSPVSGGWDTSTWGLKSNTEPQSPPIASPKAITKPVRRTVVDESENFFSAFLSPTDVQTIQKSPVVSKPPAKSQRPEEEVKSSLHESLHIGQSRTPETTESQVKDSSLCVSGETLAAGTSSPKTEGKHEETVNKESDMKVPTVSLKVSESVIDVKTTMESISNTSTQSLTAETKDIALEPKEQKHEDRQSNTPSPPVSTFSSGTSTTSDIEVLDHESVISESSASSRQETTDSKSSLHLMQTSFQLLSASACPEYNRLDDFQKLTESCCSSDAFERIDSFSVQSLDSRSVSEINSDDELSGKGYALVPIIVNSSTPKSKTVESAEGKSEEVNETLVIPTEEAEMEESGRSATPVNCEQPDILVSSTPINEGQTVLDKVAEQCEPAESQPEALSEKEDVCKTVEFLNEKLEKREAQLLSLSKEKALLEEAFDNLKDEMFRVKEESSSISSLKDEFTQRIAEAEKKVQLACKERDAAKKEIKNIKEELATRLNSSETADLLKEKDEQIRGLMEEGEKLSKQQLHNSNIIKKLRAKDKENENMVAKLNKKVKELEEELQHLKQVLDGKEEVEKQHRENIKKLNSMVERQEKDLGRLQVDMDELEEKNRSIQAALDSAYKELTDLHKANAAKDSEAQEAALSREMKAKEELSAALEKAQEEARQQQETLAIQVGDLRLALQRTEQAAARKEDYLRHEIGELQQRLQEAENRNQELSQSVSSTTRPLLRQIENLQATLGSQTSSWEKLEKNLSDRLGESQTLLAAAVERERAATEELLANKIQMSSMESQNSLLRQENSRFQAQLESEKNRLCKLEDENNRYQVELENLKDEYVRTLEETRKEKTLLNSQLEMERMKVEQERKKAIFTQETIKEKERKPFSVSSTPTMSRSSSISGVDMAGLQTSFLSQDESHDHSFGPMPISANGSNLYDAVRMGAGSSIIENLQSQLKLREGEITHLQLEIGNLEKTRSIMAEELVKLTNQNDELEEKVKEIPKLRTQLRDLDQRYNTILQMYGEKAEEAEELRLDLEDVKNMYKTQIDELLRQSLS

SEQ ID NO: 856210 - protein, 1093 aa, Homo sapiens; identical to SEQ ID NO: 856209

SEQ ID NO: 856211 - protein, 197 aa, Homo sapiens [sequence omitted]

SEQ ID NO: 856212 - protein, 1012 aa, Homo sapiens
MSWFNASQLSSFAKQALSQAQKSIDRVLDIQEEEPSIWAETIPYGEPGISSPVSGGWDTSTWGLKSNTEPQSPPIASPKAITKPVRRTVVDESENFFSAFLSPTDVQTIQKSPVVSKPPAKSQRPEEEVKSSLHESLHIGQSRTPETTESQVKDSSLCVSGETLAAGTSSPKTEGKHEETVNKESDMKVPTVSLKVSESVIDVKTTMESISNTSTQSLTAETKDIALEPKEQKHEDRQSNTPSPPVSTFSSGTSTTSDIEVLDHESVISESSASSRQETTDSKSSLHLMQTSFQLLSASACPEYNRLDDFQKLTESCCSSDAFERIDSFSVQSLDSRSVSEINSDDELSGKGYALVPIIVNSSTPKSKTVESAEGKSEEVNETLVIPTEEAEMEESGRSATPVNCEQPDILVSSTPINEGQTVLDKVAEQCEPAESQPEALSEKEDVCKTVEFLNEKLEKREAQLLSLSKEKALLEEAFDNLKDEMFRVKEESSSISSLKDEFTQRIAEAEKKVQLACKERDAAKKEIKNIKEELATRLNSSETADLLKEKDEQIRGLMEEGEKLSKQQLHNSNIIKKLRAKDKENENMVAKLNKKVKELEEELQHLKQVLDGKEEVEKQHRENIKKLNSMVERQEKDLGRLQVDMDELEEKNRSIQAALDSAYKELTDLHKANAAKDSEAQEAALSREMKAKEELSAALEKAQEEARQQQETLAIQVGDLRLALQRTEQAAARKEDYLRHEIGELQQRLQEAENRNQELSQSVSSTTRPLLRQIENLQATLGSQTSSWEKLEKNLSDRLGESQTLLAAAVERERAATEELLANKIQMSSMESQNSLLRQENSRFQAQLESEKNRLCKLEDENNRYQVELENLKDEYVRTLEETRKEKTLLNSQLEMERMKVEQERKKAIFTQETIKEKERKPFSVSSTPTMSRSSSISGVDMAGLQTSFLSQDESHDHSFGPMPISANGSNLYDAVRMGAGSSIIENLQSQLKLREGEITHLQVLEKLNLL

SEQ ID NO: 856213 - protein, 1012 aa, Homo sapiens; identical to SEQ ID NO: 856212

SEQ ID NO: 856214 - protein, 458 aa, Homo sapiens
MSWFNASQLSSFAKQALSQAQKSIDRVLDIQEEEPSIWAETIPYGEPGISSPVSGGWDTSTWGLKSNTEPQSPPIASPKAITKPVRRTVVDESENFFSAFLSPTDVQTIQKSPVVSKPPAKSQRPEEEVKSSLHESLHIGQSRTPETTESQVKDSSLCVSGETLAAGTSSPKTEGKHEETVNKESDMKVPTVSLKVSESVIDVKTTMESISNTSTQSLTAETKDIALEPKEQKHEDRQSNTPSPPVSTFSSGTSTTSDIEVLDHESVISESSASSRQETTDSKSSLHLMQTSFQLLSASACPEYNRLDDFQKLTESCCSSDAFERIDSFSVQSLDSRSVSEINSDDELSGKGYALVPIIVNSSTPKSKTVESAEGKSEEVNETLVIPTEEAEMEESGRSATPVNCEQPDILVSSTPINEGQTVLDKVAEQCEPAESQPEALSEKEDVCKVTLVSGRDF

SEQ ID NO: 856215 - protein, 1093 aa, Homo sapiens; identical to SEQ ID NO: 856209

SEQ ID NO: 856216 - protein, 1101 aa, Homo sapiens
FQGAADEAGEALEMSVEEAKRKISSLSFTLEEEEEGGVEEEEPSIWAETIPYGEPGISSPVSGGWDTSTWGLKSNTEPQSPPIASPKAITKPVRRTVVDESENFFSAFLSPTDVQTIQKSPVVSKPPAKSQRPEEEVKSSLHESLHIGQSRTPETTESQVKDSSLCVSGETLAAGTSSPKTEGKHEETVNKESDMKVPTVSLKVSESVIDVKTTMESISNTSTQSLTAETKDIALEPKEQKHEDRQSNTPSPPVSTFSSGTSTTSDIEVLDHESVISESSASSRQETTDSKSSLHLMQTSFQLLSASACPEYNRLDDFQKLTESCCSSDAFERIDSFSVQSLDSRSVSEINSDDELSGKGYALVPIIVNSSTPKSKTVESAEGKSEEVNETLVIPTEEAEMEESGRSATPVNCEQPDILVSSTPINEGQTVLDKVAEQCEPAESQPEALSEKEDVCKTVEFLNEKLEKREAQLLSLSKEKALLEEAFDNLKDEMFRVKEESSSISSLKDEFTQRIAEAEKKVQLACKERDAAKKEIKNIKEELATRLNSSETADLLKEKDEQIRGLMEEGEKLSKQQLHNSNIIKKLRAKDKENENMVAKLNKKVKELEEELQHLKQVLDGKEEVEKQHRENIKKLNSMVERQEKDLGRLQVDMDELEEKNRSIQAALDSAYKELTDLHKANAAKDSEAQEAALSREMKAKEELSAALEKAQEEARQQQETLAIQVGDLRLALQRTEQAAARKEDYLRHEIGELQQRLQEAENRNQELSQSVSSTTRPLLRQIENLQATLGSQTSSWEKLEKNLSDRLGESQTLLAAAVERERAATEELLANKIQMSSMESQNSLLRQENSRFQAQLESEKNRLCKLEDENNRYQVELENLKDEYVRTLEETRKEKTLLNSQLEMERMKVEQERKKAIFTQETIKEKERKPFSVSSTPTMSRSSSISGVDMAGLQTSFLSQDESHDHSFGPMPISANGSNLYDAVRMGAGSSIIENLQSQLKLREGEITHLQLEIGNLEKTRSIMAEELVKLTNQNDELEEKVKEIPKLRTQLRDLDQRYNTILQMYGEKAEEAEELRLDLEDVKNMYKTQIDELLRQSLS

SEQ ID NO: 856217 - protein, 1012 aa, Homo sapiens; identical to SEQ ID NO: 856212

SEQ ID NO: 856218 - protein, 1004 aa, Homo sapiens
MSWFNASQLSSFAKQALSQAQKSIDRVLDIQEEEPSIWAETIPYGEPGISSPVSGGWDTSTWGLKSNTEPQSPPIASPKAITKPVRRTVVDESENFFSAFLSPTDVQTIQKSPVVSKPPAKSQRPEEEVKSSLHESLHIGQSRTPETTESQVKDSSLCVSGETLAAGTSSPKTEGKHEETVNKESDMKVPTVSLKVSESVIDVKTTMESISNTSTQSLTAETKDIALEPKEQKHEDRQSNTPSPPVSTFSSGTSTTSDIEVLDHESVISESSASSRQETTDSKSSLHLMQTSFQLLSASACPEYNRLDDFQKLTESCCSSDAFERIDSFSVQSLDSRSVSEINSDDELSGKGYALVPIIVNSSTPKSKTVESAEGKSEEVNETLVIPTEEAEMEESGRSATPVNCEQPDILVSSTPINEGQTVLDKVAEQCEPAESQPEALSEKEDVCKTVEFLNEKLEKREAQLLSLSKEKALLEEAFDNLKDEMFRVKEESSSISSLKDEFTQRIAEAEKKVQLACKERDAAKKEIKNIKEELATRLNSSETADLLKEKDEQIRGLMEEGEKLSKQQLHNSNIIKKLRAKDKENENMVAKLNKKVKELEEELQHLKQVLDGKEEVEKQHRENIKKLNSMVERQEKDLGRLQVDMDELEEKNRSIQAALDSAYKELTDLHKANAAKDSEAQEAALSREMKAKEELSAALEKAQEEARQQQETLAIQVGDLRLALQRTEQAAARKEDYLRHEIGELQQRLQEAENRNQELSQSVSSTTRPLLRQIENLQATLGSQTSSWEKLEKNLSDRLGESQTLLAAAVERERAATEELLANKIQMSSMESQNSLLRQENSRFQAQLESEKNRLCKLEDENNRYQVELENLKDEYVRTLEETRKEKTLLNSQLEMERMKVEQERKKAIFTQETIKEKERKPFSVSSTPTMSRSSSISGVDMAGLQTSFLSQDESHDHSFGPMPISANGSNLYDAVRMGAGSSIIENLQSQLKLREGEITHLQ

SEQ ID NO: 856219 - protein, 74 aa, Homo sapiens
KKISNGFTGKICQIFKKQVISILDRIFQRRENGKRVVPHFMKLVYTSVPTFDKGSLKKENHRLISPMSRDLKNS

SEQ ID NO: 856220 - protein, 94 aa, Homo sapiens
CGRTRGSPPGPSLQVQLFIEILNRYIYFYEKENDAVTIQVLNQLIQKIREDLPNLESSEETEQINKHFHNTLEHLRLRRESPESEGPIYEGLIL

SEQ ID NO: 856221 - protein, 796 aa, Homo sapiens
MPTTQQSPQDEQEKLLDEAIQAVKVQSFQMKRCLDKNKLMDALKHASNMLGELRTSMLSPKSYYELYMAISDELHYLEVYLTDEFAKGRKVADLYELVQYAGNIIPRLYLLITVGVVYVKSFPQSRKDILKDLVEMCRGVQHPLRGLFLRNYLLQCTRNILPDEGEPTDEETTGDISDSMDFVLLNFAEMNKLWVRMQHQGHSRDREKRERERQELRILVGTNLVRLSQLEGVNVERYKQIVLTGILEQVVNCRDALAQEYLMECIIQVFPDEFHLQTLNPFLRACAELHQNVNVKNIIIALIDRLALFAHREDGPGIPADIKLFDIFSQQVATVIQSRQDMPSEDVVSLQVSLINLAMKCYPDRVDYVDKVLETTVEIFNKLNLEHIATSSAVSKELTRLLKIPVDTYNNILTVLKLKHFHPLFEYFDYESRKSMSCYVLSNVLDYNTEIVSQDQVDSIMNLVSTLIQDQPDQPVEDPDPEDFADEQSLVGRFIHLLRSEDPDQQYLILNTARKHFGAGGNQRIRFTLPPLVFAAYQLAFRYKENSKVDDKWEKKCQKIFSFAHQTISALIKAELAELPLRLFLQGALAAGEIGFENHETVAYEFMSQAFSLYEDEISDSKAQLAAITLIIGTFERMKCFSEENHEPLRTQCALAASKLLKKPDQGRAVSTCAHLFWSGRNTDKNGEELHGGKRVMECLKKALKIANQCMDPSLQVQLFIEILNRYIYFYEKENDAVTIQVLNQLIQKIREDLPNLESSEETEQINKHFHNTLEHLRLRRESPESEGPIYEGLIL

SEQ ID NO: 856222 - protein, 796 aa, Homo sapiens; identical to SEQ ID NO: 856221

SEQ ID NO: 856223 - protein, 776 aa, Homo sapiens
MPTTQQSPQDEQEKLLDEAIQAVKVQSFQMKRCLTKLMDALSYYELYMAISDELHYLEVYLTDEFAKGRKVADLYELVQYAGNIIPRLYLLITVGVVYVKSFPQSRKDILKDLVEMCRGVQHPLRGLFLRNYLLQCTRNILPDEGEPTDEETTGDISDSMDFVLLNFAEMNKLWVRMQHQGHSRDREKRERERQELRILVGTNLVRLSQLEGVNVERYKQIVLTGILEQVVNCRDALAQEYLMECIIQVFPDEFHLQTLNPFLRACAELHQNVNVKNIIIALIDRLALFAHREDGPGIPADIKLFDIFSQQVATVIQSRQDMPSEDVVSLQVSLINLAMKCYPDRVDYVDKVLETTVEIFNKLNLEHIATSSAVSKELTRLLKIPVDTYNNILTVLKLKHFHPLFEYFDYESRKSMSCYVLSNVLDYNTEIVSQDQVDSIMNLVSTLIQDQPDQPVEDPDPEDFADEQSLVGRFIHLLRSEDPDQQYLILNTARKHFGAGGNQRIRFTLPPLVFAAYQLAFRYKENSKVDDKWEKKCQKIFSFAHQTISALIKAELAELPLRLFLQGALAAGEIGFENHETVAYEFMSQAFSLYEDEISDSKAQLAAITLIIGTFERMKCFSEENHEPLRTQCALAASKLLKKPDQGRAVSTCAHLFWSGRNTDKNGEELHGGKRVMECLKKALKIANQCMDPSLQVQLFIEILNRYIYFYEKENDAVTIQVLNQLIQKIREDLPNLESSEETEQINKHFHNTLEHLRLRRESPESEGPIYEGLIL

SEQ ID NO: 856224 - protein, 534 aa, Homo sapiens
MECIIQVFPDEFHLQTLNPFLRACAELHQNVNVKNIIIALIDRLALFAHREDGPGIPADIKLFDIFSQQVATVIQSRQDMPSEDVVSLQVSLINLAMKCYPDRVDYVDKVLETTVEIFNKLNLEHIATSSAVSKELTRLLKIPVDTYNNILTVLKLKHFHPLFEYFDYESRKSMSCYVLSNVLDYNTEIVSQDQVDSIMNLVSTLIQDQPDQPVEDPDPEDFADEQSLVGRFIHLLRSEDPDQQYLILNTARKHFGAGGNQRIRFTLPPLVFAAYQLAFRYKENSKVDDKWEKKCQKIFSFAHQTISALIKAELAELPLRLFLQGALAAGEIGFENHETVAYEFMSQAFSLYEDEISDSKAQLAAITLIIGTFERMKCFSEENHEPLRTQCALAASKLLKKPDQGRAVSTCAHLFWSGRNTDKNGEELHGGKRVMECLKKALKIANQCMDPSLQVQLFIEILNRYIYFYEKENDAVTIQVLNQLIQKIREDLPNLESSEETEQINKHFHNTLEHLRLRRESPESEGPIYEGLIL

SEQ ID NO: 856225 - protein, 534 aa, Homo sapiens; identical to SEQ ID NO: 856224

SEQ ID NO: 856226 - protein, 796 aa, Homo sapiens; identical to SEQ ID NO: 856221

SEQ ID NO: 856227 - protein, 305 aa, Homo sapiens
MINQSLEIFFSLMLLGQILNTARKHFGAGGNQRIRFTLPPLVFAAYQLAFRYKENSKVDDKWEKKCQKIFSFAHQTISALIKAELAELPLRLFLQGALAAGEIGFENHETVAYEFMSQAFSLYEDEISDSKAQLAAITLIIGTFERMKCFSEENHEPLRTQCALAASKLLKKPDQGRAVSTCAHLFWSGRNTDKNGEELHGGKRVMECLKKALKIANQCMDPSLQVQLFIEILNRYIYFYEKENDAVTIQVLNQLIQKIREDLPNLESSEETEQINKHFHNTLEHLRLRRESPESEGPIYEGLIL

SEQ ID NO: 856228 - protein, 559 aa, Homo sapiens
MPTTQQSPQDEQEKLLDEAIQAVKVQSFQMKRCLDKNKLMDALKHASNMLGELRTSMLSPKSYYELYMAISDELHYLEVYLTDEFAKGRKVADLYELVQYAGNIIPRLYLLITVGVVYVKSFPQSRKDILKDLVEMCRGVQHPLRGLFLRNYLLQCTRNILPDEGEPTDEETTGDISDSMDFVLLNFAEMNKLWVRMQHQGHSRDREKRERERQELRILVGTNLVRLSQLEGVNVERYKQIVLTGILEQVVNCRDALAQEYLMECIIQVFPDEFHLQTLNPFLRACAELHQNVNVKNIIIALIDRLALFAHREDGPGIPADIKLFDIFSQQVATVIQSRQDMPSEDVVSLQVSLINLAMKCYPDRVDYVDKVLETTVEIFNKLNLEHIATSSAVSKELTRLLKIPVDTYNNILTVLKLKHFHPLFEYFDYESRKSMSCYVLSNVLDYNTEIVSQDQVDSIMNLVSTLIQDQPDQPVEDPDPEDFADEQSLVGRFIHLLRSEDPDQQYLILNTARKHFGAGGNQRIRFTLPPLVFAAYQLAFRYKENSKVDSISGGDPLG

SEQ ID NO: 856229 - protein, 140 aa, Homo sapiens
MQFVFLPVPDRDVHRCSQLGPVSGRNTDKNGEELHGGKRVMECLKKALKIANQCMDPSLQVQLFIEILNRYIYFYEKENDAVTIQVLNQLIQKIREDLPNLESSEETEQINKHFHNTLEHLRLRRESPESEGPIYEGLIL

SEQ ID NO: 856230 - protein, 796 aa, Homo sapiens; identical to SEQ ID NO: 856221

SEQ ID NO: 856231 - protein, 796 aa, Homo sapiens; identical to SEQ ID NO: 856221

SEQ ID NO: 856232 - protein, 767 aa, Homo sapiens
MKRCLDKNKLMDALKHASNMLGELRTSMLSPKSYYELYMAISDELHYLEVYLTDEFAKGRKVADLYELVQYAGNIIPRLYLLITVGVVYVKSFPQSRKDILKDLVEMCRGVQHPLRGLFLRNYLLQCTRNILPDEGEPTDEETTGDISDSMDFVLLNFAEMNKLWVRMQHQGHSRDREKRERERQELRILVGTNLVRLSQLEGVNVERYKQIVLTGILEQVVNCRDALAQEYLMECIIQVFPDEFHLQTLNPFLRACAELHQNVNVKNIIIALIDRLALFAHREDGPGIPADIKLFDIFSQQVATVIQSRQDMPSEDVVSLQVSLINLAMKCYPDRVDYVDKVLETTVEIFNKLNLEHIATSSAVSKELTRLLKIPVDTYNNILTVLKLKHFHPLFEYFDYESRKSMSCYVLSNVLDYNTEIVSQDQVDSIMNLVSTLIQDQPDQPVEDPDPEDFADEQSLVGRFIHLLRSEDPDQQYLILNTARKHFGAGGNQRIRFTLPPLVFAAYQLAFRYKENSKVDDKWEKKCQKIFSFAHQTISALIKAELAELPLRLFLQGALAAGEIGFENHETVAYEFMSQAFSLYEDEISDSKAQLAAITLIIGTFERMKCFSEENHEPLRTQCALAASKLLKKPDQGRAVSTCAHLFWSGRNTDKNGEELHGGKRVMECLKKALKIANQCMDPSLQVQLFIEILNRYIYFYEKENDAVTIQVLNQLIQKIREDLPNLESSEETEQINKHFHNTLEHLRLRRESPESEGPIYEGLIL

SEQ ID NO: 856233 - protein, 534 aa, Homo sapiens; identical to SEQ ID NO: 856224

SEQ ID NO: 856234 - protein, 519 aa, Homo sapiens
ELHQNDYVLHIYILVYTVKNIIIALIDRLALFAHREDGPGIPADIKLFDIFSQQVATVIQSRQDMPSEDVVSLQVSLINLAMKCYPDRVDYVDKVLETTVEIFNKLNLEHIATSSAVSKELTRLLKIPVDTYNNILTVLKLKHFHPLFEYFDYESRKSMSCYVLSNVLDYNTEIVSQDQVDSIMNLVSTLIQDQPDQPVEDPDPEDFADEQSLVGRFIHLLRSEDPDQQYLILNTARKHFGAGGNQRIRFTLPPLVFAAYQLAFRYKENSKVDDKWEKKCQKIFSFAHQTISALIKAELAELPLRLFLQGALAAGEIGFENHETVAYEFMSQAFSLYEDEISDSKAQLAAITLIIGTFERMKCFSEENHEPLRTQCALAASKLLKKPDQGRAVSTCAHLFWSGRNTDKNGEELHGGKRVMECLKKALKIANQCMDPSLQVQLFIEILNRYIYFYEKENDAVTIQVLNQLIQKIREDLPNLESSEETEQINKHFHNTLEHLRLRRESPESEGPIYEGLIL

SEQ ID NO: 856235 - protein, 517 aa, Homo sapiens
MPTTQQSPQDEQEKLLDEAIQAVKVQSFQMKRCLDKNKLMDALKHASNMLGELRTSMLSPKSYYELYMAISDELHYLEVYLTDEFAKGRKVADLYELVQYAGNIIPRLIATSSAVSKELTRLLKIPVDTYNNILTVLKLKHFHPLFEYFDYESRKSMSCYVLSNVLDYNTEIVSQDQVDSIMNLVSTLIQDQPDQPVEDPDPEDFADEQSLVGRFIHLLRSEDPDQQYLILNTARKHFGAGGNQRIRFTLPPLVFAAYQLAFRYKENSKVDDKWEKKCQKIFSFAHQTISALIKAELAELPLRLFLQGALAAGEIGFENHETVAYEFMSQAFSLYEDEISDSKAQLAAITLIIGTFERMKCFSEENHEPLRTQCALAASKLLKKPDQGRAVSTCAHLFWSGRNTDKNGEELHGGKRVMECLKKALKIANQCMDPSLQVQLFIEILNRYIYFYEKENDAVTIQVLNQLIQKIREDLPNLESSEETEQINKHFHNTLEHLRLRRESPESEGPIYEGLIL

SEQ ID NO: 856236 - protein, 571 aa, Homo sapiens
MPTTQQSPQDEQEKLLDEAIQAVKVQSFQMKRCLDKNKLMDALKHASNMLGELRTSMLSPKSYYELYMAISDELHYLEVYLTDEFAKGRKVADLYELVQYAGNIIPRLYLLITVGVVYVKSFPQSRKDILKDLVEMCRGVQHPLRGLFLRNYLLQCTRNILPDEGEPTDEETTGDISDSMDFVLLNFAEMNKLWVRMQHQGHSRDREKRERERQELRILVGTNLVRLSQLEGVNVERYKQIVLTGILEQVVNCRDALAQEYLMECIIQVFPDEFHLQTLNPFLRACAELHQNVNVKNIIIALIDRLALFAHREDGPGIPADIKLFDIFSQQVATVIQSRQDMPSEDVVSLQVSLINLAMKCYPDRVDYVDKVLETTVEIFNKLNLEHIATSSAVSKELTRLLKIPVDTYNNILTVLKLKHFHPLFEYFDYESRKSMSCYVLSNVLDYNTEIVSQDQVDSIMNLVSTLIQDQPDQPVEDPDPEDFADEQSLVGRFIHLLRSEDPDQQYLILNTARKHFGAGGNQRIRFTLPPLVFAAYQLAFRYKENSKVDSIWGFHLGIPFGDSIWGDSIW

SEQ ID NO: 856237 - protein, 462 aa, Homo sapiens
MPTTQQSPQDEQEKLLDEAIQAVKVQSFQMKRCLDKNKLMDALKHASNMLGELRTSMLSPKSYYELYMAISDELHYLEVYLTDEFAKGRKVADLYELVQYAGNIIPRLYLLITVGVVYVKSFPQSRKDILKDLVEMCRGVQHPLRGLFLRNYLLQCTRNILPDEGEPTDEETTGDISDSMDFVLLNFAEMNKLWVRMQHQGHSRDREKRERERQELRILVGTNLVRLSQLEGVNVERYKQIVLTGILEQVVNCRDALAQEYLMECIIQVFPDEFHLQTLNPFLRACAELHQNVNVKNIIIALIDRLALFAHREDGPGIPADIKLFDIFSQQVATVIQSRQDMPSEDVVSLQVSLINLAMKCYPDRVDYVDKVLETTVEIFNKLNLEHIATSSAVSKELTRLLKIPVDTYNNILTVLKLKHFHPLFEYFDYESRKSMSCYVLSNVLDYNTEIVSQDQVREYLR

SEQ ID NO: 856238 - protein, 99 aa, Homo sapiens
LLLSPLPQEGPGSLAAGESSSLSASTSVSDSSQKKEEHNYSLFVSDNLGEQPTKCSPEEDEEDEEDVDDEDHDEGFGSEHYIIIKWYFLKLLGDSETPS

SEQ ID NO: 856239 - protein, 308 aa, Homo sapiens
MDPPFGDAFRSHTFSEQTLMSTDLLANSSDPDFMYELHDEGFGSEHELSENEEEEEEEEDYEDDKDDDISDTFSEPGYENDSVEDLKEVTSISSRKRGKRRYFWEYSEQLTPSQQERMLRPSEWNRDTLPSNMYQKNGLHHGKYAVKKSRRTDVEDLTPNPKKLLQIGNELRKLNKVISDLTPVSELPLTARPRSRKEKNKLASRACRLKKKAQYEANKVKLWGLNTEYDNLLFVINSIKQEIVNRVQNPRDERGPNMGQKLEILIKDTLGLPVAGQTSEFVNQVLEKTAEGNPTGGLVGLRIPTSKV

SEQ ID NO: 856240 - protein, 342 aa, Homo sapiens
LLLSPLPQEGPGSLAAGESSSLSASTSVSDSSQKKEEHNYSLFVSDNLGEQPTKCSPEEDEEDEEDVDDEDHDEGFGSEHELSENEEEEEEEEDYEDDKDDDISDTFSEPGYENDSVEDLKEVTSISSRKRGKRRYFWEYSEQLTPSQQERMLRPSEWNRDTLPSNMYQKNGLHHGKYAVKKSRRTDVEDLTPNPKKLLQIGNELRKLNKVISDLTPVSELPLTARPRSRKEKNKLASRACRLKKKAQYEANKVKLWGLNTEYDNLLFVINSIKQEIVNRVQNPRDERGPNMGQKLEILIKDTLGLPVAGQTSEFVNQVLEKTAEGNPTGGLVGLRIPTSKV

SEQ ID NO: 856241 - protein, 209 aa, Homo sapiens
MNYQQNPRDNFLSLEDCKDIENLESFTDVLDNEGALTSNWEQWDTYCEDLTKYTKLTSCDIWGTKEVDYLGLDDFSSPYQDEEVISKTPTLAQLNSEDSQSVSDSLYYPDSLFSVKQNPLPSSFPGKKITSRAAAPVCSSKTLQAEVPLSDCVQKASKPTSSTQIMVKTNMYHNEKVNFHVECKDYVKKAKVKINPVQQSRPLLSQIHT

SEQ ID NO: 856242 - protein, 342 aa, Homo sapiens; identical to SEQ ID NO: 856240

SEQ ID NO: 856243 - protein, 342 aa, Homo sapiens; identical to SEQ ID NO: 856240

SEQ ID NO: 856244 - protein, 293 aa, Homo sapiens
MCFSATTDLGRGAVGNVSVLGRMRTLQLGRWLGPRNVSAFLSACPAQAPPLGPRPTARERARSRAGGGGWGRIAGEITRRGSRARPRPGPQCPPGRPGTAMIKAILIFNNHGKPRLSKFYQPYSEDTQQQIIRETFHLVSKRDENVCNFLEGGLLIGGSDNKLIYRHYATLYFVFCVDSSESELGILDLIQVFVETLDKCFENVCELDLIFHVDKVHNILAEMVMGGMVLETNMNEIVTQIDAQNKLEKSEAGLAGAPARAVSAVKNMNLPEIPRNINIGDISIKVPNLPSFK

SEQ ID NO: 856245 - protein, 171 aa, Homo sapiens
MSEDTQQQIIRETFHLVSKRDENVCNFLEGGLLIGGSDNKLIYRHYATLYFVFCVDSSESELGILDLIQVFVETLDKCFENVCELDLIFHVDKVHNILAEMVMGGMVLETNMNEIVTQIDAQNKLEKSEAGLAGAPARAVSAVKNMNLPEIPRNINIGDISIKVPNLPSFK

SEQ ID NO: 856246 - protein, 159 aa, Homo sapiens
MCFSATTDLGRGAVGNVSVLGRMRTLQLGRWLGPRNVSAFLSACPAQAPPLGPRPTARERARSRAGGGGWGRIAGEITRRGSRARPRPGPQCPPGRPGTAMIKAILIFNNHGKPRLSKFYQPYSEDTQQQIIRETFHLVSKRDENVCNFLEGGLYLWKH

SEQ ID NO: 856247 - protein, 262 aa, Homo sapiens
MCFSATTDLGRGAVGNVSVLGRMRTLQLGRWLGPRNVSAFLSACPAQAPPLGPRPTARERARSRAGGGGWGRIAGEITRRGSRARPRPGPQCPPGRPGTAMIKAILIFNNHGKPRLSKFYQPYSEDTQQQIIRETFHLVSKRDENVCNFLEGGLLIGGSDNKLIYRHYATLYFVFCVDSSESELGILDLIQVFVETLDKCFENVCELDLIFHVDKVHNILAEMVMGGMVLETNMNEIVTQIDAQNKLEKSETFIFQSPRQDR

SEQ ID NO: 856248 - protein, 293 aa, Homo sapiens; identical to SEQ ID NO: 856244

SEQ ID NO: 856249 - protein, 293 aa, Homo sapiens; identical to SEQ ID NO: 856244

SEQ ID NO: 856250 - protein, 262 aa, Homo sapiens; identical to SEQ ID NO: 856247

SEQ ID NO: 856251 - protein, 181 aa, Homo sapiens
MKQLPAATVRLLSSSQIITSVVSVVKELIENSLDAGATSVDVKLENYGFDKIEVRDNGEGIKAVDAPVMAMKYYTSKINSHEDLENLTTYGFRGEALGSICCIAEVLITTRTAADNFSTQYVLDGSGHILSQKPSHLGQGKKVALYTNILYLFCLNCWFKKKKLLGEYKYIALGLVLIKAS

SEQ ID NO: 856252 - protein, 932 aa, Homo sapiens
MKQLPAATVRLLSSSQIITSVVSVVKELIENSLDAGATSVDVKLENYGFDKIEVRDNGEGIKAVDAPVMAMKYYTSKINSHEDLENLTTYGFRGEALGSICCIAEVLITTRTAADNFSTQYVLDGSGHILSQKPSHLGQGTTVTALRLFKNLPVRKQFYSTAKKCKDEIKKIQDLLMSFGILKPDLRIVFVHNKAVIWQKSRVSDHKMALMSVLGTAVMNNMESFQYHSEESQIYLSGFLPKCDADHSFTSLSTPERSFIFINSRPVHQKDILKLIRHHYNLKCLKESTRLYPVFFLKIDVPTADVDVNLTPDKSQVLLQNKESVLIALENLMTTCYGPLPSTNSYENNKTDVSAADIVLSKTAETDVLFNKVESSGKNYSNVDTSVIPFQNDMHNDESGKNTDDDLNHQISIGDFGYGHCSSEISNIDKNTKNAFQDISMSNVSWENSQTEYSKTCFISSVKHTQSENGNKDHIDESGENEEEAGLENSSEISADEWSRGNILKNSVGENIEPVKILVPEKSLPCKVSNNNYPIPEQMNLNEDSCNKKSNVIDNKSGKVTAYDLLSNRVIKKPMSASALFVQDHRPQFLIENPKTSLEDATLQIEELWKTLSEEEKLKYEEKATKDLERYNSQMKRAIEQESQMSLKDGRKKIKPTSAWNLAQKHKLKTSLSNQPKLDELLQSQIEKRRSQNIKMVQIPFSMKNLKINFKKQNKVDLEEKDEPCLIHNLRFPDAWLMTSKTEVMLLNPYRVEEALLFKRLLENHKLPAEPLEKPIMLTESLFNGSHYLDVLYKMTADDQRYSGSTYLSDPRLTANGFKIKLIPGVSITENYLEIEGMANCLPFYGVADLKEILNAILNRNAKEVYECRPRKVISYLEGEAVRLSRQLPMYLSKEDIQDIIYRMKHQFGNEIKECVHGRPFFHHLTYLPETT

SEQ ID NO: 856253 - protein, 961 aa, Homo sapiens
MKQLPAATVRLLSSSQIITSVVSVVKELIENSLDAGATSVDVKLENYGFDKIEVRDNGEGIKAVDAPVMAMKYYTSKINSHEDLENLTTYGFRGEALGSICCIAEVLITTRTAADNFSTQYVLDGSGHILSQKPSHLGQGTTVTALRLFKNLPVRKQFYSTAKKCKDEIKKIQDLLMSFGILKPDLRIVFVHNKAVIWQKSRVSDHKMALMSVLGTAVMNNMESFQYHSEESQIYLSGFLPKCDADHSFTSLSTPERSFIFINSRPVHQKDILKLIRHHYNLKCLKESTRLYPVFFLKIDVPTADVDVNLTPDKSQVLLQNKESVLIALENLMTTCYGPLPSTNSYENNKTDVSAADIVLSKTAETDVLFNKVESSGKNYSNVDTSVIPFQNDMHNDESGKNTDDDLNHQISIGDFGYGHCSSEISNIDKNTKNAFQDISMSNVSWENSQTEYSKTCFISSVKHTQSENGNKDHIDESGENEEEAGLENSSEISADEWSRGNILKNSVGENIEPVKILVPEKSLPCKVSNNNYPIPEQMNLNEDSCNKKSNVIDNKSGKVTAYDLLSNRVIKKPMSASALFVQDHRPQFLIENPKTSLEDATLQIEELWKTLSEEEKLKTLNINTKYYVLVINPAENESEIIPPIIYRYEEKATKDLERYNSQMKRAIEQESQMSLKDGRKKIKPTSAWNLAQKHKLKTSLSNQPKLDELLQSQIEKRRSQNIKMVQIPFSMKNLKINFKKQNKVDLEEKDEPCLIHNLRFPDAWLMTSKTEVMLLNPYRVEEALLFKRLLENHKLPAEPLEKPIMLTESLFNGSHYLDVLYKMTADDQRYSGSTYLSDPRLTANGFKIKLIPGVSITENYLEIEGMANCLPFYGVADLKEILNAILNRNAKEVYECRPRKVISYLEGEAVRLSRQLPMYLSKEDIQDIIYRMKHQFGNEIKECVHGRPFFHHLTYLPETT

SEQ ID NO: 856254 - protein, 893 aa, Homo sapiens
MKQLPAATVRLLSSSQIITSVVSVVKELIENSLDAGATSVDVKLENYGFDKIEVRDNGEGIKAVDAPVMAMKYYTSKINSHEDLENLTTYGFRGEALGSICCIAEVLITTRTAADNFSTQYVLDGSGHILSQKPSHLGQGTTVTALRLFKNLPVRKQFYSTAKKCKDEIKKIQDLLMSFGILKPDLRIVFVHNKIYLSGFLPKCDADHSFTSLSTPERSFIFINSRPVHQKDILKLIRHHYNLKCLKESTRLYPVFFLKIDVPTADVDVNLTPDKSQVLLQNKESVLIALENLMTTCYGPLPSTNSYENNKTDVSAADIVLSKTAETDVLFNKVESSGKNYSNVDTSVIPFQNDMHNDESGKNTDDDLNHQISIGDFGYGHCSSEISNIDKNTKNAFQDISMSNVSWENSQTEYSKTCFISSVKHTQSENGNKDHIDESGENEEEAGLENSSEISADEWSRGNILKNSVGENIEPVKILVPEKSLPCKVSNNNYPIPEQMNLNEDSCNKKSNVIDNKSGKVTAYDLLSNRVIKKPMSASALFVQDHRPQFLIENPKTSLEDATLQIEELWKTLSEEEKLKYEEKATKDLERYNSQMKRAIEQESQMSLKDGRKKIKPTSAWNLAQKHKLKTSLSNQPKLDELLQSQIEKRRSQNIKMVQIPFSMKNLKINFKKQNKVDLEEKDEPCLIHNLRFPDAWLMTSKTEVMLLNPYRVEEALLFKRLLENHKLPAEPLEKPIMLTESLFNGSHYLDVLYKMTADDQRYSGSTYLSDPRLTANGFKIKLIPGVSITENYLEIEGMANCLPFYGVADLKEILNAILNRNAKEVYECRPRKVISYLEGEAVRLSRQLPMYLSKEDIQDIIYRMKHQFGNEIKECVHGRPFFHHLTYLPETT

SEQ ID NO: 856255 - protein, 932 aa, Homo sapiens; identical to SEQ ID NO: 856252

SEQ ID NO: 856256 - protein, 932 aa, Homo sapiens; identical to SEQ ID NO: 856252

SEQ ID NO: 856257 - protein, 932 aa, Homo sapiens; identical to SEQ ID NO: 856252

SEQ ID NO: 856258 - protein, 320 aa, Homo sapiens
MILNSLRYEEKATKDLERYNSQMKRAIEQESQMSLKDGRKKIKPTSAWNLAQKHKLKTSLSNQPKLDELLQSQIEKRRSQNIKMVQIPFSMKNLKINFKKQNKVDLEEKDEPCLIHNLRFPDAWLMTSKTEVMLLNPYRVEEALLFKRLLENHKLPAEPLEKPIMLTESLFNGSHYLDVLYKMTADDQRYSGSTYLSDPRLTANGFKIKLIPGVSITENYLEIEGMANCLPFYGVADLKEILNAILNRNAKEVYECRPRKVISYLEGEAVRLSRQLPMYLSKEDIQDIIYRMKHQFGNEIKECVHGRPFFHHLTYLPETT

SEQ ID NO: 856259 - protein, 623 aa, Homo sapiens
MKQLPAATVRLLSSSQIITSVVSVVKELIENSLDAGATSVDVKLENYGFDKIEVRDNGEGIKAVDAPVMAMKYYTSKINSHEDLENLTTYGFRGEALGSICCIAEVLITTRTAADNFSTQYVLDGSGHILSQKPSHLGQGTTVTALRLFKNLPVRKQFYSTAKKCKDEIKKIQDLLMSFGILKPDLRIVFVHNKAVIWQKSRVSDHKMALMSVLGTAVMNNMESFQYHSEESQIYLSGFLPKCDADHSFTSLSTPERSFIFINSRPVHQKDILKLIRHHYNLKCLKESTRLYPVFFLKIDVPTADVDVNLTPDKSQVLLQNKESVLIALENLMTTCYGPLPSTNSYENNKTDVSAADIVLSKTAETDVLFNKVESSGKNYSNVDTSVIPFQNDMHNDESGKNTDDDLNHQISIGDFGYGHCSSEISNIDKNTKNAFQDISMSNVSWENSQTEYSKTCFISSVKHTQSENGNKDHIDESGENEEEAGLENSSEISADEWSRGNILKNSVGENIEPVKILVPEKSLPCKVSNNNYPIPEQMNLNEDSCNKKSNVIDNKSGKVTAYDLLSNRVIKKPMSASALFVQDHRPQFLIENPKTSLEDATLQIEELWKTLSEEEKLKSFNY

SEQ ID NO: 856260 - protein, 138 aa, Homo sapiens [sequence omitted]

SEQ ID NO: 856261 - protein, 126 aa, Homo sapiens
  misc_feature (11)..(13): Xaa can be any naturally occurring amino acid
AAPPGRRPVFXXXSVDTPRVSITENYLEIEGMANCLPFYGVADLKEILNAILNRNAKEVYECRPRKVISYLEGEAVRLSRQLPMYLSKEDIQDIIYRMKHQFGNEIKECVHGRPFFHHLTYLPETT

SEQ ID NO: 856262 - protein, 932 aa, Homo sapiens; identical to SEQ ID NO: 856252

SEQ ID NO: 856263 - protein, 932 aa, Homo sapiens; identical to SEQ ID NO: 856252

SEQ ID NO: 856264 - protein, 747 aa, Homo sapiens
MQRKAARLIAVIWQKSRVSDHKMALMSVLGTAVMNNMESFQYHSEESQIYLSGFLPKCDADHSFTSLSTPERSFIFINSRPVHQKDILKLIRHHYNLKCLKESTRLYPVFFLKIDVPTADVDVNLTPDKSQVLLQNKESVLIALENLMTTCYGPLPSTNSYENNKTDVSAADIVLSKTAETDVLFNKVESSGKNYSNVDTSVIPFQNDMHNDESGKNTDDVVNHQISIGDFGYGHCSSEISNIDKNTKNAFQDISMSNVSWENSQTEYSKTCFISSVKHTQSENGNKDHIDESGENEEEAGLENSSEISADEWSRGNILKNSVGENIEPVKILVPEKSLPCKVSNNNYPIPEQMNLNEDSCNKKSNVIDNKSGKVTAYDLLSNRVIKKPMSASALFVQDHRPQFLIENPKTSLEDATLQIEELWKTLSEEEKLKYEEKATKDLERYNSQMKRAIEQESQMSLKDGRKKIKPTSAWNLAQKHKLKTSLSNQPKLDELLQSQIEKRRSQNIKMVQIPFSMKNLKINFKKQNKVDLEEKDEPCLIHNLRFPDAWLMTSKTEVMLLNPYRVEEALLFKRLLENHKLPAEPLEKPIMLTESLFNGSHYLDVLYKMTADDQRYSGSTYLSDPRLTANGFKIKLIPGVSITENYLEIEGMANCLPFYGVADLKEILNAILNRNAKEVYECRPRKVISYLEGEAVRLSRQLPMYLSKEDIQDIIYRMKHQFGNEIKECVHGRPFFHHLTYLPETT

SEQ ID NO: 856265 - protein, 785 aa, Homo sapiens
MKQLPAATVRLLSSSQIITSVVSVVKELIENSLDAGATSVDVKLENYGFDKIEVRDNGEGIKAVDAPVMAMKYYTSKINSHEDLENLTTYGFRGEALGSICCIAEVLITTRTAADNFSTQYVLDGSGHILSQKPSHLGQGTTVTALRLFKNLPVRKQFYSTAKKCKDEIKKIQDLLMSFGILKPDLRIVFVHNKAVIWQKSRVSDHKMALMSVLGTAVMNNMESFQYHSEESQIYLSGFLPKCDADHSFTSLSTPERSFIFINSRPVHQKDILKLIRHHYNLKCLKESTRLYPVFFLKIDVPTADVDVNLTPDKSQVLLQNKESVLIALENLMTTCYGPLPSTNSYENNKTDVSAADIVLSKTAETDVLFNKVESSGKNYSNVDTSVIPFQNDMHNDESGKNTDDDLNHQISIGDFGYGHCSSEISNIDKNTKNAFQDISMSNVSWENSQTEYSKTCFISSVKHTQSENGNKDHIDESGENEEEAGLENSSEISADEWSRGNILKNSVGENIEPVKILVPEKSLPCKVSNNNYPIPEQMNLNEDSCNKKSNVIDNKSGKVTAYDLLSNRVIKKPMSASALFVQDHRPQFLIENPKTSLEDATLQIEELWKTLSEEEKLKYEEKATKDLERYNSQMKRAIEQESQMSLKDGRKKIKPTSAWNLAQKHKLKTSLSNQPKLDELLQSQIEKRRSQNIKMVQIPFSMKNLKINFKKQNKVDLEEKDEPCLIHNLRFPDAWLMTSKTEVMLLNPYRVEEALLFKRLLENHKLPAEPLEKPIMLTERSFNY

SEQ ID NO: 856266 - protein, 298 aa, Homo sapiens
MKRAIEQESQMSLKDGRKKIKPTSAWNLAQKHKLKTSLSNQPKLDELLQSQIEKRRSQNIKMVQIPFSMKNLKINFKKQNKVDLEEKDEPCLIHNLRFPDAWLMTSKTEVMLLNPYRVEEALLFKRLLENHKLPAEPLEKPIMLTESLFNGSHYLDVLYKMTADDQRYSGSTYLSDPRLTANGFKIKLIPGVSITENYLEIEGMANCLPFYGVADLKEILNAILNRNAKEVYECRPRKVISYLEGEAVRLSRQLPMYLSKEDIQDIIYRMKHQFGNEIKECVHGRPFFHHLTYLPETT

SEQ ID NO: 856267 - protein, 133 aa, Homo sapiens
MILNSLRYEEKATKDLERYNSQMKRAIEQESQMSLKDGRKKIKPTSAWNLAQKHKLKTSLSNQPKLDELLQSQIEKRRSQNIKMVQIPFSMKNLKINFKKQNKVDLEEKDEPCLIHNLRFPDAWLMTSKTESF

SEQ ID NO: 856268 - protein, 2812 aa, Homo sapiens
MKLNPQQAPLYGDCVVTVLLAEEDKAEDDVVFYLVFLGSTLRHCTSTRKVSSDTLETIAPGHDCCETVKVQLCASKEGLPVFVVAEEDFHFVQDEAYDAAQFLATSAGNQQALNFTRFLDQSGPPSGDVNSLDKKLVLAFRHLKLPTEWNVLGTDQSLHDAGPRETLMHFAVRLGLLRLTWFLLQKPGGRGALSIHNQEGATPVSLALERGYHKLHQLLTEENAGEPDSWSSLSYEIPYGDCSVRHHRELDIYTLTSESDSHHEHPFPGDGCTGPIFKLMNIQQQLMKTNLKQMDSLMPLMMTAQDPSSAPETDGQFLPCAPEPTDPQRLSSSEETESTQCCPGSPVAQTESPCDLSSIVEEENTDRSCRKKNKGVERKGEEVEPAPIVDSGTVSDQDSCLQSLPDCGVKGTEGLSSCGNRNEETGTKSSGMPTDQESLSSGDAVLQRDLVMEPGTAQYSSGGELGGISTTNVSTPDTAGEMEHGLMNPDATVWKNVLQGGESTKERFENSNIGTAGASDVHVTSKPVDKISVPNCAPAASSLDGNKPAESSLAFSNEETSTEKTAETETSRSREESADAPVDQNSVVIPAAAKDKISDGLEPYTLLAAGIGEAMSPSDLALLGLEEDVMPHQNSETNSSHAQSQKGKSSPICSTTGDDKLCADSACQQNTVTSSGDLVAKLCDNIVSESESTTARQPSSQDPPDASHCEDPQAHTVTSDPVRDTQERADFCPFKVVDNKGQRKDVKLDKPLTNMLEVVSHPHPVVPKMEKELVPDQAVISDSTFSLANSPGSESVTKDDALSFVPSQKEKGTATPELHTATDYRDGPDGNSNEPDTRPLEDRAAGLSTSSTAAELQHGMGNTSLTGLGGEHEGPAPPAIPEALNIKGNTDSSLQSMGKATLALDSVLTEEGKLLVVSESSAAQEQDKDKAVTCSSIKENALSSGTLQEEQRTPPPGQDTQQFHEKSISADCAKDKALQLSNSPGASSAFLKAETEHNKEVAPQVSLLTQGGAAQSLVPPGASLATESRQEALGAEHNSSALLPCLLPDGSDGSDALNCSQASPLDVGVKNTQSQGKTSACEVSGNVTVDVTGVNALQGMAEPRRENISHNTQDILIPNVLLSQEKNAVLGLPVALQDKAVTDPQGVGTPEMIPLDWEKGKLEGADHSCTMGDAEEAQIDDEAHPVLLQPVAKELPTDMELSAHDDGAPAGVREVTRAPPSGRERSTPSLPCMVSAQDAPLPKGADLIEEAASRIVDAVIEQVKAAGALLTEGEACHMSLSSPELGPLTKGLESAFTEKVSTFPPGESLPMGSTPEEATGSLAGCFAGREEPEKIILPVQGPEPAAEMPDVKAEDEVDFRASSISEEVAVGSIAATLKMKQGPMTQAINRENWCTIEPCPDAASLLASKQSPECENFLDVGLGRECTSKQGVLKRESGSDSDLFHSPSDDMDSIIFPKPEEEHLACDITGSSSSTDDTASLDRHSSHGSDVSLSQILKPNRSRDRQSLDGFYSHGMGAEGRESESEPADPGDVEEEEMDSITEVPANCSVLRSSMRSLSPFRRHSWGPGKNAASDAEMNHRSSMRVLGDVVRRPPIHRRSFSLEGLTGGAGVGNKPSSSLEVSSANAEELRHPFSGEERVDSLVSLSEEDLESDQREHRMFDQQICHRSKQQGFNYCTSAISSPLTKSISLMTISHPGLDNSRPFHSTFHNTSANLTESITEENYNFLPHSPSKKDSEWKSGTKVSRTFSYIKNKMSSSKKSKEKEKEKDKIKEKEKDSKDKEKDKKTVNGHTFSSIPVVGPISCSQCMKPFTNKDAYTCANCSAFVHKGCRESLASCAKVKMKQPKGSLQAHDTSSLPTVIMRNKPSQPKERPRSAVLLVDETATTPIFANRRSQQSVSLSKSVSIQNITGVGNDENMSNTWKFLSHSTDSLNKISKVNESTESLTDEEGTDMNEGQLLGDFEIESKQLEAESWSRIIDSKFLKQQKKDVVKRQEVIYELMQTEFHHVRTLKIMSGVYSQGMMADLLFEQQMVEKLFPCLDELISIHSQFFQRILERKKESLVDKSEKNFLIKRIGDVLVNQFSGENAERLKKTYGKFCGQHNQSVNYFKDLYAKDKRFQAFVKKKMSSSVVRRLGIPECILLVTQRITKYPVLFQRILQCTKDNEVEQEDLAQSLSLVKDVIGAVDSKVASYEKKVRLNEIYTKTDSKSIMRMKSGQMFAKEDLKRKKLVRDGSVFLKNAAGRLKEVQAVLLTDILVFLQEKDQKYIFASLDQKSTVISLKKLIVREVAHEEKGLFLISMGMTDPEMVEVHASSKEERNSWIQIIQDTINTLNRDEDEGIPSENEEEKKMLDTRARELKEQLHQKDQKILLLLEEKEMIFRDMAECSTPLPEDCSPTHSPRVLFRSNTEEALKGGPLMKSAINEVEILQGLVSGNLGGTLGPTVSSPIEQDVVGPVSLPRRAETFGGFDSHQMNASKGGEKEEGDDGQDLRRTESDSGLKKGGNANLVFMLKRNSEQVVQSVVHLYELLSALQGVVLQQDSYIEDQKLVLSERALTRSLSRPSSLIEQEKQRSLEKQRQDLANLQKQQAQYLEEKRRREREWEARERELREREALLAQREEEVQQGQQDLEKEREELQQKKGTYQYDLERLRAAQKQLEREQEQLRREAERLSQRQTERDLCQVSHPHTKLMRIPSFFPSPEEPPSPSAPSIAKSGSLDSELSVSPKRNSISRTHKDKGPFHILSSTSQTNKGPEGQSQAPASTSASTRLFGLTKPKEKKEKKKKNKTSRSQPGDGPASEVSAEGEEIFC

SEQ ID NO: 856269 - protein, 475 aa, Homo sapiens
MSQQNHLLMREGTDMNEGQLLGDFEIESKQLEAESWSRIIDSKFLKQQKKDVVKRQEVIYELMQTEFHHVRTLKIMSGVYSQGMMADLLFEQQMVEKLFPCLDELISIHSQFFQRILERKKESLVDKSEKNFLIKRIGDVLVNQFSGENAERLKKTYGKFCGQHNQSVNYFKDLYAKDKRFQAFVKKKMSSSVVRRLGIPECILLVTQRITKYPVLFQRILQCTKDNEVEQEDLAQSLSLVKDVIGAVDSKVASYEKKVRLNEIYTKTDSKSIMRMKSGQMFAKEDLKRKKLVRDGSVFLKNAAGRLKEVQAVLLTDILVFLQEKDQKYIFASLDQKSTVISLKKLIVREVAHEEKGLFLISMGMTDPEMVEVHASSKEERNSWIQIIQDTINTLSGMDGGALTDASLTESYFSTSFIGVNGFGSPVETKYPLMQYTLVVFQRLRVCTSGFSNTKNTGPQTSHLLEPINFLLCLN

SEQ ID NO: 856270 - protein, 72 aa, Homo sapiens
APLGSTESDSGLKKGGNANLVFMLKRNSEQVVQSVVHLYELLSALQVRAFIFHPCVYLSREQQLGAVVDLDL

SEQ ID NO: 856271 - protein, 2812 aa, Homo sapiens; identical to SEQ ID NO: 856268

SEQ ID NO: 856272 - protein, 2812 aa, Homo sapiens; identical to SEQ ID NO: 856268

SEQ ID NO: 856273 - protein, 1713 aa, Homo sapiens
MAEPRRENISHNTQDILIPNVLLSQEKNAVLGLPVALQDKAVTDPQGVGTPEMIPLDWEKGKLEGADHSCTMGDAEEAQIDDEAHPVLLQPVAKELPTDMELSAHDDGAPAGVREVTRAPPSGRERSTPSLPCMVSAQDAPLPKGADLIEEAASRIVDAVIEQVKAAGALLTEGEACHMSLSSPELGPLTKGLESAFTEKVSTFPPGESLPMGSTPEEATGSLAGCFAGREEPEKIILPVQGPEPAAEMPDVKAEDEVDFRASSISEEVAVGSIAATLKMKQGPMTQAINRENWCTIEPCPDAASLLASKQSPECENFLDVGLGRECTSKQGVLKRESGSDSDLFHSPSDDMDSIIFPKPEEEHLACDITGSSSSTDDTASLDRHSSHGSDVSLSQILKPNRSRDRQSLDGFYSHGMGAEGRESESEPADPGDVEEEEMDSITEVPANCSVLRSSMRSLSPFRRHSWGPGKNAASDAEMNHRSSMRVLGDVVRRPPIHRRSFSLEGLTGGAGVGNKPSSSLEVSSANAEELRHPFSGEERVDSLVSLSEEDLESDQREHRMFDQQICHRSKQQGFNYCTSAISSPLTKSISLMTISHPGLDNSRPFHSTFHNTSANLTESITEENYNFLPHSPSKKDSEWKSGTKVSRTFSYIKNKMSSSKKSKEKEKEKDKIKEKEKDSKDKEKDKKTVNGHTFSSIPVVGPISCSQCMKPFTNKDAYTCANCSAFVHKGCRESLASCAKVKMKQPKGSLQAHDTSSLPTVIMRNKPSQPKERPRSAVLLVDETATTPIFANRRSQQSVSLSKSVSIQNITGVGNDENMSNTWKFLSHSTDSLNKISKVNESTESLTDEEGTDMNEGQLLGDFEIESKQLEAESWSRIIDSKFLKQQKKDVVKRQEVIYELMQTEFHHVRTLKIMSGVYSQGMMADLLFEQQMVEKLFPCLDELISIHSQFFQRILERKKESLVDKSEKNFLIKRIGDVLVNQFSGENAERLKKTYGKFCGQHNQSVNYFKDLYAKDKRFQAFVKKKMSSSVVRRLGIPECILLVTQRITKYPVLFQRILQCTKDNEVEQEDLAQSLSLVKDVIGAVDSKVASYEKKVRLNEIYTKTDSKSIMRMKSGQMFAKEDLKRKKLVRDGSVFLKNAAGRLKEVQAVLLTDILVFLQEKDQKYIFASLDQKSTVISLKKLIVREVAHEEKGLFLISMGMTDPEMVEVHASSKEERNSWIQIIQDTINTLNRDEDEGIPSENEEEKKMLDTRARELKEQLHQKDQKILLLLEEKEMIFRDMAECSTPLPEDCSPTHSPRVLFRSNTEEALKGGPLMKSAINEVEILQGLVSGNLGGTLGPTVSSPIEQDVVGPVSLPRRAETFGGFDSHQMNASKGGEKEEGDDGQDLRRTESDSGLKKGGNANLVFMLKRNSEQVVQSVVHLYELLSALQGVVLQQDSYIEDQKLVLSERALTRSLSRPSSLIEQEKQRSLEKQRQDLANLQKQQAQYLEEKRRREREWEARERELREREALLAQREEEVQQGQQDLEKEREELQQKKGTYQYDLERLRAAQKQLEREQEQLRREAERLSQRQTERDLCQVSHPHTKLMRIPSFFPSPEEPPSPSAPSIAKSGSLDSELSVSPKRNSISRTHKDKGPFHILSSTSQTNKGPEGQSQAPASTSASTRLFGLTKPKEKKEKKKKNKTSRSQPGDGPASEVSAEGEEIFC

SEQ ID NO: 856274 - protein, 2839 aa, Homo sapiens
MKLNPQQAPLYGDCVVTVLLAEEDKAEDDVVFYLVFLGSTLRHCTSTRKVSSDTLETIAPGHDCCETVKVQLCASKEGLPVFVVAEEDFHFVQDEAYDAAQFLATSAGNQQALNFTRFLDQSGPPSGDVNSLDKKLVLAFRHLKLPTEWNVLGTDQSLHDAGPRETLMHFAVRLGLLRLTWFLLQKPGGRGALSIHNQEGATPVSLALERGYHKLHQLLTEENAGEPDSWSSLSYEIPYGDCSVRHHRELDIYTLTSESDSHHEHPFPGDGCTGPIFKLMNIQQQLMKTNLKQMDSLMPLMMTAQDPSSAPETDGQFLPCAPEPTDPQRLSSSEETESTQCCPGSPVAQTESPCDLSSIVEEENTDRSCRKKNKGVERKGEEVEPAPIVDSGTVSDQDSCLQSLPDCGVKGTEGLSSCGNRNEETGTKSSGMPTDQESLSSGDAVLQRDLVMEPGTAQYSSGGELGGISTTNVSTPDTAGEMEHGLMNPDATVWKNVLQGGESTKERFENSNIGTAGASDVHVTSKPVDKISVPNCAPAASSLDGNKPAESSLAFSNEETSTEKTAETETSRSREESADAPVDQNSVVIPAAAKDKISDGLEPYTLLAAGIGEAMSPSDLALLGLEEDVMPHQNSETNSSHAQSQKGKSSPICSTTGDDKLCADSACQQNTVTSSGDLVAKLCDNIVSESESTTARQPSSQDPPDASHCEDPQAHTVTSDPVRDTQERADFCPFKVVDNKGQRKDVKLDKPLTNMLEVVSHPHPVVPKMEKELVPDQAVISDSTFSLANSPGSESVTKDDALSFVPSQKEKGTATPELHTATDYRDGPDGNSNEPDTRPLEDRAAGLSTSSTAAELQHGMGNTSLTGLGGEHEGPAPPAIPEALNIKGNTDSSLQSMGKATLALDSVLTEEGKLLVVSESSAAQEQDKDKAVTCSSIKENALSSGTLQEEQRTPPPGQDTQQFHEKSISADCAKDKALQLSNSPGASSAFLKAETEHNKEVAPQVSLLTQGGAAQSLVPPGASLATESRQEALGAEHNSSALLPCLLPDGSDGSDALNCSQASPLDVGVKNTQSQGKTSACEVSGNVTVDVTGVNALQGMAEPRRENISHNTQDILIPNVLLSQEKNAVLGLPVALQDKAVTDPQGVGTPEMIPLDWEKGKLEGADHSCTMGDAEEAQIDDEAHPVLLQPVAKELPTDMELSAHDDGAPAGVREVTRAPPSGRERSTPSLPCMVSAQDAPLPKGADLIEEAASRIVDAVIEQVKAAGALLTEGEACHMSLSSPELGPLTKGLESAFTEKVSTFPPGESLPMGSTPEEATGSLAGCFAGREEPEKIILPVQGPEPAAEMPDVKAEDEVDFRASSISEEVAVGSIAATLKMKQGPMTQAINRENWCTIEPCPDAASLLASKQSPECENFLDVGLGRECTSKQGVLKRESGSDSDLFHSPSDDMDSIIFPKPEEEHLACDITGSSSSTDDTASLDRHSSHGSDVSLSQILKPNRSRDRQSLDGFYSHGMGAEGRESESEPADPGDVEEEEMDSITEVPANCSVLRSSMRSLSPFRRHSWGPGKNAASDAEMNHRSSMRVLGDVVRRPPIHRRSFSLEGLTGGAGVGNKPSSSLEVSSANAEELRHPFSGEERVDSLVSLSEEDLESDQREHRMFDQQICHRSKQQGFNYCTSAISSPLTKSISLMTISHPGLDNSRPFHSTFHNTSANLTESITEENYNFLPHSPSKKDSEWKSGTKVSRTFSYIKNKMSSSKKSKEKEKEKDKIKEKEKDSKDKEKDKKTVNGHTFSSIPVVGPISCSQCMKPFTNKDAYTCANCSAFVHKGCRESLASCAKVKMKQPKGSLQAHDTSSLPTVIMRNKPSQPKERPRSAVLLVDETATTPIFANRRSQQSVSLSKSVSIQNITGVGNDENMSNTWKFLSHSTDSLNKISKVNESTESLTDEEGTDMNEGQLLGDFEIESKQLEAESWSRIIDSKFLKQQKKDVVKRQEVIYELMQTEFHHVRTLKIMSGVYSQGMMADLLFEQQMVEKLFPCLDELISIHSQFFQRILERKKESLVDKSEKNFLIKRIGDVLVNQFSGENAERLKKTYGKFCGQHNQSVNYFKDLYAKDKRFQAFVKKKMSSSVVRRLGIPECILLVTQRITKYPVLFQRILQCTKDNEVEQEDLAQSLSLVKDVIGAVDSKVASYEKKVRLNEIYTKTDSKSIMRMKSGQMFAKEDLKRKKLVRDGSVFLKNAAGRLKEVQAVLLTDILVFLQEKDQKYIFASLDQKSTVISLKKLIVREVAHEEKGLFLISMGMTDPEMVEVHASSKEERNSWIQIIQDTINTLNRDEDEGIPSENEEEKKMLDTRARELKEQLHQKDQKILLLLEEKEMIFRDMAECSTPLPEDCSPTHSPRVLFRSNTEEALKGGPLMKSAINEVEILQGLVSGNLGGTLGPTVSSPIEQDVVGPVSLPRRAETFGGFDSHQMNASKGGEKEEGDDGQDLRRTESDSGLKKGGNANLVFMLKRNSEQVVQSVVHLYELLSALQGVVLQQDSYIEDQKLVLSERALTRSLSRPSSLIEQEKQRSLEKQRQDLANLQKQQAQYLEEKRRREREWEARERELREREALLAQREEEVQQGQQDLEKEREELQQKKGTYQYDLERLRAAQKQLEREQEQLRREAERLSQRQTERDLCQILLGGGQLMKPSSSMQSTDVSSVEFAEVSHPHTKLMRIPSFFPSPEEPPSPSAPSIAKSGSLDSELSVSPKRNSISRTHKDKGPFHILSSTSQTNKGPEGQSQAPASTSASTRLFGLTKPKEKKEKKKKNKTSRSQPGDGPASEVSAEGEEIFC

SEQ ID NO: 856275 - protein, 1465 aa, Homo sapiens
MPDVKAEDEVDFRASSISEEVAVGSIAATLKMKQGPMTQAINRENWCTIEPCPDAASLLASKQSPECENFLDVGLGRECTSKQGVLKRESGSDSDLFHSPSDDMDSIIFPKPEEEHLACDITGSSSSTDDTASLDRHSSHGSDVSLSQILKPNRSRDRQSLDGFYSHGMGAEGRESESEPADPGDVEEEEMDSITEVPANCSVLRSSMRSLSPFRRHSWGPGKNAASDAEMNHRSSMRVLGDVVRRPPIHRRSFSLEGLTGGAGVGNKPSSSLEVSSANAEELRHPFSGEERVDSLVSLSEEDLESDQREHRMFDQQICHRSKQQGFNYCTSAISSPLTKSISLMTISHPGLDNSRPFHSTFHNTSANLTESITEENYNFLPHSPSKKDSEWKSGTKVSRTFSYIKNKMSSSKKSKEKEKEKDKIKEKEKDSKDKEKDKKTVNGHTFSSIPVVGPISCSQCMKPFTNKDAYTCANCSAFVHKGCRESLASCAKVKMKQPKGSLQAHDTSSLPTVIMRNKPSQPKERPRSAVLLVDETATTPIFANRRSQQSVSLSKSVSIQNITGVGNDENMSNTWKFLSHSTDSLNKISKVNESTESLTDEEGTDMNEGQLLGDFEIESKQLEAESWSRIIDSKFLKQQKKDVVKRQEVIYELMQTEFHHVRTLKIMSGVYSQGMMADLLFEQQMVEKLFPCLDELISIHSQFFQRILERKKESLVDKSEKNFLIKRIGDVLVNQFSGENAERLKKTYGKFCGQHNQSVNYFKDLYAKDKRFQAFVKKKMSSSVVRRLGIPECILLVTQRITKYPVLFQRILQCTKDNEVEQEDLAQSLSLVKDVIGAVDSKVASYEKKVRLNEIYTKTDSKSIMRMKSGQMFAKEDLKRKKLVRDGSVFLKNAAGRLKEVQAVLLTDILVFLQEKDQKYIFASLDQKSTVISLKKLIVREVAHEEKGLFLISMGMTDPEMVEVHASSKEERNSWIQIIQDTINTLNRDEDEGIPSENEEEKKMLDTRARELKEQLHQKDQKILLLLEEKEMIFRDMAECSTPLPEDCSPTHSPRVLFRSNTEEALKGGPLMKSAINEVEILQGLVSGNLGGTLGPTVSSPIEQDVVGPVSLPRRAETFGGFDSHQMNASKGGEKEEGDDGQDLRRTESDSGLKKGGNANLVFMLKRNSEQVVQSVVHLYELLSALQGVVLQQDSYIEDQKLVLSERALTRSLSRPSSLIEQEKQRSLEKQRQDLANLQKQQAQYLEEKRRREREWEARERELREREALLAQREEEVQQGQQDLEKEREELQQKKGTYQYDLERLRAAQKQLEREQEQLRREAERLSQRQTERDLCQVSHPHTKLMRIPSFFPSPEEPPSPSAPSIAKSGSLDSELSVSPKRNSISRTHKDKGPFHILSSTSQTNKGPEGQSQAPASTSASTRLFGLTKPKEKKEKKKKNKTSRSQPGDGPASEVSAEGEEIFC

SEQ ID NO: 856276 - protein, 1465 aa, Homo sapiens; identical to SEQ ID NO: 856275

SEQ ID NO: 856277 - protein, 2816 aa, Homo sapiens
MKLNPQQAPLYGDCVVTVLLAEEDKAEDDVVFYLVFLGSTLRHCTSTRKVSSDTLETIAPGHDCCETVKVQLCASKEGLPVFVVAEEDFHFVQDEAYDAAQFLATSAGNQQALNFTRFLDQSGPPSGDVNSLDKKLVLAFRHLKLPTEWNVLGTDQSLHDAGPRETLMHFAVRLGLLRLTWFLLQKPGGRGALSIHNQEGATPVSLALERGYHKLHQLLTEENAGEPDSWSSLSYEIPYGDCSVRHHRELDIYTLTSESDSHHEHPFPGDGCTGPIFKLMNIQQQLMKTNLKQMDSLMPLMMTAQDPSSAPETDGQFLPCAPEPTDPQRLSSSEETESTQCCPGSPVAQTESPCDLSSIVEEENTDRSCRKKNKGVERKGEEVEPAPIVDSGTVSDQDSCLQSLPDCGVKGTEGLSSCGNRNEETGTKSSGMPTDQESLSSGDAVLQRDLVMEPGTAQYSSGGELGGISTTNVSTPDTAGEMEHGLMNPDATVWKNVLQGGESTKERFENSNIGTAGASDVHVTSKPVDKISVPNCAPAASSLDGNKPAESSLAFSNEETSTEKTAETETSRSREESADAPVDQNSVVIPAAAKDKISDGLEPYTLLAAGIGEAMSPSDLALLGLEEDVMPHQNSETNSSHAQSQKGKSSPICSTTGDDKLCADSACQQNTVTSSGDLVAKLCDNIVSESESTTARQPSSQDPPDASHCEDPQAHTVTSDPVRDTQERADFCPFKVVDNKGQRKDVKLDKPLTNMLEVVSHPHPVVPKMEKELVPDQAVISDSTFSLANSPGSESVTKDDALSFVPSQKEKGTATPELHTATDYRDGPDGNSNEPDTRPLEDRAAGLSTSSTAAELQHGMGNTSLTGLGGEHEGPAPPAIPEALNIKGNTDSSLQSMGKATLALDSVLTEEGKLLVVSESSAAQEQDKDKAVTCSSIKENALSSGTLQEEQRTPPPGQDTQQFHEKSISADCAKDKALQLSNSPGASSAFLKAETEHNKEVAPQVSLLTQGGAAQSLVPPGASLATESRQEALGAEHNSSALLPCLLPDGSDGSDALNCSQASPLDVGVKNTQSQGKTSACEVSGNVTVDVTGVNALQGMAEPRRENISHNTQDILIPNVLLSQEKNAVLGLPVALQDKAVTDPQGVGTPEMIPLDWEKGKLEGADHSCTMGDAEEAQIDDEAHPVLLQPVAKELPTDMELSAHDDGAPAGVREVTRAPPSGRERSTPSLPCMVSAQDAPLPKGADLIEEAASRIVDAVIEQVKAAGALLTEGEACHMSLSSPELGPLTKGLESAFTEKVSTFPPGESLPMGSTPEEATGSLAGCFAGREEPEKIILPVQGPEPAAEMPDVKAEDEVDFRASSISEEVAVGSIAATLKMKQGPMTQAINRENWCTIEPCPDAASLLASKQSPECENFLDVGLGRECTSKQGVLKRESGSDSDLFHSPSDDMDSIIFPKPEEEHLACDITGSSSSTDDTASLDRHSSHGSDVSLSQILKPNRSRDRQSLDGFYSHGMGAEGRESESEPADPGDVEEEEMDSITEVPANCSVLRSSMRSLSPFRRHSWGPGKNAASDAEMNHRSSMRVLGDVVRRPPIHRRSFSLEGLTGGAGVGNKPSSSLEVSSANAEELRHPFSGEERVDSLVSLSEEDLESDQREHRMFDQQICHRSKQQGFNYCTSAISSPLTKSISLMTISHPGLDNSRPFHSTFHNTSANLTESITEENYNFLPHSPSKKDSEWKSGTKVSRTFSYIKNKMSSSKKSKEKEKEKDKIKEKEKDSKDKEKDKKTVNGHTFSSIPVVGPISCSQCMKPFTNKDAYTCANCSAFVHKGCRESLASCAKVKMKQPKGSLQAHDTSSLPTVIMRNKPSQPKERPRSAVLLVDETATTPIFANRRSQQSVSLSKSVSIQNITGVGNDENMSNTWKFLSHSTDSLNKISKVNESTESLTDEEGTDMNEGQLLGDFEIESKQLEAESWSRIIDSKFLKQQKKDVVKRQEVIYELMQTEFHHVRTLKIMSGVYSQGMMADLLFEQQMVEKLFPCLDELISIHSQFFQRILERKKESLVDKSEKNFLIKRIGDVLVNQFSGENAERLKKTYGKFCGQHNQSVNYFKDLYAKDKRFQAFVKKKMSSSVVRRLGIPECILLVTQRITKYPVLFQRILQCTKDNEVEQEDLAQSLSLVKDVIGAVDSKVASYEKKVRLNEIYTKTDSKSIMRMKSGQMFAKEDLKRKKLVRDGSVFLKNAAGRLKEVQAVLLTDILVFLQEKDQKYIFASLDQKSTVISLKKLIVREVAHEEKGLFLISMGMTDPEMVEVHASSKEERNSWIQIIQDTINTLNRDEDEGIPSENEEEKKMLDTRARELKEQLHQKDQKILLLLEEKEMIFRDMAECSTPLPEDCSPTHSPRVLFRSNTEEALKGGPLMKSAINEVEILQGLVSGNLGGTLGPTVSSPIEQDVVGPVSLPRRAETFGGFDSHQMNASKGGEKEEGDDGQDLRRTESDSGLKKGGNANLVFMLKRNSEQVVQSVVHLYELLSALQGVVLQQDSYIEDQKLVLSERALTRSLSRPSSLIEQEKQRSLEKQRQDLANLQKQQAQYLEEKRRREREWEARERELREREALLAQREEEVQQGQQDLEKEREELQQKKGTYQYDLERLRAAQKQLEREQEQLRREAERLSQRQTERDLCQVSHPHTKLMRIPSFFPSPEEPPSPSAPSIAKSGSLDSELSVSPKRNSISRTHKDKGPFHILSSTSQTNKGPEGQSQAPASTSASTRLFGLTKPKEKKEKKKKNKTSRSQPGGESRTPALPVAIVSVHSERG

SEQ ID NO: 856278 - protein, 2722 aa, Homo sapiens
MKLNPQQAPLYGDCVVTVLLAEEDKAEDDVVFYLVFLGSTLRHCTSTRKVSSDTLETIAPGHDCCETVKVQLCASKEGLPVFVVAEEDFHFVQDEAYDAAQFLATSAGNQQALNFTRFLDQSGPPSGDVNSLDKKLVLAFRHLKLPTEWNVLGTDQSLHDAGPRETLMHFAVRLGLLRLTWFLLQKPGGRGALSIHNQEGATPVSLALERGYHKLHQLLTEENAGEPDSWSSLSYEIPYGDCSVRHHRELDIYTLTSESDSHHEHPFPGDGCTGPIFKLMNIQQQLMKTNLKQMDSLMPLMMTAQDPSSAPETDGQFLPCAPEPTDPQRLSSSEETESTQCCPGSPVAQTESPCDLSSIVEEENTDRSCRKKNKGVERKGEEVEPAPIVDSGTVSDQDSCLQSLPDCGVKGTEGLSSCGNRNEETGTKSSGMPTDQESLSSGDAVLQRDLVMEPGTAQYSSGGELGGISTTNVSTPDTAGEMEHGLMNPDATVWKNVLQGGESTKERFENSNIGTAGASDVHVTSKPVDKISVPNCAPAASSLDGNKPAESSLAFSNEETSTEKTAETETSRSREESADAPVDQNSVVIPAAAKDKISDGLEPYTLLAAGIGEAMSPSDLALLGLEEDVMPHQNSETNSSHAQSQKGKSSPICSTTGDDKLCADSACQQNTVTSSGDLVAKLCDNIVSESESTTARQPSSQDPPDASHCEDPQAHTVTSDPVRDTQERADFCPFKVVDNKGQRKDVKLDKPLTNMLEVVSHPHPVVPKMEKELVPDQAVISDSTFSLANSPGSESVTKDDALSFVPSQKEKGTATPELHTATDYRDGPDGNSNEPDTRPLEDRAAGLSTSSTAAELQHGMGNTSLTGLGGEHEGPAPPAIPEALNIKGNTDSSLQSMGKATLALDSVLTEEGKLLVVSESSAAQEQDKDKAVTCSSIKENALSSGTLQEEQRTPPPGQDTQQFHEKSISADCAKDKALQLSNSPGASSAFLKAETEHNKEVAPQVSLLTQGGAAQSLVPPGASLATESRQEALGAEHNSSALLPCLLPDGSDGSDALNCSQASPLDVGVKNTQSQGKTSACEVSGNVTVDVTGVNALQGMAEPRRENISHNTQDILIPNVLLSQEKNAVLGLPVALQDKAVTDPQGVGTPEMIPLDWEKGKLEGADHSCTMGDAEEAQIDDEAHPVLLQPVAKELPTDMELSAHDDGAPAGVREVTRAPPSGRERSTPSLPCMVSAQDAPLPKGADLIEEAASRIVDAVIEQVKAAGALLTEGEACHMSLSSPELGPLTKGLESAFTEKVSTFPPGESLPMGSTPEEATGSLAGCFAGREEPEKIILPVQGPEPAAEMPDVKAEDEVDFRASSISEEVAVGSIAATLKMKQGPMTQAINRENWCTIEPCPDAASLLASKQSPECENFLDVGLGRECTSKQGVLKRESGSDSDLFHSPSDDMDSIIFPKPEEEHLACDITGSSSSTDDTASLDRHSSHGSDVSLSQILKPNRSRDRQSLDGFYSHGMGAEGRESESEPADPGDVEEEEMDSITEVPANCSVLRSSMRSLSPFRRHSWGPGKNAASDAEMNHRSSMRVLGDVVRRPPIHRRSFSLEGLTGGAGVGNKPSSSLEVSSANAEELRHPFSGEERVDSLVSLSEEDLESDQREHRMFDQQICHRSKQQGFNYCTSAISSPLTKSISLMTISHPGLDNSRPFHSTFHNTSANLTESITEENYNFLPHSPSKKDSEWKSGTKVSRTFSYIKNKMSSSKKSKEKEKEKDKIKEKEKDSKDKEKDKKTVNGHTFSSIPVVGPISCSQCMKPFTNKDAYTCANCSAFVHKGCRESLASCAKVKMKQPKGSLQAHDTSSLPTVIMRNKPSQPKERPRSAVLLVDETATTPIFANRRSQQSVSLSKSVSIQNITGVGNDENMSNTWKFLSHSTDSLNKISKVNESTESLTDEEGTDMNEGQLLGDFEIESKQLEAESWSRIIDSKFLKQQKKDVVKRQEVIYELMQTEFHHVRTLKIMSGVYSQGMMADLLFEQQMVEKLFPCLDELISIHSQFFQRILERKKESLVDKSEKNFLIKRIGDVLVNQFSGENAERLKKTYGKFCGQHNQSVNYFKDLYAKDKRFQAFVKKKMSSSVVRRLGIPECILLVTQRITKYPVLFQRILQCTKDNEVEQEDLAQSLSLVKDVIGAVDSKVASYEKKVRLNEIYTKTDSKSIMRMKSGQMFAKEDLKRKKLVRDGSVFLKNAAGRLKEVQAVLLTDILVFLQEKDQKYIFASLDQKSTVISLKKLIVREVAHEEKGLFLISMGMTDPEMVEVHASSKEERNSWIQIIQDTINTLNRDEDEGIPSENEEEKKMLDTRARELKEQLHQKDQKILLLLEEKEMIFRDMAECSTPLPEDCSPTHSPRVLFRSNTEEALKGGPLMKSAINEVEILQGLVSGNLGGTLGPTVSSPIEQDVVGPVSLPRRAETFGGFDSHQMNASKGGEKEEGDDGQDLRRTESDSGLKKGGNANLVFMLKRNSEQVVQSVVHLYELLSALQGVVLQQDSYIEDQKLVLSERALTRSLSRPSSLIEQEKQRSLEKQRQDLANLQKQQAQYLEEKRRREREWEARERELREREALLAQREEEVQQGQQDLEKEREELQQKKGTYQYDLERLRAAQKQLEREQEQLRREAERLSQRQTERDLCQILLGGGQLMKPSSSMQSTDVSSVEFAEVGKYPASTPS

SEQ ID NO: 856279 - protein, 1344 aa, Homo sapiens
MDSIIFPKPEEEHLACDITGSSSSTDDTASLDRHSSHGSDVSLSQILKPNRSRDRQSLDGFYSHGMGAEGRESESEPADPGDVEEEEMDSITEVPANCSVLRSSMRSLSPFRRHSWGPGKNAASDAEMNHRSFSLEGLTGGAGVGNKPSSSLEVSSANAEELRHPFSGEERVDSLVSLSEEDLESDQREHRMFDQQICHRSKQQGFNYCTSAISSPLTKSISLMTISHPGLDNSRPFHSTFHNTSANLTESITEENYNFLPHSPSKKDSEWKSGTKVSRTFSYIKNKMSSSKKSKEKEKEKDKIKEKEKDSKDKEKDKKTVNGHTFSSIPVVGPISCSQCMKPFTNKDAYTCANCSAFVHKGCRESLASCAKVKMKQPKGSLQAHDTSSLPTVIMRNKPSQPKERPRSAVLLVDETATTPIFANRRSQQSVSLSKSVSIQNITGVGNDENMSNTWKFLSHSTDSLNKISKVNESTESLTDEEGTDMNEGQLLGDFEIESKQLEAESWSRIIDSKFLKQQKKDVVKRQEVIYELMQTEFHHVRTLKIMSGVYSQGMMADLLFEQQMVEKLFPCLDELISIHSQFFQRILERKKESLVDKSEKNFLIKRIGDVLVNQFSGENAERLKKTYGKFCGQHNQSVNYFKDLYAKDKRFQAFVKKKMSSSVVRRLGIPECILLVTQRITKYPVLFQRILQCTKDNEVEQEDLAQSLSLVKDVIGAVDSKVASYEKKVRLNEIYTKTDSKSIMRMKSGQMFAKEDLKRKKLVRDGSVFLKNAAGRLKEVQAVLLTDILVFLQEKDQKYIFASLDQKSTVISLKKLIVREVAHEEKGLFLISMGMTDPEMVEVHASSKEERNSWIQIIQDTINTLNRDEDEGIPSENEEEKKMLDTRARELKEQLHQKDQKILLLLEEKEMIFRDMAECSTPLPEDCSPTHSPRVLFRSNTEEALKGGPLMKSAINEVEILQGLVSGNLGGTLGPTVSSPIEQDVVGPVSLPRRAETFGGFDSHQMNASKGGEKEEGDDGQDLRRTESDSGLKKGGNANLVFMLKRNSEQVVQSVVHLYELLSALQGVVLQQDSYIEDQKLVLSERALTRSLSRPSSLIEQEKQRSLEKQRQDLANLQKQQAQYLEEKRRREREWEARERELREREALLAQREEEVQQGQQDLEKEREELQQKKGTYQYDLERLRAAQKQLEREQEQLRREAERLSQRQTERDLCQVSHPHTKLMRIPSFFPSPEEPPSPSAPSIAKSGSLDSELSVSPKRNSISRTHKDKGPFHILSSTSQTNKGPEGQSQAPASTSASTRLFGLTKPKEKKEKKKKNKTSRSQPGDGPASEVSAEGEEIFC

SEQ ID NO: 856280 - protein, 1057 aa, Homo sapiens
MSSSKKSKEKEKEKDKIKEKEKDSKDKEKDKKTVNGHTFSSIPVVGPISCSQCMKPFTNKDAYTCANCSAFVHKGCRESLASCAKVKMKQPKGSLQAHDTSSLPTVIMRNKPSQPKERPRSAVLLVDETATTPIFANRRSQQSVSLSKSVSIQNITGVGNDENMSNTWKFLSHSTDSLNKISKVNESTESLTDEEGTDMNEGQLLGDFEIESKQLEAESWSRIIDSKFLKQQKKDVVKRQEVIYELMQTEFHHVRTLKIMSGVYSQGMMADLLFEQQMVEKLFPCLDELISIHSQFFQRILERKKESLVDKSEKNFLIKRIGDVLVNQFSGENAERLKKTYGKFCGQHNQSVNYFKDLYAKDKRFQAFVKKKMSSSVVRRLGIPECILLVTQRITKYPVLFQRILQCTKDNEVEQEDLAQSLSLVKDVIGAVDSKVASYEKKVRLNEIYTKTDSKSIMRMKSGQMFAKEDLKRKKLVRDGSVFLKNAAGRLKEVQAVLLTDILVFLQEKDQKYIFASLDQKSTVISLKKLIVREVAHEEKGLFLISMGMTDPEMVEVHASSKEERNSWIQIIQDTINTLNRDEDEGIPSENEEEKKMLDTRARELKEQLHQKDQKILLLLEEKEMIFRDMAECSTPLPEDCSPTHSPRVLFRSNTEEALKGGPLMKSAINEVEILQGLVSGNLGGTLGPTVSSPIEQDVVGPVSLPRRAETFGGFDSHQMNASKGGEKEEGDDGQDLRRTESDSGLKKGGNANLVFMLKRNSEQVVQSVVHLYELLSALQGVVLQQDSYIEDQKLVLSERALTRSLSRPSSLIEQEKQRSLEKQRQDLANLQKQQAQYLEEKRRREREWEARERELREREALLAQREEEVQQGQQDLEKEREELQQKKGTYQYDLERLRAAQKQLEREQEQLRREAERLSQRQTERDLCQVSHPHTKLMRIPSFFPSPEEPPSPSAPSIAKSGSLDSELSVSPKRNSISRTHKDKGPFHILSSTSQTNKGPEGQSQAPASTSASTRLFGLTKPKEKKEKKKKNKTSRSQPGDGPASEVSAEGEEIFC

SEQ ID NO: 856281 - protein, 1052 aa, Homo sapiens
SLHPIRQSGEEREEGQEDQKTFFEELAVEDKQADGRRCASSPISCSQCMKPFTNKDAYTCANCSAFVHKGCRESLASCAKVKMKQPKGSLQAHDTSSLPTVIMRNKPSQPKERPRSAVLLVDETATTPIFANRRSQQSVSLSKSVSIQNITGVGNDENMSNTWKFLSHSTDSLNKISKVNESTESLTDEEGTDMNEGQLLGDFEIESKQLEAESWSRIIDSKFLKQQKKDVVKRQEVIYELMQTEFHHVRTLKIMSGVYSQGMMADLLFEQQMVEKLFPCLDELISIHSQFFQRILERKKESLVDKSEKNFLIKRIGDVLVNQFSGENAERLKKTYGKFCGQHNQSVNYFKDLYAKDKRFQAFVKKKMSSSVVRRLGIPECILLVTQRITKYPVLFQRILQCTKDNEVEQEDLAQSLSLVKDVIGAVDSKVASYEKKVRLNEIYTKTDSKSIMRMKSGQMFAKEDLKRKKLVRDGSVFLKNAAGRLKEVQAVLLTDILVFLQEKDQKYIFASLDQKSTVISLKKLIVREVAHEEKGLFLISMGMTDPEMVEVHASSKEERNSWIQIIQDTINTLNRDEDEGIPSENEEEKKMLDTRARELKEQLHQKDQKILLLLEEKEMIFRDMAECSTPLPEDCSPTHSPRVLFRSNTEEALKGGPLMKSAINEVEILQGLVSGNLGGTLGPTVSSPIEQDVVGPVSLPRRAETFGGFDSHQMNASKGGEKEEGDDGQDLRRTESDSGLKKGGNANLVFMLKRNSEQVVQSVVHLYELLSALQGVVLQQDSYIEDQKLVLSERALTRSLSRPSSLIEQEKQRSLEKQRQDLANLQKQQAQYLEEKRRREREWEARERELREREALLAQREEEVQQGQQDLEKEREELQQKKGTYQYDLERLRAAQKQLEREQEQLRREAERLSQRQTERDLCQVSHPHTKLMRIPSFFPSPEEPPSPSAPSIAKSGSLDSELSVSPKRNSISRTHKDKGPFHILSSTSQTNKGPEGQSQAPASTSASTRLFGLTKPKEKKEKKKKNKTSRSQPGDGPASEVSAEGEEIFC

SEQ ID NO: 856282 - protein, 2365 aa, Homo sapiens
MKLNPQQAPLYGDCVVTVLLAEEDKAEDDVVFYLVFLGSTLRHCTSTRKVSSDTLETIAPGHDCCETVKVQLCASKEGLPVFVVAEEDFHFVQDEAYDAAQFLATSAGNQQALNFTRFLDQSGPPSGDVNSLDKKLVLAFRHLKLPTEWNVLGTDQSLHDAGPRETLMHFAVRLGLLRLTWFLLQKPGGRGALSIHNQEGATPVSLALERGYHKLHQLLTEENAGEPDSWSSLSYEIPYGDCSVRHHRELDIYTLTSESDSHHEHPFPGDGCTGPIFKLMNIQQQLMKTNLKQMDSLMPLMMTAQDPSSAPETDGQFLPCAPEPTDPQRLSSSEETESTQCCPGSPVAQTESPCDLSSIVEEENTDRSCRKKNKGVERKGEEVEPAPIVDSGTVSDQDSCLQSLPDCGVKGTEGLSSCGNRNEETGTKSSGMPTDQESLSSGDAVLQRDLVMEPGTAQYSSGGELGGISTTNVSTPDTAGEMEHGLMNPDATVWKNVLQGGESTKERFENSNIGTAGASDVHVTSKPVDKISVPNCAPAASSLDGNKPAESSLAFSNEETSTEKTAETETSRSREESADAPVDQNSVVIPAAAKDKISDGLEPYTLLAAGIGEAMSPSDLALLGLEEDVMPHQNSETNSSHAQSQKGKSSPICSTTGDDKLCADSACQQNTVTSSGDLVAKLCDNIVSESESTTARQPSSQDPPDASHCEDPQAHTVTSDPVRDTQERADFCPFKVVDNKGQRKDVKLDKPLTNMLEVVSHPHPVVPKMEKELVPDQAVISDSTFSLANSPGSESVTKDDALSFVPSQKEKGTATPELHTATDYRDGPDGNSNEPDTRPLEDRAAGLSTSSTAAELQHGMGNTSLTGLGGEHEGPAPPAIPEALNIKGNTDSSLQSMGKATLALDSVLTEEGKLLVVSESSAAQEQDKDKAVTCSSIKENALSSGTLQEEQRTPPPGQDTQQFHEKSISADCAKDKALQLSNSPGASSAFLKAETEHNKEVAPQVSLLTQGGAAQSLVPPGASLATESRQEALGAEHNSSALLPCLLPDGSDGSDALNCSQASPLDVGVKNTQSQGKTSACEVSGNVTVDVTGVNALQGMAEPRRENISHNTQDILIPNVLLSQEKNAVLGLPVALQDKAVTDPQGVGTPEMIPLDWEKGKLEGADHSCTMGDAEEAQIDDEAHPVLLQPVAKELPTDMELSAHDDGAPAGVREVTRAPPSGRERSTPSLPCMVSAQDAPLPKGADLIEEAASRIVDAVIEQVKAAGALLTEGEACHMSLSSPELGPLTKGLESAFTEKVSTFPPGESLPMGSTPEEATGSLAGCFAGREEPEKIILPVQGPEPAAEMPDVKAEDEVDFRASSISEEVAVGSIAATLKMKQGPMTQAINRENWCTIEPCPDAASLLASKQSPECENFLDVGLGRECTSKQGVLKRESGSDSDLFHSPSDDMDSIIFPKPEEEHLACDITGSSSSTDDTASLDRHSSHGSDVSLSQILKPNRSRDRQSLDGFYSHGMGAEGRESESEPADPGDVEEEEMDSITEVPANCSVLRSSMRSLSPFRRHSWGPGKNAASDAEMNHRSSMRVLGDVVRRPPIHRRSFSLEGLTGGAGVGNKPSSSLEVSSANAEELRHPFSGEERVDSLVSLSEEDLESDQREHRMFDQQICHRSKQQGFNYCTSAISSPLTKSISLMTISHPGLDNSRPFHSTFHNTSANLTESITEENYNFLPHSPSKKDSEWKSGTKVSRTFSYIKNKMSSSKKSKEKEKEKDKIKEKEKDSKDKEKDKKTVNGHTFSSIPVVGPISCSQCMKPFTNKDAYTCANCSAFVHKGCRESLASCAKVKMKQPKGSLQAHDTSSLPTVIMRNKPSQPKERPRSAVLLVDETATTPIFANRRSQQSVSLSKSVSIQNITGVGNDENMSNTWKFLSHSTDSLNKISKVNESTESLTDEEGTDMNEGQLLGDFEIESKQLEAESWSRIIDSKFLKQQKKDVVKRQEVIYELMQTEFHHVRTLKIMSGVYSQGMMADLLFEQQMVEKLFPCLDELISIHSQFFQRILERKKESLVDKSEKNFLIKRIGDVLVNQFSGENAERLKKTYGKFCGQHNQSVNYFKDLYAKDKRFQAFVKKKMSSSVVRRLGIPECILLVTQRITKYPVLFQRILQCTKDNEVEQEDLAQSLSLVKDVIGAVDSKVASYEKKVRLNEIYTKTDSKSIMRMKSGQMFAKEDLKRKKLVRDGSVFLKNAAGRLKEVQAVLLTDILVFLQEKDQKYIFASLDQKSTVISLKKLIVREVAHEEKGLFLISMGMTDPEMVEVHASSKEERNSWIQIIQDTINTLNRDEDEGIPSENEEEKKMLDTHRVRARFVSC

SEQ ID NO: 856283 - protein, 859 aa, Homo sapiens [sequence omitted]

SEQ ID NO: 856284 - protein, 661 aa, Homo sapiens
MIRLELVPYACTTDNEVEQEDLAQSLSLVKDVIGAVDSKVASYEKKVRLNEIYTKTDSKSIMRMKSGQMFAKEDLKRKKLVRDGSVFLKNAAGRLKEVQAVLLTDILVFLQEKDQKYIFASLDQKSTVISLKKLIVREVAHEEKGLFLISMGMTDPEMVEVHASSKEERNSWIQIIQDTINTLNRDEDEGIPSENEEEKKMLDTRARELKEQLHQKDQKILLLLEEKEMIFRDMAECSTPLPEDCSPTHSPRVLFRSNTEEALKGGPLMKSAINEVEILQGLVSGNLGGTLGPTVSSPIEQDVVGPVSLPRRAETFGGFDSHQMNASKGGEKEEGDDGQDLRRTESDSGLKKGGNANLVFMLKRNSEQVVQSVVHLYELLSALQGVVLQQDSYIEDQKLVLSERALTRSLSRPSSLIEQEKQRSLEKQRQDLANLQKQQAQYLEEKRRREREWEARERELREREALLAQREEEVQQGQQDLEKEREELQQKKGTYQYDLERLRAAQKQLEREQEQLRREAERLSQRQTERDLCQVSHPHTKLMRIPSFFPSPEEPPSPSAPSIAKSGSLDSELSVSPKRNSISRTHKDKGPFHILSSTSQTNKGPEGQSQAPASTSASTRLFGLTKPKEKKEKKKKNKTSRSQPGDGPASEVSAEGEEIFC

SEQ ID NO: 856285 - protein, 2324 aa, Homo sapiens
MKLNPQQAPLYGDCVVTVLLAEEDKAEDDVVFYLVFLGSTLRHCTSTRKVSSDTLETIAPGHDCCETVKVQLCASKEGLPVFVVAEEDFHFVQDEAYDAAQFLATSAGNQQALNFTRFLDQSGPPSGDVNSLDKKLVLAFRHLKLPTEWNVLGTDQSLHDAGPRETLMHFAVRLGLLRLTWFLLQKPGGRGALSIHNQEGATPVSLALERGYHKLHQLLTEENAGEPDSWSSLSYEIPYGDCSVRHHRELDIYTLTSESDSHHEHPFPGDGCTGPIFKLMNIQQQLMKTNLKQMDSLMPLMMTAQDPSSAPETDGQFLPCAPEPTDPQRLSSSEETESTQCCPGSPVAQTESPCDLSSIVEEENTDRSCRKKNKGVERKGEEVEPAPIVDSGTVSDQDSCLQSLPDCGVKGTEGLSSCGNRNEETGTKSSGMPTDQESLSSGDAVLQRDLVMEPGTAQYSSGGELGGISTTNVSTPDTAGEMEHGLMNPDATVWKNVLQGGESTKERFENSNIGTAGASDVHVTSKPVDKISVPNCAPAASSLDGNKPAESSLAFSNEETSTEKTAETETSRSREESADAPVDQNSVVIPAAAKDKISDGLEPYTLLAAGIGEAMSPSDLALLGLEEDVMPHQNSETNSSHAQSQKGKSSPICSTTGDDKLCADSACQQNTVTSSGDLVAKLCDNIVSESESTTARQPSSQDPPDASHCEDPQAHTVTSDPVRDTQERADFCPFKVVDNKGQRKDVKLDKPLTNMLEVVSHPHPVVPKMEKELVPDQAVISDSTFSLANSPGSESVTKDDALSFVPSQKEKGTATPELHTATDYRDGPDGNSNEPDTRPLEDRAAGLSTSSTAAELQHGMGNTSLTGLGGEHEGPAPPAIPEALNIKGNTDSSLQSMGKATLALDSVLTEEGKLLVVSESSAAQEQDKDKAVTCSSIKENALSSGTLQEEQRTPPPGQDTQQFHEKSISADCAKDKALQLSNSPGASSAFLKAETEHNKEVAPQVSLLTQGGAAQSLVPPGASLATESRQEALGAEHNSSALLPCLLPDGSDGSDALNCSQASPLDVGVKNTQSQGKTSACEVSGNVTVDVTGVNALQGMAEPRRENISHNTQDILIPNVLLSQEKNAVLGLPVALQDKAVTDPQGVGTPEMIPLDWEKGKLEGADHSCTMGDAEEAQIDDEAHPVLLQPVAKELPTDMELSAHDDGAPAGVREVTRAPPSGRERSTPSLPCMVSAQDAPLPKGADLIEEAASRIVDAVIEQVKAAGALLTEGEACHMSLSSPELGPLTKGLESAFTEKVSTFPPGESLPMGSTPEEATGSLAGCFAGREEPEKIILPVQGPEPAAEMPDVKAEDEVDFRASSISEEVAVGSIAATLKMKQGPMTQAINRENWCTIEPCPDAASLLASKQSPECENFLDVGLGRECTSKQGVLKRESGSDSDLFHSPSDDMDSIIFPKPEEEHLACDITGSSSSTDDTASLDRHSSHGSDVSLSQILKPNRSRDRQSLDGFYSHGMGAEGRESESEPADPGDVEEEEMDSITEVPANCSVLRSSMRSLSPFRRHSWGPGKNAASDAEMNHRSSMRVLGDVVRRPPIHRRSFSLEGLTGGAGVGNKPSSSLEVSSANAEELRHPFSGEERVDSLVSLSEEDLESDQREHRMFDQQICHRSKQQGFNYCTSAISSPLTKSISLMTISHPGLDNSRPFHSTFHNTSANLTESITEENYNFLPHSPSKKDSEWKSGTKVSRTFSYIKNKMSSSKKSKEKEKEKDKIKEKEKDSKDKEKDKKTVNGHTFSSIPVVGPISCSQCMKPFTNKDAYTCANCSAFVHKGCRESLASCAKVKMKQPKGSLQAHDTSSLPTVIMRNKPSQPKERPRSAVLLVDETATTPIFANRRSQQSVSLSKSVSIQNITGVGNDENMSNTWKFLSHSTDSLNKISKVNESTESLTDEEGTDMNEGQLLGDFEIESKQLEAESWSRIIDSKFLKQQKKDVVKRQEVIYELMQTEFHHVRTLKIMSGVYSQGMMADLLFEQQMVEKLFPCLDELISIHSQFFQRILERKKESLVDKSEKNFLIKRIGDVLVNQFSGENAERLKKTYGKFCGQHNQSVNYFKDLYAKDKRFQAFVKKKMSSSVVRRLGIPECILLVTQRITKYPVLFQRILQCTKDNEVEQEDLAQSLSLVKDVIGAVDSKVASYEKKVRLNEIYTKTDSKSIMRMKSGQMFAKEDLKRKKLVRDGSVFLKNAAGRLKEVQAVLLTDILVFLQEKDQKYIFASLDQKSTVISLKKLIVREVAHEEKGLFLISMGMTDPEMVEVHASSTSLSWVHA

SEQ ID NO: 856286 - protein, 126 aa, Homo sapiens
MEVLGHFGQGSNGYLELALPSARGVSVCLRKWQSAIQDFRSNATALCHIRNQAWPQPEGTCSLMGKHTKNKRASRTCGACGPETAGNGSQARVAGRTHVAGSVGGSYRGKRPSQQLGEAATPLVDG

SEQ ID NO: 856287 - protein, 2182 aa, Homo sapiens
MKLNPQQAPLYGDCVVTVLLAEEDKAEDDVVFYLVFLGSTLRHCTSTRKVSSDTLETIAPGHDCCETVKVQLCASKEGLPVFVVAEEDFHFVQDEAYDAAQFLATSAGNQQALNFTRFLDQSGPPSGDVNSLDKKLVLAFRHLKLPTEWNVLGTDQSLHDAGPRETLMHFAVRLGLLRLTWFLLQKPGGRGALSIHNQEGATPVSLALERGYHKLHQLLTEENAGEPDSWSSLSYEIPYGDCSVRHHRELDIYTLTSESDSHHEHPFPGDGCTGPIFKLMNIQQQLMKTNLKQMDSLMPLMMTAQDPSSAPETDGQFLPCAPEPTDPQRLSSSEETESTQCCPGSPVAQTESPCDLSSIVEEENTDRSCRKKNKGVERKGEEVEPAPIVDSGTVSDQDSCLQSLPDCGVKGTEGLSSCGNRNEETGTKSSGMPTDQESLSSGDAVLQRDLVMEPGTAQYSSGGELGGISTTNVSTPDTAGEMEHGLMNPDATVWKNVLQGGESTKERFENSNIGTAGASDVHVTSKPVDKISVPNCAPAASSLDGNKPAESSLAFSNEETSTEKTAETETSRSREESADAPVDQNSVVIPAAAKDKISDGLEPYTLLAAGIGEAMSPSDLALLGLEEDVMPHQNSETNSSHAQSQKGKSSPICSTTGDDKLCADSACQQNTVTSSGDLVAKLCDNIVSESESTTARQPSSQDPPDASHCEDPQAHTVTSDPVRDTQERADFCPFKVVDNKGQRKDVKLDKPLTNMLEVVSHPHPVVPKMEKELVPDQAVISDSTFSLANSPGSESVTKDDALSFVPSQKEKGTATPELHTATDYRDGPDGNSNEPDTRPLEDRAAGLSTSSTAAELQHGMGNTSLTGLGGEHEGPAPPAIPEALNIKGNTDSSLQSMGKATLALDSVLTEEGKLLVVSESSAAQEQDKDKAVTCSSIKENALSSGTLQEEQRTPPPGQDTQQFHEKSISADCAKDKALQLSNSPGASSAFLKAETEHNKEVAPQVSLLTQGGAAQSLVPPGASLATESRQEALGAEHNSSALLPCLLPDGSDGSDALNCSQASPLDVGVKNTQSQGKTSACEVSGNVTVDVTGVNALQGMAEPRRENISHNTQDILIPNVLLSQEKNAVLGLPVALQDKAVTDPQGVGTPEMIPLDWEKGKLEGADHSCTMGDAEEAQIDDEAHPVLLQPVAKELPTDMELSAHDDGAPAGVREVTRAPPSGRERSTPSLPCMVSAQDAPLPKGADLIEEAASRIVDAVIEQVKAAGALLTEGEACHMSLSSPELGPLTKGLESAFTEKVSTFPPGESLPMGSTPEEATGSLAGCFAGREEPEKIILPVQGPEPAAEMPDVKAEDEVDFRASSISEEVAVGSIAATLKMKQGPMTQAINRENWCTIEPCPDAASLLASKQSPECENFLDVGLGRECTSKQGVLKRESGSDSDLFHSPSDDMDSIIFPKPEEEHLACDITGSSSSTDDTASLDRHSSHGSDVSLSQILKPNRSRDRQSLDGFYSHGMGAEGRESESEPADPGDVEEEEMDSITEVPANCSVLRSSMRSLSPFRRHSWGPGKNAASDAEMNHRSSMRVLGDVVRRPPIHRRSFSLEGLTGGAGVGNKPSSSLEVSSANAEELRHPFSGEERVDSLVSLSEEDLESDQREHRMFDQQICHRSKQQGFNYCTSAISSPLTKSISLMTISHPGLDNSRPFHSTFHNTSANLTESITEENYNFLPHSPSKKDSEWKSGTKVSRTFSYIKNKMSSSKKSKEKEKEKDKIKEKEKDSKDKEKDKKTVNGHTFSSIPVVGPISCSQCMKPFTNKDAYTCANCSAFVHKGCRESLASCAKVKMKQPKGSLQAHDTSSLPTVIMRNKPSQPKERPRSAVLLVDETATTPIFANRRSQQSVSLSKSVSIQNITGVGNDENMSNTWKFLSHSTDSLNKISKVNESTESLTDEEGTDMNEGQLLGDFEIESKQLEAESWSRIIDSKFLKQQKKDVVKRQEVIYELMQTEFHHVRTLKIMSGVYSQGMMADLLFEQQMVEKLFPCLDELISIHSQFFQRILERKKESLVDKSEKNFLIKRIGDVLVNQFQVRMQNGHETLAAWGNITSETIQDLCRVGSACKRVTVGAGGPRMGYTGTHRIQHAVRQIGRSQRRRVADAMSSTDIHTKTHRQARSRTTPLSADSLTI

SEQ ID NO: 856288 - protein, 323 aa, Homo sapiens
ETGLKNEGRVLVRHSAWCPLLWGREGSRSSLSSWPELQGSPLCASQGVVLQQDSYIEDQKLVLSERALTRSLSRPSSLIEQEKQRSLEKQRQDLANLQKQQAQYLEEKRRREREWEARERELREREALLAQREEEVQQGQQDLEKEREELQQKKGTYQYDLERLRAAQKQLEREQEQLRREAERLSQRQTERDLCQVSHPHTKLMRIPSFFPSPEEPPSPSAPSIAKSGSLDSELSVSPKRNSISRTHKDKGPFHILSSTSQTNKGPEGQSQAPASTSASTRLFGLTKPKEKKEKKKKNKTSRSQPGDGPASEVSAEGEEIFC

SEQ ID NO: 856289 - protein, 1350 aa, Homo sapiens
MKLNPQQAPLYGDCVVTVLLAEEDKAEDDVVFYLVFLGSTLRHCTSTRKVSSDTLETIAPGHDCCETVKVQLCASKEGLPVFVVAEEDFHFVQDEAYDAAQFLATSAGNQQALNFTRFLDQSGPPSGDVNSLDKKLVLAFRHLKLPTEWNVLGTDQSLHDAGPRETLMHFAVRLGLLRLTWFLLQKPGGRGALSIHNQEGATPVSLALERGYHKLHQLLTEENAGEPDSWSSLSYEIPYGDCSVRHHRELDIYTLTSESDSHHEHPFPGDGCTGPIFKLMNIQQQLMKTNLKQMDSLMPLMMTAQDPSSAPETDGQFLPCAPEPTDPQRLSSSEETESTQCCPGSPVAQTESPCDLSSIVEEENTDRSCRKKNKGVERKGEEVEPAPIVDSGTVSDQDSCLQSLPDCGVKGTEGLSSCGNRNEETGTKSSGMPTDQESLSSGDAVLQRDLVMEPGTAQYSSGGELGGISTTNVSTPDTAGEMEHGLMNPDATVWKNVLQGGESTKERFENSNIGTAGASDVHVTSKPVDKISVPNCAPAASSLDGNKPAESSLAFSNEETSTEKTAETETSRSREESADAPVDQNSVVIPAAAKDKISDGLEPYTLLAAGIGEAMSPSDLALLGLEEDVMPHQNSETNSSHAQSQKGKSSPICSTTGDDKLCADSACQQNTVTSSGDLVAKLCDNIVSESESTTARQPSSQDPPDASHCEDPQAHTVTSDPVRDTQERADFCPFKVVDNKGQRKDVKLDKPLTNMLEVVSHPHPVVPKMEKELVPDQAVISDSTFSLANSPGSESVTKDDALSFVPSQKEKGTATPELHTATDYRDGPDGNSNEPDTRPLEDRAAGLSTSSTAAELQHGMGNTSLTGLGGEHEGPAPPAIPEALNIKGNTDSSLQSMGKATLALDSVLTEEGKLLVVSESSAAQEQDKDKAVTCSSIKENALSSGTLQEEQRTPPPGQDTQQFHEKSISADCAKDKALQLSNSPGASSAFLKAETEHNKEVAPQVSLLTQGGAAQSLVPPGASLATESRQEALGAEHNSSALLPCLLPDGSDGSDALNCSQASPLDVGVKNTQSQGKTSACEVSGNVTVDVTGVNALQGMAEPRRENISHNTQDILIPNVLLSQEKNAVLGLPVALQDKAVTDPQGVGTPEMIPLDWEKGKLEGADHSCTMGDAEEAQIDDEAHPVLLQPVAKELPTDMELSAHDDGAPAGVREVTRAPPSGRERSTPSLPCMVSAQDAPLPKGADLIEEAASRIVDAVIEQVKAAGALLTEGEACHMSLSSPELGPLTKGLESAFTEKVSTFPPGESLPMGSTPEEATGSLAGCFAGREEPEKIILPVQGPEPAAECQT

SEQ ID NO: 856290 - protein, 1604 aa, Homo sapiens
MKLNPQQAPLYGDCVVTVLLAEEDKAEDDVVFYLVFLGSTLRHCTSTRKVSSDTLETIAPGHDCCETVKVQLCASKEGLPVFVVAEEDFHFVQDEAYDAAQFLATSAGNQQALNFTRFLDQSGPPSGDVNSLDKKLVLAFRHLKLPTEWNVLGTDQSLHDAGPRETLMHFAVRLGLLRLTWFLLQKPGGRGALSIHNQEGATPVSLALERGYHKLHQLLTEENAGEPDSWSSLSYEIPYGDCSVRHHRELDIYTLTSESDSHHEHPFPGDGCTGPIFKLMNIQQQLMKTNLKQMDSLMPLMMTAQDPSSAPETDGQFLPCAPEPTDPQRLSSSEETESTQCCPGSPVAQTESPCDLSSIVEEENTDRSCRKKNKGVERKGEEVEPAPIVDSGTVSDQDSCLQSLPDCGVKGTEGLSSCGNRNEETGTKSSGMPTDQESLSSGDAVLQRDLVMEPGTAQYSSGGELGGISTTNVSTPDTAGEMEHGLMNPDATVWKNVLQGGESTKERFENSNIGTAGASDVHVTSKPVDKISVPNCAPAASSLDGNKPAESSLAFSNEETSTEKTAETETSRSREESADAPVDQNSVVIPAAAKDKISDGLEPYTLLAAGIGEAMSPSDLALLGLEEDVMPHQNSETNSSHAQSQKGKSSPICSTTGDDKLCADSACQQNTVTSSGDLVAKLCDNIVSESESTTARQPSSQDPPDASHCEDPQAHTVTSDPVRDTQERADFCPFKVVDNKGQRKDVKLDKPLTNMLEVVSHPHPVVPKMEKELVPDQAVISDSTFSLANSPGSESVTKDDALSFVPSQKEKGTATPELHTATDYRDGPDGNSNEPDTRPLEDRAAGLSTSSTAAELQHGMGNTSLTGLGGEHEGPAPPAIPEALNIKGNTDSSLQSMGKATLALDSVLTEEGKLLVVSESSAAQEQDKDKAVTCSSIKENALSSGTLQEEQRTPPPGQDTQQFHEKSISADCAKDKALQLSNSPGASSAFLKAETEHNKEVAPQVSLLTQGGAAQSLVPPGASLATESRQEALGAEHNSSALLPCLLPDGSDGSDALNCSQASPLDVGVKNTQSQGKTSACEVSGNVTVDVTGVNALQGMAEPRRENISHNTQDILIPNVLLSQEKNAVLGLPVALQDKAVTDPQGVGTPEMIPLDWEKGKLEGADHSCTMGDAEEAQIDDEAHPVLLQPVAKELPTDMELSAHDDGAPAGVREVTRAPPSGRERSTPSLPCMVSAQDAPLPKGADLIEEAASRIVDAVIEQVKAAGALLTEGEACHMSLSSPELGPLTKGLESAFTEKVSTFPPGESLPMGSTPEEATGSLAGCFAGREEPEKIILPVQGPEPAAEMPDVKAEDEVDFRASSISEEVAVGSIAATLKMKQGPMTQAINRENWCTIEPCPDAASLLASKQSPECENFLDVGLGRECTSKQGVLKRESGSDSDLFHSPSDDMDSIIFPKPEEEHLACDITGSSSSTDDTASLDRHSSHGSDVSLSQILKPNRSRDRQSLDGFYSHGMGAEGRESESEPADPGDVEEEEMDSITEVPANCSVLRSSMRSLSPFRRHSWGPGKNAASDAEMNHRSSMRVLGDVVRRPPIHRRRYRVH

SEQ ID NO: 856291 - protein, 330 aa, Homo sapiens
PAKSPSPLPSPGSAGNNEQHVGPRRRQVKTLTAKLNAKDSRGIDEELGPNVGPKPHPTAAEPLIEQRKKEEQTTRSQPVSPRQKYQQRRRDLLLTLFLSAEAAASDPASPPLLRPRVHKSLTLTPTAPQQSSPPGRPQVLDNKQRSLEKQRQDLANLQKQQAQYLEEKRRREREWEARERELREREALLAQREEEVQQGQQDLEKEREELQQKKGTYQYDLERLRAAQKQLEREQEQLRREAERLSQRQTERDLCQVSHPHTKLMRIPSFFPSPEEPPSPSAPSIAKSGSLDSELSVSPKRNSISRTHKDKGPFHILSSTSQTNKGPEGQ

SEQ ID NO: 856292 - protein, 1698 aa, Homo sapiens
MKLNPQQAPLYGDCVVTVLLAEEDKAEDDVVFYLVFLGSTLRHCTSTRKVSSDTLETIAPGHDCCETVKVQLCASKEGLPVFVVAEEDFHFVQDEAYDAAQFLATSAGNQQALNFTRFLDQSGPPSGDVNSLDKKLVLAFRHLKLPTEWNVLGTDQSLHDAGPRETLMHFAVRLGLLRLTWFLLQKPGGRGALSIHNQEGATPVSLALERGYHKLHQLLTEENAGEPDSWSSLSYEIPYGDCSVRHHRELDIYTLTSESDSHHEHPFPGDGCTGPIFKLMNIQQQLMKTNLKQMDSLMPLMMTAQDPSSAPETDGQFLPCAPEPTDPQRLSSSEETESTQCCPGSPVAQTESPCDLSSIVEEENTDRSCRKKNKGVERKGEEVEPAPIVDSGTVSDQDSCLQSLPDCGVKGTEGLSSCGNRNEETGTKSSGMPTDQESLSSGDAVLQRDLVMEPGTAQYSSGGELGGISTTNVSTPDTAGEMEHGLMNPDATVWKNVLQGGESTKERFENSNIGTAGASDVHVTSKPVDKISVPNCAPAASSLDGNKPAESSLAFSNEETSTEKTAETETSRSREESADAPVDQNSVVIPAAAKDKISDGLEPYTLLAAGIGEAMSPSDLALLGLEEDVMPHQNSETNSSHAQSQKGKSSPICSTTGDDKLCADSACQQNTVTSSGDLVAKLCDNIVSESESTTARQPSSQDPPDASHCEDPQAHTVTSDPVRDTQERADFCPFKVVDNKGQRKDVKLDKPLTNMLEVVSHPHPVVPKMEKELVPDQAVISDSTFSLANSPGSESVTKDDALSFVPSQKEKGTATPELHTATDYRDGPDGNSNEPDTRPLEDRAAGLSTSSTAAELQHGMGNTSLTGLGGEHEGPAPPAIPEALNIKGNTDSSLQSMGKATLALDSVLTEEGKLLVVSESSAAQEQDKDKAVTCSSIKENALSSGTLQEEQRTPPPGQDTQQFHEKSISADCAKDKALQLSNSPGASSAFLKAETEHNKEVAPQVSLLTQGGAAQSLVPPGASLATESRQEALGAEHNSSALLPCLLPDGSDGSDALNCSQASPLDVGVKNTQSQGKTSACEVSGNVTVDVTGVNALQGMAEPRRENISHNTQDILIPNVLLSQEKNAVLGLPVALQDKAVTDPQGVGTPEMIPLDWEKGKLEGADHSCTMGDAEEAQIDDEAHPVLLQPVAKELPTDMELSAHDDGAPAGVREVTRAPPSGRERSTPSLPCMVSAQDAPLPKGADLIEEAASRIVDAVIEQVKAAGALLTEGEACHMSLSSPELGPLTKGLESAFTEKVSTFPPGESLPMGSTPEEATGSLAGCFAGREEPEKIILPVQGPEPAAEMPDVKAEDEVDFRASSISEEVAVGSIAATLKMKQGPMTQAINRENWCTIEPCPDAASLLASKQSPECENFLDVGLGRECTSKQGVLKRESGSDSDLFHSPSDDMDSIIFPKPEEEHLACDITGSSSSTDDTASLDRHSSHGSDVSLSQILKPNRSRDRQSLDGFYSHGMGAEGRESESEPADPGDVEEEEMDSITEVPANCSVLRSSMRSLSPFRRHSWGPGKNAASDAEMNHRSFSLEGLTGGAGVGNKPSSSLEVSSANAEELRHPFSGEERVDSLVSLSEEDLESDQREHRMFDQQICHRSKQQGFNYCTSAISSPLTKSISLMTISHPGLDIFTALPPVPATIPVLI

SEQ ID NO: 856293 - protein, 155 aa, Homo sapiens [sequence omitted]

SEQ ID NO: 856294 - protein, 112 aa, Homo sapiens
  misc_feature (10)..(10): Xaa can be any naturally occurring amino acid
SCIPPPFRTXVSPSTNSRPFHSTFHNTSANLTESITEENYNFLPHSPSKKDSEWKSGTKVSRTFSYIKNKMSSSKKSKVSITVGIACDHLSRILSQPAFTPKLVKSWGHKWK

SEQ ID NO: 856295 - protein, 221 aa, Homo sapiens
MKLNPQQAPLYGDCVVTVLLAEEDKAEDDVVFYLVFLGSTLRHCTSTRKVSSDTLETIAPGHDCCETVKVQLCASKEGLPVFVVAEEDFHFVQDEAYDAAQFLATSAGNQQALNFTRFLDQSGPPSGDVNSLDKKLVLAFRHLKLPTEWNVLGTDQSLHDAGPRETLMHFAVRLGLLRLTWFLLQKPGGRGALSIHNQEGATPVSLALERGYHKLHQLLTE

SEQ ID NO: 856296 - protein, 233 aa, Homo sapiens
ETGLKNEGRVLVRHSAWCPLLWGREGSRSSLSSWPELQGSPLCASQGVVLQQDSYIEDQKLVLSERALTRSLSRPSSLIEQEKQRSLEKQRQDLANLQKQQAQYLEEKRRREREWEARERELREREALLAQREEEVQQGQQDLEKKTKTRGAKGPPEREELQQKKGTYQYDLERLRAAQKQLEREQEQLRREAERLSQRQTERDLCQVMGLPAESNLMMILIKTPCVLSKVRK

SEQ ID NO: 856297 - protein, 1149 aa, Homo sapiens
MRPARRISISISPLLLKSKTLFSLGSSYSSDEEEELHNSRPFHSTFHNTSANLTESITEENYNFLPHSPSKKDSEWKSGTKVSRTFSYIKNKMSSSKKSKEKEKEKDKIKEKEKDSKDKEKDKKTVNGHTFSSIPVVGPISCSQCMKPFTNKDAYTCANCSAFVHKGCRESLASCAKVKMKQPKGSLQAHDTSSLPTVIMRNKPSQPKERPRSAVLLVDETATTPIFANRRSQQSVSLSKSVSIQNITGVGNDENMSNTWKFLSHSTDSLNKISKVNESTESLTDEEGTDMNEGQLLGDFEIESKQLEAESWSRIIDSKFLKQQKKDVVKRQEVIYELMQTEFHHVRTLKIMSGVYSQGMMADLLFEQQMVEKLFPCLDELISIHSQFFQRILERKKESLVDKSEKNFLIKRIGDVLVNQFSGENAERLKKTYGKFCGQHNQSVNYFKDLYAKDKRFQAFVKKKMSSSVVRRLGIPECILLVTQRITKYPVLFQRILQCTKDNEVEQEDLAQSLSLVKDVIGAVDSKVASYEKKVRLNEIYTKTDSKSIMRMKSGQMFAKEDLKRKKLVRDGSVFLKNAAGRLKEVQAVLLTDILVFLQEKDQKYIFASLDQKSTVISLKKLIVREVAHEEKGLFLISMGMTDPEMVEVHASSKEERNSWIQIIQDTINTLNRDEDEGIPSENEEEKKMLDTRARELKEQLHQKDQKILLLLEEKEMIFRDMAECSTPLPEDCSPTHSPRVLFRSNTEEALKGGPLMKSAINEVEILQGLVSGNLGGTLGPTVSSPIEQDVVGPVSLPRRAETFGGFDSHQMNASKGGEKEEGDDGQDLRRTESDSGLKKGGNANLVFMLKRNSEQVVQSVVHLYELLSALQGVVLQQDSYIEDQKLVLSERALTRSLSRPSSLIEQEKQRSLEKQRQDLANLQKQQAQYLEEKRRREREWEARERELREREALLAQREEEVQQGQQDLEKEREELQQKKGTYQYDLERLRAAQKQLEREQEQLRREAERLSQRQTERDLCQVSHPHTKLMRIPSFFPSPEEPPSPSAPSIAKSGSLDSELSVSPKRNSISRTHKDKGPFHILSSTSQTNKGPEGQSQAPASTSASTRLFGLTKPKEKKEKKKKNKTSRSQPGDGPASEVSAEGEEIFC

SEQ ID NO: 856298 - protein, 213 aa, Homo sapiens
MTGERRPYACTKDNEVEQEDLAQSLSLVKDVIGAVDSKVASYEKKVRLNEIYTKTDSKSIMRMKSGQMFAKEDLKRKKLVRDGSVFLKNAAGRLKEVQAVLLTDILVFLQEKDQKYIFASLDQKSTVISLKKLIVREVAHEEKGLFLISMGMTDPEMVEVHASSKEERNSWIQIIQDTINTLNRDEDEGIPSENEEEKKMLDTHRVRARFVSC

SEQ ID NO: 856299 - protein, 2812 aa, Homo sapiens; identical to SEQ ID NO: 856268

SEQ ID NO: 856300 - protein, 2850 aa, Homo sapiens
MKLNPQQAPLYGDCVVTVLLAEEDKAEDDVVFYLVFLGSTLRHCTSTRKVSSDTLETIAPGHDCCETVKVQLCASKEGLPVFVVAEEDFHFVQDEAYDAAQFLATSAGNQQALNFTRFLDQSGPPSGDVNSLDKKLVLAFRHLKLPTEWNVLGTDQSLHDAGPRETLMHFAVRLGLLRLTWFLLQKPGGRGALSIHNQEGATPVSLALERGYHKLHQLLTEENAGEPDSWSSLSYEIPYGDCSVRHHRELDIYTLTSESDSHHEHPFPGDGCTGPIFKLMNIQQQLMKTNLKQMDSLMPLMMTAQDPSSAPETDGQFLPCAPEPTDPQRLSSSEETESTQCCPGSPVAQTESPCDLSSIVEEENTDRSCRKKNKGVERKGEEVEPAPIVDSGTVSDQDSCLQSLPDCGVKGTEGLSSCGNRNEETGTKSSGMPTDQESLSSGDAVLQRDLVMEPGTAQYSSGGELGGISTTNVSTPDTAGEMEHGLMNPDATVWKNVLQGGESTKERFENSNIGTAGASDVHVTSKPVDKISVPNCAPAASSLDGNKPAESSLAFSNEETSTEKTAETETSRSREESADAPVDQNSVVIPAAAKDKISDGLEPYTLLAAGIGEAMSPSDLALLGLEEDVMPHQNSETNSSHAQSQKGKSSPICSTTGDDKLCADSACQQNTVTSSGDLVAKLCDNIVSESESTTARQPSSQDPPDASHCEDPQAHTVTSDPVRDTQERADFCPFKVVDNKGQRKDVKLDKPLTNMLEVVSHPHPVVPKMEKELVPDQAVISDSTFSLANSPGSESVTKDDALSFVPSQKEKGTATPELHTATDYRDGPDGNSNEPDTRPLEDRAAGLSTSSTAAELQHGMGNTSLTGLGGEHEGPAPPAIPEALNIKGNTDSSLQSMGKATLALDSVLTEEGKLLVVSESSAAQEQDKDKAVTCSSIKENALSSGTLQEEQRTPPPGQDTQQFHEKSISADCAKDKALQLSNSPGASSAFLKAETEHNKEVAPQVSLLTQGGAAQSLVPPGASLATESRQEALGAEHNSSALLPCLLPDGSDGSDALNCSQASPLDVGVKNTQSQGKTSACEVSGNVTVDVTGVNALQGMAEPRRENISHNTQDILIPNVLLSQEKNAVLGLPVALQDKAVTDPQGVGTPEMIPLDWEKGKLEGADHSCTMGDAEEAQIDDEAHPVLLQPVAKELPTDMELSAHDDGAPAGVREVTRAPPSGRERSTPSLPCMVSAQDAPLPKGADLIEEAASRIVDAVIEQVKAAGALLTEGEACHMSLSSPELGPLTKGLESAFTEKVSTFPPGESLPMGSTPEEATGSLAGCFAGREEPEKIILPVQGPEPAAEMPDVKAEDEVDFRASSISEEVAVGSIAATLKMKQGPMTQAINRENWCTIEPCPDAASLLASKQSPECENFLDVGLGRECTSKQGVLKRESGSDSDLFHSPSDDMDSIIFPKPEEEHLACDITGSSSSTDDTASLDRHSSHGSDVSLSQILKPNRSRDRQSLDGFYSHGMGAEGRESESEPADPGDVEEEEMDSITEVPANCSVLRSSMRSLSPFRRHSWGPGKNAASDAEMNHRSSMRVLGDVVRRPPIHRRSFSLEGLTGGAGVGNKPSSSLEVSSANAEELRHPFSGEERVDSLVSLSEEDLESDQREHRMFDQQICHRSKQQGFNYCTSAISSPLTKSISLMTISHPGLDNSRPFHSTFHNTSANLTESITEENYNFLPHSPSKKDSEWKSGTKVSRTFSYIKNKMSSSKKSKEKEKEKDKIKEKEKDSKDKEKDKKTVNGHTFSSIPVVGPISCSQCMKPFTNKDAYTCANCSAFVHKGCRESLASCAKVKMKQPKGSLQAHDTSSLPTVIMRNKPSQPKERPRSAVLLVDETATTPIFANRRSQQSVSLSKSVSIQNITGVGNDENMSNTWKFLSHSTDSLNKISKVNESTESLTDEEGTDMNEGQLLGDFEIESKQLEAESWSRIIDSKFLKQQKKDVVKRQEVIYELMQTEFHHVRTLKIMSGVYSQGMMADLLFEQQMVEKLFPCLDELISIHSQFFQRILERKKESLVDKSEKNFLIKRIGDVLVNQFSGENAERLKKTYGKFCGQHNQSVNYFKDLYAKDKRFQAFVKVLIRNMKIPVIVESHVSLSAFTESLFHVIPHSLFTPLQKKMSSSVVRRLGIPECILLVTQRITKYPVLFQRILQCTKDNEVEQEDLAQSLSLVKDVIGAVDSKVASYEKKVRLNEIYTKTDSKSIMRMKSGQMFAKEDLKRKKLVRDGSVFLKNAAGRLKEVQAVLLTDILVFLQEKDQKYIFASLDQKSTVISLKKLIVREVAHEEKGLFLISMGMTDPEMVEVHASSKEERNSWIQIIQDTINTLNRDEDEGIPSENEEEKKMLDTRARELKEQLHQKDQKILLLLEEKEMIFRDMAECSTPLPEDCSPTHSPRVLFRSNTEEALKGGPLMKSAINEVEILQGLVSGNLGGTLGPTVSSPIEQDVVGPVSLPRRAETFGGFDSHQMNASKGGEKEEGDDGQDLRRTESDSGLKKGGNANLVFMLKRNSEQVVQSVVHLYELLSALQGVVLQQDSYIEDQKLVLSERALTRSLSRPSSLIEQEKQRSLEKQRQDLANLQKQQAQYLEEKRRREREWEARERELREREALLAQREEEVQQGQQDLEKEREELQQKKGTYQYDLERLRAAQKQLEREQEQLRREAERLSQRQTERDLCQVSHPHTKLMRIPSFFPSPEEPPSPSAPSIAKSGSLDSELSVSPKRNSISRTHKDKGPFHILSSTSQTNKGPEGQSQAPASTSASTRLFGLTKPKEKKEKKKKNKTSRSQPGDGPASEVSAEGEEIFC

SEQ ID NO: 856301 - protein, 2722 aa, Homo sapiens; identical to SEQ ID NO: 856278

SEQ ID NO: 856302 - protein, 2841 aa, Homo sapiens
MKLNPQQAPLYGDCVVTVLLAEEDKAEDDVVFYLVFLGSTLRHCTSTRKVSSDTLETIAPGHDCCETVKVQLCASKEGLPVFVVAEEDFHFVQDEAYDAAQFLATSAGNQQALNFTRFLDQSGPPSGDVNSLDKKLVLAFRHLKLPTEWNVLGTDQSLHDAGPRETLMHFAVRLGLLRLTWFLLQKPGGRGALSIHNQEGATPVSLALERGYHKLHQLLTEENAGEPDSWSSLSYEIPYGDCSVRHHRELDIYTLTSESDSHHEHPFPGDGCTGPIFKLMNIQQQLMKTNLKQMDSLMPLMMTAQDPSSAPETDGQFLPCAPEPTDPQRLSSSEETESTQCCPGSPVAQTESPCDLSSIVEEENTDRSCRKKNKGVERKGEEVEPAPIVDSGTVSDQDSCLQSLPDCGVKGTEGLSSCGNRNEETGTKSSGMPTDQESLSSGDAVLQRDLVMEPGTAQYSSGGELGGISTTNVSTPDTAGEMEHGLMNPDATVWKNVLQGGESTKERFENSNIGTAGASDVHVTSKPVDKISVPNCAPAASSLDGNKPAESSLAFSNEETSTEKTAETETSRSREESADAPVDQNSVVIPAAAKDKISDGLEPYTLLAAGIGEAMSPSDLALLGLEEDVMPHQNSETNSSHAQSQKGKSSPICSTTGDDKLCADSACQQNTVTSSGDLVAKLCDNIVSESESTTARQPSSQDPPDASHCEDPQAHTVTSDPVRDTQERADFCPFKVVDNKGQRKDVKLDKPLTNMLEVVSHPHPVVPKMEKELVPDQAVISDSTFSLANSPGSESVTKDDALSFVPSQKEKGTATPELHTATDYRDGPDGNSNEPDTRPLEDRAAGLSTSSTAAELQHGMGNTSLTGLGGEHEGPAPPAIPEALNIKGNTDSSLQSMGKATLALDSVLTEEGKLLVVSESSAAQEQDKDKAVTCSSIKENALSSGTLQEEQRTPPPGQDTQQFHEKSISADCAKDKALQLSNSPGASSAFLKAETEHNKEVAPQVSLLTQGGAAQSLVPPGASLATESRQEALGAEHNSSALLPCLLPDGSDGSDALNCSQASPLDVGVKNTQSQGKTSACEVSGNVTVDVTGVNALQGMAEPRRENISHNTQDILIPNVLLSQEKNAVLGLPVALQDKAVTDPQGVGTPEMIPLDWEKGKLEGADHSCTMGDAEEAQIDDEAHPVLLQPVAKELPTDMELSAHDDGAPAGVREVTRAPPSGRERSTPSLPCMVSAQDAPLPKGADLIEEAASRIVDAVIEQVKAAGALLTEGEACHMSLSSPELGPLTKGLESAFTEKVSTFPPGESLPMGSTPEEATGSLAGCFAGREEPEKIILPVQGPEPAAEMPDVKAEDEVDFRASSISEEVAVGSIAATLKMKQGPMTQAINRENWCTIEPCPDAASLLASKQSPECENFLDVGLGRECTSKQGVLKRESGSDSDLFHSPSDDMDSIIFPKPEEEHLACDITGSSSSTDDTASLDRHSSHGSDVSLSQILKPNRSRDRQSLDGFYSHGMGAEGRESESEPADPGDVEEEEMDSITEVPANCSVLRSSMRSLSPFRRHSWGPGKNAASDAEMNHRSSMRVLGDVVRRPPIHRRSFSLEGLTGGAGVGNKPSSSLEVSSANAEELRHPFSGEERVDSLVSLSEEDLESDQREHRMFDQQICHRSKQQGFNYCTSAISSPLTKSISLMTISHPGLDNSRPFHSTFHNTSANLTESITEENYNFLPHSPSKKDSEWKSGTKVSRTFSYIKNKMSSSKKSKEKEKEKDKIKEKEKDSKDKEKDKKTVNGHTFSSIPVVGPISCSQCMKPFTNKDAYTCANCSAFVHKGCRESLASCAKVKMKQPKGSLQAHDTSSLPTVIMRNKPSQPKERPRSAVLLVDETATTPIFANRRSQQSVSLSKSVSIQNITGVGNDENMSNTWKFLSHSTDSLNKISKVNESTESLTDEEGTDMNEGQLLGDFEIESKQLEAESWSRIIDSKFLKQQKKDVVKRQEVIYELMQTEFHHVRTLKIMSGVYSQGMMADLLFEQQMVEKLFPCLDELISIHSQFFQRILERKKESLVDKSEKNFLIKRIGDVLVNQFSGENAERLKKTYGKFCGQHNQSVNYFKDLYAKDKRFQAFVKKKMSSSVVRRLGIPECILLVTQRITKYPVLFQRILQCTKDNEVEQEDLAQSLSLVKDVIGAVDSKVASYEKKVRLNEIYTKTDSKSIMRMKSGQMFAKEDLKRKKLVRDGSVFLKNAAGRLKEVQAVLLTDILVFLQEKDQKYIFASLDQKSTVISLKKLIVREVAHEEKGLFLISMGMTDPEMVEVHASSKEERNSWIQIIQDTINTLNRDEDEGIPSENEEEKKMLDTRARELKEQLHQKDQKILLLLEEKEMIFRDMAECSTPLPEDCSPTHSPRVLFRSNTEEALKGGPLMKSAINEVEILQGLVSGNLGGTLGPTVSSPIEQDVVGPVSLPRRAETFGGFDSHQMNASKGGEKEEGDDGQDLRRTESDSGLKKGGNANLVFMLKRNSEQVVQSVVHLYELLSALQGVVLQQDSYIEDQKLVLSERALTRSLSRPSSLIEQEKQRSLEKQRQDLANLQKQQAQYLEEKRRREREWEARERELREREALLAQREEEVQQGQQDLEKEREELQQKKGTYQYDLERLRAAQKQLEREQEQLRREAERLSQRQTERDLCQVSHPHTKLMRIPSFFPSPEEPPSPSAPSIAKSGSLDSELSVSPKRNSISRTHKDKGPFHILSSTSQTNKGPEGQSQAPAVHLCLYPPVWVNKAKRKKKGPEGQSQAPASTSASTRLFGLTKPKEKKEKKKKNKTSRSQPGDGPASEVSAEGEEIFC

SEQ ID NO: 856303 - protein, 2794 aa, Homo sapiens
MKLNPQQAPLYGDCVVTVLLAEEDKAEDDVVFYLVFLGSTLRHCTSTRKVSSDTLETIAPGHDCCETVKVQLCASKEGLPVFVVAEEDFHFVQDEAYDAAQFLATSAGNQQALNFTRFLDQSGPPSGDVNSLDKKLVLAFRHLKLPTEWNVLGTDQSLHDAGPRETLMHFAVRLGLLRLTWFLLQKPGGRGALSIHNQEGATPVSLALERGYHKLHQLLTEENAGEPDSWSSLSYEIPYGDCSVRHHRELDIYTLTSESDSHHEHPFPGDGCTGPIFKLMNIQQQLMKTNLKQMDSLMPLMMTAQDPSSAPETDGQFLPCAPEPTDPQRLSSSEETESTQCCPGSPVAQTESPCDLSSIVEEENTDRSCRKKNKGVERKGEEVEPAPIVDSGTVSDQDSCLQSLPDCGVKGTEGLSSCGNRNEETGTKSSGMPTDQESLSSGDAVLQRDLVMEPGTAQYSSGGELGGISTTNVSTPDTAGEMEHGLMNPDATVWKNVLQGGESTKERFENSNIGTAGASDVHVTSKPVDKISVPNCAPAASSLDGNKPAESSLAFSNEETSTEKTAETETSRSREESADAPVDQNSVVIPAAAKDKISDGLEPYTLLAAGIGEAMSPSDLALLGLEEDVMPHQNSETNSSHAQSQKGKSSPICSTTGDDKLCADSACQQNTVTSSGDLVAKLCDNIVSESESTTARQPSSQDPPDASHCEDPQAHTVTSDPVRDTQERADFCPFKVVDNKGQRKDVKLDKPLTNMLEVVSHPHPVVPKMEKELVPDQAVISDSTFSLANSPGSESVTKDDALSFVPSQKEKGTATPELHTATDYRDGPDGNSNEPDTRPLEDRAAGLSTSSTAAELQHGMGNTSLTGLGGEHEGPAPPAIPEALNIKGNTDSSLQSMGKATLALDSVLTEEGKLLVVSESSAAQEQDKDKAVTCSSIKENALSSGTLQEEQRTPPPGQDTQQFHEKSISADCAKDKALQLSNSPGASSAFLKAETEHNKEVAPQVSLLTQGGAAQSLVPPGASLATESRQEALGAEHNSSALLPCLLPDGSDGSDALNCSQASPLDVGVKNTQSQGKTSACEVSGNVTVDVTGVNALQGMAEPRRENISHNTQDILIPNVLLSQEKNAVLGLPVALQDKAVTDPQGVGTPEMIPLDWEKGKLEGADHSCTMGDAEEAQIDDEAHPVLLQPVAKELPTDMELSAHDDGAPAGVREVTRAPPSGRERSTPSLPCMVSAQDAPLPKGADLIEEAASRIVDAVIEQVKAAGALLTEGEACHMSLSSPELGPLTKGLESAFTEKVSTFPPGESLPMGSTPEEATGSLAGCFAGREEPEKIILPVQGPEPAAEMPDVKAEDEVDFRASSISEEVAVGSIAATLKMKQGPMTQAINRENWCTIEPCPDAASLLASKQSPECENFLDVGLGRECTSKQGVLKRESGSDSDLFHSPSDDMDSIIFPKPEEEHLACDITGSSSSTDDTASLDRHSSHGSDVSLSQILKPNRSRDRQSLDGFYSHGMGAEGRESESEPADPGDVEEEEMDSITEVPANCSVLRSSMRSLSPFRRHSWGPGKNAASDAEMNHRSFSLEGLTGGAGVGNKPSSSLEVSSANAEELRHPFSGEERVDSLVSLSEEDLESDQREHRMFDQQICHRSKQQGFNYCTSAISSPLTKSISLMTISHPGLDNSRPFHSTFHNTSANLTESITEENYNFLPHSPSKKDSEWKSGTKVSRTFSYIKNKMSSSKKSKEKEKEKDKIKEKEKDSKDKEKDKKTVNGHTFSSIPVVGPISCSQCMKPFTNKDAYTCANCSAFVHKGCRESLASCAKVKMKQPKGSLQAHDTSSLPTVIMRNKPSQPKERPRSAVLLVDETATTPIFANRRSQQSVSLSKSVSIQNITGVGNDENMSNTWKFLSHSTDSLNKISKVNESTESLTDEEGTDMNEGQLLGDFEIESKQLEAESWSRIIDSKFLKQQKKDVVKRQEVIYELMQTEFHHVRTLKIMSGVYSQGMMADLLFEQQMVEKLFPCLDELISIHSQFFQRILERKKESLVDKSEKNFLIKRIGDVLVNQFSGENAERLKKTYGKFCGQHNQSVNYFKDLYAKDKRFQAFVKKKMSSSVVRRLGIPECILLVTQRITKYPVLFQRILQCTKDNEVEQEDLAQSLSLVKDVIGAVDSKVASYEKKVRLNEIYTKTDSKSIMRMKSGQMFAKEDLKRKKLVRDGSVFLKNAAGRLKEVQAVLLTDILVFLQEKDQKYIFASLDQKSTVISLKKLIVREVAHEEKGLFLISMGMTDPEMVEVHASSKEERNSWIQIIQDTINTLNRDEDEGIPSENEEEKKMLDTRARELKEQLHQKDQKILLLLEEKEMIFRDMAECSTPLPEDCSPTHSPRVLFRSNTEEALKGGPLMKSAINEVEILQGLVSGNLGGTLGPTVSSPIEQDVVGPVSLPRRAETFGGFDSHQMNASKGGEKEEGDDGQDLRRTESDSGLKKGGNANLVFMLKRNSEQVVQSVVHLYELLSALQGVVLQQDSYIEDQKLVLSERALTRSLSRPSSLIEQEKQRSLEKQRQDLANLQKQQAQYLEEKRRREREWEARERELREREALLAQREEEVQQGQQDLEKEREELQQKKGTYQYDLERLRAAQKQLEREQEQLRREAERLSQRQTERDLCQVSHPHTKLMRIPSFFPSPEEPPSPSAPSIAKSGSLDSELSVSPKRNSISRTHKDKGPFHILSSTSQTNKGPEGQSQAPASTSASTRLFGLTKPKEKKEKKKKNKTSRSQPGDGPASEVSAEGEEIFC

SEQ ID NO: 856304 - protein, 2834 aa, Homo sapiens
MKLNPQQAPLYGDCVVTVLLAEEDKAEDDVVFYLVFLGSTLRHCTSTRKVSSDTLETIAPGHDCCETVKVQLCASKEGLPVFVVAEEDFHFVQDEAYDAAQFLATSAGNQQALNFTRFLDQSGPPSGDVNSLDKKLVLAFRHLKLPTEWNVLGTDQSLHDAGPRETLMHFAVRLGLLRLTWFLLQKPGGRGALSIHNQEGATPVSLALERGYHKLHQLLTEENAGEPDSWSSLSYEIPYGDCSVRHHRELDIYTLTSESDSHHEHPFPGDGCTGPIFKLMNIQQQLMKTNLKQMDSLMPLMMTAQDPSSAPETDGQFLPCAPEPTDPQRLSSSEETESTQCCPGSPVAQTESPCDLSSIVEEENTDRSCRKKNKGVERKGEEVEPAPIVDSGTVSDQDSCLQSLPDCGVKGTEGLSSCGNRNEETGTKSSGMPTDQESLSSGDAVLQRDLVMEPGTAQYSSGGELGGISTTNVSTPDTAGEMEHGLMNPDATVWKNVLQGGESTKERFENSNIGTAGASDVHVTSKPVDKISVPNCAPAASSLDGNKPAESSLAFSNEETSTEKTAETETSRSREESADAPVDQNSVVIPAAAKDKISDGLEPYTLLAAGIGEAMSPSDLALLGLEEDVMPHQNSETNSSHAQSQKGKSSPICSTTGDDKLCADSACQQNTVTSSGDLVAKLCDNIVSESESTTARQPSSQDPPDASHCEDPQAHTVTSDPVRDTQERADFCPFKVVDNKGQRKDVKLDKPLTNMLEVVSHPHPVVPKMEKELVPDQAVISDSTFSLANSPGSESVTKDDALSFVPSQKEKGTATPELHTATDYRDGPDGNSNEPDTRPLEDRAAGLSTSSTAAELQHGMGNTSLTGLGGEHEGPAPPAIPEALNIKGNTDSSLQSMGKATLALDSVLTEEGKLLVVSESSAAQEQDKDKAVTCSSIKENALSSGTLQEEQRTPPPGQDTQQFHEKSISADCAKDKALQLSNSPGASSAFLKAETEHNKEVAPQVSLLTQGGAAQSLVPPGASLATESRQEALGAEHNSSALLPCLLPDGSDGSDALNCSQASPLDVGVKNTQSQGKTSACEVSGNVTVDVTGVNALQGMAEPRRENISHNTQDILIPNVLLSQEKNAVLGLPVALQDKAVTDPQGVGTPEMIPLDWEKGKLEGADHSCTMGDAEEAQIDDEAHPVLLQPVAKELPTDMELSAHDDGAPAGVREVTRAPPSGRERSTPSLPCMVSAQDAPLPKGADLIEEAASRIVDAVIEQVKAAGALLTEGEACHMSLSSPELGPLTKGLESAFTEKVSTFPPGESLPMGSTPEEATGSLAGCFAGREEPEKIILPVQGPEPAAEMPDVKAEDEVDFRASSISEEVAVGSIAATLKMKQGPMTQAINRENWCTIEPCPDAASLLASKQSPECENFLDVGLGRECTSKQGVLKRESGSDSDLFHSPSDDMDSIIFPKPEEEHLACDITGSSSSTDDTASLDRHSSHGSDVSLSQILKPNRSRDRQSLDGFYSHGMGAEGRESESEPADPGDVEEEEMDSITEVPANCSVLRSSMRSLSPFRRHSWGPGKNAASDAEMNHRSSMRVLGDVVRRPPIHRRSMSWCPSGVQYSAGLSADFNYRSFSLEGLTGGAGVGNKPSSSLEVSSANAEELRHPFSGEERVDSLVSLSEEDLESDQREHRMFDQQICHRSKQQGFNYCTSAISSPLTKSISLMTISHPGLDNSRPFHSTFHNTSANLTESITEENYNFLPHSPSKKDSEWKSGTKVSRTFSYIKNKMSSSKKSKEKEKEKDKIKEKEKDSKDKEKDKKTVNGHTFSSIPVVGPISCSQCMKPFTNKDAYTCANCSAFVHKGCRESLASCAKVKMKQPKGSLQAHDTSSLPTVIMRNKPSQPKERPRSAVLLVDETATTPIFANRRSQQSVSLSKSVSIQNITGVGNDENMSNTWKFLSHSTDSLNKISKVNESTESLTDEEGTDMNEGQLLGDFEIESKQLEAESWSRIIDSKFLKQQKKDVVKRQEVIYELMQTEFHHVRTLKIMSGVYSQGMMADLLFEQQMVEKLFPCLDELISIHSQFFQRILERKKESLVDKSEKNFLIKRIGDVLVNQFSGENAERLKKTYGKFCGQHNQSVNYFKDLYAKDKRFQAFVKKKMSSSVVRRLGIPECILLVTQRITKYPVLFQRILQCTKDNEVEQEDLAQSLSLVKDVIGAVDSKVASYEKKVRLNEIYTKTDSKSIMRMKSGQMFAKEDLKRKKLVRDGSVFLKNAAGRLKEVQAVLLTDILVFLQEKDQKYIFASLDQKSTVISLKKLIVREVAHEEKGLFLISMGMTDPEMVEVHASSKEERNSWIQIIQDTINTLNRDEDEGIPSENEEEKKMLDTRARELKEQLHQKDQKILLLLEEKEMIFRDMAECSTPLPEDCSPTHSPRVLFRSNTEEALKGGPLMKSAINEVEILQGLVSGNLGGTLGPTVSSPIEQDVVGPVSLPRRAETFGGFDSHQMNASKGGEKEEGDDGQDLRRTESDSGLKKGGNANLVFMLKRNSEQVVQSVVHLYELLSALQGVVLQQDSYIEDQKLVLSERALTRSLSRPSSLIEQEKQRSLEKQRQDLANLQKQQAQYLEEKRRREREWEARERELREREALLAQREEEVQQGQQDLEKEREELQQKKGTYQYDLERLRAAQKQLEREQEQLRREAERLSQRQTERDLCQVSHPHTKLMRIPSFFPSPEEPPSPSAPSIAKSGSLDSELSVSPKRNSISRTHKDKGPFHILSSTSQTNKGPEGQSQAPASTSASTRLFGLTKPKEKKEKKKKNKTSRSQPGDGPASEVSAEGEEIFC

SEQ ID NO: 856305 - protein, 2711 aa, Homo sapiens
MKLNPQQAPLYGDCVVTVLLAEEDKAEDDVVFYLVFLGSTLRHCTSTRKVSSDTLETIAPGHDCCETVKVQLCASKEGLPVFVVAEEDFHFVQDEAYDAAQFLATSAGNQQALNFTRFLDQSGPPSGDVNSLDKKLVLAFRHLKLPTEWNVLGTDQSLHDAGPRETLMHFAVRLGLLRLTWFLLQKPGGRGALSIHNQEGATPVSLALERGYHKLHQLLTEENAGEPDSWSSLSYEIPYGDCSVRHHRELDIYTLTSESDSHHEHPFPGDGCTGPIFKLMNIQQQLMKTNLKQMDSLMPLMMTAQDPSSAPETDGQFLPCAPEPTDPQRLSSSEETESTQCCPGSPVAQTESPCDLSSIVEEENTDRSCRKKNKGVERKGEEVEPAPIVDSGTVSDQDSCLQSLPDCGVKGTEGLSSCGNRNEETGTKSSGMPTDQESLSSGDAVLQRDLVMEPGTAQYSSGGELGGISTTNVSTPDTAGEMEHGLMNPDATVWKNVLQGGESTKERFENSNIGTAGASDVHVTSKPVDKISVPNCAPAASSLDGNKPAESSLAFSNEETSTEKTAETETSRSREESADAPVDQNSVVIPAAAKDKISDGLEPYTLLAAGIGEAMSPSDLALLGLEEDVMPHQNSETNSSHAQSQKGKSSPICSTTGDDKLCADSACQQNTVTSSGDLVAKLCDNIVSESESTTARQPSSQDPPDASHCEDPQAHTVTSDPVRDTQERADFCPFKVVDNKGQRKDVKLDKPLTNMLEVVSHPHPVVPKMEKELVPDQAVISDSTFSLANSPGSESVTKDDALSFVPSQKEKGTATPELHTATDYRDGPDGNSNEPDTRPLEDRAAGLSTSSTAAELQHGMGNTSLTGLGGEHEGPAPPAIPEALNIKGNTDSSLQSMGKATLALDSVLTEEGKLLVVSESSAAQEQDKDKAVTCSSIKENALSSGTLQEEQRTPPPGQDTQQFHEKSISADCAKDKALQLSNSPGASSAFLKAETEHNKEVAPQVSLLTQGGAAQSLVPPGASLATESRQEALGAEHNSSALLPCLLPDGSDGSDALNCSQASPLDVGVKNTQSQGKTSACEVSGNVTVDVTGVNALQGMAEPRRENISHNTQDILIPNVLLSQEKNAVLGLPVALQDKAVTDPQGVGTPEMIPLDWEKGKLEGADHSCTMGDAEEAQIDDEAHPVLLQPVAKELPTDMELSAHDDGAPAGVREVTRAPPSGRERSTPSLPCMVSAQDAPLPKGADLIEEAASRIVDAVIEQVKAAGALLTEGEACHMSLSSPELGPLTKGLESAFTEKVSTFPPGESLPMGSTPEEATGSLAGCFAGREEPEKIILPVQGPEPAAEMPDVKAEDEVDFRASSISEEVAVGSIAATLKMKQGPMTQAINRENWCTIEPCPDAASLLASKQSPECENFLDVGLGRECTSKQGVLKRESGSDSDLFHSPSDDMDSIIFPKPEEEHLACDITGSSSSTDDTASLDRHSSHGSDVSLSQILKPNRSRDRQSLDGFYSHGMGAEGRESESEPADPGDVEEEEMDSITEVPANCSVLRSSMRSLSPFRRHSWGPGKNAASDAEMNHRSSMRVLGDVVRRPPIHRRSFSLEGLTGGAGVGNKPSSSLEVSSANAEELRHPFSGEERVDSLVSLSEEDLESDQREHRMFDQQICHRSKQQGFNYCTSAISSPLTKSISLMTISHPGLDNSRPFHSTFHNTSANLTESITEENYNFLPHSPSKKDSEWKSGTKVSRTFSYIKNKMSSSKKSKEKEKEKDKIKEKEKDSKDKEKDKKTVNGHTFSSIPVVGPISCSQCMKPFTNKDAYTCANCSAFVHKGCRESLASCAKVKMKQPKGSLQAHDTSSLPTVIMRNKPSQPKERPRSAVLLVDETATTPIFANRRSQQSVSLSKSVSIQNITGVGNDENMSNTWKFLSHSTDSLNKISKVNESTESLTDEEGTDMNEGQLLGDFEIESKQLEAESWSRIIDSKFLKQQKKDVVKRQEVIYELMQTEFHHVRTLKIMSGVYSQGMMADLLFEQQMVEKLFPCLDELISIHSQFFQRILERKKESLVDKSEKNFLIKRIGDVLVNQFSGENAERLKKTYGKFCGQHNQSVNYFKDLYAKDKRFQAFVKKKMSSSVVRRLGIPECILLVTQRITKYPVLFQRILQCTKDNEVEQEDLAQSLSLVKDVIGAVDSKVASYEKKVRLNEIYTKTDSKSIMRMKSGQMFAKEDLKRKKLVRDGSVFLKNAAGRLKEVQAVLLTDILVFLQEKDQKYIFASLDQKSTVISLKKLIVREVAHEEKGLFLISMGMTDPEMVEVHASSKEERNSWIQIIQDTINTLNRDEDEGIPSENEEEKKMLDTRARELKEQLHQKDQKILLLLEEKEMIFRDMAECSTPLPEDCSPTHSPRVLFRSNTEEALKGGPLMKSAINEVEILQGLVSGNLGGTLGPTVSSPIEQDVVGPVSLPRRAETFGGFDSHQMNASKGGEKEEGDDGQDLRRTESDSGLKKGGNANLVFMLKRNSEQVVQSVVHLYELLSALQGVVLQQDSYIEDQKLVLSERALTRSLSRPSSLIEQEKQRSLEKQRQDLANLQKQQAQYLEEKRRREREWEARERELREREALLAQREEEVQQGQQDLEKEREELQQKKGTYQYDLERLRAAQKQLEREQEQLRREAERLSQRQTERDLCQVMGLPAESNLMMILIKTPCVLSKVRK

SEQ ID NO: 856306 - protein, 2722 aa, Homo sapiens
MKLNPQQAPLYGDCVVTVLLAEEDKAEDDVVFYLVFLGSTLRHCTSTRKVSSDTLETIAPGHDCCETVKVQLCASKEGLPVFVVAEEDFHFVQDEAYDAAQFLATSAGNQQALNFTRFLDQSGPPSGDVNSLDKKLVLAFRHLKLPTEWNVLGTDQSLHDAGPRETLMHFAVRLGLLRLTWFLLQKPGGRGALSIHNQEGATPVSLALERGYHKLHQLLTEENAGEPDSWSSLSYEIPYGDCSVRHHRELDIYTLTSESDSHHEHPFPGDGCTGPIFKLMNIQQQLMKTNLKQMDSLMPLMMTAQDPSSAPETDGQFLPCAPEPTDPQRLSSSEETESTQCCPGSPVAQTESPCDLSSIVEEENTDRSCRKKNKGVERKGEEVEPAPIVDSGTVSDQDSCLQSLPDCGVKGTEGLSSCGNRNEETGTKSSGMPTDQESLSSGDAVLQRDLVMEPGTAQYSSGGELGGISTTNVSTPDTAGEMEHGLMNPDATVWKNVLQGGESTKERFENSNIGTAGASDVHVTSKPVDKISVPNCAPAASSLDGNKPAESSLAFSNEETSTEKTAETETSRSREESADAPVDQNSVVIPAAAKDKISDGLEPYTLLAAGIGEAMSPSDLALLGLEEDVMPHQNSETNSSHAQSQKGKSSPICSTTGDDKLCADSACQQNTVTSSGDLVAKLCDNIVSESESTTARQPSSQDPPDASHCEDPQAHTVTSDPVRDTQERADFCPFKVVDNKGQRKDVKLDKPLTNMLEVVSHPHPVVPKMEKELVPDQAVISDSTFSLANSPGSESVTKDDALSFVPSQKEKGTATPELHTATDYRDGPDGNSNEPDTRPLEDRAAGLSTSSTAAELQHGMGNTSLTGLGGEHEGPAPPAIPEALNIKGNTDSSLQSMGKATLALDSVLTEEGKLLVVSESSAAQEQDKDKAVTCSSIKENALSSGTLQEEQRTPPPGQDTQQFHEKSISADCAKDKALQLSNSPGASSAFLKAETEHNKEVAPQVSLLTQGGAAQSLVPPGASLATESRQEALGAEHNSSALLPCLLPDGSDGSDALNCSQASPLDVGVKNTQSQGKTSACEVSGNVTVDVTGVNALQGMAEPRRENISHNTQDILIPNVLLSQEKNAVLGLPVALQDKAVTDPQGVGTPEMIPLDWEKGKLEGADHSCTMGDAEEAQIDDEAHPVLLQPVAKELPTDMELSAHDDGAPAGVREVTRAPPSGRERSTPSLPCMVSAQDAPLPKGADLIEEAASRIVDAVIEQVKAAGALLTEGEACHMSLSSPELGPLTKGLESAFTEKVSTFPPGESLPMGSTPEEATGSLAGCFAGREEPEKIILPVQGPEPAAEMPDVKAEDEVDFRASSISEEVAVGSIAATLKMKQGPMTQAINRENWCTIEPCPDAASLLASKQSPECENFLDVGLGRECTSKQGVLKRESGSDSDLFHSPSDDMDSIIFPKPEEEHLACDITGSSSSTDDTASLDRHSSHGSDVSLSQILKPNRSRDRQSLDGFYSHGMGAEGRESESEPADPGDVEEEEMDSITEVPANCSVLRSSMRSLSPFRRHSWGPGKNAASDAEMNHRSSMRVLGDVVRRPPIHRRSFSLEGLTGGAGVGNKPSSSLEVSSANAEELRHPFSGEERVDSLVSLSEEDLESDQREHRMFDQQICHRSKQQGFNYCTSAISSPLTKSISLMTISHPGLDNSRPFHSTFHNTSANLTESITEENYNFLPHSPSKKDSEWKSGTKVSRTFSYIKNKMSSSKKSKEKEKEKDKIKEKEKDSKDKEKDKKTVNGHTFSSIPVVGPISCSQCMKPFTNKDAYTCANCSAFVHKGCRESLASCAKVKMKQPKGSLQAHDTSSLPTVIMRNKPSQPKERPRSAVLLVDETATTPIFANRRSQQSVSLSKSVSIQNITGVGNDENMSNTWKFLSHSTDSLNKISKVNESTESLTDEEGTDMNEGQLLGDFEIESKQLEAESWSRIIDSKFLKQQKKDVVKRQEVIYELMQTEFHHVRTLKIMSGVYSQGMMADLLFEQQMVEKLFPCLDELISIHSQFFQRILERKKESLVDKSEKNFLIKRIGDVLVNQFSGENAERLKKTYGKFCGQHNQSVNYFKDLYAKDKRFQAFVKKKMSSSVVRRLGIPECILLVTQRITKYPVLFQRILQCTKDNEVEQEDLAQSLSLVKDVIGAVDSKVASYEKKVRLNEIYTKTDSKSIMRMKSGQMFAKEDLKRKKLVRDGSVFLKNAAGRLKEVQAVLLTDILVFLQEKDQKYIFASLDQKSTVISLKKLIVREVAHEEKGLFLISMGMTDPEMVEVHASSKEERNSWIQIIQDTINTLNRDEDEGIPSENEEEKKMLDTRARELKEQLHQKDQKILLLLEEKEMIFRDMAECSTPLPEDCSPTHSPRVLFRSNTEEALKGGPLMKSAINEVEILQGLVSGNLGGTLGPTVSSPIEQDVVGPVSLPRRAETFGGFDSHQMNASKGGEKEEGDDGQDLRRTESDSGLKKGGNANLVFMLKRNSEQVVQSVVHLYELLSALQGVVLQQDSYIEDQKLVLSERALTRSLSRPSSLIEQEKQRSLEKQRQDLANLQKQQAQYLEEKRRREREWEARERELREREALLAQREEEVQQGQQDLEKKTKTRGAKGPPEREELQQKKGTYQYDLERLRAAQKQLEREQEQLRREAERLSQRQTERDLCQVMGLPAESNLMMILIKTPCVLSKVRK

SEQ ID NO: 856307 - protein, 1074 aa, Homo sapiens
MSIKWARFHEVPHITVRFIGPKHGEEKEKEKDKIKEKEKDSKDKEKDKKTVNGHTFSSIPVVGPISCSQCMKPFTNKDAYTCANCSAFVHKGCRESLASCAKVKMKQPKGSLQAHDTSSLPTVIMRNKPSQPKERPRSAVLLVDETATTPIFANRRSQQSVSLSKSVSIQNITGVGNDENMSNTWKFLSHSTDSLNKISKVNESTESLTDEEGTDMNEGQLLGDFEIESKQLEAESWSRIIDSKFLKQQKKDVVKRQEVIYELMQTEFHHVRTLKIMSGVYSQGMMADLLFEQQMVEKLFPCLDELISIHSQFFQRILERKKESLVDKSEKNFLIKRIGDVLVNQFSGENAERLKKTYGKFCGQHNQSVNYFKDLYAKDKRFQAFVKKKMSSSVVRRLGIPECILLVTQRITKYPVLFQRILQCTKDNEVEQEDLAQSLSLVKDVIGAVDSKVASYEKKVRLNEIYTKTDSKSIMRMKSGQMFAKEDLKRKKLVRDGSVFLKNAAGRLKEVQAVLLTDILVFLQEKDQKYIFASLDQKSTVISLKKLIVREVAHEEKGLFLISMGMTDPEMVEVHASSKEERNSWIQIIQDTINTLNRDEDEGIPSENEEEKKMLDTRARELKEQLHQKDQKILLLLEEKEMIFRDMAECSTPLPEDCSPTHSPRVLFRSNTEEALKGGPLMKSAINEVEILQGLVSGNLGGTLGPTVSSPIEQDVVGPVSLPRRAETFGGFDSHQMNASKGGEKEEGDDGQDLRRTESDSGLKKGGNANLVFMLKRNSEQVVQSVVHLYELLSALQGVVLQQDSYIEDQKLVLSERALTRSLSRPSSLIEQEKQRSLEKQRQDLANLQKQQAQYLEEKRRREREWEARERELREREALLAQREEEVQQGQQDLEKEREELQQKKGTYQYDLERLRAAQKQLEREQEQLRREAERLSQRQTERDLCQVSHPHTKLMRIPSFFPSPEEPPSPSAPSIAKSGSLDSELSVSPKRNSISRTHKDKGPFHILSSTSQTNKGPEGQSQAPASTSASTRLFGLTKPKEKKEKKKKNKTSRSQPGDGPASEVSAEGEEIFC

SEQ ID NO: 856308 - protein, 873 aa, Homo sapiens
MSQQNHLLMREGTDMNEGQLLGDFEIESKQLEAESWSRIIDSKFLKQQKKDVVKRQEVIYELMQTEFHHVRTLKIMSGVYSQGMMADLLFEQQMVEKLFPCLDELISIHSQFFQRILERKKESLVDKSEKNFLIKRIGDVLVNQFSGENAERLKKTYGKFCGQHNQSVNYFKDLYAKDKRFQAFVKKKMSSSVVRRLGIPECILLVTQRITKYPVLFQRILQCTKDNEVEQEDLAQSLSLVKDVIGAVDSKVASYEKKVRLNEIYTKTDSKSIMRMKSGQMFAKEDLKRKKLVRDGSVFLKNAAGRLKEVQAVLLTDILVFLQEKDQKYIFASLDQKSTVISLKKLIVREVAHEEKGLFLISMGMTDPEMVEVHASSKEERNSWIQIIQDTINTLNRDEDEGIPSENEEEKKMLDTRARELKEQLHQKDQKILLLLEEKEMIFRDMAECSTPLPEDCSPTHSPRVLFRSNTEEALKGGPLMKSAINEVEILQGLVSGNLGGTLGPTVSSPIEQDVVGPVSLPRRAETFGGFDSHQMNASKGGEKEEGDDGQDLRRTESDSGLKKGGNANLVFMLKRNSEQVVQSVVHLYELLSALQGVVLQQDSYIEDQKLVLSERALTRSLSRPSSLIEQEKQRSLEKQRQDLANLQKQQAQYLEEKRRREREWEARERELREREALLAQREEEVQQGQQDLEKEREELQQKKGTYQYDLERLRAAQKQLEREQEQLRREAERLSQRQTERDLCQVSHPHTKLMRIPSFFPSPEEPPSPSAPSIAKSGSLDSELSVSPKRNSISRTHKDKGPFHILSSTSQTNKGPEGQSQAPASTSASTRLFGLTKPKEKKEKKKKNKTSRSQPGDGPASEVSAEGEEIFC

SEQ ID NO: 856309 - protein, 1350 aa, Homo sapiens; identical to SEQ ID NO: 856289

SEQ ID NO: 856310 - protein, 660 aa, Homo sapiens
MTGERRPYACTKDNEVEQEDLAQSLSLVKDVIGAVDSKVASYEKKVRLNEIYTKTDSKSIMRMKSGQMFAKEDLKRKKLVRDGSVFLKNAAGRLKEVQAVLLTDILVFLQEKDQKYIFASLDQKSTVISLKKLIVREVAHEEKGLFLISMGMTDPEMVEVHASSKEERNSWIQIIQDTINTLNRDEDEGIPSENEEEKKMLDTRARELKEQLHQKDQKILLLLEEKEMIFRDMAECSTPLPEDCSPTHSPRVLFRSNTEEALKGGPLMKSAINEVEILQGLVSGNLGGTLGPTVSSPIEQDVVGPVSLPRRAETFGGFDSHQMNASKGGEKEEGDDGQDLRRTESDSGLKKGGNANLVFMLKRNSEQVVQSVVHLYELLSALQGVVLQQDSYIEDQKLVLSERALTRSLSRPSSLIEQEKQRSLEKQRQDLANLQKQQAQYLEEKRRREREWEARERELREREALLAQREEEVQQGQQDLEKEREELQQKKGTYQYDLERLRAAQKQLEREQEQLRREAERLSQRQTERDLCQVSHPHTKLMRIPSFFPSPEEPPSPSAPSIAKSGSLDSELSVSPKRNSISRTHKDKGPFHILSSTSQTNKGPEGQSQAPASTSASTRLFGLTKPKEKKEKKKKNKTSRSQPGDGPASEVSAEGEEIFC

SEQ ID NO: 856311 - protein, 2260 aa, Homo sapiens
MKLNPQQAPLYGDCVVTVLLAEEDKAEDDVVFYLVFLGSTLRHCTSTRKVSSDTLETIAPGHDCCETVKVQLCASKEGLPVFVVAEEDFHFVQDEAYDAAQFLATSAGNQQALNFTRFLDQSGPPSGDVNSLDKKLVLAFRHLKLPTEWNVLGTDQSLHDAGPRETLMHFAVRLGLLRLTWFLLQKPGGRGALSIHNQEGATPVSLALERGYHKLHQLLTEENAGEPDSWSSLSYEIPYGDCSVRHHRELDIYTLTSESDSHHEHPFPGDGCTGPIFKLMNIQQQLMKTNLKQMDSLMPLMMTAQDPSSAPETDGQFLPCAPEPTDPQRLSSSEETESTQCCPGSPVAQTESPCDLSSIVEEENTDRSCRKKNKGVERKGEEVEPAPIVDSGTVSDQDSCLQSLPDCGVKGTEGLSSCGNRNEETGTKSSGMPTDQESLSSGDAVLQRDLVMEPGTAQYSSGGELGGISTTNVSTPDTAGEMEHGLMNPDATVWKNVLQGGESTKERFENSNIGTAGASDVHVTSKPVDKISVPNCAPAASSLDGNKPAESSLAFSNEETSTEKTAETETSRSREESADAPVDQNSVVIPAAAKDKISDGLEPYTLLAAGIGEAMSPSDLALLGLEEDVMPHQNSETNSSHAQSQKGKSSPICSTTGDDKLCADSACQQNTVTSSGDLVAKLCDNIVSESESTTARQPSSQDPPDASHCEDPQAHTVTSDPVRDTQERADFCPFKVVDNKGQRKDVKLDKPLTNMLEVVSHPHPVVPKMEKELVPDQAVISDSTFSLANSPGSESVTKDDALSFVPSQKEKGTATPELHTATDYRDGPDGNSNEPDTRPLEDRAAGLSTSSTAAELQHGMGNTSLTGLGGEHEGPAPPAIPEALNIKGNTDSSLQSMGKATLALDSVLTEEGKLLVVSESSAAQEQDKDKAVTCSSIKENALSSGTLQEEQRTPPPGQDTQQFHEKSISADCAKDKALQLSNSPGASSAFLKAETEHNKEVAPQVSLLTQGGAAQSLVPPGASLATESRQEALGAEHNSSALLPCLLPDGSDGSDALNCSQASPLDVGVKNTQSQGKTSACEVSGNVTVDVTGVNALQGMAEPRRENISHNTQDILIPNVLLSQEKNAVLGLPVALQDKAVTDPQGVGTPEMIPLDWEKGKLEGADHSCTMGDAEEAQIDDEAHPVLLQPVAKELPTDMELSAHDDGAPAGVREVTRAPPSGRERSTPSLPCMVSAQDAPLPKGADLIEEAASRIVDAVIEQVKAAGALLTEGEACHMSLSSPELGPLTKGLESAFTEKVSTFPPGESLPMGSTPEEATGSLAGCFAGREEPEKIILPVQGPEPAAEMPDVKAEDEVDFRASSISEEVAVGSIAATLKMKQGPMTQAINRENWCTIEPCPDAASLLASKQSPECENFLDVGLGRECTSKQGVLKRESGSDSDLFHSPSDDMDSIIFPKPEEEHLACDITGSSSSTDDTASLDRHSSHGSDVSLSQILKPNRSRDRQSLDGFYSHGMGAEGRESESEPADPGDVEEEEMDSITEVPANCSVLRSSMRSLSPFRRHSWGPGKNAASDAEMNHRSSMRVLGDVVRRPPIHRRSFSLEGLTGGAGVGNKPSSSLEVSSANAEELRHPFSGEERVDSLVSLSEEDLESDQREHRMFDQQICHRSKQQGFNYCTSAISSPLTKSISLMTISHPGLDNSRPFHSTFHNTSANLTESITEENYNFLPHSPSKKDSEWKSGTKVSRTFSYIKNKMSSSKKSKEKEKEKDKIKEKEKDSKDKEKDKKTVNGHTFSSIPVVGPISCSQCMKPFTNKDAYTCANCSAFVHKGCRESLASCAKVKMKQPKGSLQAHDTSSLPTVIMRNKPSQPKERPRSAVLLVDETATTPIFANRRSQQSVSLSKSVSIQNITGVGNDENMSNTWKFLSHSTDSLNKISKVNESTESLTDEEGTDMNEGQLLGDFEIESKQLEAESWSRIIDSKFLKQQKKDVVKRQEVIYELMQTEFHHVRTLKIMSGVYSQGMMADLLFEQQMVEKLFPCLDELISIHSQFFQRILERKKESLVDKSEKNFLIKRIGDVLVNQFSGENAERLKKTYGKFCGQHNQSVNYFKDLYAKDKRFQAFVKKKMSSSVVRRLGIPECILLVTQRITKYPVLFQRILQCTKDNEVEQEDLAQSLSLVKDVIGAVDSKVASYEKKVRLNEIYTKTDSKSIMRMKSGQMFAKEDLKRKKLVRDGSVFLKNAAGRLKGKAWLFCLKYVPR

SEQ ID NO: 856312 - protein, 1966 aa, Homo sapiens
MKLNPQQAPLYGDCVVTVLLAEEDKAEDDVVFYLVFLGSTLRHCTSTRKVSSDTLETIAPGHDCCETVKVQLCASKEGLPVFVVAEEDFHFVQDEAYDAAQFLATSAGNQQALNFTRFLDQSGPPSGDVNSLDKKLVLAFRHLKLPTEWNVLGTDQSLHDAGPRETLMHFAVRLGLLRLTWFLLQKPGGRGALSIHNQEGATPVSLALERGYHKLHQLLTEENAGEPDSWSSLSYEIPYGDCSVRHHRELDIYTLTSESDSHHEHPFPGDGCTGPIFKLMNIQQQLMKTNLKQMDSLMPLMMTAQDPSSAPETDGQFLPCAPEPTDPQRLSSSEETESTQCCPGSPVAQTESPCDLSSIVEEENTDRSCRKKNKGVERKGEEVEPAPIVDSGTVSDQDSCLQSLPDCGVKGTEGLSSCGNRNEETGTKSSGMPTDQESLSSGDAVLQRDLVMEPGTAQYSSGGELGGISTTNVSTPDTAGEMEHGLMNPDATVWKNVLQGGESTKERFENSNIGTAGASDVHVTSKPVDKISVPNCAPAASSLDGNKPAESSLAFSNEETSTEKTAETETSRSREESADAPVDQNSVVIPAAAKDKISDGLEPYTLLAAGIGEAMSPSDLALLGLEEDVMPHQNSETNSSHAQSQKGKSSPICSTTGDDKLCADSACQQNTVTSSGDLVAKLCDNIVSESESTTARQPSSQDPPDASHCEDPQAHTVTSDPVRDTQERADFCPFKVVDNKGQRKDVKLDKPLTNMLEVVSHPHPVVPKMEKELVPDQAVISDSTFSLANSPGSESVTKDDALSFVPSQKEKGTATPELHTATDYRDGPDGNSNEPDTRPLEDRAAGLSTSSTAAELQHGMGNTSLTGLGGEHEGPAPPAIPEALNIKGNTDSSLQSMGKATLALDSVLTEEGKLLVVSESSAAQEQDKDKAVTCSSIKENALSSGTLQEEQRTPPPGQDTQQFHEKSISADCAKDKALQLSNSPGASSAFLKAETEHNKEVAPQVSLLTQGGAAQSLVPPGASLATESRQEALGAEHNSSALLPCLLPDGSDGSDALNCSQASPLDVGVKNTQSQGKTSACEVSGNVTVDVTGVNALQGMAEPRRENISHNTQDILIPNVLLSQEKNAVLGLPVALQDKAVTDPQGVGTPEMIPLDWEKGKLEGADHSCTMGDAEEAQIDDEAHPVLLQPVAKELPTDMELSAHDDGAPAGVREVTRAPPSGRERSTPSLPCMVSAQDAPLPKGADLIEEAASRIVDAVIEQVKAAGALLTEGEACHMSLSSPELGPLTKGLESAFTEKVSTFPPGESLPMGSTPEEATGSLAGCFAGREEPEKIILPVQGPEPAAEMPDVKAEDEVDFRASSISEEVAVGSIAATLKMKQGPMTQAINRENWCTIEPCPDAASLLASKQSPECENFLDVGLGRECTSKQGVLKRESGSDSDLFHSPSDDMDSIIFPKPEEEHLACDITGSSSSTDDTASLDRHSSHGSDVSLSQILKPNRSRDRQSLDGFYSHGMGAEGRESESEPADPGDVEEEEMDSITEVPANCSVLRSSMRSLSPFRRHSWGPGKNAASDAEMNHRSSMRVLGDVVRRPPIHRRSFSLEGLTGGAGVGNKPSSSLEVSSANAEELRHPFSGEERVDSLVSLSEEDLESDQREHRMFDQQICHRSKQQGFNYCTSAISSPLTKSISLMTISHPGLDNSRPFHSTFHNTSANLTESITEENYNFLPHSPSKKDSEWKSGTKVSRTFSYIKNKMSSSKKSKEKEKEKDKIKEKEKDSKDKEKDKKTVNGHTFSSIPVVGPISCSQCMKPFTNKDAYTCANCSAFVHKGCRESLASCAKVKMKQPKGSLQAHDTSSLPTVIMRNKPSQPKERPRSAVLLVDETATTPIFANRRSQQSVSLSKSVSIQNITGVGNDENMSNTWKFLSHSTDSLNKISKVNESTESLTDEEVVTTVIEALRGIGMGP

SEQ ID NO: 856313 - protein, 1779 aa, Homo sapiens
MKLNPQQAPLYGDCVVTVLLAEEDKAEDDVVFYLVFLGSTLRHCTSTRKVSSDTLETIAPGHDCCETVKVQLCASKEGLPVFVVAEEDFHFVQDEAYDAAQFLATSAGNQQALNFTRFLDQSGPPSGDVNSLDKKLVLAFRHLKLPTEWNVLGTDQSLHDAGPRETLMHFAVRLGLLRLTWFLLQKPGGRGALSIHNQEGATPVSLALERGYHKLHQLLTEENAGEPDSWSSLSYEIPYGDCSVRHHRELDIYTLTSESDSHHEHPFPGDGCTGPIFKLMNIQQQLMKTNLKQMDSLMPLMMTAQDPSSAPETDGQFLPCAPEPTDPQRLSSSEETESTQCCPGSPVAQTESPCDLSSIVEEENTDRSCRKKNKGVERKGEEVEPAPIVDSGTVSDQDSCLQSLPDCGVKGTEGLSSCGNRNEETGTKSSGMPTDQESLSSGDAVLQRDLVMEPGTAQYSSGGELGGISTTNVSTPDTAGEMEHGLMNPDATVWKNVLQGGESTKERFENSNIGTAGASDVHVTSKPVDKISVPNCAPAASSLDGNKPAESSLAFSNEETSTEKTAETETSRSREESADAPVDQNSVVIPAAAKDKISDGLEPYTLLAAGIGEAMSPSDLALLGLEEDVMPHQNSETNSSHAQSQKGKSSPICSTTGDDKLCADSACQQNTVTSSGDLVAKLCDNIVSESESTTARQPSSQDPPDASHCEDPQAHTVTSDPVRDTQERADFCPFKVVDNKGQRKDVKLDKPLTNMLEVVSHPHPVVPKMEKELVPDQAVISDSTFSLANSPGSESVTKDDALSFVPSQKEKGTATPELHTATDYRDGPDGNSNEPDTRPLEDRAAGLSTSSTAAELQHGMGNTSLTGLGGEHEGPAPPAIPEALNIKGNTDSSLQSMGKATLALDSVLTEEGKLLVVSESSAAQEQDKDKAVTCSSIKENALSSGTLQEEQRTPPPGQDTQQFHEKSISADCAKDKALQLSNSPGASSAFLKAETEHNKEVAPQVSLLTQGGAAQSLVPPGASLATESRQEALGAEHNSSALLPCLLPDGSDGSDALNCSQASPLDVGVKNTQSQGKTSACEVSGNVTVDVTGVNALQGMAEPRRENISHNTQDILIPNVLLSQEKNAVLGLPVALQDKAVTDPQGVGTPEMIPLDWEKGKLEGADHSCTMGDAEEAQIDDEAHPVLLQPVAKELPTDMELSAHDDGAPAGVREVTRAPPSGRERSTPSLPCMVSAQDAPLPKGADLIEEAASRIVDAVIEQVKAAGALLTEGEACHMSLSSPELGPLTKGLESAFTEKVSTFPPGESLPMGSTPEEATGSLAGCFAGREEPEKIILPVQGPEPAAEMPDVKAEDEVDFRASSISEEVAVGSIAATLKMKQGPMTQAINRENWCTIEPCPDAASLLASKQSPECENFLDVGLGRECTSKQGVLKRESGSDSDLFHSPSDDMDSIIFPKPEEEHLACDITGSSSSTDDTASLDRHSSHGSDVSLSQILKPNRSRDRQSLDGFYSHGMGAEGRESESEPADPGDVEEEEMDSITEVPANCSVLRSSMRSLSPFRRHSWGPGKNAASDAEMNHRSFSLEGLTGGAGVGNKPSSSLEVSSANAEELRHPFSGEERVDSLVSLSEEDLESDQREHRMFDQQICHRSKQQGFNYCTSAISSPLTKSISLMTISHPGLDNSRPFHSTFHNTSANLTESITEENYNFLPHSPSKKDSEWKSGTKVSRTFSYIKNKMSSSKKSKVSITVGIACDHLSRILSQPAFTPKLVKSWGHKWK

SEQ ID NO: 856314 - protein, 1613 aa, Homo sapiens
MKLNPQQAPLYGDCVVTVLLAEEDKAEDDVVFYLVFLGSTLRHCTSTRKVSSDTLETIAPGHDCCETVKVQLCASKEGLPVFVVAEEDFHFVQDEAYDAAQFLATSAGNQQALNFTRFLDQSGPPSGDVNSLDKKLVLAFRHLKLPTEWNVLGTDQSLHDAGPRETLMHFAVRLGLLRLTWFLLQKPGGRGALSIHNQEGATPVSLALERGYHKLHQLLTEENAGEPDSWSSLSYEIPYGDCSVRHHRELDIYTLTSESDSHHEHPFPGDGCTGPIFKLMNIQQQLMKTNLKQMDSLMPLMMTAQDPSSAPETDGQFLPCAPEPTDPQRLSSSEETESTQCCPGSPVAQTESPCDLSSIVEEENTDRSCRKKNKGVERKGEEVEPAPIVDSGTVSDQDSCLQSLPDCGVKGTEGLSSCGNRNEETGTKSSGMPTDQESLSSGDAVLQRDLVMEPGTAQYSSGGELGGISTTNVSTPDTAGEMEHGLMNPDATVWKNVLQGGESTKERFENSNIGTAGASDVHVTSKPVDKISVPNCAPAASSLDGNKPAESSLAFSNEETSTEKTAETETSRSREESADAPVDQNSVVIPAAAKDKISDGLEPYTLLAAGIGEAMSPSDLALLGLEEDVMPHQNSETNSSHAQSQKGKSSPICSTTGDDKLCADSACQQNTVTSSGDLVAKLCDNIVSESESTTARQPSSQDPPDASHCEDPQAHTVTSDPVRDTQERADFCPFKVVDNKGQRKDVKLDKPLTNMLEVVSHPHPVVPKMEKELVPDQAVISDSTFSLANSPGSESVTKDDALSFVPSQKEKGTATPELHTATDYRDGPDGNSNEPDTRPLEDRAAGLSTSSTAAELQHGMGNTSLTGLGGEHEGPAPPAIPEALNIKGNTDSSLQSMGKATLALDSVLTEEGKLLVVSESSAAQEQDKDKAVTCSSIKENALSSGTLQEEQRTPPPGQDTQQFHEKSISADCAKDKALQLSNSPGASSAFLKAETEHNKEVAPQVSLLTQGGAAQSLVPPGASLATESRQEALGAEHNSSALLPCLLPDGSDGSDALNCSQASPLDVGVKNTQSQGKTSACEVSGNVTVDVTGVNALQGMAEPRRENISHNTQDILIPNVLLSQEKNAVLGLPVALQDKAVTDPQGVGTPEMIPLDWEKGKLEGADHSCTMGDAEEAQIDDEAHPVLLQPVAKELPTDMELSAHDDGAPAGVREVTRAPPSGRERSTPSLPCMVSAQDAPLPKGADLIEEAASRIVDAVIEQVKAAGALLTEGEACHMSLSSPELGPLTKGLESAFTEKVSTFPPGESLPMGSTPEEATGSLAGCFAGREEPEKIILPVQGPEPAAEMPDVKAEDEVDFRASSISEEVAVGSIAATLKMKQGPMTQAINRENWCTIEPCPDAASLLASKQSPECENFLDVGLGRECTSKQGVLKRESGSDSDLFHSPSDDMDSIIFPKPEEEHLACDITGSSSSTDDTASLDRHSSHGSDVSLSQILKPNRSRDRQSLDGFYSHGMGAEGRESESEPADPGDVEEEEMDSITEVPANCSVLRSSMRSLSPFRRHSWGPGKNAASDAEMNHRSSMRVLGDVVRRPPIHRRSMSWCPLVCSTLLA

SEQ ID NO: 856315 - protein, 1564 aa, Homo sapiens
MKLNPQQAPLYGDCVVTVLLAEEDKAEDDVVFYLVFLGSTLRHCTSTRKVSSDTLETIAPGHDCCETVKVQLCASKEGLPVFVVAEEDFHFVQDEAYDAAQFLATSAGNQQALNFTRFLDQSGPPSGDVNSLDKKLVLAFRHLKLPTEWNVLGTDQSLHDAGPRETLMHFAVRLGLLRLTWFLLQKPGGRGALSIHNQEGATPVSLALERGYHKLHQLLTEENAGEPDSWSSLSYEIPYGDCSVRHHRELDIYTLTSESDSHHEHPFPGDGCTGPIFKLMNIQQQLMKTNLKQMDSLMPLMMTAQDPSSAPETDGQFLPCAPEPTDPQRLSSSEETESTQCCPGSPVAQTESPCDLSSIVEEENTDRSCRKKNKGVERKGEEVEPAPIVDSGTVSDQDSCLQSLPDCGVKGTEGLSSCGNRNEETGTKSSGMPTDQESLSSGDAVLQRDLVMEPGTAQYSSGGELGGISTTNVSTPDTAGEMEHGLMNPDATVWKNVLQGGESTKERFENSNIGTAGASDVHVTSKPVDKISVPNCAPAASSLDGNKPAESSLAFSNEETSTEKTAETETSRSREESADAPVDQNSVVIPAAAKDKISDGLEPYTLLAAGIGEAMSPSDLALLGLEEDVMPHQNSETNSSHAQSQKGKSSPICSTTGDDKLCADSACQQNTVTSSGDLVAKLCDNIVSESESTTARQPSSQDPPDASHCEDPQAHTVTSDPVRDTQERADFCPFKVVDNKGQRKDVKLDKPLTNMLEVVSHPHPVVPKMEKELVPDQAVISDSTFSLANSPGSESVTKDDALSFVPSQKEKGTATPELHTATDYRDGPDGNSNEPDTRPLEDRAAGLSTSSTAAELQHGMGNTSLTGLGGEHEGPAPPAIPEALNIKGNTDSSLQSMGKATLALDSVLTEEGKLLVVSESSAAQEQDKDKAVTCSSIKENALSSGTLQEEQRTPPPGQDTQQFHEKSISADCAKDKALQLSNSPGASSAFLKAETEHNKEVAPQVSLLTQGGAAQSLVPPGASLATESRQEALGAEHNSSALLPCLLPDGSDGSDALNCSQASPLDVGVKNTQSQGKTSACEVSGNVTVDVTGVNALQGMAEPRRENISHNTQDILIPNVLLSQEKNAVLGLPVALQDKAVTDPQGVGTPEMIPLDWEKGKLEGADHSCTMGDAEEAQIDDEAHPVLLQPVAKELPTDMELSAHDDGAPAGVREVTRAPPSGRERSTPSLPCMVSAQDAPLPKGADLIEEAASRIVDAVIEQVKAAGALLTEGEACHMSLSSPELGPLTKGLESAFTEKVSTFPPGESLPMGSTPEEATGSLAGCFAGREEPEKIILPVQGPEPAAEMPDVKAEDEVDFRASSISEEVAVGSIAATLKMKQGPMTQAINRENWCTIEPCPDAASLLASKQSPECENFLDVGLGRECTSKQGVLKRESGSDSDLFHSPSDDMDSIIFPKPEEEHLACDITGSSSSTDDTASLDRHSSHGSDVSLSQILKPNRSRDRQSLDGFYSHGMGAEGRESESEPADPGDVEEEEMDSITEVPANCFVSKCSMDICVLNPIK

SEQ ID NO: 856316 - protein, 1582 aa, Homo sapiens
MKLNPQQAPLYGDCVVTVLLAEEDKAEDDVVFYLVFLGSTLRHCTSTRKVSSDTLETIAPGHDCCETVKVQLCASKEGLPVFVVAEEDFHFVQDEAYDAAQFLATSAGNQQALNFTRFLDQSGPPSGDVNSLDKKLVLAFRHLKLPTEWNVLGTDQSLHDAGPRETLMHFAVRLGLLRLTWFLLQKPGGRGALSIHNQEGATPVSLALERGYHKLHQLLTEENAGEPDSWSSLSYEIPYGDCSVRHHRELDIYTLTSESDSHHEHPFPGDGCTGPIFKLMNIQQQLMKTNLKQMDSLMPLMMTAQDPSSAPETDGQFLPCAPEPTDPQRLSSSEETESTQCCPGSPVAQTESPCDLSSIVEEENTDRSCRKKNKGVERKGEEVEPAPIVDSGTVSDQDSCLQSLPDCGVKGTEGLSSCGNRNEETGTKSSGMPTDQESLSSGDAVLQRDLVMEPGTAQYSSGGELGGISTTNVSTPDTAGEMEHGLMNPDATVWKNVLQGGESTKERFENSNIGTAGASDVHVTSKPVDKISVPNCAPAASSLDGNKPAESSLAFSNEETSTEKTAETETSRSREESADAPVDQNSVVIPAAAKDKISDGLEPYTLLAAGIGEAMSPSDLALLGLEEDVMPHQNSETNSSHAQSQKGKSSPICSTTGDDKLCADSACQQNTVTSSGDLVAKLCDNIVSESESTTARQPSSQDPPDASHCEDPQAHTVTSDPVRDTQERADFCPFKVVDNKGQRKDVKLDKPLTNMLEVVSHPHPVVPKMEKELVPDQAVISDSTFSLANSPGSESVTKDDALSFVPSQKEKGTATPELHTATDYRDGPDGNSNEPDTRPLEDRAAGLSTSSTAAELQHGMGNTSLTGLGGEHEGPAPPAIPEALNIKGNTDSSLQSMGKATLALDSVLTEEGKLLVVSESSAAQEQDKDKAVTCSSIKENALSSGTLQEEQRTPPPGQDTQQFHEKSISADCAKDKALQLSNSPGASSAFLKAETEHNKEVAPQVSLLTQGGAAQSLVPPGASLATESRQEALGAEHNSSALLPCLLPDGSDGSDALNCSQASPLDVGVKNTQSQGKTSACEVSGNVTVDVTGVNALQGMAEPRRENISHNTQDILIPNVLLSQEKNAVLGLPVALQDKAVTDPQGVGTPEMIPLDWEKGKLEGADHSCTMGDAEEAQIDDEAHPVLLQPVAKELPTDMELSAHDDGAPAGVREVTRAPPSGRERSTPSLPCMVSAQDAPLPKGADLIEEAASRIVDAVIEQVKAAGALLTEGEACHMSLSSPELGPLTKGLESAFTEKVSTFPPGESLPMGSTPEEATGSLAGCFAGREEPEKIILPVQGPEPAAEMPDVKAEDEVDFRASSISEEVAVGSIAATLKMKQGPMTQAINRENWCTIEPCPDAASLLASKQSPECENFLDVGLGRECTSKQGVLKRESGSDSDLFHSPSDDMDSIIFPKPEEEHLACDITGSSSSTDDTASLDRHSSHGSDVSLSQILKPNRSRDRQSLDGFYSHGMGAEGRESESEPADPGDVEEEEMDSITEVPANCSVLRSSMRSLSPFRRHSWGPGKNAASDAEMNHRR

SEQ ID NO: 856317 - protein, 1376 aa, Homo sapiens
  misc_feature (1357)..(1357): Xaa can be any naturally occurring amino acid
  misc_feature (1363)..(1363): Xaa can be any naturally occurring amino acid
MKLNPQQAPLYGDCVVTVLLAEEDKAEDDVVFYLVFLGSTLRHCTSTRKVSSDTLETIAPGHDCCETVKVQLCASKEGLPVFVVAEEDFHFVQDEAYDAAQFLATSAGNQQALNFTRFLDQSGPPSGDVNSLDKKLVLAFRHLKLPTEWNVLGTDQSLHDAGPRETLMHFAVRLGLLRLTWFLLQKPGGRGALSIHNQEGATPVSLALERGYHKLHQLLTEENAGEPDSWSSLSYEIPYGDCSVRHHRELDIYTLTSESDSHHEHPFPGDGCTGPIFKLMNIQQQLMKTNLKQMDSLMPLMMTAQDPSSAPETDGQFLPCAPEPTDPQRLSSSEETESTQCCPGSPVAQTESPCDLSSIVEEENTDRSCRKKNKGVERKGEEVEPAPIVDSGTVSDQDSCLQSLPDCGVKGTEGLSSCGNRNEETGTKSSGMPTDQESLSSGDAVLQRDLVMEPGTAQYSSGGELGGISTTNVSTPDTAGEMEHGLMNPDATVWKNVLQGGESTKERFENSNIGTAGASDVHVTSKPVDKISVPNCAPAASSLDGNKPAESSLAFSNEETSTEKTAETETSRSREESADAPVDQNSVVIPAAAKDKISDGLEPYTLLAAGIGEAMSPSDLALLGLEEDVMPHQNSETNSSHAQSQKGKSSPICSTTGDDKLCADSACQQNTVTSSGDLVAKLCDNIVSESESTTARQPSSQDPPDASHCEDPQAHTVTSDPVRDTQERADFCPFKVVDNKGQRKDVKLDKPLTNMLEVVSHPHPVVPKMEKELVPDQAVISDSTFSLANSPGSESVTKDDALSFVPSQKEKGTATPELHTATDYRDGPDGNSNEPDTRPLEDRAAGLSTSSTAAELQHGMGNTSLTGLGGEHEGPAPPAIPEALNIKGNTDSSLQSMGKATLALDSVLTEEGKLLVVSESSAAQEQDKDKAVTCSSIKENALSSGTLQEEQRTPPPGQDTQQFHEKSISADCAKDKALQLSNSPGASSAFLKAETEHNKEVAPQVSLLTQGGAAQSLVPPGASLATESRQEALGAEHNSSALLPCLLPDGSDGSDALNCSQASPLDVGVKNTQSQGKTSACEVSGNVTVDVTGVNALQGMAEPRRENISHNTQDILIPNVLLSQEKNAVLGLPVALQDKAVTDPQGVGTPEMIPLDWEKGKLEGADHSCTMGDAEEAQIDDEAHPVLLQPVAKELPTDMELSAHDDGAPAGVREVTRAPPSGRERSTPSLPCMVSAQDAPLPKGADLIEEAASRIVDAVIEQVKAAGALLTEGEACHMSLSSPELGPLTKGLESAFTEKVSTFPPGESLPMGSTPEEALLEACVQQPMLQIRPHLHQAQGNTHSLLRQERLHELPSXPVFPLXFSDSRRGDWQEGQ

SEQ ID NO: 856318 - protein, 78 aa, Homo sapiens
EGRKDRGRALALDLLQREKLALVAFTSGFDDRQRNQQSNLMPASPHASAEELLQRKPALPALVFRTGAGWSLKTLFQQ

SEQ ID NO: 856319 - protein, 189 aa, Homo sapiens
HSLKGSPVEVTTTNDHGKQYSDGKWHEIIAIRHQAFGQITLDGIYTGSSAILNGSTVIGDNTGVFLGGLPRSYTILRKDPEIIQKGFVGCLKDVHFMKNYNPSAIWEPLDWQSSEEQINVYNSWEGCPASLNEGAQFLGAGFLELHPYMFHGGMNFEISFKFRTDQLNGLLLFVYNKDGPDFLAVCELI

SEQ ID NO: 856320 - protein, 69 aa, Homo sapiens
MMEVVVGNGVVALRGIPPRTSRKSSRKTRFCGERGSKQSGKCSPVGLAVVSLGGSRGSGKGLGRLEKRL

SEQ ID NO: 856321 - protein, 69 aa, Homo sapiens; identical to SEQ ID NO: 856320

SEQ ID NO: 856322 - protein, 69 aa, Homo sapiens; identical to SEQ ID NO: 856320

SEQ ID NO: 856323 - protein, 69 aa, Homo sapiens; identical to SEQ ID NO: 856320

SEQ ID NO: 856324 - protein, 69 aa, Homo sapiens; identical to SEQ ID NO: 856320

SEQ ID NO: 856325 - protein, 69 aa, Homo sapiens; identical to SEQ ID NO: 856320

SEQ ID NO: 856326 - protein, 69 aa, Homo sapiens; identical to SEQ ID NO: 856320

SEQ ID NO: 856327 - protein, 69 aa, Homo sapiens; identical to SEQ ID NO: 856320

SEQ ID NO: 856328 - protein, 69 aa, Homo sapiens; identical to SEQ ID NO: 856320

SEQ ID NO: 856329 - protein, 1022 aa, Homo sapiens
MRVQLLQDLQDFFRKKAEIETEYSRNLEKLAERFMAKTRSTKDHQQYKKDQNLLSPVNCWYLLLNQVRRESKDHATLSDIYLNNVIMRFMQISEDSTRMFKKSKEIAFQLHEDLMKVLNELYTVMKTYHMYHAESISAESKLKEAEKQEEKQIGRSGDPVFHIRLEERHQRRSSVKKIEKMKEKRQAKYSENKLKSIKARNEYLLTLEATNASVFKYYIHDLSDLIDCCDLGYHASLNRALRTYLSAEYNLETSRHEGLDIIENAVDNLEPRSDKQRFMEMYPAAFCPPMKFEFQSHMGDEVCQVSAQQPVQAELMLRYQQLQSRLATLKIENEEVKKTTEATLQTIQDMVTIEDYDVSECFQHSRSTESVKSTVSETYLSKPSIAKRRANQQETEQFYFMKLREYLEGSNLITKLQAKHDLLQRTLGEGHRAEYMTTSRGRRNSHTRHQDSGQVIPLIVESCIRFINLYGLQHQGIFRVSGSQVEVNDIKNSFERGENPLADDQSNHDINSVAGVLKLYFRGLENPLFPKERFNDLISCIRIDNLYERALHIRKLLLTLPRSVLIVMRYLFAFLNHLSQYSDENMMDPYNLAICFGPTLMPVPEIQDQVSCQAHVNEIIKTIIIHHETIFPDAKELDGPVYEKCMAGDDYCDSPYSEHGTLEEVDQDAGTEPHTSEDECEPIEAIAKFDYVGRSARELSFKKGASLLLYHRASEDWWEGRHNGIDGLVPHQYIVVQDMDDTFSDTLSQKADSEASSGPVTEDKSSSKDMNSPTDRHPDGYLARQRKRGEPPPPVRRPGRTSDGHCPLHPPHALSNSSVDLGSPSLASHPRGLLQNRGLNNDSPERRRRPGHGSLTNISRHDSLKKIDSPPIRRSTSSGQYTGFNDHKPLDPETIAQDIEETMNTALNELRELERQSTAKHAPDVVLDTLEQVKNSPTPATSTESLSPLHNVALRSSEPQIRRSTSSSSDTMSTFKPMVAPRMGVQLKPPALRPKPAVLPKTNPTIGPAPPPQGPTDKSCTM

SEQ ID NO: 856330 - protein, 103 aa, Homo sapiens
MSTPSRFKKDKEIIAEYESQVKEIRAQLVEQQKCLEQQTEMRVQLLQDLQDFFRKKAEIETEYSRNLEKLAERFMAKTNPACLPKTSPLALLVLEAMPEEEEE

SEQ ID NO: 856331 - protein, 1062 aa, Homo sapiens
MSTPSRFKKDKEIIAEYESQVKEIRAQLVEQQKCLEQQTEMRVQLLQDLQDFFRKKAEIETEYSRNLEKLAERFMAKTRSTKDHQQYKKDQNLLSPVNCWYLLLNQVRRESKDHATLSDIYLNNVIMRFMQISEDSTRMFKKSKEIAFQLHEDLMKVLNELYTVMKTYHMYHAESISAESKLKEAEKQEEKQIGRSGDPVFHIRLEERHQRRSSVKKIEKMKEKRQAKYSENKLKSIKARNEYLLTLEATNASVFKYYIHDLSDLIDCCDLGYHASLNRALRTYLSAEYNLETSRHEGLDIIENAVDNLEPRSDKQRFMEMYPAAFCPPMKFEFQSHMGDEVCQVSAQQPVQAELMLRYQQLQSRLATLKIENEEVKKTTEATLQTIQDMVTIEDYDVSECFQHSRSTESVKSTVSETYLSKPSIAKRRANQQETEQFYFMKLREYLEGSNLITKLQAKHDLLQRTLGEGHRAEYMTTSRGRRNSHTRHQDSGQVIPLIVESCIRFINLYGLQHQGIFRVSGSQVEVNDIKNSFERGENPLADDQSNHDINSVAGVLKLYFRGLENPLFPKERFNDLISCIRIDNLYERALHIRKLLLTLPRSVLIVMRYLFAFLNHLSQYSDENMMDPYNLAICFGPTLMPVPEIQDQVSCQAHVNEIIKTIIIHHETIFPDAKELDGPVYEKCMAGDDYCDSPYSEHGTLEEVDQDAGTEPHTSEDECEPIEAIAKFDYVGRSARELSFKKGASLLLYHRASEDWWEGRHNGIDGLVPHQYIVVQDMDDTFSDTLSQKADSEASSGPVTEDKSSSKDMNSPTDRHPDGYLARQRKRGEPPPPVRRPGRTSDGHCPLHPPHALSNSSVDLGSPSLASHPRGLLQNRGLNNDSPERRRRPGHGSLTNISRHDSLKKIDSPPIRRSTSSGQYTGFNDHKPLDPETIAQDIEETMNTALNELRELERQSTAKHAPDVVLDTLEQVKNSPTPATSTESLSPLHNVALRSSEPQIRRSTSSSSDTMSTFKPMVAPRMGVQLKPPALRPKPAVLPKTNPTIGPAPPPQGPTDKSCTM

SEQ ID NO: 856332 - protein, 441 aa, Homo sapiens
MSTPSRFKKDKEIIAEYESQVKEIRAQLVEQQKCLEQQTEMRVQLLQDLQDFFRKKAEIETEYSRNLEKLAERFMAKTRSTKDHQQYKKDQNLLSPVNCWYLLLNQVRRESKDHATLSDIYLNNVIMRFMQISEDSTRMFKKSKEIAFQLHEDLMKVLNELYTVMKTYHMYHAESISAESKLKEAEKQEEKQIGRSGDPVFHIRLEERHQRRSSVKKIEKMKEKRQAKYSENKLKSIKARNEYLLTLEATNASVFKYYIHDLSDLIDCCDLGYHASLNRALRTYLSAEYNLETSRHEGLDIIENAVDNLEPRSDKQRFMEMYPAAFCPPMKFEFQSHMGDEVCQVSAQQPVQAELMLRYQQLQSRLATLKIENEEVSMRSSCHTSNLNSNITGRHSHMTWAYLIFKIQPLHHVFPALRVPVVLFVGDKCKDSVFCHRLIFY

SEQ ID NO: 856333 - protein, 270 aa, Homo sapiens
MSTPSRFKKDKEIIAEYESQVKEIRAQLVEQQKCLEQQTEMRVQLLQDLQDFFRKKAEIETEYSRNLEKLAERFMAKTRSTKDHQQYKKDQNLLSPVNCWYLLLNQVRRESKDHATLSDIYLNNVIMRFMQISEDSTRMFKKSKEIAFQLHEDLMKVLNELYTVMKTYHMYHAESISAESKLKEAEKQEEKQIGRSGDPVFHIRLEERHQRRSSVKKIEKMKEKRQAKYSENKLKSIKARNEYLLTLEATNASVFKYYIHDLSDLIDVST

SEQ ID NO: 856334 - protein, 680 aa, Homo sapiens
FSPILRKFALISILLLAAADITCRPMSILSILSLKLLIKIFVVVVVVGRNGFPTTNPSGPPLGEGHRAEYMTTRPPNVPPKPQKHRKSRPRSQYNTKLFNGDLETFVKDSGQVIPLIVESCIRFINLYGLQHQGIFRVSGSQVEVNDIKNSFERGENPLADDQSNHDINSVAGVLKLYFRGLENPLFPKERFNDLISCIRIDNLYERALHIRKLLLTLPRSVLIVMRYLFAFLNHLSQYSDENMMDPYNLAICFGPTLMPVPEIQDQVSCQAHVNEIIKTIIIHHETIFPDAKELDGPVYEKCMAGDDYCDSPYSEHGTLEEVDQDAGTEPHTSEDECEPIEAIAKFDYVGRSARELSFKKGASLLLYHRASEDWWEGRHNGIDGLVPHQYIVVQDMDDTFSDTLSQKADSEASSGPVTEDKSSSKDMNSPTDRHPDGYLARQRKRGEPPPPVRRPGRTSDGHCPLHPPHALSNSSVDLGSPSLASHPRGLLQNRGLNNDSPERRRRPGHGSLTNISRHDSLKKIDSPPIRRSTSSGQYTGFNDHKPLDPETIAQDIEETMNTALNELRELERQSTAKHAPDVVLDTLEQVKNSPTPATSTESLSPLHNVALRSSEPQIRRSTSSSSDTMSTFKPMVAPRMGVQLKPPALRPKPAVLPKTNPTIGPAPPPQGPTDKSCTM

SEQ ID NO: 856335 - protein, 441 aa, Homo sapiens; identical to SEQ ID NO: 856332

SEQ ID NO: 856336 - protein, 906 aa, Homo sapiens
MSTPSRFKKDKEIIAEYESQVKEIRAQLVEQQKCLEQQTEMRVQLLQDLQDFFRKKAEIETEYSRNLEKLAERFMAKTRSTKDHQQYKKDQNLLSPVNCWYLLLNQVRRESKDHATLSDIYLNNVIMRFMQISEDSTRMFKKSKEIAFQLHEDLMKVLNELYTVMKTYHMYHAESISAESKLKEAEKQEEKQIGRSGDPVFHIRLEERHQRRSSVKKIEKMKEKRQAKYSENKLKSIKARNEYLLTLEATNASVFKYYIHDLSDLIDCCDLGYHASLNRALRTYLSAEYNLETSRHEGLDIIENAVDNLEPRSDKQRFMEMYPAAFCPPMKFEFQSHMGDEVCQVSAQQPVQAELMLRYQQLQSRLATLKIENEEVKKTTEATLQTIQDMVTIEDYDVSECFQHSRSTESVKSTVSETYLSKPSIAKRRANQQETEQFYFMKLREYLEGSNLITKLQAKHDLLQRTLGEGHRAEYMTTSRGRRNSHTRHQDSGQVIPLIVESCIRFINLYGLQHQGIFRVSGSQVEVNDIKNSFERGENPLADDQSNHDINSVAGVLKLYFRGLENPLFPKERFNDLISCIRIDNLYERALHIRKLLLTLPRSVLIVMRYLFAFLNHLSQYSDENMMDPYNLAICFGPTLMPVPEIQDQVSCQAHVNEIIKTIIIHHETIFPDAKELDGPVYEKCMAGDDYCDSPYSEHGTLEEVDQDAGTEPHTSEDECEPIEAIAKFDYVGRSARELSFKKGASLLLYHRASEDWWEGRHNGIDGLVPHQYIVVQDMDDTFSDTLSQKADSEASSGPVTEDKSSSKDMNSPTDRHPDGYLARQRKRGEPPPPVRRPGRTSDGHCPLHPPHALSNSSVDLGSPSLASHPRGLLQNRGLNNDSPERRRRPGHGSLHIATLVEMQLH

SEQ ID NO: 856337 - protein, 735 aa, Homo sapiens
MSTPSRFKKDKEIIAEYESQVKEIRAQLVEQQKCLEQQTEMRVQLLQDLQDFFRKKAEIETEYSRNLEKLAERFMAKTRSTKDHQQYKKDQNLLSPVNCWYLLLNQVRRESKDHATLSDIYLNNVIMRFMQISEDSTRMFKKSKEIAFQLHEDLMKVLNELYTVMKTYHMYHAESISAESKLKEAEKQEEKQIGRSGDPVFHIRLEERHQRRSSVKKIEKMKEKRQAKYSENKLKSIKARNEYLLTLEATNASVFKYYIHDLSDLIDCCDLGYHASLNRALRTYLSAEYNLETSRHEGLDIIENAVDNLEPRSDKQRFMEMYPAAFCPPMKFEFQSHMGDEVCQVSAQQPVQAELMLRYQQLQSRLATLKIENEEVKKTTEATLQTIQDMVTIEDYDVSECFQHSRSTESVKSTVSETYLSKPSIAKRRANQQETEQFYFMKLREYLEGSNLITKLQAKHDLLQRTLGEGHRAEYMTTSRGRRNSHTRHQDSGQVIPLIVESCIRFINLYGLQHQGIFRVSGSQVEVNDIKNSFERGENPLADDQSNHDINSVAGVLKLYFRGLENPLFPKERFNDLISCIRIDNLYERALHIRKLLLTLPRSVLIVMRYLFAFLNHLSQYSDENMMDPYNLAICFGPTLMPVPEIQDQVSCQAHVNEIIKTIIIHHETIFPDAKELDGPVYEKCMAGDDYCDSPYSEHGTLEEVDQDAGTEPHTSEDGMLSPYAIIKPVFISLL

SEQ ID NO: 856338 - protein, 2492 aa, Homo sapiens
MTAEPMSESKLNTLVQKLHDFLAHSSEESEETSSPPRLAMNQNTDKISGSGSNSDMMENSKEEGTSSSEKSKSSGSSRSKRKPSIVTKYVESDDEKPLDDETVNEDASNENSENDITMQSLPKGTVIVQPEPVLNEDKDDFKGPEFRSRSKMKTENLKKRGEDGLHGIVSCTACGQQVNHFQKDSIYRHPSLQVLICKNCFKYYMSDDISRDSDGMDEQCRWCAEGGNLICCDFCHNAFCKKCILRNLGRKELSTIMDENNQWYCYICHPEPLLDLVTACNSVFENLEQLLQQNKKKIKVDSEKSNKVYEHTSRFSPKKTSSNCNGEEKKLDDSCSGSVTYSYSALIVPKEMIKKAKKLIETTANMNSSYVKFLKQATDNSEISSATKLRQLKAFKSVLADIKKAHLALEEDLNSEFRAMDAVNKEKNTKEHKVIDAKFETKARKGEKPCALEKKDISKSEAKLSRKQVDSEHMHQNVPTEEQRTNKSTGGEHKKSDRKEEPQYEPANTSEDLDMDIVSVPSSVPEDIFENLETAMEVQSSVDHQGDGSSGTEQEVESSSVKLNISSKDNRGGIKSKTTAKVTKELYVKLTPVSLSNSPIKGADCQEVPQDKDGYKSCGLNPKLEKCGLGQENSDNEHLVENEVSLLLEESDLRRSPRVKTTPLRRPTETNPVTSNSDEECNETVKEKQKLSVPVRKKDKRNSSDSAIDNPKPNKLPKSKQSETVDQNSDSDEMLAILKEVSRMSHSSSSDTDINEIHTNHKTLYDLKTQAGKDDKGKRKRKSSTSGSDFDTKKGKSAKSSIISKKKRQTQSESSNYDSELEKEIKSMSKIGAARTTKKRIPNTKDFDSSEDEKHSKKGMDNQGHKNLKTSQEGSSDDAERKQERETFSSAEGTVDKDTTIMELRDRLPKKQQASASTDGVDKLSGKEQSFTSLEVRKVAETKEKSKHLKTKTCKKVQDGLSDIAEKFLKKDQSDETSEDDKKQSKKGTEEKKKPSDFKKKVIKMEQQYESSSDGTEKLPEREEICHFPKGIKQIKNGTTDGEKKSKKIRDKTSKKKDELSDYAEKSTGKGDSCDSSEDKKSKNGAYGREKKRCKLLGKSSRKRQDCSSSDTEKYSMKEDGCNSSDKRLKRIELRERRNLSSKRNTKEIQSGSSSSDAEESSEDNKKKKQRTSSKKKAVIVKEKKRNSLRTSTKRKQADITSSSSSDIEDDDQNSIGEGSSDEQKIKPVTENLVLSSHTGFCQSSGDEALSKSVPVTVDDDDDDNDPENRIAKKMLLEEIKANLSSDEDGSSDDEPEEGKKRTGKQNEENPGDEEAKNQVNSESDSDSEESKKPRYRHRLLRHKLTVSDGESGEEKKTKPKEHKEVKGRNRRKVSSEDSEDSDFQESGVSEEVSESEDEQRPRTRSAKKAELEENQRSYKQKKKRRRIKVQEDSSSENKSNSEEEEEEKEEEEEEEEEEEEEEEDENDDSKSPGKGRKKIRKILKDDKLRTETQNALKEEEERRKRIAEREREREKLREVIEIEDASPTKCPITTKLVLDEDEETKEPLVQVHRNMVIKLKPHQVDGVQFMWDCCCESVKKTKKSPGSGCILAHCMGLGKTLQVVSFLHTVLLCDKLDFSTALVVCPLNTALNWMNEFEKWQEGLKDDEKLEVSELATVKRPQERSYMLQRWQEDGGVMIIGYEMYRNLAQGRNVKSRKLKEIFNKALVDPGPDFVVCDEGHILKNEASAVSKAMNSIRSRRRIILTGTPLQNNLIEYHCMVNFIKENLLGSIKEFRNRFINPIQNGQCADSTMVDVRVMKKRAHILYEMLAGCVQRKDYTALTKFLPPKHEYVLAVRMTSIQCKLYQYYLDHLTGVGNNSEGGRGKAGAKLFQDFQMLSRIWTHPWCLQLDYISKENKGYFDEDSMDEFIASDSDETSMSLSSDDYTKKKKKGKKGKKDSSSSGSGSDNDVEVIKVWNSRSRGGGEGNVDETGNNPSVSLKLEESKATSSSNPSSPAPDWYKDFVTDADAEVLEHSGKMVLLFEILRMAEEIGDKVLVFSQSLISLDLIEDFLELASREKTEDKDKPLIYKGEGKWLRNIDYYRLDGSTTAQSRKKWAEEFNDETNVRGRLFIISTKAGSLGINLVAANRVIIFDASWNPSYDIQSIFRVYRFGQTKPVYVYRFLAQGTMEDKIYDRQVTKQSLSFRVVDQQQVERHFTMNELTELYTFEPDLLDDPNSEKKKKRDTPMLPKDTILAELLQIHKEHIVGYHEHDSLLDHKEEEELTEEERKAAWAEYEAEKKGLTMRFNIPTGTNLPPVSFNSQTPYIPFNLGALSAMSNQQLEDLINQGREKVVEATNSVTAVRIQPLEDIISAVWKENMNLSEAQVQALALSRQASQELDVKRREAIYNDVLTKQQMLISCVQRILMNRRLQQQYNQQQQQQMTYQQATLGHLMMPKPPNLIMNPSNYQQIDMRGMYQPVAGGMQPPPLQRAPPPMRSKNPGPSQGKSM

SEQ ID NO: 856339 - protein, 2533 aa, Homo sapiens
MTAEPMSESKLNTLVQKLHDFLAHSSEESEETSSPPRLAMNQNTDKISGSGSNSDMMENSKEEGTSSSEKSKSSGSSRSKRKPSIVTKYVESDDEKPLDDETVNEDASNENSENDITMQSLPKGTVIVQPEPVLNEDKDDFKGPEFRSRSKMKTENLKKRGVLWWISLYLIPCAHVGENLQRITKFCLILERCMHQSTEKILKDGLHGIVSCTACGQQVNHFQKDSIYRHPSLQVLICKNCFKYYMSDDISRDSDGMDEQCRWCAEGGNLICCDFCHNAFCKKCILRNLGRKELSTIMDENNQWYCYICHPEPLLDLVTACNSVFENLEQLLQQNKKKIKVDSEKSNKVYEHTSRFSPKKTSSNCNGEEKKLDDSCSGSVTYSYSALIVPKEMIKKAKKLIETTANMNSSYVKFLKQATDNSEISSATKLRQLKAFKSVLADIKKAHLALEEDLNSEFRAMDAVNKEKNTKEHKVIDAKFETKARKGEKPCALEKKDISKSEAKLSRKQVDSEHMHQNVPTEEQRTNKSTGGEHKKSDRKEEPQYEPANTSEDLDMDIVSVPSSVPEDIFENLETAMEVQSSVDHQGDGSSGTEQEVESSSVKLNISSKDNRGGIKSKTTAKVTKELYVKLTPVSLSNSPIKGADCQEVPQDKDGYKSCGLNPKLEKCGLGQENSDNEHLVENEVSLLLEESDLRRSPRVKTTPLRRPTETNPVTSNSDEECNETVKEKQKLSVPVRKKDKRNSSDSAIDNPKPNKLPKSKQSETVDQNSDSDEMLAILKEVSRMSHSSSSDTDINEIHTNHKTLYDLKTQAGKDDKGKRKRKSSTSGSDFDTKKGKSAKSSIISKKKRQTQSESSNYDSELEKEIKSMSKIGAARTTKKRIPNTKDFDSSEDEKHSKKGMDNQGHKNLKTSQEGSSDDAERKQERETFSSAEGTVDKDTTIMELRDRLPKKQQASASTDGVDKLSGKEQSFTSLEVRKVAETKEKSKHLKTKTCKKVQDGLSDIAEKFLKKDQSDETSEDDKKQSKKGTEEKKKPSDFKKKVIKMEQQYESSSDGTEKLPEREEICHFPKGIKQIKNGTTDGEKKSKKIRDKTSKKKDELSDYAEKSTGKGDSCDSSEDKKSKNGAYGREKKRCKLLGKSSRKRQDCSSSDTEKYSMKEDGCNSSDKRLKRIELRERRNLSSKRNTKEIQSGSSSSDAEESSEDNKKKKQRTSSKKKAVIVKEKKRNSLRTSTKRKQADITSSSSSDIEDDDQNSIGEGSSDEQKIKPVTENLVLSSHTGFCQSSGDEALSKSVPVTVDDDDDDNDPENRIAKKMLLEEIKANLSSDEDGSSDDEPEEGKKRTGKQNEENPGDEEAKNQVNSESDSDSEESKKPRYRHRLLRHKLTVSDGESGEEKKTKPKEHKEVKGRNRRKVSSEDSEDSDFQESGVSEEVSESEDEQRPRTRSAKKAELEENQRSYKQKKKRRRIKVQEDSSSENKSNSEEEEEEKEEEEEEEEEEEEEEEDENDDSKSPGKGRKKIRKILKDDKLRTETQNALKEEEERRKRIAEREREREKLREVIEIEDASPTKCPITTKLVLDEDEETKEPLVQVHRNMVIKLKPHQVDGVQFMWDCCCESVKKTKKSPGSGCILAHCMGLGKTLQVVSFLHTVLLCDKLDFSTALVVCPLNTALNWMNEFEKWQEGLKDDEKLEVSELATVKRPQERSYMLQRWQEDGGVMIIGYEMYRNLAQGRNVKSRKLKEIFNKALVDPGPDFVVCDEGHILKNEASAVSKAMNSIRSRRRIILTGTPLQNNLIEYHCMVNFIKENLLGSIKEFRNRFINPIQNGQCADSTMVDVRVMKKRAHILYEMLAGCVQRKDYTALTKFLPPKHEYVLAVRMTSIQCKLYQYYLDHLTGVGNNSEGGRGKAGAKLFQDFQMLSRIWTHPWCLQLDYISKENKGYFDEDSMDEFIASDSDETSMSLSSDDYTKKKKKGKKGKKDSSSSGSGSDNDVEVIKVWNSRSRGGGEGNVDETGNNPSVSLKLEESKATSSSNPSSPAPDWYKDFVTDADAEVLEHSGKMVLLFEILRMAEEIGDKVLVFSQSLISLDLIEDFLELASREKTEDKDKPLIYKGEGKWLRNIDYYRLDGSTTAQSRKKWAEEFNDETNVRGRLFIISTKAGSLGINLVAANRVIIFDASWNPSYDIQSIFRVYRFGQTKPVYVYRFLAQGTMEDKIYDRQVTKQSLSFRVVDQQQVERHFTMNELTELYTFEPDLLDDPNSEKKKKRDTPMLPKDTILAELLQIHKEHIVGYHEHDSLLDHKEEEELTEEERKAAWAEYEAEKKGLTMRFNIPTGTNLPPVSFNSQTPYIPFNLGALSAMSNQQLEDLINQGREKVVEATNSVTAVRIQPLEDIISAVWKENMNLSEAQVQALALSRQASQELDVKRREAIYNDVLTKQQMLISCVQRILMNRRLQQQYNQQQQQQMTYQQATLGHLMMPKPPNLIMNPSNYQQIDMRGMYQPVAGGMQPPPLQRAPPPMRSKNPGPSQGKSM

SEQ ID NO: 856340 - protein, 90 aa, Homo sapiens [sequence omitted]

SEQ ID NO: 856341 - protein, 2492 aa, Homo sapiens; identical to SEQ ID NO: 856338

SEQ ID NO: 856342 - protein, 2492 aa, Homo sapiens; identical to SEQ ID NO: 856338

SEQ ID NO: 856343 - protein, 1759 aa, Homo sapiens
MLAILKEVSRMSHSSSSDTDINEIHTNHKTLYDLKTQAGKDDKGKRKRKSSTSGSDFDTKKGKSAKSSIISKKKRQTQSESSNYDSELEKEIKSMSKIGAARTTKKRIPNTKDFDSSEDEKHSKKGMDNQGHKNLKTSQEGSSDDAERKQERETFSSAEGTVDKDTTIMELRDRLPKKQQASASTDGVDKLSGKEQSFTSLEVRKVAETKEKSKHLKTKTCKKVQDGLSDIAEKFLKKDQSDETSEDDKKQSKKGTEEKKKPSDFKKKVIKMEQQYESSSDGTEKLPEREEICHFPKGIKQIKNGTTDGEKKSKKIRDKTSKKKDELSDYAEKSTGKGDSCDSSEDKKSKNGAYGREKKRCKLLGKSSRKRQDCSSSDTEKYSMKEDGCNSSDKRLKRIELRERRNLSSKRNTKEIQSGSSSSDAEESSEDNKKKKQRTSSKKKAVIVKEKKRNSLRTSTKRKQADITSSSSSDIEDDDQNSIGEGSSDEQKIKPVTENLVLSSHTGFCQSSGDEALSKSVPVTVDDDDDDNDPENRIAKKMLLEEIKANLSSDEDGSSDDEPEEGKKRTGKQNEENPGDEEAKNQVNSESDSDSEESKKPRYRHRLLRHKLTVSDGESGEEKKTKPKEHKEVKGRNRRKVSSEDSEDSDFQESGVSEEVSESEDEQRPRTRSAKKAELEENQRSYKQKKKRRRIKVQEDSSSENKSNSEEEEEEKEEEEEEEEEEEEEEEDENDDSKSPGKGRKKIRKILKDDKLRTETQNALKEEEERRKRIAEREREREKLREVIEIEDASPTKCPITTKLVLDEDEETKEPLVQVHRNMVIKLKPHQVDGVQFMWDCCCESVKKTKKSPGSGCILAHCMGLGKTLQVVSFLHTVLLCDKLDFSTALVVCPLNTALNWMNEFEKWQEGLKDDEKLEVSELATVKRPQERSYMLQRWQEDGGVMIIGYEMYRNLAQGRNVKSRKLKEIFNKALVDPGPDFVVCDEGHILKNEASAVSKAMNSIRSRRRIILTGTPLQNNLIEYHCMVNFIKENLLGSIKEFRNRFINPIQNGQCADSTMVDVRVMKKRAHILYEMLAGCVQRKDYTALTKFLPPKHEYVLAVRMTSIQCKLYQYYLDHLTGVGNNSEGGRGKAGAKLFQDFQMLSRIWTHPWCLQLDYISKENKGYFDEDSMDEFIASDSDETSMSLSSDDYTKKKKKGKKGKKDSSSSGSGSDNDVEVIKVWNSRSRGGGEGNVDETGNNPSVSLKLEESKATSSSNPSSPAPDWYKDFVTDADAEVLEHSGKMVLLFEILRMAEEIGDKVLVFSQSLISLDLIEDFLELASREKTEDKDKPLIYKGEGKWLRNIDYYRLDGSTTAQSRKKWAEEFNDETNVRGRLFIISTKAGSLGINLVAANRVIIFDASWNPSYDIQSIFRVYRFGQTKPVYVYRFLAQGTMEDKIYDRQVTKQSLSFRVVDQQQVERHFTMNELTELYTFEPDLLDDPNSEKKKKRDTPMLPKDTILAELLQIHKEHIVGYHEHDSLLDHKEEEELTEEERKAAWAEYEAEKKGLTMRFNIPTGTNLPPVSFNSQTPYIPFNLGALSAMSNQQLEDLINQGREKVVEATNSVTAVRIQPLEDIISAVWKENMNLSEAQVQALALSRQASQELDVKRREAIYNDVLTKQQMLISCVQRILMNRRLQQQYNQQQQQQMTYQQATLGHLMMPKPPNLIMNPSNYQQIDMRGMYQPVAGGMQPPPLQRAPPPMRSKNPGPSQGKSM

SEQ ID NO: 856344 - protein, 2390 aa, Homo sapiens
MTAEPMSESKLNTLVQKLHDFLAHSSEESEETSSPPRLAMNQNTDKISGSGSNSDMMENSKEEGTSSSEKSKSSGSSRSKRKPSIVTKYVESDDEKPLDDETVNEDASNENSENDITMQSLPKGTVIVQPEPVLNEDKDDFKGPEFRSRSKMKTENLKKRGEDGLHGIVSCTACGQQVNHFQKDSIYRHPSLQVLICKNCFKYYMSDDISRDSDGMDEQCRWCAEGGNLICCDFCHNAFCKKCILRNLGRKELSTIMDENNQWYCYICHPEPLLDLVTACNSVFENLEQLLQQNKKKIKVDSEKSNKVYEHTSRFSPKKTSSNCNGEEKKLDDSCSGSVTYSYSALIVPKEMIKKAKKLIETTANMNSSYVKFLKQATDNSEISSATKLRQLKAFKSVLADIKKAHLALEEDLNSEFRAMDAVNKEKNTKEHKVIDAKFETKARKGEKPCALEKKDISKSEAKLSRKQVDSEHMHQNVPTEEQRTNKSTGGEHKKSDRKEEPQYEPANTSEDLDMDIVSVPSSVPEDIFENLETAMEVQSSVDHQGDGSSGTEQEVESSSVKLNISSKDNRGGIKSKTTAKVTKELYVKLTPVSLSNSPIKGADCQEVPQDKDGYKSCGLNPKLEKCGLGQENSDNEHLVENEVSLLLEESDLRRSPRVKTTPLRRPTETNPVTSNSDEECNETVKEKQKLSVPVRKKDKRNSSDSAIDNPKPNKLPKSKQSETVDQNSDSDEMLAILKEVSRMSHSSSSDTDINEIHTNHKTLYDLKTQAGKDDKGKRKRKSSTSGSDFDTKKGKSAKSSIISKKKRQTQSESSNYDSELEKEIKSMSKIGAARTTKKRIPNTKDFDSSEDEKHSKKGMDNQGHKNLKTSQEGSSDDAERKQERETFSSAEGTVDKDTTIMELRDRLPKKQQASASTDGVDKLSGKEQSFTSLEVRKVAETKEKSKHLKTKTCKKVQDGLSDIAEKFLKKDQSDETSEDDKKQSKKGTEEKKKPSDFKKKVIKMEQQYESSSDGTEKLPEREEICHFPKGIKQIKNGTTDGEKKSKKIRDKTSKKKDELSDYAEKSTGKGDSCDSSEDKKSKNGAYGREKKRCKLLGKSSRKRQDCSSSDTEKYSMKEDGCNSSDKRLKRIELRERRNLSSKRNTKEIQSGSSSSDAEESSEDNKKKKQRTSSKKKAVIVKEKKRNSLRTSTKRKQADITSSSSSDIEDDDQNSIGEGSSDEQKIKPVTENLVLSSHTGFCQSSGDEALSKSVPVTVDDDDDDNDPENRIAKKMLLEEIKANLSSDEDGSSDDEPEEGKKRTGKQNEENPGDEEAKNQVNSESDSDSEESKKPRYRHRLLRHKLTVSDGESGEEKKTKPKEHKEVKGRNRRKVSSEDSEDSDFQESGVSEEVSESEDEQRPRTRSAKKAELEENQRSYKQKKKRRRIKVQEDSSSENKSNSEEEEEEKEEEEEEEEEEEEEEEDENDDSKSPGKGRKKIRKILKDDKLRTETQNALKEEEERRKRIAEREREREKLREVIEIEDASPTKCPITTKLVLDEDEETKEPLVQVHRNMVIKLKPHQVDGVQFMWDCCCESVKKTKKSPGSGCILAHCMGLGKTLQVVSFLHTVLLCDKLDFSTALVVCPLNTALNWMNEFEKWQEGLKDDEKLEVSELATVKRPQERSYMLQRWQEDGGVMIIGYEMYRNLAQGRNVKSRKLKEIFNKALVDPGPDFVVCDEGHILKNEASAVSKAMNSIRSRRRIILTGTPLQNNLIEYHCMVNFIKENLLGSIKEFRNRFINPIQNGQCADSTMVDVRVMKKRAHILYEMLAGCVQRKDYTALTKFLPPKHEYVLAVRMTSIQCKLYQYYLDHLTGVGNNSEGGRGKAGAKLFQDFQMLSRIWTHPWCLQLDYISKENKGYFDEDSMDEFIASDSDETSMSLSSDDYTKKKKKGKKGKKDSSSSGSGSDNDVEVIKVWNSRSRGGGEGNVDETGNNPSVSLKLEESKATSSSNPSSPAPDWYKDFVTDADAEVLEHSGKMVLLFEILRMAEEIGDKVLVFSQSLISLDLIEDFLELASREKTEDKDKPLIYKGEGKWLRNIDYYRLDGSTTAQSRKKWAEEFNDETNVRGRLFIISTKAGSLGINLVAANRVIIFDASWNPSYDIQSIFRVYRFGQTKPVYVYRFLAQGTMEDKIYDRQVTKQSLSFRVVDQQQVERHFTMNELTELYTFEPDLLDDPNSEKKKKRDTPMLPKDTILAELLQIHKEHIVGYHEHDSLLDHKEEEELTEEERKAAWAEYEAEKKGLTMRFNIPTGTNLPPVSFNSQTPYIPFNLGALSAMSNQQLEDLINQGREKVVEATNSVTAVRIQPLEDIISAVWKENMNLSEAQVQALALSRQASQELDVKRREAI

SEQ ID NO: 856345 - protein, 615 aa, Homo sapiens [sequence omitted]

SEQ ID NO: 856346 - protein, 2150 aa, Homo sapiens
MTAEPMSESKLNTLVQKLHDFLAHSSEESEETSSPPRLAMNQNTDKISGSGSNSDMMENSKEEGTSSSEKSKSSGSSRSKRKPSIVTKYVESDDEKPLDDETVNEDASNENSENDITMQSLPKGTVIVQPEPVLNEDKDDFKGPEFRSRSKMKTENLKKRGEDGLHGIVSCTACGQQVNHFQKDSIYRHPSLQVLICKNCFKYYMSDDISRDSDGMDEQCRWCAEGGNLICCDFCHNAFCKKCILRNLGRKELSTIMDENNQWYCYICHPEPLLDLVTACNSVFENLEQLLQQNKKKIKVDSEKSNKVYEHTSRFSPKKTSSNCNGEEKKLDDSCSGSVTYSYSALIVPKEMIKKAKKLIETTANMNSSYVKFLKQATDNSEISSATKLRQLKAFKSVLADIKKAHLALEEDLNSEFRAMDAVNKEKNTKEHKVIDAKFETKARKGEKPCALEKKDISKSEAKLSRKQVDSEHMHQNVPTEEQRTNKSTGGEHKKSDRKEEPQYEPANTSEDLDMDIVSVPSSVPEDIFENLETAMEVQSSVDHQGDGSSGTEQEVESSSVKLNISSKDNRGGIKSKTTAKVTKELYVKLTPVSLSNSPIKGADCQEVPQDKDGYKSCGLNPKLEKCGLGQENSDNEHLVENEVSLLLEESDLRRSPRVKTTPLRRPTETNPVTSNSDEECNETVKEKQKLSVPVRKKDKRNSSDSAIDNPKPNKLPKSKQSETVDQNSDSDEMLAILKEVSRMSHSSSSDTDINEIHTNHKTLYDLKTQAGKDDKGKRKRKSSTSGSDFDTKKGKSAKSSIISKKKRQTQSESSNYDSELEKEIKSMSKIGAARTTKKRIPNTKDFDSSEDEKHSKKGMDNQGHKNLKTSQEGSSDDAERKQERETFSSAEGTVDKDTTIMELRDRLPKKQQASASTDGVDKLSGKEQSFTSLEVRKVAETKEKSKHLKTKTCKKVQDGLSDIAEKFLKKDQSDETSEDDKKQSKKGTEEKKKPSDFKKKVIKMEQQYESSSDGTEKLPEREEICHFPKGIKQIKNGTTDGEKKSKKIRDKTSKKKDELSDYAEKSTGKGDSCDSSEDKKSKNGAYGREKKRCKLLGKSSRKRQDCSSSDTEKYSMKEDGCNSSDKRLKRIELRERRNLSSKRNTKEIQSGSSSSDAEESSEDNKKKKQRTSSKKKAVIVKEKKRNSLRTSTKRKQADITSSSSSDIEDDDQNSIGEGSSDEQKIKPVTENLVLSSHTGFCQSSGDEALSKSVPVTVDDDDDDNDPENRIAKKMLLEEIKANLSSDEDGSSDDEPEEGKKRTGKQNEENPGDEEAKNQVNSESDSDSEESKKPRYRHRLLRHKLTVSDGESGEEKKTKPKEHKEVKGRNRRKVSSEDSEDSDFQESGVSEEVSESEDEQRPRTRSAKKAELEENQRSYKQKKKRRRIKVQEDSSSENKSNSEEEEEEKEEEEEEEEEEEEEEEDENDDSKSPGKGRKKIRKILKDDKLRTETQNALKEEEERRKRIAEREREREKLREVIEIEDASPTKCPITTKLVLDEDEETKEPLVQVHRNMVIKLKPHQVDGVQFMWDCCCESVKKTKKSPGSGCILAHCMGLGKTLQVVSFLHTVLLCDKLDFSTALVVCPLNTALNWMNEFEKWQEGLKDDEKLEVSELATVKRPQERSYMLQRWQEDGGVMIIGYEMYRNLAQGRNVKSRKLKEIFNKALVDPGPDFVVCDEGHILKNEASAVSKAMNSIRSRRRIILTGTPLQNNLIEYHCMVNFIKENLLGSIKEFRNRFINPIQNGQCADSTMVDVRVMKKRAHILYEMLAGCVQRKDYTALTKFLPPKHEYVLAVRMTSIQCKLYQYYLDHLTGVGNNSEGGRGKAGAKLFQDFQMLSRIWTHPWCLQLDYISKENKGYFDEDSMDEFIASDSDETSMSLSSDDYTKKKKKGKKGKKDSSSSGSGSDNDVEVIKVWNSRSRGGGEGNVDETGNNPSVSLKLEESKATSSSNPSSPAPDWYKDFVTDADAEVLEHSGKMVLLFEILRMAEEIGDKVLVFSQSLISLDLIEDFLELASREKTEDKDKPLIYKGELQIFLCRNFKNTDLNIPYKHFSNKRNKTTQSHNSIISKFFCNVYLSLSIYMYSLFQNKIVLFIFEVYNMVLWDTYR

SEQ ID NO: 856347 - protein, 1007 aa, Homo sapiens
MTAEPMSESKLNTLVQKLHDFLAHSSEESEETSSPPRLAMNQNTDKISGSGSNSDMMENSKEEGTSSSEKSKSSGSSRSKRKPSIVTKYVESDDEKPLDDETVNEDASNENSENDITMQSLPKGTVIVQPEPVLNEDKDDFKGPEFRSRSKMKTENLKKRGEDGLHGIVSCTACGQQVNHFQKDSIYRHPSLQVLICKNCFKYYMSDDISRDSDGMDEQCRWCAEGGNLICCDFCHNAFCKKCILRNLGRKELSTIMDENNQWYCYICHPEPLLDLVTACNSVFENLEQLLQQNKKKIKVDSEKSNKVYEHTSRFSPKKTSSNCNGEEKKLDDSCSGSVTYSYSALIVPKEMIKKAKKLIETTANMNSSYVKFLKQATDNSEISSATKLRQLKAFKSVLADIKKAHLALEEDLNSEFRAMDAVNKEKNTKEHKVIDAKFETKARKGEKPCALEKKDISKSEAKLSRKQVDSEHMHQNVPTEEQRTNKSTGGEHKKSDRKEEPQYEPANTSEDLDMDIVSVPSSVPEDIFENLETAMEVQSSVDHQGDGSSGTEQEVESSSVKLNISSKDNRGGIKSKTTAKVTKELYVKLTPVSLSNSPIKGADCQEVPQDKDGYKSCGLNPKLEKCGLGQENSDNEHLVENEVSLLLEESDLRRSPRVKTTPLRRPTETNPVTSNSDEECNETVKEKQKLSVPVRKKDKRNSSDSAIDNPKPNKLPKSKQSETVDQNSDSDEMLAILKEVSRMSHSSSSDTDINEIHTNHKTLYDLKTQAGKDDKGKRKRKSSTSGSDFDTKKGKSAKSSIISKKKRQTQSESSNYDSELEKEIKSMSKIGAARTTKKRIPNTKDFDSSEDEKHSKKGMDNQGHKNLKTSQEGSSDDAERKQERETFSSAEGTVDKDTTIMELRDRLPKKQQASASTDGVDKLSGKEQSFTSLEVRKVAETKEKSKHLKTKTCKKVQDGLSDIAEKFLKKDQSDETSEDDKKQSKKKKKKKRKLGLGFALGITGLE

SEQ ID NO: 856348 - protein, 1871 aa, Homo sapiens
MTAEPMSESKLNTLVQKLHDFLAHSSEESEETSSPPRLAMNQNTDKISGSGSNSDMMENSKEEGTSSSEKSKSSGSSRSKRKPSIVTKYVESDDEKPLDDETVNEDASNENSENDITMQSLPKGTVIVQPEPVLNEDKDDFKGPEFRSRSKMKTENLKKRGEDGLHGIVSCTACGQQVNHFQKDSIYRHPSLQVLICKNCFKYYMSDDISRDSDGMDEQCRWCAEGGNLICCDFCHNAFCKKCILRNLGRKELSTIMDENNQWYCYICHPEPLLDLVTACNSVFENLEQLLQQNKKKIKVDSEKSNKVYEHTSRFSPKKTSSNCNGEEKKLDDSCSGSVTYSYSALIVPKEMIKKAKKLIETTANMNSSYVKFLKQATDNSEISSATKLRQLKAFKSVLADIKKAHLALEEDLNSEFRAMDAVNKEKNTKEHKVIDAKFETKARKGEKPCALEKKDISKSEAKLSRKQVDSEHMHQNVPTEEQRTNKSTGGEHKKSDRKEEPQYEPANTSEDLDMDIVSVPSSVPEDIFENLETAMEVQSSVDHQGDGSSGTEQEVESSSVKLNISSKDNRGGIKSKTTAKVTKELYVKLTPVSLSNSPIKGADCQEVPQDKDGYKSCGLNPKLEKCGLGQENSDNEHLVENEVSLLLEESDLRRSPRVKTTPLRRPTETNPVTSNSDEECNETVKEKQKLSVPVRKKDKRNSSDSAIDNPKPNKLPKSKQSETVDQNSDSDEMLAILKEVSRMSHSSSSDTDINEIHTNHKTLYDLKTQAGKDDKGKRKRKSSTSGSDFDTKKGKSAKSSIISKKKRQTQSESSNYDSELEKEIKSMSKIGAARTTKKRIPNTKDFDSSEDEKHSKKGMDNQGHKNLKTSQEGSSDDAERKQERETFSSAEGTVDKDTTIMELRDRLPKKQQASASTDGVDKLSGKEQSFTSLEVRKVAETKEKSKHLKTKTCKKVQDGLSDIAEKFLKKDQSDETSEDDKKQSKKGTEEKKKPSDFKKKVIKMEQQYESSSDGTEKLPEREEICHFPKGIKQIKNGTTDGEKKSKKIRDKTSKKKDELSDYAEKSTGKGDSCDSSEDKKSKNGAYGREKKRCKLLGKSSRKRQDCSSSDTEKYSMKEDGCNSSDKRLKRIELRERRNLSSKRNTKEIQSGSSSSDAEESSEDNKKKKQRTSSKKKAVIVKEKKRNSLRTSTKRKQADITSSSSSDIEDDDQNSIGEGSSDEQKIKPVTENLVLSSHTGFCQSSGDEALSKSVPVTVDDDDDDNDPENRIAKKMLLEEIKANLSSDEDGSSDDEPEEGKKRTGKQNEENPGDEEAKNQVNSESDSDSEESKKPRYRHRLLRHKLTVSDGESGEEKKTKPKEHKEVKGRNRRKVSSEDSEDSDFQESGVSEEVSESEDEQRPRTRSAKKAELEENQRSYKQKKKRRRIKVQEDSSSENKSNSEEEEEEKEEEEEEEEEEEEEEEDENDDSKSPGKGRKKIRKILKDDKLRTETQNALKEEEERRKRIAEREREREKLREVIEIEDASPTKCPITTKLVLDEDEETKEPLVQVHRNMVIKLKPHQVDGVQFMWDCCCESVKKTKKSPGSGCILAHCMGLGKTLQVVSFLHTVLLCDKLDFSTALVVCPLNTALNWMNEFEKWQEGLKDDEKLEVSELATVKRPQERSYMLQRWQEDGGVMIIGYEMYRNLAQGRNVKSRKLKEIFNKALVDPGPDFVVCDEGHILKNEASAVSKAMNSIRSRRRIILTGTPLQNNLIEYHCMVNFIKENLLGSIKEFRNRFINPIQNGQCADSTMVDVRVMKKRAHILYEMLAGCVQRKDYTALTKFLPPKHEYVLAVRMTSIQCKLYQYYLDHLTVLHLNKMGMLKSIKYF

SEQ ID NO: 856349 - protein, 1618 aa, Homo sapiens
MTAEPMSESKLNTLVQKLHDFLAHSSEESEETSSPPRLAMNQNTDKISGSGSNSDMMENSKEEGTSSSEKSKSSGSSRSKRKPSIVTKYVESDDEKPLDDETVNEDASNENSENDITMQSLPKGTVIVQPEPVLNEDKDDFKGPEFRSRSKMKTENLKKRGEDGLHGIVSCTACGQQVNHFQKDSIYRHPSLQVLICKNCFKYYMSDDISRDSDGMDEQCRWCAEGGNLICCDFCHNAFCKKCILRNLGRKELSTIMDENNQWYCYICHPEPLLDLVTACNSVFENLEQLLQQNKKKIKVDSEKSNKVYEHTSRFSPKKTSSNCNGEEKKLDDSCSGSVTYSYSALIVPKEMIKKAKKLIETTANMNSSYVKFLKQATDNSEISSATKLRQLKAFKSVLADIKKAHLALEEDLNSEFRAMDAVNKEKNTKEHKVIDAKFETKARKGEKPCALEKKDISKSEAKLSRKQVDSEHMHQNVPTEEQRTNKSTGGEHKKSDRKEEPQYEPANTSEDLDMDIVSVPSSVPEDIFENLETAMEVQSSVDHQGDGSSGTEQEVESSSVKLNISSKDNRGGIKSKTTAKVTKELYVKLTPVSLSNSPIKGADCQEVPQDKDGYKSCGLNPKLEKCGLGQENSDNEHLVENEVSLLLEESDLRRSPRVKTTPLRRPTETNPVTSNSDEECNETVKEKQKLSVPVRKKDKRNSSDSAIDNPKPNKLPKSKQSETVDQNSDSDEMLAILKEVSRMSHSSSSDTDINEIHTNHKTLYDLKTQAGKDDKGKRKRKSSTSGSDFDTKKGKSAKSSIISKKKRQTQSESSNYDSELEKEIKSMSKIGAARTTKKRIPNTKDFDSSEDEKHSKKGMDNQGHKNLKTSQEGSSDDAERKQERETFSSAEGTVDKDTTIMELRDRLPKKQQASASTDGVDKLSGKEQSFTSLEVRKVAETKEKSKHLKTKTCKKVQDGLSDIAEKFLKKDQSDETSEDDKKQSKKGTEEKKKPSDFKKKVIKMEQQYESSSDGTEKLPEREEICHFPKGIKQIKNGTTDGEKKSKKIRDKTSKKKDELSDYAEKSTGKGDSCDSSEDKKSKNGAYGREKKRCKLLGKSSRKRQDCSSSDTEKYSMKEDGCNSSDKRLKRIELRERRNLSSKRNTKEIQSGSSSSDAEESSEDNKKKKQRTSSKKKAVIVKEKKRNSLRTSTKRKQADITSSSSSDIEDDDQNSIGEGSSDEQKIKPVTENLVLSSHTGFCQSSGDEALSKSVPVTVDDDDDDNDPENRIAKKMLLEEIKANLSSDEDGSSDDEPEEGKKRTGKQNEENPGDEEAKNQVNSESDSDSEESKKPRYRHRLLRHKLTVSDGESGEEKKTKPKEHKEVKGRNRRKVSSEDSEDSDFQESGVSEEVSESEDEQRPRTRSAKKAELEENQRSYKQKKKRRRIKVQEDSSSENKSNSEEEEEEKEEEEEEEEEEEEEEEDENDDSKSPGKGRKKIRKILKDDKLRTETQNALKEEEERRKRIAEREREREKLREVIEIEDASPTKCPITTKLVLDEDEETKEPLVQVHRNMVIKLKPHQVDGVQFMWDCCCESVKKTKKSPGSGCILAHCMGLGKTLQVRAEEYEGILFLWIH

SEQ ID NO: 856350 - protein, 1331 aa, Homo sapiens
MTAEPMSESKLNTLVQKLHDFLAHSSEESEETSSPPRLAMNQNTDKISGSGSNSDMMENSKEEGTSSSEKSKSSGSSRSKRKPSIVTKYVESDDEKPLDDETVNEDASNENSENDITMQSLPKGTVIVQPEPVLNEDKDDFKGPEFRSRSKMKTENLKKRGEDGLHGIVSCTACGQQVNHFQKDSIYRHPSLQVLICKNCFKYYMSDDISRDSDGMDEQCRWCAEGGNLICCDFCHNAFCKKCILRNLGRKELSTIMDENNQWYCYICHPEPLLDLVTACNSVFENLEQLLQQNKKKIKVDSEKSNKVYEHTSRFSPKKTSSNCNGEEKKLDDSCSGSVTYSYSALIVPKEMIKKAKKLIETTANMNSSYVKFLKQATDNSEISSATKLRQLKAFKSVLADIKKAHLALEEDLNSEFRAMDAVNKEKNTKEHKVIDAKFETKARKGEKPCALEKKDISKSEAKLSRKQVDSEHMHQNVPTEEQRTNKSTGGEHKKSDRKEEPQYEPANTSEDLDMDIVSVPSSVPEDIFENLETAMEVQSSVDHQGDGSSGTEQEVESSSVKLNISSKDNRGGIKSKTTAKVTKELYVKLTPVSLSNSPIKGADCQEVPQDKDGYKSCGLNPKLEKCGLGQENSDNEHLVENEVSLLLEESDLRRSPRVKTTPLRRPTETNPVTSNSDEECNETVKEKQKLSVPVRKKDKRNSSDSAIDNPKPNKLPKSKQSETVDQNSDSDEMLAILKEVSRMSHSSSSDTDINEIHTNHKTLYDLKTQAGKDDKGKRKRKSSTSGSDFDTKKGKSAKSSIISKKKRQTQSESSNYDSELEKEIKSMSKIGAARTTKKRIPNTKDFDSSEDEKHSKKGMDNQGHKNLKTSQEGSSDDAERKQERETFSSAEGTVDKDTTIMELRDRLPKKQQASASTDGVDKLSGKEQSFTSLEVRKVAETKEKSKHLKTKTCKKVQDGLSDIAEKFLKKDQSDETSEDDKKQSKKGTEEKKKPSDFKKKVIKMEQQYESSSDGTEKLPEREEICHFPKGIKQIKNGTTDGEKKSKKIRDKTSKKKDELSDYAEKSTGKGDSCDSSEDKKSKNGAYGREKKRCKLLGKSSRKRQDCSSSDTEKYSMKEDGCNSSDKRLKRIELRERRNLSSKRNTKEIQSGSSSSDAEESSEDNKKKKQRTSSKKKAVIVKEKKRNSLRTSTKRKQADITSSSSSDIEDDDQNSIGEGSSDEQKIKPVTENLVLSSHTGFCQSSGDEALSKSVPVTVDDDDDDNDPENRYDSICKDFKKIITHPRHGHKQQQRNSKQVVKTRSACLRKTRSQSSCKFERKARKWAKTQKP

SEQ ID NO: 856351 - protein, 2454 aa, Homo sapiens
MTAEPMSESKLNTLVQKLHDFLAHSSEESEETSSPPRLAMNQNTDKISGSGSNSDMMENSKEEGTSSSEKSKSSGSSRSKRKPSIVTKYVESDDEKPLDDETVNEDASNENSENDITMQSLPKEDGLHGIVSCTACGQQVNHFQKDSIYRHPSLQVLICKNCFKYYMSDDISRDSDGMDEQCRWCAEGGNLICCDFCHNAFCKKCILRNLGRKELSTIMDENNQWYCYICHPEPLLDLVTACNSVFENLEQLLQQNKKKIKVDSEKSNKVYEHTSRFSPKKTSSNCNGEEKKLDDSCSGSVTYSYSALIVPKEMIKKAKKLIETTANMNSSYVKFLKQATDNSEISSATKLRQLKAFKSVLADIKKAHLALEEDLNSEFRAMDAVNKEKNTKEHKVIDAKFETKARKGEKPCALEKKDISKSEAKLSRKQVDSEHMHQNVPTEEQRTNKSTGGEHKKSDRKEEPQYEPANTSEDLDMDIVSVPSSVPEDIFENLETAMEVQSSVDHQGDGSSGTEQEVESSSVKLNISSKDNRGGIKSKTTAKVTKELYVKLTPVSLSNSPIKGADCQEVPQDKDGYKSCGLNPKLEKCGLGQENSDNEHLVENEVSLLLEESDLRRSPRVKTTPLRRPTETNPVTSNSDEECNETVKEKQKLSVPVRKKDKRNSSDSAIDNPKPNKLPKSKQSETVDQNSDSDEMLAILKEVSRMSHSSSSDTDINEIHTNHKTLYDLKTQAGKDDKGKRKRKSSTSGSDFDTKKGKSAKSSIISKKKRQTQSESSNYDSELEKEIKSMSKIGAARTTKKRIPNTKDFDSSEDEKHSKKGMDNQGHKNLKTSQEGSSDDAERKQERETFSSAEGTVDKDTTIMELRDRLPKKQQASASTDGVDKLSGKEQSFTSLEVRKVAETKEKSKHLKTKTCKKVQDGLSDIAEKFLKKDQSDETSEDDKKQSKKGTEEKKKPSDFKKKVIKMEQQYESSSDGTEKLPEREEICHFPKGIKQIKNGTTDGEKKSKKIRDKTSKKKDELSDYAEKSTGKGDSCDSSEDKKSKNGAYGREKKRCKLLGKSSRKRQDCSSSDTEKYSMKEDGCNSSDKRLKRIELRERRNLSSKRNTKEIQSGSSSSDAEESSEDNKKKKQRTSSKKKAVIVKEKKRNSLRTSTKRKQADITSSSSSDIEDDDQNSIGEGSSDEQKIKPVTENLVLSSHTGFCQSSGDEALSKSVPVTVDDDDDDNDPENRIAKKMLLEEIKANLSSDEDGSSDDEPEEGKKRTGKQNEENPGDEEAKNQVNSESDSDSEESKKPRYRHRLLRHKLTVSDGESGEEKKTKPKEHKEVKGRNRRKVSSEDSEDSDFQESGVSEEVSESEDEQRPRTRSAKKAELEENQRSYKQKKKRRRIKVQEDSSSENKSNSEEEEEEKEEEEEEEEEEEEEEEDENDDSKSPGKGRKKIRKILKDDKLRTETQNALKEEEERRKRIAEREREREKLREVIEIEDASPTKCPITTKLVLDEDEETKEPLVQVHRNMVIKLKPHQVDGVQFMWDCCCESVKKTKKSPGSGCILAHCMGLGKTLQVVSFLHTVLLCDKLDFSTALVVCPLNTALNWMNEFEKWQEGLKDDEKLEVSELATVKRPQERSYMLQRWQEDGGVMIIGYEMYRNLAQGRNVKSRKLKEIFNKALVDPGPDFVVCDEGHILKNEASAVSKAMNSIRSRRRIILTGTPLQNNLIEYHCMVNFIKENLLGSIKEFRNRFINPIQNGQCADSTMVDVRVMKKRAHILYEMLAGCVQRKDYTALTKFLPPKHEYVLAVRMTSIQCKLYQYYLDHLTGVGNNSEGGRGKAGAKLFQDFQMLSRIWTHPWCLQLDYISKENKGYFDEDSMDEFIASDSDETSMSLSSDDYTKKKKKGKKGKKDSSSSGSGSDNDVEVIKVWNSRSRGGGEGNVDETGNNPSVSLKLEESKATSSSNPSSPAPDWYKDFVTDADAEVLEHSGKMVLLFEILRMAEEIGDKVLVFSQSLISLDLIEDFLELASREKTEDKDKPLIYKGEGKWLRNIDYYRLDGSTTAQSRKKWAEEFNDETNVRGRLFIISTKAGSLGINLVAANRVIIFDASWNPSYDIQSIFRVYRFGQTKPVYVYRFLAQGTMEDKIYDRQVTKQSLSFRVVDQQQVERHFTMNELTELYTFEPDLLDDPNSEKKKKRDTPMLPKDTILAELLQIHKEHIVGYHEHDSLLDHKEEEELTEEERKAAWAEYEAEKKGLTMRFNIPTGTNLPPVSFNSQTPYIPFNLGALSAMSNQQLEDLINQGREKVVEATNSVTAVRIQPLEDIISAVWKENMNLSEAQVQALALSRQASQELDVKRREAIYNDVLTKQQMLISCVQRILMNRRLQQQYNQQQQQQMTYQQATLGHLMMPKPPNLIMNPSNYQQIDMRGMYQPVAGGMQPPPLQRAPPPMRSKNPGPSQGKSM

SEQ ID NO: 856352 - protein, 2492 aa, Homo sapiens; identical to SEQ ID NO: 856338

SEQ ID NO: 856353 - protein, 2492 aa, Homo sapiens; identical to SEQ ID NO: 856338

SEQ ID NO: 856354 - protein, 1268 aa, Homo sapiens
MVDSYRYPLCESHSTGFCQSSGDEALSKSVPVTVDDDDDDNDPENRIAKKMLLEEIKANLSSDEDGSSDDEPEEGKKRTGKQNEENPGDEEAKNQVNSESDSDSEESKKPRYRHRLLRHKLTVSDGESGEEKKTKPKEHKEVKGRNRRKVSSEDSEDSDFQESGVSEEVSESEDEQRPRTRSAKKAELEENQRSYKQKKKRRRIKVQEDSSSENKSNSEEEEEEKEEEEEEEEEEEEEEEDENDDSKSPGKGRKKIRKILKDDKLRTETQNALKEEEERRKRIAEREREREKLREVIEIEDASPTKCPITTKLVLDEDEETKEPLVQVHRNMVIKLKPHQVDGVQFMWDCCCESVKKTKKSPGSGCILAHCMGLGKTLQVVSFLHTVLLCDKLDFSTALVVCPLNTALNWMNEFEKWQEGLKDDEKLEVSELATVKRPQERSYMLQRWQEDGGVMIIGYEMYRNLAQGRNVKSRKLKEIFNKALVDPGPDFVVCDEGHILKNEASAVSKAMNSIRSRRRIILTGTPLQNNLIEYHCMVNFIKENLLGSIKEFRNRFINPIQNGQCADSTMVDVRVMKKRAHILYEMLAGCVQRKDYTALTKFLPPKHEYVLAVRMTSIQCKLYQYYLDHLTGVGNNSEGGRGKAGAKLFQDFQMLSRIWTHPWCLQLDYISKENKGYFDEDSMDEFIASDSDETSMSLSSDDYTKKKKKGKKGKKDSSSSGSGSDNDVEVIKVWNSRSRGGGEGNVDETGNNPSVSLKLEESKATSSSNPSSPAPDWYKDFVTDADAEVLEHSGKMVLLFEILRMAEEIGDKVLVFSQSLISLDLIEDFLELASREKTEDKDKPLIYKGEGKWLRNIDYYRLDGSTTAQSRKKWAEEFNDETNVRGRLFIISTKAGSLGINLVAANRVIIFDASWNPSYDIQSIFRVYRFGQTKPVYVYRFLAQGTMEDKIYDRQVTKQSLSFRVVDQQQVERHFTMNELTELYTFEPDLLDDPNSEKKKKRDTPMLPKDTILAELLQIHKEHIVGYHEHDSLLDHKEEEELTEEERKAAWAEYEAEKKGLTMRFNIPTGTNLPPVSFNSQTPYIPFNLGALSAMSNQQLEDLINQGREKVVEATNSVTAVRIQPLEDIISAVWKENMNLSEAQVQALALSRQASQELDVKRREAIYNDVLTKQQMLISCVQRILMNRRLQQQYNQQQQQQMTYQQATLGHLMMPKPPNLIMNPSNYQQIDMRGMYQPVAGGMQPPPLQRAPPPMRSKNPGPSQGKSM

SEQ ID NO: 856355 - protein, 194 aa, Homo sapiens
TVCCFYNFFSSLINEVLQLLITHCCQGSQIERNVRSLRVETDSVTAVRIQPLEDIISAVWKENMNLSEAQVQALALSRQASQELDVKRREAIYNDVLTKQQMLISCVQRILMNRRLQQQYNQQQQQQMTYQQATLGHLMMPKPPNLIMNPSNYQQIDMRGMYQPVAGGMQPPPLQRAPPPMRSKNPGPSQGKSM

SEQ ID NO: 856356 - protein, 2125 aa, Homo sapiens
MTAEPMSESKLNTLVQKLHDFLAHSSEESEETSSPPRLAMNQNTDKISGSGSNSDMMENSKEEGTSSSEKSKSSGSSRSKRKPSIVTKYVESDDEKPLDDETVNEDASNENSENDITMQSLPKGTVIVQPEPVLNEDKDDFKGPEFRSRSKMKTENLKKRGEDGLHGIVSCTACGQQVNHFQKDSIYRHPSLQVLICKNCFKYYMSDDISRDSDGMDEQCRWCAEGGNLICCDFCHNAFCKKCILRNLGRKELSTIMDENNQWYCYICHPEPLLDLVTACNSVFENLEQLLQQNKKKIKVDSEKSNKVYEHTSRFSPKKTSSNCNGEEKKLDDSCSGSVTYSYSALIVPKEMIKKAKKLIETTANMNSSYVKFLKQATDNSEISSATKLRQLKAFKSVLADIKKAHLALEEDLNSEFRAMDAVNKEKNTKEHKVIDAKFETKARKGEKPCALEKKDISKSEAKLSRKQVDSEHMHQNVPTEEQRTNKSTGGEHKKSDRKEEPQYEPANTSEDLDMDIVSVPSSVPEDIFENLETAMEVQSSVDHQGDGSSGTEQEVESSSVKLNISSKDNRGGIKSKTTAKVTKELYVKLTPVSLSNSPIKGADCQEVPQDKDGYKSCGLNPKLEKCGLGQENSDNEHLVENEVSLLLEESDLRRSPRVKTTPLRRPTETNPVTSNSDEECNETVKEKQKLSVPVRKKDKRNSSDSAIDNPKPNKLPKSKQSETVDQNSDSDEMLAILKEVSRMSHSSSSDTDINEIHTNHKTLYDLKTQAGKDDKGKRKRKSSTSGSDFDTKKGKSAKSSIISKKKRQTQSESSNYDSELEKEIKSMSKIGAARTTKKRIPNTKDFDSSEDEKHSKKGMDNQGHKNLKTSQEGSSDDAERKQERETFSSAEGTVDKDTTIMELRDRLPKKQQASASTDGVDKLSGKEQSFTSLEVRKVAETKEKSKHLKTKTCKKVQDGLSDIAEKFLKKDQSDETSEDDKKQSKKGTEEKKKPSDFKKKVIKMEQQYESSSDGTEKLPEREEICHFPKGIKQIKNGTTDGEKKSKKIRDKTSKKKDELSDYAEKSTGKGDSCDSSEDKKSKNGAYGREKKRCKLLGKSSRKRQDCSSSDTEKYSMKEDGCNSSDKRLKRIELRERRNLSSKRNTKEIQSGSSSSDAEESSEDNKKKKQRTSSKKKAVIVKEKKRNSLRTSTKRKQADITSSSSSDIEDDDQNSIGEGSSDEQKIKPVTENLVLSSHTGFCQSSGDEALSKSVPVTVDDDDDDNDPENRIAKKMLLEEIKANLSSDEDGSSDDEPEEGKKRTGKQNEENPGDEEAKNQVNSESDSDSEESKKPRYRHRLLRHKLTVSDGESGEEKKTKPKEHKEVKGRNRRKVSSEDSEDSDFQESGVSEEVSESEDEQRPRTRSAKKAELEENQRSYKQKKKRRRIKVQEDSSSENKSNSEEEEEEKEEEEEEEEEEEEEEEDENDDSKSPGKGRKKIRKILKDDKLRTETQNALKEEEERRKRIAEREREREKLREVIEIEDASPTKCPITTKLVLDEDEETKEPLVQVHRNMVIKLKPHQVDGVQFMWDCCCESVKKTKKSPGSGCILAHCMGLGKTLQVVSFLHTVLLCDKLDFSTALVVCPLNTALNWMNEFEKWQEGLKDDEKLEVSELATVKRPQERSYMLQRWQEDGGVMIIGYEMYRNLAQGRNVKSRKLKEIFNKALVDPGPDFVVCDEGHILKNEASAVSKAMNSIRSRRRIILTGTPLQNNLIEYHCMVNFIKENLLGSIKEFRNRFINPIQNGQCADSTMVDVRVMKKRAHILYEMLAGCVQRKDYTALTKFLPPKHEYVLAVRMTSIQCKLYQYYLDHLTGVGNNSEGGRGKAGAKLFQDFQMLSRIWTHPWCLQLDYISKENKGYFDEDSMDEFIASDSDETSMSLSSDDYTKKKKKGKKGKKDSSSSGSGSDNDVEVIKVWNSRSRGGGEGNVDETGNNPSVSLKLEESKATSSSNPSSPAPDWYKDFVTDADAEVLEHSGKMVLLFEILRMAEEIGDKVLVFSQSLISLDLIEDFLELASREKTEDKDKPLIYKGEGKWLRNIDYYRLDGSTTAQSRKKWAEEFNDETNVRGRLFIISYLTDQRNSR

SEQ ID NO: 856357 - protein, 1725 aa, Homo sapiens
MTAEPMSESKLNTLVQKLHDFLAHSSEESEETSSPPRLAMNQNTDKISGSGSNSDMMENSKEEGTSSSEKSKSSGSSRSKRKPSIVTKYVESDDEKPLDDETVNEDASNENSENDITMQSLPKGTVIVQPEPVLNEDKDDFKGPEFRSRSKMKTENLKKRGEDGLHGIVSCTACGQQVNHFQKDSIYRHPSLQVLICKNCFKYYMSDDISRDSDGMDEQCRWCAEGGNLICCDFCHNAFCKKCILRNLGRKELSTIMDENNQWYCYICHPEPLLDLVTACNSVFENLEQLLQQNKKKIKVDSEKSNKVYEHTSRFSPKKTSSNCNGEEKKLDDSCSGSVTYSYSALIVPKEMIKKAKKLIETTANMNSSYVKFLKQATDNSEISSATKLRQLKAFKSVLADIKKAHLALEEDLNSEFRAMDAVNKEKNTKEHKVIDAKFETKARKGEKPCALEKKDISKSEAKLSRKQVDSEHMHQNVPTEEQRTNKSTGGEHKKSDRKEEPQYEPANTSEDLDMDIVSVPSSVPEDIFENLETAMEVQSSVDHQGDGSSGTEQEVESSSVKLNISSKDNRGGIKSKTTAKVTKELYVKLTPVSLSNSPIKGADCQEVPQDKDGYKSCGLNPKLEKCGLGQENSDNEHLVENEVSLLLEESDLRRSPRVKTTPLRRPTETNPVTSNSDEECNETVKEKQKLSVPVRKKDKRNSSDSAIDNPKPNKLPKSKQSETVDQNSDSDEMLAILKEVSRMSHSSSSDTDINEIHTNHKTLYDLKTQAGKDDKGKRKRKSSTSGSDFDTKKGKSAKSSIISKKKRQTQSESSNYDSELEKEIKSMSKIGAARTTKKRIPNTKDFDSSEDEKHSKKGMDNQGHKNLKTSQEGSSDDAERKQERETFSSAEGTVDKDTTIMELRDRLPKKQQASASTDGVDKLSGKEQSFTSLEVRKVAETKEKSKHLKTKTCKKVQDGLSDIAEKFLKKDQSDETSEDDKKQSKKGTEEKKKPSDFKKKVIKMEQQYESSSDGTEKLPEREEICHFPKGIKQIKNGTTDGEKKSKKIRDKTSKKKDELSDYAEKSTGKGDSCDSSEDKKSKNGAYGREKKRCKLLGKSSRKRQDCSSSDTEKYSMKEDGCNSSDKRLKRIELRERRNLSSKRNTKEIQSGSSSSDAEESSEDNKKKKQRTSSKKKAVIVKEKKRNSLRTSTKRKQADITSSSSSDIEDDDQNSIGEGSSDEQKIKPVTENLVLSSHTGFCQSSGDEALSKSVPVTVDDDDDDNDPENRIAKKMLLEEIKANLSSDEDGSSDDEPEEGKKRTGKQNEENPGDEEAKNQVNSESDSDSEESKKPRYRHRLLRHKLTVSDGESGEEKKTKPKEHKEVKGRNRRKVSSEDSEDSDFQESGVSEEVSESEDEQRPRTRSAKKAELEENQRSYKQKKKRRRIKVQEDSSSENKSNSEEEEEEKEEEEEEEEEEEEEEEDENDDSKSPGKGRKKIRKILKDDKLRTETQNALKEEEERRKRIAEREREREKLREVIEIEDASPTKCPITTKLVLDEDEETKEPLVQVHRNMVIKLKPHQVDGVQFMWDCCCESVKKTKKSPGSGCILAHCMGLGKTLQVVSFLHTVLLCDKLDFSTALVVCPLNTALNWMNEFEKWQEGLKDDEKLEVSELATVKRPQERSYMLQRWQEDGGVMIIGYEMYRNLAQGRNVKSRKLKEIFNKALVDPGKVLIDSDIKKQVE

SEQ ID NO: 856358 - protein, 1335 aa, Homo sapiens
MTAEPMSESKLNTLVQKLHDFLAHSSEESEETSSPPRLAMNQNTDKISGSGSNSDMMENSKEEGTSSSEKSKSSGSSRSKRKPSIVTKYVESDDEKPLDDETVNEDASNENSENDITMQSLPKGTVIVQPEPVLNEDKDDFKGPEFRSRSKMKTENLKKRGEDGLHGIVSCTACGQQVNHFQKDSIYRHPSLQVLICKNCFKYYMSDDISRDSDGMDEQCRWCAEGGNLICCDFCHNAFCKKCILRNLGRKELSTIMDENNQWYCYICHPEPLLDLVTACNSVFENLEQLLQQNKKKIKVDSEKSNKVYEHTSRFSPKKTSSNCNGEEKKLDDSCSGSVTYSYSALIVPKEMIKKAKKLIETTANMNSSYVKFLKQATDNSEISSATKLRQLKAFKSVLADIKKAHLALEEDLNSEFRAMDAVNKEKNTKEHKVIDAKFETKARKGEKPCALEKKDISKSEAKLSRKQVDSEHMHQNVPTEEQRTNKSTGGEHKKSDRKEEPQYEPANTSEDLDMDIVSVPSSVPEDIFENLETAMEVQSSVDHQGDGSSGTEQEVESSSVKLNISSKDNRGGIKSKTTAKVTKELYVKLTPVSLSNSPIKGADCQEVPQDKDGYKSCGLNPKLEKCGLGQENSDNEHLVENEVSLLLEESDLRRSPRVKTTPLRRPTETNPVTSNSDEECNETVKEKQKLSVPVRKKDKRNSSDSAIDNPKPNKLPKSKQSETVDQNSDSDEMLAILKEVSRMSHSSSSDTDINEIHTNHKTLYDLKTQAGKDDKGKRKRKSSTSGSDFDTKKGKSAKSSIISKKKRQTQSESSNYDSELEKEIKSMSKIGAARTTKKRIPNTKDFDSSEDEKHSKKGMDNQGHKNLKTSQEGSSDDAERKQERETFSSAEGTVDKDTTIMELRDRLPKKQQASASTDGVDKLSGKEQSFTSLEVRKVAETKEKSKHLKTKTCKKVQDGLSDIAEKFLKKDQSDETSEDDKKQSKKGTEEKKKPSDFKKKVIKMEQQYESSSDGTEKLPEREEICHFPKGIKQIKNGTTDGEKKSKKIRDKTSKKKDELSDYAEKSTGKGDSCDSSEDKKSKNGAYGREKKRCKLLGKSSRKRQDCSSSDTEKYSMKEDGCNSSDKRLKRIELRERRNLSSKRNTKEIQSGSSSSDAEESSEDNKKKKQRTSSKKKAVIVKEKKRNSLRTSTKRKQADITSSSSSDIEDDDQNSIGEGSSDEQKIKPVTENLVLSSHTGFCQSSGDEALSKSVPVTVDDDDDDNDPENRIAKKMLLEEIKANLSSDEDGSSDDEPEEGKKRTGKLETLKRRVPLLLQKNAVPHQQRNKAGWRMI

SEQ ID NO: 856359 - protein, 1064 aa, Homo sapiens
MTAEPMSESKLNTLVQKLHDFLAHSSEESEETSSPPRLAMNQNTDKISGSGSNSDMMENSKEEGTSSSEKSKSSGSSRSKRKPSIVTKYVESDDEKPLDDETVNEDASNENSENDITMQSLPKGTVIVQPEPVLNEDKDDFKGPEFRSRSKMKTENLKKRGEDGLHGIVSCTACGQQVNHFQKDSIYRHPSLQVLICKNCFKYYMSDDISRDSDGMDEQCRWCAEGGNLICCDFCHNAFCKKCILRNLGRKELSTIMDENNQWYCYICHPEPLLDLVTACNSVFENLEQLLQQNKKKIKVDSEKSNKVYEHTSRFSPKKTSSNCNGEEKKLDDSCSGSVTYSYSALIVPKEMIKKAKKLIETTANMNSSYVKFLKQATDNSEISSATKLRQLKAFKSVLADIKKAHLALEEDLNSEFRAMDAVNKEKNTKEHKVIDAKFETKARKGEKPCALEKKDISKSEAKLSRKQVDSEHMHQNVPTEEQRTNKSTGGEHKKSDRKEEPQYEPANTSEDLDMDIVSVPSSVPEDIFENLETAMEVQSSVDHQGDGSSGTEQEVESSSVKLNISSKDNRGGIKSKTTAKVTKELYVKLTPVSLSNSPIKGADCQEVPQDKDGYKSCGLNPKLEKCGLGQENSDNEHLVENEVSLLLEESDLRRSPRVKTTPLRRPTETNPVTSNSDEECNETVKEKQKLSVPVRKKDKRNSSDSAIDNPKPNKLPKSKQSETVDQNSDSDEMLAILKEVSRMSHSSSSDTDINEIHTNHKTLYDLKTQAGKDDKGKRKRKSSTSGSDFDTKKGKSAKSSIISKKKRQTQSESSNYDSELEKEIKSMSKIGAARTTKKRIPNTKDFDSSEDEKHSKKGMDNQGHKNLKTSQEGSSDDAERKQERETFSSAEGTVDKDTTIMELRDRLPKKQQASASTDGVDKLSGKEQSFTSLEVRKVAETKEKSKHLKTKTCKKVQDGLSDIAEKFLKKDQSDETSEDDKKQSKKGTEEKKKPSDFKKKVIKMEQQYESSSDGTEKLPEREEICHFPKGIKQIKNGNWHCAGIKMRHFFSLFLIRLSSSCNC

SEQ ID NO: 856360 - protein, 90 aa, Homo sapiens [sequence omitted]

SEQ ID NO: 856361 - protein, 78 aa, Homo sapiens
SLSLWPPLLQAHGRYCLATADVHSKPRPSSVSLCFAGNLELWETSPNLFHVCKILPLRGWRLDKVYKEAPCILSYICM

SEQ ID NO: 856362 - protein, 1320 aa, Homo sapiens
LPTLMLLLLTLLPAAIEKGKGKAKKGSSFQTVSALHRENLNKLMTNLRSTHPHFVRCIIPNETKSPGVMDNPLVMHQLRCNGVLEGIRICRKGFPNRILYGDFRQRYRILNPAAIPEGQFIDSRKGAEKLLSSLDIDHNQYKFGHTKVFFKAGLLGLLEEMRDERLSRIITRIQAQSRGVLARMEYKKLLERRDSLLVIQWNIRAFMGVKNWPWMKLYFKIKPLLKSAEREKEMASMKEEFTRLKEALEKSEARRKELEEKMVSLLQEKNDLQLQVQAEQDNLADAEERCDQLIKNKIQLEAKVKEMNERLEDEEEMNAELTAKKRKLEDECSELKRDIDDLELTLAKVEKEKHATENKVKNLTEEMAGLDEIIAKLTKEKKALQEAHQQALDDLQAEEDKVNTLTKAKVKLEQQVDDLEGSLEQEKKVRMDLERAKRKLEGDLKLTQESIMDLENDKQQLDERLKKKDFELNALNARIEDEQALGSQLQKKLKELQARIEELEEELEAERTARAKVEKLRSDLSRELEEISERLEEAGGATSVQIEMNKKREAEFQKMRRDLEEATLQHEATAAALRKKHADSVAELGEQIDNLQRVKQKLEKEKSEFKLELDDVTSNMEQIIKAKANLEKMCRTLEDQMNEHRSKAEETQRSVNDLTSQRAKLQTENGELSRQLDEKEALISQLTRGKLTYTQQLEDLKRQLEEEVKAKNALAHALQSARHDCDLLREQYEEETEAKAELQRVLSKANSEVAQWRTKYETDAIQRTEELEEAKKKLAQRLQEAEEAVEAVNAKCSSLEKTKHRLQNEIEDLMVDVERSNAAAAALDKKQRNFDKILAEWKQKYEESQSELESSQKEARSLSTELFKLKNAYEESLEHLETFKRENKNLQEEISDLTEQLGSSGKTIHELEKVRKQLEAEKMELQSALEEAEASLEHEEGKILRAQLEFNQIKAEIERKLAEKDEEMEQAKRNHLRVVDSLQTSLDAETRSRNEALRVKKKMEGDLNEMEIQLSHANRMAAEAQKQVKSLQSLLKDTQIQLDDAVRANDDLKENIAIVERRNNLLQAELEELRAVVEQTERSRKLAEQELIETSERVQLLHSQNTSLINQKKKMDADLSQLQTEVEEAVQECRNAEEKAKKAITDAAMMAEELKKEQDTSAHLERMKKNMEQTIKDLQHRLDEAEQIALKGGKKQLQKLEARVRELENELEAEQKRNAESVKGMRKSERRIKELTYQTEEDRKNLLRLQDLVDKLQLKVKAYKRQAEEAEEQANTNLSKFRKVQHELDEAEERADIAESQVNKLRAKSRDIGTKGLNEE

SEQ ID NO: 856363 - protein, 414 aa, Homo sapiens
MGDSEMAVFGAAAPYLRKSEKERLEAQTRPFDLKKDVFVPDDKQEFVKAKIVSREGGKVTAETEYGKTVTVKEDQVMQQNPPKFDKIEDMAMLTFLHEPAVLYNLKDRYGSWMIYTYSGLFCVTVNPYKWLPVYTPEVVAAYRGKKRSEAPPHIFSISDNAYQYMLTDRENQSILITGESGAGKTVNTKRVIQYFAVIAAIGDRSKKDQSPGKGTLEDQIIQANPALEAFGNAKTVRNDNSSRFGKFIRIHFGATGKLASADIETYLLEKSRVIFQLKAERDYHIFYQILSNKKPELLDMLLITNNPYDYAFISQGETTVASIDDAEELMATDNAFDVLGFTSEDLVDKLQLKVKAYKRQAEEAEEQANTNLSKFRKVQHELDEAEERADIAESQVNKLRAKSRDIGTKGLNEE

SEQ ID NO: 856364 - protein, 614 aa, Homo sapiens
MGDSEMAVFGAAAPYLRKSEKERLEAQTRPFDLKKDVFVPDDKQEFVKAKIVSREGGKVTAETEYGKTVTVKEDQVMQQNPPKFDKIEDMAMLTFLHEPAVLYNLKDRYGSWMIYTYSGLFCVTVNPYKWLPVYTPEVVAAYRGKKRSEAPPHIFSISDNAYQYMLTDRENQSILITGESGAGKTVNTKRVIQYFAVIAAIGDRSKKDQSPGKGTLEDQIIQANPALEAFGNAKTVRNDNSSRFGKFIRIHFGATGKLASADIETYLLEKSRVIFQLKAERDYHIFYQILSNKKPELLDMLLITNNPYDYAFISQGETTVASIDDAEELMATDNAFDVLGFTSEEKNSMYKLTGAIMHFGNMKFKLKQREEQAEPDGTEEADKSAYLMGLNSADLLKGLCHPRVKVGNEYVTKGQNVQQVIYATGALAKAVYERMFNWMVTRINATLETKQPRQYFIGVLDIAGFEIFDFNSFEQLCINFTNEKLQQFFNHHMFVLEQEEYKKEGEEQANTNLSKFRKVQHELDEAEERADIAESQVNKLRAKSRDIGTKGGSLFWALLVTPTAGIPRQSTLKPGMLPFHLFHTLEPHGPRGQGNAVLCDFKDSSSSNFFFFFF

SEQ ID NO: 856365 - protein, 394 aa, Homo sapiens
MGDSEMAVFGAAAPYLRKSEKERLEAQTRPFDLKKDVFVPDDKQEFVKAKIVSREGGKVTAETEYGKTVTVKEDQVMQQNPPKFDKIEDMAMLTFLHEPAVLYNLKDRYGSWMIYTYSGLFCVTVNPYKWLPVYTPEVVAAYRGKKRSEAPPHIFSISDNAYQYMLTDRENQSILITGESGAGKTVNTKRVIQYFAVIAAIGDRSKKDQSPGKGTLEDQIIQANPALEAFGNAKTVRNDNSSRFGKFIRIHFGATGKLASADIETYLLEKSRVIFQLKAERDYHIFYQILSNKKPELLDMLLITNNPYDYAFISQGETTVASIDDAEELMATDNAFDVLGFTSEVIHKHFYLKRVEIMAQCEEWIADIQQYSSYKRVGRTMSHHAAALKRHTAQ

SEQ ID NO: 856366 - protein, 635 aa, Homo sapiens
LLGVGELASGQLEDLKRQLEEEVKAKNALAHALQSARHDCDLLREQYEEETEAKAELQRVLSKANSEVAQWRTKYETDAIQRTEELEEAKKKLAQRLQEAEEAVEAVNAKCSSLEKTKHRLQNEIEDLMVDVERSNAAAAALDKKQRNFDKILAEWKQKYEESQSELESSQKEARSLSTELFKLKNAYEESLEHLETFKRENKNLQEEISDLTEQLGSSGKTIHELEKVRKQLEAEKMELQSALEEAEASLEHEEGKILRAQLEFNQIKAEIERKLAEKDEEMEQAKRNHLRVVDSLQTSLDAETRSRNEALRVKKKMEGDLNEMEIQLSHANRMAAEAQKQVKSLQSLLKDTQIQLDDAVRANDDLKENIAIVERRNNLLQAELEELRAVVEQTERSRKLAEQELIETSERVQLLHSQNTSLINQKKKMDADLSQLQTEVEEAVQECRNAEEKAKKAITDAAMMAEELKKEQDTSAHLERMKKNMEQTIKDLQHRLDEAEQIALKGGKKQLQKLEARVRELENELEAEQKRNAESVKGMRKSERRIKELTYQTEEDRKNLLRLQDLVDKLQLKVKAYKRQAEEAEEQANTNLSKFRKVQHELDEAEERADIAESQVNKLRAKSRDIGTKGLNEE

SEQ ID NO: 856367 - protein, 1011 aa, Homo sapiens
MLEDEEEMNAELTAKKRKLEDECSELKRDIDDLELTLAKVEKEKHATENKVKNLTEEMAGLDEIIAKLTKEKKALQEAHQQALDDLQAEEDKVNTLTKAKVKLEQQVDDLEGSLEQEKKVRMDLERAKRKLEGDLKLTQESIMDLENDKQQLDERLKKKDFELNALNARIEDEQALGSQLQKKLKELQARIEELEEELEAERTARAKVEKLRSDLSRELEEISERLEEAGGATSVQIEMNKKREAEFQKMRRDLEEATLQHEATAAALRKKHADSVAELGEQIDNLQRVKQKLEKEKSEFKLELDDVTSNMEQIIKAKANLEKMCRTLEDQMNEHRSKAEETQRSVNDLTSQRAKLQTENGELSRQLDEKEALISQLTRGKLTYTQQLEDLKRQLEEEVKAKNALAHALQSARHDCDLLREQYEEETEAKAELQRVLSKANSEVAQWRTKYETDAIQRTEELEEAKKKLAQRLQEAEEAVEAVNAKCSSLEKTKHRLQNEIEDLMVDVERSNAAAAALDKKQRNFDKILAEWKQKYEESQSELESSQKEARSLSTELFKLKNAYEESLEHLETFKRENKNLQEEISDLTEQLGSSGKTIHELEKVRKQLEAEKMELQSALEEAEASLEHEEGKILRAQLEFNQIKAEIERKLAEKDEEMEQAKRNHLRVVDSLQTSLDAETRSRNEALRVKKKMEGDLNEMEIQLSHANRMAAEAQKQVKSLQSLLKDTQIQLDDAVRANDDLKENIAIVERRNNLLQAELEELRAVVEQTERSRKLAEQELIETSERVQLLHSQNTSLINQKKKMDADLSQLQTEVEEAVQECRNAEEKAKKAITDAAMMAEELKKEQDTSAHLERMKKNMEQTIKDLQHRLDEAEQIALKGGKKQLQKLEARVRELENELEAEQKRNAESVKGMRKSERRIKELTYQTEEDRKNLLRLQDLVDKLQLKVKAYKRQAEEAEEQANTNLSKFRKVQHELDEAEERADIAESQVNKLRAKSRDIGTKGLNEE

SEQ ID NO: 856368 - protein, 492 aa, Homo sapiens
KSEPVPGQILAEWKQKYEESQSELESSQKEARSLSTELFKLKNAYEESLEHLETFKRENKNLQEEISDLTEQLGSSGKTIHELEKVRKQLEAEKMELQSALEEAEASLEHEEGKILRAQLEFNQIKAEIERKLAEKDEEMEQAKRNHLRVVDSLQTSLDAETRSRNEALRVKKKMEGDLNEMEIQLSHANRMAAEAQKQVKSLQSLLKDTQIQLDDAVRANDDLKENIAIVERRNNLLQAELEELRAVVEQTERSRKLAEQELIETSERVQLLHSQNTSLINQKKKMDADLSQLQTEVEEAVQECRNAEEKAKKAITDAAMMAEELKKEQDTSAHLERMKKNMEQTIKDLQHRLDEAEQIALKGGKKQLQKLEARVRELENELEAEQKRNAESVKGMRKSERRIKELTYQTEEDRKNLLRLQDLVDKLQLKVKAYKRQAEEAEEQANTNLSKFRKVQHELDEAEERADIAESQVNKLRAKSRDIGTKGLNEE

SEQ ID NO: 856369 - protein, 555 aa, Homo sapiens
MGDSEMAVFGAAAPYLRKSEKERLEAQTRPFDLKKDVFVPDDKQEFVKAKIVSREGGKVTAETEYGKTVTVKEDQVMQQNPPKFDKIEDMAMLTFLHEPAVLYNLKDRYGSWMIYTYSGLFCVTVNPYKWLPVYTPEVVAAYRGKKRSEAPPHIFSISDNAYQYMLTDRENQSILITGESGAGKTVNTKRVIQYFAVIAAIGDRSKKDQSPGKGTLEDQIIQANPALEAFGNAKTVRNDNSSRFGKFIRIHFGATGKLASADIETYLLEKSRVIFQLKAERDYHIFYQILSNKKPELLDMLLITNNPYDYAFISQGETTVASIDDAEELMATDNAFDVLGFTSEEKNSMYKLTGAIMHFGNMKFKLKQREEQAEPDGTEEADKSAYLMGLNSADLLKGLCHPRVKVGNEYVTKGQNVQQVIYATGALAKAVYERMFNWMVTRINATLETKQPRQYFIGVLDIAGFEIFDFNSFEQLCINFTNEKLQQFFNHHMFVLEQEEYKKEGEEQANTNLSKFRKVQHELDEAEERADIAESQVNKLRAKSRDIGTKGLNEE

SEQ ID NO: 856370 - protein, 378 aa, Homo sapiens
SEQGRARPVLRGGPVRVRQPRGSARPPPNPRLPSAPPSLSALTSPPKTPYLAKGRRSGERSPLPFQKTKTEKPFSRPGKAGGRGAAGLAMELLCHEVDPVRRAVRDRNLLRDDRVLQNLLTIEERYLPQCSYFKCVQKDIQPYMRRMVATWMLEVCEEQKCEEEVFPLAMNYLDRFLAGVPTPKSHLQLLGAVCMFLASKLKETSPLTAEKLCIYTDNSIKPQELLEWELVVLGKLKWNLAAVTPHDFIEHILRKLPQQREKLSLIRKHAQTFIALCATDFKFAMYPPSMIATGSVGAAICGLQQDEEVSSLTCDALTELLAKITNTDVDCLKACQEQIEAVLLNSLQQYRQDQRDGSKSEDELDQASTPTDVRDIDL

SEQ ID NO: 856371 - protein, 289 aa, Homo sapiens
MELLCHEVDPVRRAVRDRNLLRDDRVLQNLLTIEERYLPQCSYFKCVQKDIQPYMRRMVATWMLEVCEEQKCEEEVFPLAMNYLDRFLAGVPTPKSHLQLLGAVCMFLASKLKETSPLTAEKLCIYTDNSIKPQELLEWELVVLGKLKWNLAAVTPHDFIEHILRKLPQQREKLSLIRKHAQTFIALCATDFKFAMYPPSMIATGSVGAAICGLQQDEEVSSLTCDALTELLAKITNTDVDCLKACQEQIEAVLLNSLQQYRQDQRDGSKSEDELDQASTPTDVRDIDL

SEQ ID NO: 856372 - protein, 289 aa, Homo sapiens; identical to SEQ ID NO: 856371

SEQ ID NO: 856373 - protein, 102 aa, Homo sapiens [sequence omitted]

SEQ ID NO: 856374 - protein, 378 aa, Homo sapiens; identical to SEQ ID NO: 856370

SEQ ID NO: 856375 - protein, 378 aa, Homo sapiens; identical to SEQ ID NO: 856370

SEQ ID NO: 856376 - protein, 126 aa, Homo sapiens
MGGPVRVRQPRGSARPPPNPRLPSAPPSLSALTSPPKTPYLAKGRRSGERSPLPFQKTKTDMELLCHEVDPVRRAVRDRNLLRDDRVLQNLLTIEERYLPQCSYFKCVQKDIQPYMRRMVATWMLE

SEQ ID NO: 856377 - protein, 343 aa, Homo sapiens
SEQGRARPVLRGGPVRVRQPRGSARPPPNPRLPSAPPSLSALTSPPKTPYLAKGRRSGERSPLPFQKTKTEKPFSRPGKAGGRGAAGLAMELLCHEVDPVRRAVRDRNLLRDDRVLQNLLTIEERYLPQCSYFKCVQKDIQPYMRRMVATWMLEVCEEQKCEEEVFPLAMNYLDRFLAGVPTPKSHLQLLGAVCMFLASKLKETSPLTAEKLCIYTDNSIKPQELLEWELVVLGKLKWNLAAVTPHDFIEHILRKLPQQREKLSLIRKHAQTFIALCATAQQVGQGKGKGCNQEMPQERLRGVSKSQRPAPDSISASFRVARRLLLLRHVCHVQHSSQTHSLD

SEQ ID NO: 856378 - protein, 306 aa, Homo sapiens
SEQGRARPVLRGGPVRVRQPRGSARPPPNPRLPSAPPSLSALTSPPKTPYLAKGRRSGERSPLPFQKTKTEKPFSRPGKAGGRGAAGLAMELLCHEVDPVRRAVRDRNLLRDDRVLQNLLTIEERYLPQCSYFKCVQKDIQPYMRRMVATWMLEVCEEQKCEEEVFPLAMNYLDRFLAGVPTPKSHLQLLGAVCMFLASKLKETSPLTAEKLCIYTDNSIKPQELLEWELVVLGKLKWNLAAVTPHDFIEHILRKLPQQREKLSLIRKHAQTFIALCATDFKFAMYPPSMIATGSVGAAICGLQHE

SEQ ID NO: 856379 - protein, 399 aa, Homo sapiens
SEQGRARPVLRGGPVRVRQPRGSARPPPNPRLPSAPPSLSALTSPPKTPYLAKGRRSGERSPLPFQKTKTEKPFSRPGKAGGRGAAGLAMELLCHEVDPVRRAVRDRNLLRDDRVLQNLLTIEERYLPQCSYFKCVQKDIQPYMRRMVATWMLELVRVRQPRGSARTTTQSSPLFCSSFYFSALTSPPKTPYVAKGRRSGERSSPPLPEKHEHQNKAYTRPGGNAGGDEGPPGWPCEHSRVPTSVDPGPTGPMRQHSATRHRRTDTAPPCQNPAYTSPRTTLPTGSGLRTPTQRRQAQGPSQPLTNDGRKWDGRHTWRHATTHVPRRRNHDTYSGHETQRRPITAKTWSPLCNFQTRWGAPGDPLGGLGESSPRIHREKVPPLFTPGTTPGGMTLATTK

SEQ ID NO: 856380 - protein, 112 aa, Homo sapiens
  misc_feature (3)..(3): Xaa can be any naturally occurring amino acid
  misc_feature (15)..(15): Xaa can be any naturally occurring amino acid
  misc_feature (33)..(33): Xaa can be any naturally occurring amino acid
  misc_feature (37)..(37): Xaa can be any naturally occurring amino acid
HAXERLAPPLWGALXPQLTLAPPVDVAIHSPEXLPCXPARITLLRDKAGAHACARLELVTPGCRNPGRVDTAARDDRGKQCDAISSPCYSLTVYSIRGVGVCLVRMLESADK

SEQ ID NO: 856381 - protein, 378 aa, Homo sapiens; identical to SEQ ID NO: 856370

SEQ ID NO: 856382 - protein, 378 aa, Homo sapiens; identical to SEQ ID NO: 856370

SEQ ID NO: 856383 - protein, 209 aa, Homo sapiens
MELLCHEVDPVRRAVRDRNLLRDDRVLQNLLTIEERYLPQCSYFKCVQKDIQPYMRRMVATWMLEVCEEQKCEEEVFPLAMNYLDRFLAGVPTPKSHLQLLGAVCMFLASKLKETSPLTAEKLCIYTDNSIKPQELLVMTGPFLPSFLRFPLSPGQQYAFYHHCQSKFLGSRMTPPIEFTHLWAIAHLIGNHCLFFVCSYYVPRLRAQH

SEQ ID NO: 856384 - protein, 289 aa, Homo sapiens; identical to SEQ ID NO: 856371

SEQ ID NO: 856385 - protein, 515 aa, Homo sapiens
MEAREPGRPTPTYHLVPNTSQSQVEEDVSSPPQRSSETMQLKKEISLLNGVSLVVGNMIGSGIFVSPKGVLVHTASYGMSLIVWAIGGLFSVVGALCYAELGTTITKSGASYAYILEAFGGFIAFIRLWVSLLVVEPTGQAIIAITFANYIIQPSFPSCDPPYLACRLLAAACICLLTFVNCAYVKWGTRVQDTFTYAKVVALIAIIVMGLVKLCQGHSEHFQDAFEGSSWDMGNLSLALYSALFSYSGWDTLNFVTEEIKNPERNLPLAIGISMPIVTLIYILTNVAYYTVLNISDVLSSDAVAVTFADQTFGMFSWTIPIAVALSCFGGLNASIFASSRLFFVGSREGHLPDLLSMIHIERFTPIPALLFNCTMALIYLIVEDVFQLINYFSFSYWFFVGLSVVGQLYLRWKEPKRPRPLKLSVFFPIVFCICSVFLVIVPLFTDTINSLIGIGIALSGVPFYFMGVYLPESRRPLFIRNVLAAITRGTQQLCFCVLTELDVAEEKKDERKTD

SEQ ID NO: 856386 - protein, 515 aa, Homo sapiens; identical to SEQ ID NO: 856385

SEQ ID NO: 856387 - protein, 158 aa, Homo sapiens [sequence omitted]

SEQ ID NO: 856388 - protein, 515 aa, Homo sapiens; identical to SEQ ID NO: 856385

SEQ ID NO: 856389 - protein, 99 aa, Homo sapiens
PLPTLLNLSPPLFQLSVFFPIVFCICSVFLVIVPLFTDTINSLIGIGIALSGVPFYFMGVYLPESRRPLFIRNVLGELLCAPLLTGGYVCMRMQRWGVA

SEQ ID NO: 856390 - protein, 515 aa, Homo sapiens; identical to SEQ ID NO: 856385

SEQ ID NO: 856391 - protein, 515 aa, Homo sapiens; identical to SEQ ID NO: 856385

SEQ ID NO: 856392 - protein, 493 aa, Homo sapiens
MEAREPGRPTPTYHLVPNTSQSQVEEDVSSPPQRSSETMQLKKEISLLNGVSLVVGNMIGSGIFVSPKGVLVHTASYGMSLIVWAIGGLFSVVGALCYAELGTTITKSGASYAYILEAFGGFIAFIRLWVSLLVVEPTGQAIIAITFANYIIQPSFPSCDPPYLACRLLAAACICLLTFVNCAYVKWGTRVQDTFTYAKVVALIAIIVMGLVKLCQGHSEHFQDAFEGSSWDMGNLSLALYSALFSYSGWDTLNFVTEEIKNPERNLPLAIGISMPIVTLIYILTNVAYYTVLNISDVLSSDAVAVTFADQTFGMFSWTIPIAVALSCFGGLNASIFASSRLFFVGSREGHLPDLLSMIHIERFTPIPALLFNCTMALIYLIVEDVFQLINYFSFSYWFFVGLSVVGQLYLRWKEPKRPRPLKLSVFFPIVFCICSVFLVIVPLFTDTINSLIGIGIALSGVPFYFMGVYLPESRRPFSGEKVYTEVDEMNGN

SEQ ID NO: 856393 - protein, 68 aa, Homo sapiens
FFPDRVTLGFLRASAPVAFQIIHWQKHHFLHVVFREVPNAERKGGVAGARLAASTSLVQVILLPQSPK

SEQ ID NO: 856394 - protein, 103 aa, Homo sapiens
ACWSSLHGSPFYLKAAAGEFADDPCSSVKRGNMVRAARALLSAVTRLLILADMADVYKLLVQLKVVEDGILKLRNAGNEQDLGIQYKALKPEVDKLNIMAAFR

SEQ ID NO: 856395 - protein, 906 aa, Homo sapiens
MTAVHAGNINFKWDPKSLEIRTLAVERLLEPLVTQVTTLVNTNSKGPSNKKRGRSKKAHVLAASVEQATENFLEKGDKIAKESQFLKEELVAAVEDVRKQGDLMKAAAGEFADDPCSSVKRGNMVRAARALLSAVTRLLILADMADVYKLLVQLKVVEDGILKLRNAGNEQDLGIQYKALKPEVDKLNIMAAKRQQELKDVGHRDQMAAARGILQKNVPILYTASQACLQHPDVAAYKANRDLIYKQLQQAVTGISNAAQATASDDASQHQGGGGGELAYALNNFDKQIIVDPLSFSEERFRPSLEERLESIISGAALMADSSCTRDDRRERIVAECNAVRQALQDLLSEYMGNAGRKERSDALNSAIDKMTKKTRDLRRQLRKAVMDHVSDSFLETNVPLLVLIEAAKNGNEKEVKEYAQVFREHANKLIEVANLACSISNNEEGVKLVRMSASQLEALCPQVINAALALAAKPQSKLAQENMDLFKEQWEKQVRVLTDAVDDITSIDDFLAVSENHILEDVNKCVIALQEKDVDGLDRTAGAIRGRAARVIHVVTSEMDNYEPGVYTEKVLEATKLLSNTVMPRFTEQVEAAVEALSSDPAQPMDENEFIDASRLVYDGIRDIRKAVLMIRTPEELDDSDFETEDFDVRSRTSVQTEDDQLIAGQSARAIMAQLPQEQKAKIAEQVASFQEEKSKLDAEVSKWDDSGNDIIVLAKQMCMIMMEMTDFTRGKGPLKNTSDVISAAKKIAEAGSRMDKLGRTIADHCPDSACKQDLLAYLQRIALYCHQLNICSKVKAEVQNLGGELVVSGVDSAMSLIQAAKNLMNAVVQTVKASYVASTKYQKSQGMASLNLPAVSWKMKAPEKKPLVKREKQDETQTKIKRASQKKHVNPVQALSEFKAMDSI

SEQ ID NO: 856396 - protein, 906 aa, Homo sapiens; identical to SEQ ID NO: 856395

SEQ ID NO: 856397 - protein, 906 aa, Homo sapiens; identical to SEQ ID NO: 856395

SEQ ID NO: 856398 - protein, 906 aa, Homo sapiens; identical to SEQ ID NO: 856395

SEQ ID NO: 856399 - protein, 841 aa, Homo sapiens
MTAVHAGNINFKWDPKSLEIRTLAVERLLEPLVTQVTTLVNTNSKGPSNKKRGRSKKAHVLAASVEQATENFLEKGDKIAKESQFLKEELVAAVEDVRKQGDLMKAAAGEFADDPCSSVKRGNMVRAARALLSAVTRLLILADMADVYKLLVQLKVVEDGILKLRNAGNEQDLGIQYKALKPEVDKLNIMAAKRQQELKDVGHRDQMAAARGILQKNVPILYTASQACLQHPDVAAYKANRDLIYKQLQQAVTGISNAAQATASDDASQHQGGGGGELAYALNNFDKQIIVDPLSFSEERFRPSLEERLESIISGAALMADSSCTRDDRRERIVAECNAVRQALQDLLSEYMGNAGRKERSDALNSAIDKMTKKTRDLRRQLRKAVMDHVSDSFLETNVPLLVLIEAAKNGNEKEVKEYAQVFREHANKLIEVANLACSISNNEEGVKLVRMSASQLEALCPQVINAALALAAKPQSKLAQENMDLFKEQWEKQVRVLTDAVDDITSIDDFLAVSENHILEDVNKCVIALQEKDVDGLDRTAGAIRGRAARVIHVVTSEMDNYEPGVYTEKVLEATKLLSNTVMPRFTEQVEAAVEALSSDPAQPMDENEFIDASRLVYDGIRDIRKAVLMIRTPEELDDSDFETEDFDVRSRTSVQTEDDQLIAGQSARAIMAQLPQEQKAKIAEQVASFQEEKSKLDAEVSKWDDSGNDIIVLAKQMCMIMMEMTDFTRGKGPLKNTSDVISAAKKIAEAGSRMDKLGRTIADHCPDSACKQDLLAYLQRIALYCHQLNICSKVKAEVQNLGGELVVSGNCDTCGALQGLKGWPPPLCWPLTGWTAPCP

SEQ ID NO: 856400 - protein, 865 aa, Homo sapiens
MTAVHAGNINFKWDPKSLEIRTLAVERLLEPLVTQVTTLVNTNSKGPSNKKRGRSKKAHVLAASVEQATENFLEKGDKIAKESQFLKEELVAAVEDVRKQGDLMKAAAGEFADDPCSSVKRGNMVRAARALLSAVTRLLILADMADVYKLLVQLKVVEDGILKLRNAGNEQDLGIQYKALKPEVDKLNIMAAKRQQELKDVGHRDQMAAARGILQKNVPILYTASQACLQHPDVAAYKANRDLIYKQLQQAVTGISNAAQATASDDASQHQGGGGGELAYALNNFDKQIIVDPLSFSEERFRPSLEERLESIISGAALMADSSCTRDDRRERIVAECNAVRQALQDLLSEYMGNAGRKERSDALNSAIDKMTKKTRDLRRQLRKAVMDHVSDSFLETNVPLLVLIEAAKNGNEKEVKEYAQVFREHANKLIEVANLACSISNNEEGVKLVRMSASQLEALCPQVINAALALAAKPQSKLAQENMDLFKEQWEKQVRVLTDAVDDITSIDDFLAVSENHILEDVNKCVIALQEKDVDGLDRTAGAIRGRAARVIHVVTSEMDNYEPGVYTEKVLEATKLLSNTVMPRFTEQVEAAVEALSSDPAQPMDENEFIDASRLVYDGIRDIRKAVLMIRTPEELDDSDFETEDFDVRSRTSVQTEDDQLIAGQSARAIMAQLPQEQKAKIAEQVASFQEEKSKLDAEVSKWDDSGNDIIVLAKQMCMIMMEMTDFTRGKGPLKNTSDVISAAKKIAEAGSRMDKLGRTIADHCPDSACKQDLLAYLQRIALYCHQLNICSKVKAEVQNLGGELVVSGQELDECCGADSEGILRRLYQIPKVTGYGFPQPSCCVMEDEGTREKAIGEERETG

SEQ ID NO: 856401 - protein, 810 aa, Homo sapiens
MSRTGDLMKAAAGEFADDPCSSVKRGNMVRAARALLSAVTRLLILADMADVYKLLVQLKVVEDGILKLRNAGNEQDLGIQYKALKPEVDKLNIMAAKRQQELKDVGHRDQMAAARGILQKNVPILYTASQACLQHPDVAAYKANRDLIYKQLQQAVTGISNAAQATASDDASQHQGGGGGELAYALNNFDKQIIVDPLSFSEERFRPSLEERLESIISGAALMADSSCTRDDRRERIVAECNAVRQALQDLLSEYMGNAGRKERSDALNSAIDKMTKKTRDLRRQLRKAVMDHVSDSFLETNVPLLVLIEAAKNGNEKEVKEYAQVFREHANKLIEVANLACSISNNEEGVKLVRMSASQLEALCPQVINAALALAAKPQSKLAQENMDLFKEQWEKQVRVLTDAVDDITSIDDFLAVSENHILEDVNKCVIALQEKDVDGLDRTAGAIRGRAARVIHVVTSEMDNYEPGVYTEKVLEATKLLSNTVMPRFTEQVEAAVEALSSDPAQPMDENEFIDASRLVYDGIRDIRKAVLMIRTPEELDDSDFETEDFDVRSRTSVQTEDDQLIAGQSARAIMAQLPQEQKAKIAEQVASFQEEKSKLDAEVSKWDDSGNDIIVLAKQMCMIMMEMTDFTRGKGPLKNTSDVISAAKKIAEAGSRMDKLGRTIADHCPDSACKQDLLAYLQRIALYCHQLNICSKVKAEVQNLGGELVVSGVDSAMSLIQAAKNLMNAVVQTVKASYVASTKYQKSQGMASLNLPAVSWKMKAPEKKPLVKREKQDETQTKIKRASQKKHVNPVQALSEFKAMDSI

SEQ ID NO: 856402 - protein, 906 aa, Homo sapiens; identical to SEQ ID NO: 856395

SEQ ID NO: 856403 - protein, 717 aa, Homo sapiens
MAAKRQQELKDVGHRDQMAAARGILQKNVPILYTASQACLQHPDVAAYKANRDLIYKQLQQAVTGISNAAQATASDDASQHQGGGGGELAYALNNFDKQIIVDPLSFSEERFRPSLEERLESIISGAALMADSSCTRDDRRERIVAECNAVRQALQDLLSEYMGNAGRKERSDALNSAIDKMTKKTRDLRRQLRKAVMDHVSDSFLETNVPLLVLIEAAKNGNEKEVKEYAQVFREHANKLIEVANLACSISNNEEGVKLVRMSASQLEALCPQVINAALALAAKPQSKLAQENMDLFKEQWEKQVRVLTDAVDDITSIDDFLAVSENHILEDVNKCVIALQEKDVDGLDRTAGAIRGRAARVIHVVTSEMDNYEPGVYTEKVLEATKLLSNTVMPRFTEQVEAAVEALSSDPAQPMDENEFIDASRLVYDGIRDIRKAVLMIRTPEELDDSDFETEDFDVRSRTSVQTEDDQLIAGQSARAIMAQLPQEQKAKIAEQVASFQEEKSKLDAEVSKWDDSGNDIIVLAKQMCMIMMEMTDFTRGKGPLKNTSDVISAAKKIAEAGSRMDKLGRTIADHCPDSACKQDLLAYLQRIALYCHQLNICSKVKAEVQNLGGELVVSGVDSAMSLIQAAKNLMNAVVQTVKASYVASTKYQKSQGMASLNLPAVSWKMKAPEKKPLVKREKQDETQTKIKRASQKKHVNPVQALSEFKAMDSI

SEQ ID NO: 856404 - protein, 906 aa, Homo sapiens; identical to SEQ ID NO: 856395

SEQ ID NO: 856405 - protein, 678 aa, Homo sapiens
MLHDLTPYVKPKKYIPYQQLQQAVTGISNAAQATASDDASQHQGGGGGELAYALNNFDKQIIVDPLSFSEERFRPSLEERLESIISGAALMADSSCTRDDRRERIVAECNAVRQALQDLLSEYMGNAGRKERSDALNSAIDKMTKKTRDLRRQLRKAVMDHVSDSFLETNVPLLVLIEAAKNGNEKEVKEYAQVFREHANKLIEVANLACSISNNEEGVKLVRMSASQLEALCPQVINAALALAAKPQSKLAQENMDLFKEQWEKQVRVLTDAVDDITSIDDFLAVSENHILEDVNKCVIALQEKDVDGLDRTAGAIRGRAARVIHVVTSEMDNYEPGVYTEKVLEATKLLSNTVMPRFTEQVEAAVEALSSDPAQPMDENEFIDASRLVYDGIRDIRKAVLMIRTPEELDDSDFETEDFDVRSRTSVQTEDDQLIAGQSARAIMAQLPQEQKAKIAEQVASFQEEKSKLDAEVSKWDDSGNDIIVLAKQMCMIMMEMTDFTRGKGPLKNTSDVISAAKKIAEAGSRMDKLGRTIADHCPDSACKQDLLAYLQRIALYCHQLNICSKVKAEVQNLGGELVVSGVDSAMSLIQAAKNLMNAVVQTVKASYVASTKYQKSQGMASLNLPAVSWKMKAPEKKPLVKREKQDETQTKIKRASQKKHVNPVQALSEFKAMDSI

SEQ ID NO: 856406 - protein, 906 aa, Homo sapiens; identical to SEQ ID NO: 856395

SEQ ID NO: 856407 - protein, 906 aa, Homo sapiens; identical to SEQ ID NO: 856395

SEQ ID NO: 856408 - protein, 906 aa, Homo sapiens; identical to SEQ ID NO: 856395

SEQ ID NO: 856409 - protein, 600 aa, Homo sapiens
LRTRRSLCGAALMADSSCTRDDRRERIVAECNAVRQALQDLLSEYMGNAGRKERSDALNSAIDKMTKKTRDLRRQLRKAVMDHVSDSFLETNVPLLVLIEAAKNGNEKEVKEYAQVFREHANKLIEVANLACSISNNEEGVKLVRMSASQLEALCPQVINAALALAAKPQSKLAQENMDLFKEQWEKQVRVLTDAVDDITSIDDFLAVSENHILEDVNKCVIALQEKDVDGLDRTAGAIRGRAARVIHVVTSEMDNYEPGVYTEKVLEATKLLSNTVMPRFTEQVEAAVEALSSDPAQPMDENEFIDASRLVYDGIRDIRKAVLMIRTPEELDDSDFETEDFDVRSRTSVQTEDDQLIAGQSARAIMAQLPQEQKAKIAEQVASFQEEKSKLDAEVSKWDDSGNDIIVLAKQMCMIMMEMTDFTRGKGPLKNTSDVISAAKKIAEAGSRMDKLGRTIADHCPDSACKQDLLAYLQRIALYCHQLNICSKVKAEVQNLGGELVVSGVDSAMSLIQAAKNLMNAVVQTVKASYVASTKYQKSQGMASLNLPAVSWKMKAPEKKPLVKREKQDETQTKIKRASQKKHVNPVQALSEFKAMDSI

SEQ ID NO: 856410 - protein, 455 aa, Homo sapiens
MSASQLEALCPQVINAALALAAKPQSKLAQENMDLFKEQWEKQVRVLTDAVDDITSIDDFLAVSENHILEDVNKCVIALQEKDVDGLDRTAGAIRGRAARVIHVVTSEMDNYEPGVYTEKVLEATKLLSNTVMPRFTEQVEAAVEALSSDPAQPMDENEFIDASRLVYDGIRDIRKAVLMIRTPEELDDSDFETEDFDVRSRTSVQTEDDQLIAGQSARAIMAQLPQEQKAKIAEQVASFQEEKSKLDAEVSKWDDSGNDIIVLAKQMCMIMMEMTDFTRGKGPLKNTSDVISAAKKIAEAGSRMDKLGRTIADHCPDSACKQDLLAYLQRIALYCHQLNICSKVKAEVQNLGGELVVSGVDSAMSLIQAAKNLMNAVVQTVKASYVASTKYQKSQGMASLNLPAVSWKMKAPEKKPLVKREKQDETQTKIKRASQKKHVNPVQALSEFKAMDSI

SEQ ID NO: 856411 - protein, 906 aa, Homo sapiens; identical to SEQ ID NO: 856395

SEQ ID NO: 856412 - protein, 257 aa, Homo sapiens
GETRFEDIVTMSMIAGASAQRSSWFNCRRQCQAKIAEQVASFQEEKSKLDAEVSKWDDSGNDIIVLAKQMCMIMMEMTDFTRGKGPLKNTSDVISAAKKIAEAGSRMDKLGRTIADHCPDSACKQDLLAYLQRIALYCHQLNICSKVKAEVQNLGGELVVSGVDSAMSLIQAAKNLMNAVVQTVKASYVASTKYQKSQGMASLNLPAVSWKMKAPEKKPLVKREKQDETQTKIKRASQKKHVNPVQALSEFKAMDSI

SEQ ID NO: 856413 - protein, 240 aa, Homo sapiens
MTLTLRQKILMSEAGRASRQKTISFQEEKSKLDAEVSKWDDSGNDIIVLAKQMCMIMMEMTDFTRGKGPLKNTSDVISAAKKIAEAGSRMDKLGRTIADHCPDSACKQDLLAYLQRIALYCHQLNICSKVKAEVQNLGGELVVSGVDSAMSLIQAAKNLMNAVVQTVKASYVASTKYQKSQGMASLNLPAVSWKMKAPEKKPLVKREKQDETQTKIKRASQKKHVNPVQALSEFKAMDSI

SEQ ID NO: 856414 - protein, 780 aa, Homo sapiens
  misc_feature (780)..(780): Xaa can be any naturally occurring amino acid
MTAVHAGNINFKWDPKSLEIRTLAVERLLEPLVTQVTTLVNTNSKGPSNKKRGRSKKAHVLAASVEQATENFLEKGDKIAKESQFLKEELVAAVEDVRKQGDLMKAAAGEFADDPCSSVKRGNMVRAARALLSAVTRLLILADMADVYKLLVQLKVVEDGILKLRNAGNEQDLGIQYKALKPEVDKLNIMAAKRQQELKDVGHRDQMAAARGILQKNVPILYTASQACLQHPDVAAYKANRDLIYKQLQQAVTGISNAAQATASDDASQHQGGGGGELAYALNNFDKQIIVDPLSFSEERFRPSLEERLESIISGAALMADSSCTRDDRRERIVAECNAVRQALQDLLSEYMGNAGRKERSDALNSAIDKMTKKTRDLRRQLRKAVMDHVSDSFLETNVPLLVLIEAAKNGNEKEVKEYAQVFREHANKLIEVANLACSISNNEEGVKLVRMSASQLEALCPQVINAALALAAKPQSKLAQENMDLFKEQWEKQVRVLTDAVDDITSIDDFLAVSENHILEDVNKCVIALQEKDVDGLDRTAGAIRGRAARVIHVVTSEMDNYEPGVYTEKVLEATKLLSNTVMPRFTEQVEAAVEALSSDPAQPMDENEFIDASRLVYDGIRDIRKAVLMIRTPEELDDSDFETEDFDVRSRTSVQTEDDQLIAGQSARAIMAQLPQEQKAKIAEQVASFQEEKSKLDAEVSKWDDSGNDIIVLAKQMCMIMMEMTDFTRGKGPLKNTSDVISAAKKIAEAGSRMDKLGRTIADHCPIACSRTVATDDX

SEQ ID NO: 856415 - protein, 186 aa, Homo sapiens
MIMMEMTDFTRGKGPLKNTSDVISAAKKIAEAGSRMDKLGRTIADHCPDSACKQDLLAYLQRIALYCHQLNICSKVKAEVQNLGGELVVSGVDSAMSLIQAAKNLMNAVVQTVKASYVASTKYQKSQGMASLNLPAVSWKMKAPEKKPLVKREKQDETQTKIKRASQKKHVNPVQALSEFKAMDSI

SEQ ID NO: 856416 - protein, 126 aa, Homo sapiens
VRHDGARSMNSLQQRSRPEVQNLGGELVVSGVDSAMSLIQAAKNLMNAVVQTVKASYVASTKYQKSQGMASLNLPAVSWKMKAPEKKPLVKREKQDETQTKIKRASQKKHVNPVQALSEFKAMDSI

SEQ ID NO: 856417 - protein, 132 aa, Homo sapiens
MLPAEILHPGLDLAADVQLVAVEGDALQVGQQVLLASRVGAMVCNGAAKNLMNAVVQTVKASYVASTKYQKSQGMASLNLPAVSWKMKAPEKKPLVKREKQDETQTKIKRASQKKHVNPVQALSEFKAMDSI

SEQ ID NO: 856418 - protein, 488 aa, Homo sapiens
RLGTRLGVESAEASASGLWNLALAQLAAEMTAVHAGNINFKWDPKSLEIRTLAVERLLEPLVTQVTTLVNTNSKGPSNKKRGRSKKAHVLAASVEQATENFLEKGDKIAKESQFLKEELVAAVEDVRKQGDLMKAAAGEFADDPCSSVKRGNMVRAARALLSAVTRLLILADMADVYKLLVQLKVVEDGILKLRNAGNEQDLGIQYKALKPEVDKLNIMAAKRQQELKDVGHRDQMAAARGILQKNVPILYTASQACLQHPDVAAYKANRDLIYKQLQQAVTGISNAAQATASDDASQHQGGGGGELAYALNNFDKQIIVDPLSFSEERFRPSLEERLESIISGAALMADSSCTRDDRRERIVAECNAVRQALQDLLSEYMGNAGRKERSDALNSAIDKMTKKTRDLRRQLRKAVMDHVSDSFLETNVPLLVLIEAAKNGNEKEVKEYAQVFREHANKLIEVANLACSISNNEEVFPALGLQQKNLTT

SEQ ID NO: 856419 - protein, 463 aa, Homo sapiens
RLGTRLGVESAEASASGLWNLALAQLAAEMTAVHAGNINFKWDPKSLEIRTLAVERLLEPLVTQVTTLVNTNSKGPSNKKRGRSKKAHVLAASVEQATENFLEKGDKIAKESQFLKEELVAAVEDVRKQGDLMKAAAGEFADDPCSSVKRGNMVRAARALLSAVTRLLILADMADVYKLLVQLKVVEDGILKLRNAGNEQDLGIQYKALKPEVDKLNIMAAKRQQELKDVGHRDQMAAARGILQKNVPILYTASQACLQHPDVAAYKANRDLIYKQLQQAVTGISNAAQATASDDASQHQGGGGGELAYALNNFDKQIIVDPLSFSEERFRPSLEERLESIISGAALMADSSCTRDDRRERIVAECNAVRQALQDLLSEYMGNAGRKERSDALNSAIDKMTKKTRDLRRQLRKAVMDHVSDSFLETNVPLLVLIEAAKNGNEKEVKEYAQVFREHANKLIEVK

SEQ ID NO: 856420 - protein, 366 aa, Homo sapiens
RLGTRLGVESAEASASGLWNLALAQLAAEMTAVHAGNINFKWDPKSLEIRTLAVERLLEPLVTQVTTLVNTNSKGPSNKKRGRSKKAHVLAASVEQATENFLEKGDKIAKESQFLKEELVAAVEDVRKQGDLMKAAAGEFADDPCSSVKRGNMVRAARALLSAVTRLLILADMADVYKLLVQLKVVEDGILKLRNAGNEQDLGIQYKALKPEVDKLNIMAAKRQQELKDVGHRDQMAAARGILQKNVPILYTASQACLQHPDVAAYKANRDLIYKQLQQAVTGISWLPTKWGFGKRNSAARWYRSWSCPWRRTELPAPGNSRFMPWLERIRAREAGGAPLGYSQPSGCHCAKLGCLPLRALHFGGQ

SEQ ID NO: 856421 - protein, 278 aa, Homo sapiens
RLGTRLGVESAEASASGLWNLALAQLAAEMTAVHAGNINFKWDPKSLEIRTLAVERLLEPLVTQVTTLVNTNSKGPSNKKRGRSKKAHVLAASVEQATENFLEKGDKIAKESQFLKEELVAAVEDVRKQGDLMKAAAGEFADDPCSSVKRGNMVRAARALLSAVTRLLILADMADVYKLLVQLKVVEDGILKLRNAGNEQDLGIQYKALKPEVDKLNIMAAKRQQELKDVGHRDQMAAARGILQKNVPILYTASQACLQHPDVAAYKANRDLIYKQTA

SEQ ID NO: 856422 - protein, 223 aa, Homo sapiens
RLGTRLGVESAEASASGLWNLALAQLAAEMTAVHAGNINFKWDPKSLEIRTLAVERLLEPLVTQVTTLVNTNSKGPSNKKRGRSKKAHVLAASVEQATENFLEKGDKIAKESQFLKEELVAAVEDVRKQGDLMKAAAGEFADDPCSSVKRGNMVRAARALLSAVTRLLILADMADVYKLLVQLKVVEDGILKLRNAGNEQDLGIQYKALKPEVDKLNIMAAFR

SEQ ID NO: 856423 - protein, 906 aa, Homo sapiens; identical to SEQ ID NO: 856395

SEQ ID NO: 856424 - protein, 935 aa, Homo sapiens
RLGTRLGVESAEASASGLWNLALAQLAAEMTAVHAGNINFKWDPKSLEIRTLAVERLLEPLVTQVTTLVNTNSKGPSNKKRGRSKKAHVLAASVEQATENFLEKGDKIAKESQFLKEELVAAVEDVRKQGDLMKAAAGEFADDPCSSVKRGNMVRAARALLSAVTRLLILADMADVYKLLVQLKVVEDGILKLRNAGNEQDLGIQYKALKPEVDKLNIMAAKRQQELKDVGHRDQMAAARGILQKNVPILYTASQACLQHPDVAAYKANRDLIYKQLQQAVTGISNAAQATASDDASQHQGGGGGELAYALNNFDKQIIVDPLSFSEERFRPSLEERLESIISGAALMADSSCTRDDRRERIVAECNAVRQALQDLLSEYMGNAGRKERSDALNSAIDKMTKKTRDLRRQLRKAVMDHVSDSFLETNVPLLVLIEAAKNGNEKEVKEYAQVFREHANKLIEVANLACSISNNEEGVKLVRMSASQLEALCPQVINAALALAAKPQSKLAQENMDLFKEQWEKQVRVLTDAVDDITSIDDFLAVSENHILEDVNKCVIALQEKDVDGLDRTAGAIRGRAARVIHVVTSEMDNYEPGVYTEKVLEATKLLSNTVMPRFTEQVEAAVEALSSDPAQPMDENEFIDASRLVYDGIRDIRKAVLMIRTPEELDDSDFETEDFDVRSRTSVQTEDDQLIAGQSARAIMAQLPQEQKAKIAEQVASFQEEKSKLDAEVSKWDDSGNDIIVLAKQMCMIMMEMTDFTRGKGPLKNTSDVISAAKKIAEAGSRMDKLGRTIADHCPDSACKQDLLAYLQRIALYCHQLNICSKVKAEVQNLGGELVVSGVDSAMSLIQAAKNLMNAVVQTVKASYVASTKYQKSQGMASLNLPAVSWKMKAPEKKPLVKREKQDETQTKIKRASQKKHVNPVQALSEFKAMDSI

SEQ ID NO: 856425 - protein, 906 aa, Homo sapiens; identical to SEQ ID NO: 856395

SEQ ID NO: 856426 - protein, 906 aa, Homo sapiens; identical to SEQ ID NO: 856395

SEQ ID NO: 856427 - protein, 775 aa, Homo sapiens
MTAVHAGNINFKWDPKSLEIRTLAVERLLEPLVTQVTTLVNTNSKGPSNKKRGRSKKAHVLAASVEQATENFLEKGDKIAKESQFLKEELVAAVEDVRKQGDLMKAAAGEFADDPCSSVKRGNMVRAARALLSAVTRLLILADMADVYKLLVQLKVVEDGILKLRNAGNEQDLGIQYKALKPEVDKLNIMAAKRQQELKDVGHRDQMAAARGILQKNVPILYTASQACLQHPDVAAYKANRDLIYKQLQQAVTGISNAAQATASDDASQHQGGGGGELAYALNNFDKQIIVDPLSFSEERFRPSLEERLESIISGAALMADSSCTRDDRRERIVAECNAVRQALQDLLSEYMGNAGRKERSDALNSAIDKMTKKTRDLRRQLRKAVMDHVSDSFLETNVPLLVLIEAAKNGNEKEVKEYAQVFREHANKLIEVANLACSISNNEEGVKLVRMSASQLEALCPQVINAALALAAKPQSKLAQENMDLFKEQWEKQVRVLTDAVDDITSIDDFLAVSENHILEDVNKCVIALQEKDVDGLDRTAGAIRGRAARVIHVVTSEMDNYEPGVYTEKVLEATKLLSNTVMPRFTEQVEAAVEALSSDPAQPMDENEFIDASRLVYDGIRDIRKAVLMIRTPEELDDSDFETEDFDVRSRTSVQTEDDQLIAGQSARAIMAQLPQEQKAKIAEQVASFQEEKSKLDAEVSKWDDSGNDIIVLAKQMCMIMMEMTDFTRGKGPLKNTSDVISAAKKIAEAGSRMDKLGRTIADHCPGWTAPCP

SEQ ID NO: 856428 - protein, 815 aa, Homo sapiens
RLLVVSAGSPFYLKAAAGEFADDPCSSVKRGNMVRAARALLSAVTRLLILADMADVYKLLVQLKVVEDGILKLRNAGNEQDLGIQYKALKPEVDKLNIMAAKRQQELKDVGHRDQMAAARGILQKNVPILYTASQACLQHPDVAAYKANRDLIYKQLQQAVTGISNAAQATASDDASQHQGGGGGELAYALNNFDKQIIVDPLSFSEERFRPSLEERLESIISGAALMADSSCTRDDRRERIVAECNAVRQALQDLLSEYMGNAGRKERSDALNSAIDKMTKKTRDLRRQLRKAVMDHVSDSFLETNVPLLVLIEAAKNGNEKEVKEYAQVFREHANKLIEVANLACSISNNEEGVKLVRMSASQLEALCPQVINAALALAAKPQSKLAQENMDLFKEQWEKQVRVLTDAVDDITSIDDFLAVSENHILEDVNKCVIALQEKDVDGLDRTAGAIRGRAARVIHVVTSEMDNYEPGVYTEKVLEATKLLSNTVMPRFTEQVEAAVEALSSDPAQPMDENEFIDASRLVYDGIRDIRKAVLMIRTPEELDDSDFETEDFDVRSRTSVQTEDDQLIAGQSARAIMAQLPQEQKAKIAEQVASFQEEKSKLDAEVSKWDDSGNDIIVLAKQMCMIMMEMTDFTRGKGPLKNTSDVISAAKKIAEAGSRMDKLGRTIADHCPDSACKQDLLAYLQRIALYCHQLNICSKVKAEVQNLGGELVVSGVDSAMSLIQAAKNLMNAVVQTVKASYVASTKYQKSQGMASLNLPAVSWKMKAPEKKPLVKREKQDETQTKIKRASQKKHVNPVQALSEFKAMDSI

SEQ ID NO: 856429 - protein, 904 aa, Homo sapiens
RLGTRLGVESAEASASGLWNLALAQLAAEMTAVHAGNINFKWDPKSLEIRTLAVERLLEPLVTQVTTLVNTNSKGPSNKKRGRSKKAHVLAASVEQATENFLEKGDKIAKESQFLKEELVAAVEDVRKQGDLMKAAAGEFADDPCSSVKRGNMVRAARALLSAVTRLLILADMADVYKLLVQLKVVEDGILKLRNAGNEQDLGIQYKALKPEVDKLNIMAAKRQQELKDVGHRDQMAAARGILQKNVPILYTASQACLQHPDVAAYKANRDLIYKQLQQAVTGISNAAQATASDDASQHQGGGGGELAYALNNFDKQIIVDPLSFSEERFRPSLEERLESIISGAALMADSSCTRDDRRERIVAECNAVRQALQDLLSEYMGNAGRKERSDALNSAIDKMTKKTRDLRRQLRKAVMDHVSDSFLETNVPLLVLIEAAKNGNEKEVKEYAQVFREHANKLIEVINAALALAAKPQSKLAQENMDLFKEQWEKQVRVLTDAVDDITSIDDFLAVSENHILEDVNKCVIALQEKDVDGLDRTAGAIRGRAARVIHVVTSEMDNYEPGVYTEKVLEATKLLSNTVMPRFTEQVEAAVEALSSDPAQPMDENEFIDASRLVYDGIRDIRKAVLMIRTPEELDDSDFETEDFDVRSRTSVQTEDDQLIAGQSARAIMAQLPQEQKAKIAEQVASFQEEKSKLDAEVSKWDDSGNDIIVLAKQMCMIMMEMTDFTRGKGPLKNTSDVISAAKKIAEAGSRMDKLGRTIADHCPDSACKQDLLAYLQRIALYCHQLNICSKVKAEVQNLGGELVVSGVDSAMSLIQAAKNLMNAVVQTVKASYVASTKYQKSQGMASLNLPAVSWKMKAPEKKPLVKREKQDETQTKIKRASQKKHVNPVQALSEFKAMDSI

SEQ ID NO: 856430 - protein, 906 aa, Homo sapiens; identical to SEQ ID NO: 856395

SEQ ID NO: 856431 - protein, 555 aa, Homo sapiens
MGNAGRKERSDALNSAIDKMTKKTRDLRRQLRKAVMDHVSDSFLETNVPLLVLIEAAKNGNEKEVKEYAQVFREHANKLIEVANLACSISNNEEGVKLVRMSASQLEALCPQVINAALALAAKPQSKLAQENMDLFKEQWEKQVRVLTDAVDDITSIDDFLAVSENHILEDVNKCVIALQEKDVDGLDRTAGAIRGRAARVIHVVTSEMDNYEPGVYTEKVLEATKLLSNTVMPRFTEQVEAAVEALSSDPAQPMDENEFIDASRLVYDGIRDIRKAVLMIRTPEELDDSDFETEDFDVRSRTSVQTEDDQLIAGQSARAIMAQLPQEQKAKIAEQVASFQEEKSKLDAEVSKWDDSGNDIIVLAKQMCMIMMEMTDFTRGKGPLKNTSDVISAAKKIAEAGSRMDKLGRTIADHCPDSACKQDLLAYLQRIALYCHQLNICSKVKAEVQNLGGELVVSGVDSAMSLIQAAKNLMNAVVQTVKASYVASTKYQKSQGMASLNLPAVSWKMKAPEKKPLVKREKQDETQTKIKRASQKKHVNPVQALSEFKAMDSI

SEQ ID NO: 856432 - protein, 906 aa, Homo sapiens; identical to SEQ ID NO: 856395

SEQ ID NO: 856433 - protein, 414 aa, Homo sapiens
YRTRAGTLSPHPSLTLDDFLAVSENHILEDVNKCVIALQEKDVDGLDRTAGAIRGRAARVIHVVTSEMDNYEPGVYTEKVLEATKLLSNTVMPRFTEQVEAAVEALSSDPAQPMDENEFIDASRLVYDGIRDIRKAVLMIRTPEELDDSDFETEDFDVRSRTSVQTEDDQLIAGQSARAIMAQLPQEQKAKIAEQVASFQEEKSKLDAEVSKWDDSGNDIIVLAKQMCMIMMEMTDFTRGKGPLKNTSDVISAAKKIAEAGSRMDKLGRTIADHCPDSACKQDLLAYLQRIALYCHQLNICSKVKAEVQNLGGELVVSGVDSAMSLIQAAKNLMNAVVQTVKASYVASTKYQKSQGMASLNLPAVSWKMKAPEKKPLVKREKQDETQTKIKRASQKKHVNPVQALSEFKAMDSI

SEQ ID NO: 856434 - protein, 643 aa, Homo sapiens
RLGTRLGVESAEASASGLWNLALAQLAAEMTAVHAGNINFKWDPKSLEIRTLAVERLLEPLVTQVTTLVNTNSKGPSNKKRGRSKKAHVLAASVEQATENFLEKGDKIAKESQFLKEELVAAVEDVRKQGDLMKAAAGEFADDPCSSVKRGNMVRAARALLSAVTRLLILADMADVYKLLVQLKVVEDGILKLRNAGNEQDLGIQYKALKPEVDKLNIMAAKRQQELKDVGHRDQMAAARGILQKNVPILYTASQACLQHPDVAAYKANRDLIYKQLQQAVTGISNAAQATASDDASQHQGGGGGELAYALNNFDKQIIVDPLSFSEERFRPSLEERLESIISGAALMADSSCTRDDRRERIVAECNAVRQALQDLLSEYMGNAGRKERSDALNSAIDKMTKKTRDLRRQLRKAVMDHVSDSFLETNVPLLVLIEAAKNGNEKEVKEYAQVFREHANKLIEVANLACSISNNEEGVKLVRMSASQLEALCPQVINAALALAAKPQSKLAQENMDLFKEQWEKQVRVLTDAVDDITSIDDFLAVSENHILEDVNKCVIALQEKDVDGLDRTAGAIRGRAARVIHVVTSEMDNYEPGVYTEKVLEATKLLSNTVMPRFTEQVEAAVEALSSDPAQPMDENCSSLK

SEQ ID NO: 856435 - protein, 272 aa, Homo sapiens
ANVKPVCSGMDPSPGTKCSAEGHTEDDQLIAGQSARAIMAQLPQEQKAKIAEQVASFQEEKSKLDAEVSKWDDSGNDIIVLAKQMCMIMMEMTDFTRGKGPLKNTSDVISAAKKIAEAGSRMDKLGRTIADHCPDSACKQDLLAYLQRIALYCHQLNICSKVKAEVQNLGGELVVSGVDSAMSLIQAAKNLMNAVVQTVKASYVASTKYQKSQGMASLNLPAVSWKMKAPEKKPLVKREKQDETQTKIKRASQKKHVNPVQALSEFKAMDSI

SEQ ID NO: 856436 - protein, 803 aa, Homo sapiens
MTAVHAGNINFKWDPKSLEIRTLAVERLLEPLVTQVTTLVNTNSKGPSNKKRGRSKKAHVLAASVEQATENFLEKGDKIAKESQFLKEELVAAVEDVRKQGDLMKAAAGEFADDPCSSVKRGNMVRAARALLSAVTRLLILADMADVYKLLVQLKVVEDGILKLRNAGNEQDLGIQYKALKPEVDKLNIMAAKRQQELKDVGHRDQMAAARGILQKNVPILYTASQACLQHPDVAAYKANRDLIYKQLQQAVTGISNAAQATASDDASQHQGGGGGELAYALNNFDKQIIVDPLSFSEERFRPSLEERLESIISGAALMADSSCTRDDRRERIVAECNAVRQALQDLLSEYMGNAGRKERSDALNSAIDKMTKKTRDLRRQLRKAVMDHVSDSFLETNVPLLVLIEAAKNGNEKEVKEYAQVFREHANKLIEVANLACSISNNEEGVKLVRMSASQLEALCPQVINAALALAAKPQSKLAQENMDLFKEQWEKQVRVLTDAVDDITSIDDFLAVSENHILEDVNKCVIALQEKDVDGLDRTAGAIRGRAARVIHVVTSEMDNYEPGVYTEKVLEATKLLSNTVMPRFTEQVEAAVEALSSDPAQPMDENEFIDASRLVYDGIRDIRKAVLMIRTPEELDDSDFETEDFDVRSRTSVQTEDDQLIAGQSARAIMAQLPQEQKAKIAEQVASFQEEKSKLDAEVSKWDDSGNDIIVLAKQMCMIMMEMTDFTRGKGPLKNTSDVISAAKKIAEAGSRMDKLGRTIADHCPDSACKQDLLAYLQRIALYCHQLKKPDNIVFAKAVI

SEQ ID NO: 856437 - protein, 687 aa, Homo sapiens
MTAVHAGNINFKWDPKSLEIRTLAVERLLEPLVTQVTTLVNTNSKGPSNKKRGRSKKAHVLAASVEQATENFLEKGDKIAKESQFLKEELVAAVEDVRKQGDLMKAAAGEFADDPCSSVKRGNMVRAARALLSAVTRLLILADMADVYKLLVQLKVVEDGILKLRNAGNEQDLGIQYKALKPEVDKLNIMAAKRQQELKDVGHRDQMAAARGILQKNVPILYTASQACLQHPDVAAYKANRDLIYKQLQQAVTGISNAAQATASDDASQHQGGGGGELAYALNNFDKQIIVDPLSFSEERFRPSLEERLESIISGAALMADSSCTRDDRRERIVAECNAVRQALQDLLSEYMGNAGRKERSDALNSAIDKMTKKTRDLRRQLRKAVMDHVSDSFLETNVPLLVLIEAAKNGNEKEVKEYAQVFREHANKLIEVANLACSISNNEEGVKLVRMSASQLEALCPQVINAALALAAKPQSKLAQENMDLFKEQWEKQVRVLTDAVDDITSIDDFLAVSENHILEDVNKCVIALQEKDVDGLDRTAGAIRGRAARVIHVVTSEMDNYEPGVYTEKVLEATKLLSNTVMPRFTEQVEAAVEALSSDPAQPMDENEFIDASRLVYDGIRDIRKAVLMIRTPEELDDSDFETEDFDVRSRTSVQTEDDQLIAGQSARAIMAQLPQEQIHHWAHF

SEQ ID NO: 856438 - protein, 1133 aa, Homo sapiens
  misc_feature (690)..(690): Xaa can be any naturally occurring amino acid
  misc_feature (694)..(694): Xaa can be any naturally occurring amino acid
  misc_feature (706)..(706): Xaa can be any naturally occurring amino acid
RLGTRLGVESAEASASGLWNLALAQLAAEMTAVHAGNINFKWDPKSLEIRTLAVERLLEPLVTQVTTLVNTNSKGPSNKKRGRSKKAHVLAASVEQATENFLEKGDKIAKESQFLKEELVAAVEDVRKQGDLMKAAAGEFADDPCSSVKRGNMVRAARALLSAVTRLLILADMADVYKLLVQLKVVEDGILKLRNAGNEQDLGIQYKALKPEVDKLNIMAAKRQQELKDVGHRDQMAAARGILQKNVPILYTASQACLQHPDVAAYKANRDLIYKQLQQAVTGISNAAQATASDDASQHQGGGGGELAYALNNFDKQIIVDPLSFSEERFRPSLEERLESIISGAALMADSSCTRDDRRERIVAECNAVRQALQDLLSEYMGNAGRKERSDALNSAIDKMTKKTRDLRRQLRKAVMDHVSDSFLETNVPLLVLIEAAKNGNEKEVKEYAQVFREHANKLIEVANLACSISNNEEGVKLVRMSASQLEALCPQVINAALALAAKPQSKLAQENMDLFKEQWEKQVRVLTDAVDDITSIDDFLAVSENHILEDVNKCVIALQEKDVDGLDRTAGAIRGRAARVIHVVTSEMDNYEPGVYTEKVLEATKLLSNTVMPRFTEQVEAAVEALSSDPAQPMDENEFIDASRLVYDGIRDIRKAVLMIRTPEELDDSESKRTRTTLCGVITERECMXRSSXASERLMQAGIDXGLRSLPGTYSVGVILPPGDTTQAKIAEQVASFQEEKSKLDAEVSKWDDSGNDIIVLAKQMCMIMMEMTDFTRGKGPLKNTSDVISAAKKIAEAGSRMDKLGRTIADHCPTIADHCPDSACMQDLLAYLQRIALYCHQLNICSKVKAEVQNLGAGACVSGVDSAMSLIQAAKQLDDMRWLQTAATALHTLASYQTTTTAHTGYWPSAHTSPCHAAHCDTTRNGNQARTHNAPLWLHSTQHANHATGRPTETHTHLHTGRQSYKPTHSHTLDTPRARPSGPLHPRTLSHHALTRRTMPHYFTRLPVPPTETSGARKTRHTETTDLSRVTIPLATAKFKRIDLGISDSQPFQNLKNYWPLDIIQHQHCNLPVRKLYPQSIRGVTTPGVPTGTYLANTSTPSATAPWPHATSFSIRTYGKTTVTAYSKTAY

SEQ ID NO: 856439 - protein, 502 aa, Homo sapiens
RLGTRLGVESAEASASGLWNLALAQLAAEMTAVHAGNINFKWDPKSLEIRTLAVERLLEPLVTQVTTLVNTNSKGPSNKKRGRSKKAHVLAASVEQATENFLEKGDKIAKESQFLKEELVAAVEDVRKQGDLMKAAAGEFADDPCSSVKRGNMVRAARALLSAVTRLLILADMADVYKLLVQLKVVEDGILKLRNAGNEQDLGIQYKALKPEVDKLNIMAAKRQQELKDVGHRDQMAAARGILQKNVPILYTASQACLQHPDVAAYKANRDLIYKQLQQAVTGISNAAQATASDDASQHQGGGGGELAYALNNFDKQIIVDPLSFSEERFRPSLEERLESIISGAALMADSSCTRDDRRERIVAECNAVRQALQDLLSEYMGNAGRKERSDALNSAIDKMTKKTRDLRRQLRKAVMDHVSDSFLETNVPLLVLIEAAKNGNEKEVKEYAQVFREHANKLIEVANLACSISNNEEGVKLVRMSASQLEALCPQVKVQLTLVTA

SEQ ID NO: 856440 - protein, 111 aa, Homo sapiens
RLGTRLGVESAEASASGLWNLALAQLAAEMTAVHAGNINFKWDPKSLEIRTLAVERLLEPLVTQVTTLVNTNSKGPSNKKRGRSKKAHVLARREFGSTSVERVQSRQLDCF

SEQ ID NO: 856441 - protein, 298 aa, Homo sapiens
  misc_feature (283)..(283): Xaa can be any naturally occurring amino acid
  misc_feature (285)..(285): Xaa can be any naturally occurring amino acid
  misc_feature (294)..(294): Xaa can be any naturally occurring amino acid
RLGTRLGVESAEASASGLWNLALAQLAAEMTAVHAGNINFKWDPKSLEIRTLAVERLLEPLVTQVTTLVNTNSKGPSNKKRGRSKKAHVLAASVEQATENFLEKGDKIAKESQFLKEELVAAVEDVRKQGDLMKAAAGEFADDPCSSVKRGNMVRAARALLSAVTRLLILADMADVYKLLVQLKVVEDGILKLRNAGNEQDLGIQYKALKPEVDKLNIMAAKRQQELKDVGHRDQMAAARGILQKNVPILYTASQACLQHPDVAAYKANRDLIYKQLTAVQHXMXPSHCLNILXTRWR

SEQ ID NO: 856442 - protein, 206 aa, Homo sapiens
RLGTRLGVESAEASASGLWNLALAQLAAEMTAVHAGNINFKWDPKSLEIRTLAVERLLEPLVTQVTTLVNTNSKGPSNKKRGRSKKAHVLAASVEQATENFLEKGDKIAKESQFLKEELVAAVEDVRKQGDLMKAAAGEFADDPCSSVKRGNMVRAARALLSAVTRLLILADMADVYKLLVQLKVVSIQAYVCNLFYHRKIATGLP

SEQ ID NO: 856443 - protein, 73 aa, Homo sapiens
SLSAPFCLGSGGRSSIAFYVSGEKGTEFSSGRLVFVRPSSTVSSRTAPSRGRRSLRAVRKVSICTVKHFATQK

SEQ ID NO: 856444 - protein, 96 aa, Homo sapiens
SLSAPFCLGSGGRSSIAFYVSGEKGTEFSSGRLVFVRPSSTVSSRTAPSRGRRSLRAVRKNKTDFMGKLSRCSSLRNLDLRSVCGTSIKMIYGNKI

SEQ ID NO: 856445 - protein, 73 aa, Homo sapiens; identical to SEQ ID NO: 856443

SEQ ID NO: 856446 - protein, 68 aa, Homo sapiens
ACRRHFVSAAVAVAPSHFMFLARRERSFHQVDWFLCGRPPPFPPGQHLVVAGGVSELSERIRLILWEN

SEQ ID NO: 856447 - protein, 148 aa, Homo sapiens
SLSAPFCLGSGGRSSIAFYVSGEKGTEFSSGRLVFVRPSSTVSSRTAPSRGRRSLRAVRKNKTDFMGKLSRCSSLRNLDLRSVCEWYSVKRTIISYKPHQRRLKMKKLPSPYITNLCCAPTRTCFKFPWQFTTPILYQARYQHQDDLW

SEQ ID NO: 856448 - protein, 624 aa, Homo sapiens
GPSRAERLELGLGRERPAKAIFLHRRPGEGGGRERCLRCGHVCVRRGPGPREAVPSGRPRPDTLTPPWVRQRAVTGTFCASWTPLRNRRAQRMATDMQRKRSSECLDGTLTPSDGQSMERAESPTPGMAQGMEPGAGQEGAMFVHARSYEDLTESEDGAASGDSHKEGTRGPPPLPTDMRQISQDFSELSTQLTGVARDLQEEMLPGSSEDWLEPPGAVGRPATEPPREGTTEGDEEDATEAWRLHQKHVFVLSEAGKPVYSRYGSEEALSSTMGVMVALVSFLEADKNAIRSIHADGYKVVFVRRSPLVLVAVARTRQSAQELAQELLYIYYQILSLLTGAQLSHIFQQKQNYDLRRLLSGSERITDNLLQLMARDPSFLMGAARCLPLAAAVRDTVSASLQQARARSLVFSILLARNQLVALVRRKDQFLHPIDLHLLFNLISSSSSFREGEAWTPVCLPKFNAAGFFHAHISYLEPDTDLCLLLVSTDREDFFAVSDCRRRFQERLRKRGAHLALREALRTPYYSVAQVGIPDLRHFLYKSKSSGLFTSPEIEAPYTSEEEQERLLGLYQYLHSRAHNASRPLKTIYYTGPNENLLAWVRQPWDGLGFMEVLGMGHEGPLT

SEQ ID NO: 856449 - protein, 609 aa, Homo sapiens
GPSRAERLELGLGRERPAKAIFLHRRPGEGGGRERCLRCGHVCVRRGPGPREAVPSGRPRPDTLTPPWVRQRAVTGTFCASWTPLRNRRAQRMATDMQRKRSSECLDGTLTPSDGQSMERAESPTPGMAQGMEPGAGQEGAMFVHARSYEDLTESEDGAASGDSHKEGTRGPPPLPTDMRQISQDFSELSTQLTGVARDLQEEMLPGSSEDWLEPPGAVGRPATEPPREGTTEGDEEDATEAWRLHQKHVFVLSEAGKPVYSRYGSEEALSSTMGVMVALVSFLEADKNAIRSIHADGYKVVFVRRSPLVLVAVARTRQSAQELAQELLYIYYQILSLLTGAQLSHIFQQKQNYDLRRLLSGSERITDNLLQLMARDPSFLMGAARCLPLAAAVRDTVSASLQQARARSLVFSILLARNQLVALVRRKDQFLHPIDLHLLFNLISSSSSFREGEAWTPVCLPKFNAAGFFHAHISYLEPDTDLCLLLVSTDREDFFAVSDCRRRFQERLRKRGAHLALREALRTPYYSVAQVGIPDLRHFLYKSKSSGLFTSPEIEAPYTSEEEQERLLGLYQYLHSRAHNASRPLKTIYYTGPNENLLAWDERAEFCE

SEQ ID NO: 856450 - protein, 378 aa, Homo sapiens
KSCAGRRFSEGAAAEADILLSCPALRWHGYKVVFVRRSPLVLVAVARTRQSAQELAQELLYIYYQILSLLTGAQLSHIFQQKQNYDLRRLLSGSERITDNLLQLMARDPSFLMGAARCLPLAAAVRDTVSASLQQARARSLVFSILLARNQLVALVRRKDQFLHPIDLHLLFNLISSSSSFREGEAWTPVCLPKFNAAGFFHAHISYLEPDTDLCLLLVSTDREDFFAVSDCRRRFQERLRKRGAHLALREALRTPYYSVAQVGIPDLRHFLYKSKSSGLFTSPEIEAPYTSEEEQERLLGLYQYLHSRAHNASRPLKTIYYTGPNENLLAWVTGAFELYMCYSPLGTKASAVSAIHKLMRWIRKEEDRLFILTPLTY

SEQ ID NO: 856451 - protein, 258 aa, Homo sapiens
GPSRAERLELGLGRERPAKAIFLHRRPGEGGGRERCLRCGHVCVRRGPGPREAVPSGRPRPDTLTPPWVRQRAVTGTFCASWTPLRNRRAQRMATDMQRKRSSECLDGTLTPSDGQSMERAESPTPGMAQGMEPGAGQEGAMFVHARSYEDLTESEDGAASGDSHKEGTRGPPPLPTDMRQISQDFSELSTQLTGWPATSSWHSCAERTNFCTPSDLHLLFNLISSSSSFREGEAWTPVCLPKFNAVSLPGHTRCGKP

SEQ ID NO: 856452 - protein, 647 aa, Homo sapiens
GPSRAERLELGLGRERPAKAIFLHRRPGEGGGRERCLRCGHVCVRRGPGPREAVPSGRPRPDTLTPPWVRQRAVTGTFCASWTPLRNRRAQRMATDMQRKRSSECLDGTLTPSDGQSMERAESPTPGMAQGMEPGAGQEGAMFVHARSYEDLTESEDGAASGDSHKEGTRGPPPLPTDMRQISQDFSELSTQLTGVARDLQEEMLPGSSEDWLEPPGAVGRPATEPPREGTTEGDEEDATEAWRLHQKHVFVLSEAGKPVYSRYGSEEALSSTMGVMVALVSFLEADKNAIRSIHADGYKVVFVRRSPLVLVAVARTRQSAQELAQELLYIYYQILSLLTGAQLSHIFQQKQNYDLRRLLSGSERITDNLLQLMARDPSFLMGAARCLPLAAAVRDTVSASLQQARARSLVFSILLARNQLVALVRRKDQFLHPIDLHLLFNLISSSSSFREGEAWTPVCLPKFNAAGFFHAHISYLEPDTDLCLLLVSTDREDFFAVSDCRRRFQERLRKRGAHLALREALRTPYYSVAQVGIPDLRHFLYKSKSSGLFTSPEIEAPYTSEEEQERLLGLYQYLHSRAHNASRPLKTIYYTGPNENLLAWVTGAFELYMCYSPLGTKASAVSAIHKLMRWIRKEEDRLFILTPLTY

SEQ ID NO: 856453 - protein, 555 aa, Homo sapiens
MATDMQRKRSSECLDGTLTPSDGQSMERAESPTPGMAQGMEPGAGQEGAMFVHARSYEDLTESEDGAASGDSHKEGTRGPPPLPTDMRQISQDFSELSTQLTGVARDLQEEMLPGSSEDWLEPPGAVGRPATEPPREGTTEGDEEDATEAWRLHQKHVFVLSEAGKPVYSRYGSEEALSSTMGVMVALVSFLEADKNAIRSIHADGYKVVFVRRSPLVLVAVARTRQSAQELAQELLYIYYQILSLLTGAQLSHIFQQKQNYDLRRLLSGSERITDNLLQLMARDPSFLMGAARCLPLAAAVRDTVSASLQQARARSLVFSILLARNQLVALVRRKDQFLHPIDLHLLFNLISSSSSFREGEAWTPVCLPKFNAAGFFHAHISYLEPDTDLCLLLVSTDREDFFAVSDCRRRFQERLRKRGAHLALREALRTPYYSVAQVGIPDLRHFLYKSKSSGLFTSPEIEAPYTSEEEQERLLGLYQYLHSRAHNASRPLKTIYYTGPNENLLAWVTGAFELYMCYSPLGTKASAVSAIHKLMRWIRKEEDRLFILTPLTY

SEQ ID NO: 856454 - protein, 485 aa, Homo sapiens
GPSRAERLELGLGRERPAKAIFLHRRPGEGGGRERCLRCGHVCVRRGPGPREAVPSGRPRPDTLTPPWVRQRAVTGTFCASWTPLRNRRAQRMATDMQRKRSSECLDGTLTPSDGQSMERAESPTPGMAQGMEPDGYKVVFVRRSPLVLVAVARTRQSAQELAQELLYIYYQILSLLTGAQLSHIFQQKQNYDLRRLLSGSERITDNLLQLMARDPSFLMGAARCLPLAAAVRDTVSASLQQARARSLVFSILLARNQLVALVRRKDQFLHPIDLHLLFNLISSSSSFREGEAWTPVCLPKFNAAGFFHAHISYLEPDTDLCLLLVSTDREDFFAVSDCRRRFQERLRKRGAHLALREALRTPYYSVAQVGIPDLRHFLYKSKSSGLFTSPEIEAPYTSEEEQERLLGLYQYLHSRAHNASRPLKTIYYTGPNENLLAWVTGAFELYMCYSPLGTKASAVSAIHKLMRWIRKEEDRLFILTPLTY

SEQ ID NO: 856455 - protein, 266 aa, Homo sapiens
DKNAIRSIHADGYKVVFVCLPKFNAAGFFHAHISYLEPVQTFIVIWLQGSIRAPEPAGASGGGSYAAVGTRAGAGAALHLLPDPKPGFFHAHISYLEPDTDLCLLLVSTDREDFFAVSDCRRRFQERLRKRGAHLALREALRTPYYSVAQVGIPDLRHFLYKSKSSGLFTSPEIEAPYTSEEEQERLLGLYQYLHSRAHNASRPLKTIYYTGPNENLLAWVTGAFELYMCYSPLGTKASAVSAIHKLMRWIRKEEDRLFILTPLTY

SEQ ID NO: 856456 - protein, 459 aa, Homo sapiens
LPREEAQTEGGRTAQLTAVLRKLLDPRLISTEENTQAAETMGPLSAPPCTHLITWKGVLLTASLLNFWNPPTTAQVTIEAQPPKVSEGKDVLLLVHNLPQNLAGYIWYKGQMTYLYHYITSYVVDGQRIIYGPAYSGRERVYSNASLLIQNVTQEDAGSYTLHIIKRRDGTGGVTGHFTFTLHLETPKPSISSSNLNPREAMEAVILTCDPATPAASYQWWMNGQSLPMTHRLQLSKTNRTLFIFGVTKYIAGPYECEIRNPVSASRSDPVTLNLLPKLPKPYITINNLNPRENKDVLTFTCEPKSENYTYIWWLNGQSLPVSPRVKRPIENRILILPNVTRNETGPYQCEIRDRYGGIRSDPVTLNVLYGPDLPSIYPSFTYYRSGENLYLSCFAESNPRAQYSWTINGKFQLSGQKLSIPQITTKHSGLYACSVRNSATGKESSKSITVKVSDWILP

SEQ ID NO: 856457 - protein, 459 aa, Homo sapiens; identical to SEQ ID NO: 856456

SEQ ID NO: 856458 - protein, 296 aa, Homo sapiens
ARYPSILNLELTGHFTFTLHLETPKPSISSSNLNPREAMEAVILTCDPATPAASYQWWMNGQSLPMTHRLQLSKTNRTLFIFGVTKYIAGPYECEIRNPVSASRSDPVTLNLLPKLPKPYITINNLNPRENKDVLTFTCEPKSENYTYIWWLNGQSLPVSPRVKRPIENRILILPNVTRNETGPYQCEIRDRYGGIRSDPVTLNVLYGPDLPSIYPSFTYYRSGENLYLSCFAESNPRAQYSWTINGKFQLSGQKLSIPQITTKHSGLYACSVRNSATGKESSKSITVKVSDWILP

SEQ ID NO: 856459 - protein, 366 aa, Homo sapiens
LPREEAQTEGGRTAQLTAVLRKLLDPRLISTEENTQAAETMGPLSAPPCTHLITWKGVLLTASLLNFWNPPTTAQVTIEAQPPKVSEGKDVLLLVHNLPQNLAGYIWYKGQMTYLYHYITSYVVDGQRIIYGPAYSGRERVYSNASLLIQNVTQEDAGSYTLHIIKRRDGTGGVTGHFTFTLHLETPKPSISSSNLNPREAMEAVILTCDPATPAASYQWWMNGQSLPMTHRLQLSKTNRTLFIFGVTKYIAGPYECEIRNPVSASRSDPVTLNLLHGPDLPSIYPSFTYYRSGENLYLSCFAESNPRAQYSWTINGKFQLSGQKLSIPQITTKHSGLYACSVRNSATGKESSKSITVKVSDWILP

SEQ ID NO: 856460 - protein, 437 aa, Homo sapiens
LPREEAQTEGGRTAQLTAVLRKLLDPRLISTEENTQAAETMGPLSAPPCTHLITWKGVLLTASLLNFWNPPTTAQVTIEAQPPKVSEGKDVLLLVHNLPQNLAGYIWYKGQMTYLYHYITSYVVDGQRIIYGPAYSGRERVYSNASLLIQNVTQEDAGSYTLHIIKRRDGTGGVTGHFTFTLHLETPKPSISSSNLNPREAMEAVILTCDPATPAASYQWWMNGQSLPIAGPYECEIRNPVSASRSDPVTLNLLPKLPKPYITINNLNPRENKDVLTFTCEPKSENYTYIWWLNGQSLPVSPRVKRPIENRILILPNVTRNETGPYQCEIRDRYGGIRSDPVTLNVLYGPDLPSIYPSFTYYRSGENLYLSCFAESNPRAQYSWTINGKFQLSGQKLSIPQITTKHSGLYACSVRNSATGKESSKSITVKVSDWILP

SEQ ID NO: 856461 - protein, 231 aa, Homo sapiens [sequence omitted]

SEQ ID NO: 856462 - protein, 254 aa, Homo sapiens
HPAGGSTQCPPSLSSPESSHPILMTHRLQLSKTNRTLFIFGVTKYIAGPYECEIRNPVSASRSDPVTLNLLPKLPKPYITINNLNPRENKDVLTFTCEPKSENYTYIWWLNGQSLPVSPRVKRPIENRILILPNVTRNETGPYQCEIRDRYGGIRSDPVTLNVLYGPDLPSIYPSFTYYRSGENLYLSCFAESNPRAQYSWTINGKFQLSGQKLSIPQITTKHSGLYACSVRNSATGKESSKSITVKVSDWILP

SEQ ID NO: 856463 - protein, 400 aa, Homo sapiens
LPREEAQTEGGRTAQLTAVLRKLLDPRLISTEENTQAAETMGPLSAPPCTHLITWKGVLLTASLLNFWNPPTTAQVTIEAQPPKVSEGKDVLLLVHNLPQNLAGYIWYKGQMTYLYHYITSYVVDGQRIIYGPAYSGRERVYSNASLLIQNVTQEDAGSYTLHIIKRRDGTGGVTGHFTFTLHLETPKPSISSSNLNPREAMEAVILTCDPATPAASYQWWMNGQSLPMTHRLQLSKTNRTLFIFGVTKYIAGPYECEIRNPVSASRSDPVTLNLLPKLPKPYITINNLNPRENKDVLTFTCEPKSENYTYIWWLNGQSLPVSPRVKRPIENRILILPNVTRNETGPYQCEIRDRYGGIRSDPVTLNVLCEYLLFLCGPGHQLKSKPPEARSLSLSPVQV

SEQ ID NO: 856464 - protein, 307 aa, Homo sapiens
LPREEAQTEGGRTAQLTAVLRKLLDPRLISTEENTQAAETMGPLSAPPCTHLITWKGVLLTASLLNFWNPPTTAQVTIEAQPPKVSEGKDVLLLVHNLPQNLAGYIWYKGQMTYLYHYITSYVVDGQRIIYGPAYSGRERVYSNASLLIQNVTQEDAGSYTLHIIKRRDGTGGVTGHFTFTLHPKLPKPYITINNLNPRENKDVLTFTCEPKSENYTYIWWLNGQSLPVSPRVKRPIENRILILPNVTRNETGPYQCEIRDRYGGIRSDPVTLNVLCEYLLFLCGPGHQLKSKPPEARSLSLSPVQV

SEQ ID NO: 856465 - protein, 459 aa, Homo sapiens; identical to SEQ ID NO: 856456

SEQ ID NO: 856466 - protein, 100 aa, Homo sapiens
EEIRHFTFTLYLETPKPYISSSNLNPREAMEAVRLICDPETLDASYLWWMNGQSLPVTHRLQLSKTNRTLYLFGVTKYIAGPYECEIRNPVSASRMTQSP

SEQ ID NO: 856467 - protein, 466 aa, Homo sapiens
LPREEAQTEGGRTAQLTAVLRKLLDPRLISTEENTQAAETMGPLSAPPCTHLITWKGVLLTASLLNFWNPPTTAQVTIEAQPPKVSEGKDVLLLVHNLPQNLAGYIWYKGQMTYLYHYITSYVVDGQRIIYGPAYSGRERVYSNASLLIQNVTQEDAGSYTLHIIKRRDGTGGVTGHFTFTLHLETPKPSISSSNLNPREAMEAVILTCDPATPAASYQWWMNGQSLPMTHRLQLSKTNRTLFIFGVTKYIAGPYECEIRNPVSASRSDPVTLNLLPKLPKPYITINNLNPRENKDVLTFTCEPKSENYTYIWWLNGQSLPVSPRVKRPIENRILILPNVTRNETGPYQCEIRDRYGGIRSDPVTLNVLYGPDLPSIYPSFTYYRSGENLYLSCFAESNPRAQYSWTINGKFQLSGQKLSIPQITTKHSGLYACSVRNSATGKESSKSITVKVSGKWIPASLAIGI

SEQ ID NO: 856468 - protein, 400 aa, Homo sapiens; identical to SEQ ID NO: 856463

SEQ ID NO: 856469 - protein, 373 aa, Homo sapiens
LPREEAQTEGGRTAQLTAVLRKLLDPRLISTEENTQAAETMGPLSAPPCTHLITWKGVLLTASLLNFWNPPTTAQVTIEAQPPKVSEGKDVLLLVHNLPQNLAGYIWYKGQMTYLYHYITSYVVDGQRIIYGPAYSGRERVYSNASLLIQNVTQEDAGSYTLHIIKRRDGTGGVTGHFTFTLHLETPKPSISSSNLNPREAMEAVILTCDPATPAASYQWWMNGQSLPMTHRLQLSKTNRTLFIFGVTKYIAGPYECEIRNPVSASRSDPVTLNLLHGPDLPRIYPSFTYYRSGENLDLSCFTESNPPAEYFWTINGKFQQSGQKLFIPQITRNHSGLYACSVHNSATGKEISKSMTVKVSGPCHGDLTESQS

SEQ ID NO: 856470 - protein, 386 aa, Homo sapiens
LPREEAQTEGGRTAQLTAVLRKLLDPRLISTEENTQAAETMGPLSAPPCTHLITWKGVLLTASLLNFWNPPTTAQVTIEAQPPKVSEGKDVLLLVHNLPQNLAGYIWYKGQMTYLYHYITSYVVDGQRIIYGPAYSGRERVYSNASLLIQNVTQEDAGSYTLHIIKRRDGTGGVTGHFTFTLHLETPKPSISSSNLNPREAMEAVILTCDPATPAASYQWWMNGQSLPMTHRLQLSKTNRTLFIFGVTKYIAGPYECEIRNPVSASRSDPVTLNLLPKLPKPYITINNLNPRENKDVLTFTCEPKSENYTYIWWLNGQSLPVSPRVKRPIENRILILPNVTRNETGPYQCEIRDRYGGIRSDPVTLNVLYGPDLPSITLLSSSRVL

SEQ ID NO: 856471 - protein, 346 aa, Homo sapiens
LPREEAQTEGGRTAQLTAVLRKLLDPRLISTEENTQAAETMGPLSAPPCTHLITWKGVLLTASLLNFWNPPTTAQVTIEAQPPKVSEGKDVLLLVHNLPQNLAGYIWYKGQMTYLYHYITSYVVDGQRIIYGPAYSGRERVYSNASLLIQNVTQEDAGSYTLHIIKRRDGTGGVTGHFTFTLHLETPKPSISSSNLNPREAMEAVILTCDPATPAASYQWWMNGQSLPMTHRLQLSKTNRTLFIFGVTKYIAGPYECEIRNPVSASRSDPVTLNLLPKLPKPYITINNLNPRENKDVLAFTCEPKSENYTYIWWLNGQSLPVSPGVKRPIENRILILPSVTRNETG

SEQ ID NO: 856472 - protein, 335 aa, Homo sapiens
LPREEAQTEGGRTAQLTAVLRKLLDPRLISTEENTQAAETMGPLSAPPCTHLITWKGVLLTASLLNFWNPPTTAQVTIEAQPPKVSEGKDVLLLVHNLPQNLAGYIWYKGQMTYLYHYITSYVVDGQRIIYGPAYSGRERVYSNASLLIQNVTQEDAGSYTLHIIKRRDGTGGVTGHFTFTLHLETPKPSISSSNLNPREAMEAVILTCDPATPAASYQWWMNGQSLPMTHRLQLSKTNRTLFIFGVTKYIAGPYECEIRNPVSASRSDPVTLNLLREYPLFLCEPGCHPKYTWPEARPLSPSQVQVQRPLPLDIKAGHDFLPQAKQSRPRLDPQ

SEQ ID NO: 856473 - protein, 273 aa, Homo sapiens
LPREEAQTEGGRTAQLTAVLRKLLDPRLISTEENTQAAETMGPLSAPPCTHLITWKGVLLTASLLNFWNPPTTAQVTIEAQPPKVSEGKDVLLLVHNLPQNLAGYIWYKGQMTYLYHYITSYVVDGQRIIYGPAYSGRERVYSNASLLIQNVTQEDAGSYTLHIIKRRDGTGGVTGHFTFTLHLETPKPSISSSNLNPREAMEAVILTCDPATPAASYQWWMNGQSLPMTHRLQLSKTNRTLFIFGVTKYIAGPYECEIRNPVKLTLHAAQIY

SEQ ID NO: 856474 - protein, 132 aa, Homo sapiens
WYLSVSGLHREAMEAVILTCDPATPAASYQWWMNGQSLPMTHRLQLSKTNRTLFIFGVTKYIAGPYECEIRNPVSASRSDPVTLNLLPKLPKPYITINNLNPRENKDVLTFTCEPKSENYTYIWWLNGQSSL

SEQ ID NO: 856475 - protein, 142 aa, Homo sapiens
NNESRIRDRITWTFDLNLYTWPEARPLSPSQVQVQMTHRLQLSKTNRTLFIFGVTKYIAGPYECEIRNPVSASRSDPVTLNLLREYPLFLCEPGCHPKYTWPEARPLSPSQVQVQRPLPLDIKAGHDFLPQAKQSRPRLDPQ

SEQ ID NO: 856476 - protein, 459 aa, Homo sapiens; identical to SEQ ID NO: 856456

SEQ ID NO: 856477 - protein, 461 aa, Homo sapiens
INAECPLRRGEGGRTAQLTAVLRKLLDPRLISTEENTQAAETMGPLSAPPCTHLITWKGVLLTASLLNFWNPPTTAQVTIEAQPPKVSEGKDVLLLVHNLPQNLAGYIWYKGQMTYLYHYITSYVVDGQRIIYGPAYSGRERVYSNASLLIQNVTQEDAGSYTLHIIKRRDGTGGVTGHFTFTLHLETPKPSISSSNLNPREAMEAVILTCDPATPAASYQWWMNGQSLPMTHRLQLSKTNRTLFIFGVTKYIAGPYECEIRNPVSASRSDPVTLNLLPKLPKPYITINNLNPRENKDVLTFTCEPKSENYTYIWWLNGQSLPVSPRVKRPIENRILILPNVTRNETGPYQCEIRDRYGGIRSDPVTLNVLYGPDLPSIYPSFTYYRSGENLYLSCFAESNPRAQYSWTINGKFQLSGQKLSIPQITTKHSGLYACSVRNSATGKESSKSITVKVSDWILP

SEQ ID NO: 856478 - protein, 435 aa, Homo sapiens
MKHCPQQETSTIGGKKKHPEGGDPENSHIYRSLPPVPASLLNFWNPPTTAQVTIEAQPPKVSEGKDVLLLVHNLPQNLAGYIWYKGQMTYLYHYITSYVVDGQRIIYGPAYSGRERVYSNASLLIQNVTQEDAGSYTLHIIKRRDGTGGVTGHFTFTLHLETPKPSISSSNLNPREAMEAVILTCDPATPAASYQWWMNGQSLPMTHRLQLSKTNRTLFIFGVTKYIAGPYECEIRNPVSASRSDPVTLNLLPKLPKPYITINNLNPRENKDVLTFTCEPKSENYTYIWWLNGQSLPVSPRVKRPIENRILILPNVTRNETGPYQCEIRDRYGGIRSDPVTLNVLYGPDLPSIYPSFTYYRSGENLYLSCFAESNPRAQYSWTINGKFQLSGQKLSIPQITTKHSGLYACSVRNSATGKESSKSITVKVSDWILP

SEQ ID NO: 856479 - protein, 408 aa, Homo sapiens
RSDYAAEGGPASLLNFWNPPTTAQVTIEAQPPKVSEGKDVLLLVHNLPQNLAGYIWYKGQMTYLYHYITSYVVDGQRIIYGPAYSGRERVYSNASLLIQNVTQEDAGSYTLHIIKRRDGTGGVTGHFTFTLHLETPKPSISSSNLNPREAMEAVILTCDPATPAASYQWWMNGQSLPMTHRLQLSKTNRTLFIFGVTKYIAGPYECEIRNPVSASRSDPVTLNLLPKLPKPYITINNLNPRENKDVLTFTCEPKSENYTYIWWLNGQSLPVSPRVKRPIENRILILPNVTRNETGPYQCEIRDRYGGIRSDPVTLNVLYGPDLPSIYPSFTYYRSGENLYLSCFAESNPRAQYSWTINGKFQLSGQKLSIPQITTKHSGLYACSVRNSATGKESSKSITVKVSDWILP

SEQ ID NO: 856480 - protein, 270 aa, Homo sapiens
WYLSVSGLHREAMEAVILTCDPATPAASYQWWMNGQSLPMTHRLQLSKTNRTLFIFGVTKYIAGPYECEIRNPVSASRSDPVTLNLLPKLPKPYITINNLNPRENKDVLTFTCEPKSENYTYIWWLNGQSLPVSPRVKRPIENRILILPNVTRNETGPYQCEIRDRYGGIRSDPVTLNVLYGPDLPSIYPSFTYYRSGENLYLSCFAESNPRAQYSWTINGKFQLSGQKLSIPQITTKHSGLYACSVRNSATGKESSKSITVKVSDWILP

SEQ ID NO: 856481 - protein, 231 aa, Homo sapiens [sequence omitted]

SEQ ID NO: 856482 - protein, 340 aa, Homo sapiens
LPREEAQTEGGRTAQLTAVLRKLLDPRLISTEENTQAAETMGPLSAPPCTHLITWKGVLLTASLLNFWNPPTTAQVTIEAQPPKVSEGKDVLLLVHNLPQNLAGYIWYKGQMTYLYHYITSYVVDGQRIIYGPAYSGRERVYSNASLLIQNVTQEDAGSYTLHIIKRRDGTGGVTGHFTFTLHLETPKPSISSSNLNPREAMEAVILTCDPATPAASYQWWMNGQSLPMTHRLQLSKTNRTLFIFGVTKYIAGPYECEIRNPVSASRSDPVTLNLLPKLPKPYITINNLNPRENKDVLTFTCEPKSENYTYIWWLNGQSLPVSPRVKRPIENRILRTLSM

SEQ ID NO: 856483 - protein, 218 aa, Homo sapiens
SVPARPSLHIAGPYECEIRNPVSASRSDPVTLNLLPKLPKPYITINNLNPRENKDVLTFTCEPKSENYTYIWWLNGQSLPVSPRVKRPIENRILILPNVTRNETGPYQCEIRDRYGGIRSDPVTLNVLYGPDLPSIYPSFTYYRSGENLYLSCFAESNPRAQYSWTINGKFQLSGQKLSIPQITTKHSGLYACSVRNSATGKESSKSITVKVSDWILP

SEQ ID NO: 856484 - protein, 366 aa, Homo sapiens
LPREEAQTEGGRTAQLTAVLRKLLDPRLISTEENTQAAETMGPLSAPPCTHLITWKGVLLTASLLNFWNPPTTAQVTIEAQPPKVSEGKDVLLLVHNLPQNLAGYIWYKGQMTYLYHYITSYVVDGQRIIYGPAYSGRERVYSNASLLIQNVTQEDAGSYTLHIIKRRDGTGGVTGHFTFTLHPKLPKPYITINNLNPRENKDVLTFTCEPKSENYTYIWWLNGQSLPVSPRVKRPIENRILILPNVTRNETGPYQCEIRDRYGGIRSDPVTLNVLYGPDLPSIYPSFTYYRSGENLYLSCFAESNPRAQYSWTINGKFQLSGQKLSIPQITTKHSGLYACSVRNSATGKESSKSITVKVSDWILP

SEQ ID NO: 856485 - protein, 194 aa, Homo sapiens
RLEDPIEHTLLPKLPKPYITINNLNPRENKDVLTFTCEPKSENYTYIWWLNGQSLPVSPRVKRPIENRILILPNVTRNETGPYQCEIRDRYGGIRSDPVTLNVLYGPDLPSIYPSFTYYRSGENLYLSCFAESNPRAQYSWTINGKFQLSGQKLSIPQITTKHSGLYACSVRNSATGKESSKSITVKVSDWILP

SEQ ID NO: 856486 - protein, 382 aa, Homo sapiens
LPREEAQTEGGRTAQLTAVLRKLLDPRLISTEENTQAAETMGPLSAPPCTHLITWKGVLLTASLLNFWNPPTTAQVTIEAQPPKVSEGKDVLLLVHNLPQNLAGYIWYKGQMTYLYHYITSYVVDGQRIIYGPAYSGRERVYSNASLLIQNVTQEDAGSYTLHIIKRRDGTGGVTGHFTFTLHLETPKPSISSSNLNPREAMEAVILTCDPATPAASYQWWMNGQSLPMTHRLQLSKTNRTLFIFGVTKYIAGPYECEIRNPVSASRSDPVTLNLLPKLPKPYITINNLNPRENKDVLTFTCEPKSENYTYIWWLNGQSLPVSPRVKRPIENRILILPNVTRNETGPYQCEIRDRYGGIRSDPVTLNVLFRRKPLLVLLRRV

SEQ ID NO: 856487 - protein, 159 aa, Homo sapiens
VSQCDVYTNVLCSLNQCLILPVSPRVKRPIENRILILPNVTRNETGPYQCEIRDRYGGIRSDPVTLNVLYGPDLPSIYPSFTYYRSGENLYLSCFAESNPRAQYSWTINGKFQLSGQKLSIPQITTKHSGLYACSVRNSATGKESSKSITVKVSDWILP

SEQ ID NO: 856488 - protein, 157 aa, Homo sapiens
MLFSCPRAWKEGIESAQCIDKNSSLEADSPMKCTFRYSGSPCLGPYQCEIRDRYGGIRSDPVTLNVLYGPDLPSIYPSFTYYRSGENLYLSCFAESNPRAQYSWTINGKFQLSGQKLSIPQITTKHSGLYACSVRNSATGKESSKSITVKVSDWILP

SEQ ID NO: 856489 - protein, 103 aa, Homo sapiens
LEDPAGALTSGSLNGPDLPSIYPSFTYYRSGENLYLSCFAESNPRAQYSWTINGKFQLSGQKLSIPQITTKHSGLYACSVRNSATGKESSKSITVKVSDWILP

SEQ ID NO: 856490 - protein, 506 aa, Homo sapiens
LPREEAQTEGGRTAQLTAVLRKLLDPRLISTEENTQAAETMGPLSAPPCTHLITWKGVLLTASLLNFWNPPTTAQVTIEAQPPKVSEGKDVLLLVHNLPQNLAGYIWYKGQMTYLYHYITSYVVDGQRIIYGPAYSGRERVYSNASLLIQNVTQEDAGSYTLHIIKRRDGTGGVTGHFTFTLHLETPKPSISSSNLNPREAMEAVILTCDPATPAASYQWWMNGQSLPMTHRLQLSKTNRTLFIFGVTKYIAGPYECEIRNPVSASRSDPVTLNLLPKLPKPYITINNLNPRENKDVLTFTCEPKSENYTYIWWLNGQSLPVSPRVKRPIENRILILPNVTRNETGPYQCEIRDRYGGIRSDPVTLNVLYGPDLPSIYPSFTYYRSGENLYLSCFAESNPRAQYSWTINGKFQLSGQKLSIPQITTKHSGLYACSVRNSATGKESSKSITVKVSGHISNHWLYYQGFDWDVIFKNIDRMNQYELQAKSEVSLGLASYSQGFCKSLI

SEQ ID NO: 856491 - protein, 400 aa, Homo sapiens; identical to SEQ ID NO: 856463

SEQ ID NO: 856492 - protein, 321 aa, Homo sapiens
LPREEAQTEGGRTAQLTAVLRKLLDPRLISTEENTQAAETMGPLSAPPCTHLITWKGVLLTASLLNFWNPPTTAQVTIEAQPPKVSEGKDVLLLVHNLPQNLAGYIWYKGQMTYLYHYITSYVVDGQRIIYGPAYSGRERVYSNASLLIQNVTQEDAGSYTLHIIKRRDGTGGVTGHFTFTLHLETPKPSISSSNLNPREAMEAVILTCDPATPAASYQWWMNGQSLPMTHRLQLSKTNRTLFIFGVTKYIAGPYECEIRNPVSASRSDPVTLNLLPKLPKPYITINNLNPRENKDVLTFTCEPKSENYTYIWWLNGQSSL

SEQ ID NO: 856493 - protein, 373 aa, Homo sapiens; identical to SEQ ID NO: 856469

SEQ ID NO: 856494 - protein, 266 aa, Homo sapiens
LPREEAQTEGGRTAQLTAVLRKLLDPRLISTEENTQAAETMGPLSAPPCTHLITWKGVLLTASLLNFWNPPTTAQVTIEAQPPKVSEGKDVLLLVHNLPQNLAGYIWYKGQMTYLYHYITSYVVDGQRIIYGPAYSGRERVYSNASLLIQNVTQEDAGSYTLHIIKRRDGTGGVTGHFTFTLHQSEHNMRSKLLTTFYGKITVLRIEHRKSRNPQSEMLQNSTLLTTDVMLKRSAHWRIVDFKFFRFGMLNQYMYCKYSKIKKIRN

SEQ ID NO: 856495 - protein, 148 aa, Homo sapiens
TLMKYACGGIKGATQDNLLSVIHTAKLPKPYITINNLNPRENKDVLTFTCEPKSENYTYIWWLNGQSLPVSPRVKRPIENRILILPNVTRNETGPYQCEIRDRYGGIRSDPVTLNVLCEYLLFLCGPGHQLKSKPPEARSLSLSPVQV

SEQ ID NO: 856496 - protein, 1121 aa, Homo sapiens
RGCDGADAGRAYALLLLLICFNVGSGLHLQVLSTRNENKLLPKHPHLVRQKRAWITAPVALREGEDLSKKNPIAKIHSDLAEERGLKITYKYTGKGITEPPFGIFVFNKDTGELNVTSILDREETPFFLLTGYALDARGNNVEKPLELRIKVLDINDNEPVFTQDVFVGSVEELSAAHTLVMKINATDADEPNTLNSKISYRIVSLEPAYPPVFYLNKDTGEIYTTSVTLDREEHSSYTLTVEARDGNGEVTDKPVKQAQVQIRILDVNDNIPVVENKVLEGMVEENQVNVEVTRIKVFDADEIGSDNWLANFTFASGNEGGYFHIETDAQTNEGIVTLIKEVDYEEMKNLDFSVIVANKAAFHKSIRSKYKPTPIPIKVKVKNVKEGIHFKSSVISIYVSESMDRSSKGQIIGNFQAFDEDTGLPAHARYVKLEDRDNWISVDSVTSEIKLAKLPDFESRYVQNGTYTVKIVAISEDYPRKTITGTVLINVEDINDNCPTLIEPVQTICHDAEYVNVTAEDLDGHPNSGPFSFSVIDKPPGMAEKWKIARQESTSVLLQQSEKKLGRSEIQFLISDNQGFSCPEKQVLTLTVCECLHGSGCREAQHDSYVGLGPAAIALMILAFLLLLLVPLLLLMCHCGKGAKGFTPIPGTIEMLHPWNNEGAPPEDKVVPSFLPVDQGGSLVGRNGVGGMAKEATMKGSSSASIVKGQHEMSEMDGRWEEHRSLLSGRATQFTGATGAIMTTETTKTARATGASRDMAGAQAAAVALNEEFLRNYFTDKAASYTEEDENHTAKDCLLVYSQEETESLNASIGCCSFIEGELDDRFLDDLGLKFKTLAEVCLGQKIDINKEIEQRQKPATETSMNTASHSLCEQTMVNSENTYSSGSSFPVPKSLQEANAEKVTQEIVTERSVSSRQAQKVATPLPDPMASRNVIATETSYVTGSTMPPTTVILGPSQPQSLIVTERVYAPASTLVDQPYANEGTVVVTERVIQPHGGGSNPLEGTQHLQDVPYVMVRERESFLAPSSGVQPTLAMPNIAVGQNVTVTERVLAPASTLQSSYQIPTENSMTARNTTVSGAGVPGPLPDFGLEESGHSNSTITTSSTRVTKHSTVQHSYS

SEQ ID NO: 856497 - protein, 1121 aa, Homo sapiens; identical to SEQ ID NO: 856496

SEQ ID NO: 856498 - protein, 717 aa, Homo sapiens
GCVNRDHGEKFYRSNNSFANPKTVGSYVKLEDRDNWISVDSVTSEIKLAKLPDFESRYVQNGTYTVKIVAISEDYPRKTITGTVLINVEDINDNCPTLIEPVQTICHDAEYVNVTAEDLDGHPNSGPFSFSVIDKPPGMAEKWKIARQESTSVLLQQSEKKLGRSEIQFLISDNQGFSCPEKQVLTLTVCECLHGSGCREAQHDSYVGLGPAAIALMILAFLLLLLVPLLLLMCHCGKGAKGFTPIPGTIEMLHPWNNEGAPPEDKVVPSFLPVDQGGSLVGRNGVGGMAKEATMKGSSSASIVKGQHEMSEMDGRWEEHRSLLSGRATQFTGATGAIMTTETTKTARATGASRDMAGAQAAAVALNEEFLRNYFTDKAASYTEEDENHTAKDCLLVYSQEETESLNASIGCCSFIEGELDDRFLDDLGLKFKTLAEVCLGQKIDINKEIEQRQKPATETSMNTASHSLCEQTMVNSENTYSSGSSFPVPKSLQEANAEKVTQEIVTERSVSSRQAQKVATPLPDPMASRNVIATETSYVTGSTMPPTTVILGPSQPQSLIVTERVYAPASTLVDQPYANEGTVVVTERVIQPHGGGSNPLEGTQHLQDVPYVMVRERESFLAPSSGVQPTLAMPNIAVGQNVTVTERVLAPASTLQSSYQIPTENSMTARNTTVSGAGVPGPLPDFGLEESGHSNSTITTSSTRVTKHSTVQHSYS

SEQ ID NO: 856499 - protein, 590 aa, Homo sapiens
DQLARLSSESRHGRKMEIARQESTSVLLQQSEKKLGRSEIQFLISDNQGFSCPEKQVLTLTVCECLHGSGCREAQHDSYVGLGPAAIALMILAFLLLLLVPLLLLMCHCGKGAKGFTPIPGTIEMLHPWNNEGAPPEDKVVPSFLPVDQGGSLVGRNGVGGMAKEATMKGSSSASIVKGQHEMSEMDGRWEEHRSLLSGRATQFTGATGAIMTTETTKTARATGASRDMAGAQAAAVALNEEFLRNYFTDKAASYTEEDENHTAKDCLLVYSQEETESLNASIGCCSFIEGELDDRFLDDLGLKFKTLAEVCLGQKIDINKEIEQRQKPATETSMNTASHSLCEQTMVNSENTYSSGSSFPVPKSLQEANAEKVTQEIVTERSVSSRQAQKVATPLPDPMASRNVIATETSYVTGSTMPPTTVILGPSQPQSLIVTERVYAPASTLVDQPYANEGTVVVTERVIQPHGGGSNPLEGTQHLQDVPYVMVRERESFLAPSSGVQPTLAMPNIAVGQNVTVTERVLAPASTLQSSYQIPTENSMTARNTTVSGAGVPGPLPDFGLEESGHSNSTITTSSTRVTKHSTVQHSYS

SEQ ID NO: 856500 - protein, 485 aa, Homo sapiens
MCHCGKGAKGFTPIPGTIEMLHPWNNEGAPPEDKVVPSFLPVDQGGSLVGRNGVGGMAKEATMKGSSSASIVKGQHEMSEMDGRWEEHRSLLSGRATQFTGATGAIMTTETTKTARATGASRDMAGAQAAAVALNEEFLRNYFTDKAASYTEEDENHTAKDCLLVYSQEETESLNASIGCCSFIEGELDDRFLDDLGLKFKTLAEVCLGQKIDINKEIEQRQKPATETSMNTASHSLCEQTMVNSENTYSSGSSFPVPKSLQEANAEKVTQEIVTERSVSSRQAQKVATPLPDPMASRNVIATETSYVTGSTMPPTTVILGPSQPQSLIVTERVYAPASTLVDQPYANEGTVVVTERVIQPHGGGSNPLEGTQHLQDVPYVMVRERESFLAPSSGVQPTLAMPNIAVGQNVTVTERVLAPASTLQSSYQIPTENSMTARNTTVSGAGVPGPLPDFGLEESGHSNSTITTSSTRVTKHSTVQHSYS

SEQ ID NO: 856501 - protein, 824 aa, Homo sapiens
RGCDGADAGRAYALLLLLICFNVGSGLHLQVLSTRNENKLLPKHPHLVRQKRAWITAPVALREGEDLSKKNPIAKIHSDLAEERGLKITYKYTGKGITEPPFGIFVFNKDTGELNVTSILDREETPFFLLTGYALDARGNNVEKPLELRIKVLDINDNEPVFTQDVFVGSVEELSAAHTLVMKINATDADEPNTLNSKISYRIVSLEPAYPPVFYLNKDTGEIYTTSVTLDREEHSSYTLTVEARDGNGEVTDKPVKQAQVQIRILDVNDNIPVVENKVLEGMVEENQVNVEVTRIKVFDADEIGSDNWLANFTFASGNEGGYFHIETDAQTNEGIVTLIKEVDYEEMKNLDFSVIVANKAAFHKSIRSKYKPTPIPIKVKVKNVKEGIHFKSSVISIYVSESMDRSSKGQIIGNFQAFDEDTGLPAHARYVKLEDRDNWISVDSVTSEIKLAKLPDFESRYVQNGTYTVKIVAISEDYPRKTITGTVLINVEDINDNCPTLIEPVQTICHDAEYVNVTAEDLDGHPNSGPFSFSVIDKPPGMAEKWKIARQESTSVLLQQSEKKLGRSEIQFLISDNQGFSCPEKQVLTLTVCECLHGSGCREAQHDSYVGLGPAAIALMILAFLLLLLVPLLLLMCHCGKGAKGFTPIPGTIEMLHPWNNEGAPPEDKVVPSFLPVDQGGSLVGRNGVGGMAKEATMKGSSSASIVKGQHEMSEMDGRWEEHRSLLSGRATQFTGATGAIMTTETTKTARATGASRDMAGAQAAAVALNEEFLRNYFTDKAASYTEEDENHTAKDCLLVYSQEETESLNASIGCCSFIEGFR

SEQ ID NO: 856502 - protein, 235 aa, Homo sapiens
RGCDGADAGRAYALLLLLICFNVGSGLHLQVLSTRNENKLLPKHPHLVRQKRAWITAPVALREGEDLSKKNPIAKIHSDLAEERGLKITYKYTGKGITEPPFGIFVFNKDTGELNVTSILDREETPFFLLTGYALDARGNNVEKPLELRIKVLDINDNEPVFTQDVFVGSVEELSAAHTLVMKINATDADEPNTLNSKISYRIVSLEPAYPPVFYLNKDTGEIYTTSVTLDREVS

SEQ ID NO: 856503 - protein, 1121 aa, Homo sapiens; identical to SEQ ID NO: 856496

SEQ ID NO: 856504 - protein, 1121 aa, Homo sapiens; identical to SEQ ID NO: 856496

SEQ ID NO: 856505 - protein, 1121 aa, Homo sapiens; identical to SEQ ID NO: 856496

SEQ ID NO: 856506 - protein, 1121 aa, Homo sapiens; identical to SEQ ID NO: 856496

SEQ ID NO: 856507 - protein, 926 aa, Homo sapiens
MTSRFRLPAGRTYNVRASELARDRQHTEVVCNILLLDNTVQAFKVNKHDQGQVLLDVVFKHLDLTEQDYFGLQLADDSTDNPRWLDPNKPIRKQLKRGSPYSLNFRVKFFVSDPNKLQEEYTRYQYFLQIKQDILTGRLPCPSNTAALLASFAVQSELGDYDQSENLSGYLSDYSFIPNQPQDFEKEIAKLHQQHIGLSPAEAEFNYLNTARTLELYGVEFHYARDQSNNEIMIGVMSGGILIYKNRVRMNTFPWLKIVKISFKCKQFFIQLRKELHESRETLLGFNMVNYRACKNLWKACVEHHTFFRLDRPLPPQKNFFAHYFTLGSKFRYCGRTEVQSVQYGKEKANKDRVFARSPSKPLARKLMDWEVVSRNSISDDRLETQSLPSRSPPGTPNHRNSTFTQEGTRLRPSSVGHLVDHMVHTSPSEVFVNQRSPSSTQANSIVLESSPSQETPGDGKPPALPPKQSKKNSWNQIHYSHSQQDLESHINETFDIPSSPEKPTPNGGIPHDNLVLIRMKPDENGRFGFNVKGGYDQKMPVIVSRVAPGTPADLCVPRLNEGDQVVLINGRDIAEHTHDQVVLFIKASCERHSGELMLLVRPNAVYDVVEEKLENEPDFQYIPEKAPLDSVHQDDHSLRESMIQLAEGLITGTVLTQFDQLYRKKPGMTMSCAKLPQNISKNRYRDISPYDATRVILKGNEDYINANYINMEIPSSSIINQYIACQGPLPHTCTDFWQMTWEQGSSMVVMLTTQVERGRVKCHQYWPEPTGSSSYGCYQVTCHSEEGNTAYIFRKMTLFNQEKNESRPLTQIQYIAWPDHGVPDDSSDFLDFVCHVRNKRAGKEEPVVVHCSAGIGRTGVLITMETAMCLIECNQPVYPLDIVRTMRDQRAMMIQTPSQYRFVCEAILKVYEEGFVKPLTTSTNK

SEQ ID NO: 856508 - protein, 150 aa, Homo sapiens
DLPSPPTGASLKFYVPCKQCPPMKKESVKCHQYWPEPTGSSSYGCYQVTCHSEEGNTAYIFRKMTLFNQEKNESRPLTQIQYIAWPDHGVPDDSSDFLDFVCHVRNKRAGKEEPVVVHCSAGIREDLGLLLQWNRTGRPVRKMAAQQLGI

SEQ ID NO: 856509 - protein, 639 aa, Homo sapiens [sequence omitted]

SEQ ID NO: 856510 - protein, 749 aa, Homo sapiens
MTSRFRLPAGRTYNVRASELARDRQHTEVVCNILLLDNTVQAFKVNKHDQGQVLLDVVFKHLDLTEQDYFGLQLADDSTDNPRWLDPNKPIRKQLKRGSPYSLNFRVKFFVSDPNKLQEEYTRYQYFLQIKQDILTGRLPCPSNTAALLASFAVQSELGDYDQSENLSGYLSDYSFIPNQPQDFEKEIAKLHQQHIGLSPAEAEFNYLNTARTLELYGVEFHYARDQSNNEIMIGVMSGGILIYKNRVRMNTFPWLKIVKISFKCKQFFIQLRKELHESRETLLGFNMVNYRACKNLWKACVEHHTFFRLDRPLPPQKNFFAHYFTLGSKFRYCGRTEVQSVQYGKEKANKDRVFARSPSKPLARKLMDWEVVSRNSISDDRLETQSLPSRSPPGTPNHRNSTFTQEGTRLRPSSVGHLVDHMVHTSPSEVFVNQRSPSSTQANSIVLESSPSQETPGDGKPPALPPKQSKKNSWNQIHYSHSQQDLESHINETFDIPSSPEKPTPNGGIPHDNLVLIRMKPDENGRFGFNVKGGYDQKMPVIVSRVAPGTPADLCVPRLNEGDQVVLINGRDIAEHTHDQVVLFIKASCERHSGELMLLVRPNAVYDVVEEKLENEPDFQYIPEKAPLDSVHQDDHSLRESMIQLAEGLITGTVLTQFDQLYRKKPGMTMSCAKLPQNISKNRYRDISPYDATRVILKGNEDYINANYINMEIPSSSIINQYIACQGPLPHTCTDFWQMTWEQGSSMV

SEQ ID NO: 856511 - protein, 883 aa, Homo sapiens
MTSRFRLPAGRTYNVRASELARDRQHTEVVCNILLLDNTVQAFKVNKHDQGQVLLDVVFKHLDLTEQDYFGLQLADDSTDNPRWLDPNKPIRKQLKRGSPYSLNFRVKFFVSDPNKLQEEYTRYQYFLQIKQDILTGRLPCPSNTAALLASFAVQSELGDYDQSENLSGYLSDYSFIPNQPQDFEKEIAKLHQQHIGLSPAEAEFNYLNTARTLELYGVEFHYARDQSNNEIMIGVMSGGILIYKNRVRMNTFPWLKIVKISFKCKQFFIQLRKELHESRETLLGFNMVNYRACKNLWKACVEHHTFFRLDRPLPPQKNFFAHYFTLGSKFRYCGRTEVQSVQYGKEKANKDRVFARSPSKPLARKLMDWEVVSRNSISDDRLETQSLPSRSPPGTPNHRNSTFTQEGTRLRPSSVGHLVDHMVHTSPSEVFVNQRSPSSTQANSIVLESSPSQETPGDGKPPALPPKQSKKNSWNQIHYSHSQQDLESHINETFDIPSSPEKPTPNGGIPHDNLVLIRMKPDENGRFGFNVKGGYDQKMPVIVSRVAPGTPADLCVPRLNEGDQVVLINGRDIAEHTHDQVVLFIKASCERHSGELMLLVRPNAVYDVVEEKLENEPDFQYIPEKAPLDSVHQDDHSLRESMIQLAEGLITGTVLTQFDQLYRKKPGMTMSCAKLPQNISKNRYRDISPYDATRVILKGNEDYINANYINMEIPSSSIINQYIACQGPLPHTCTDFWQMTWEQGSSMVVMLTTQVERGRVKCHQYWPEPTGSSSYGCYQVTCHSEEGNTAYIFRKMTLFNQEKNESRPLTQIQYIAWPDHGVPDDSSDFLDFVCHVRNKRAGKEEPVVVHCSAGIREDLGLLLQWNRTGRPVRKMAAQQLGI

SEQ ID NO: 856512 - protein, 261 aa, Homo sapiens
MTSRFRLPAGRTYNVRASELARDRQHTEVVCNILLLDNTVQAFKVNKHDQGQVLLDVVFKHLDLTEQDYFGLQLADDSTDNPRWLDPNKPIRKQLKRGSPYSLNFRVKFFVSDPNKLQEEYTRYQYFLQIKQDILTGRLPCPSNTAALLASFAVQSELGDYDQSENLSGYLSDYSFIPNQPQDFEKEIAKLHQQHIGLSPAEAEFNYLNTARTLELYGVEFHYARDQSNNEIMIGVMSGGILIYKNRVRMNTFPCFFFPHG

SEQ ID NO: 856513 - protein, 926 aa, Homo sapiens; identical to SEQ ID NO: 856507

SEQ ID NO: 856514 - protein, 263 aa, Homo sapiens
MTSRFRLPAGRTYNVRASELARDRQHTEVVCNILLLDNTVQAFKVNKHDQGQVLLDVVFKHLDLTEQDYFGLQLADDSTDNPRWLDPNKPIRKQLKRGSPYSLNFRVKFFVSDPNKLQEEYTRYQYFLQIKQDILTGRLPCPSNTAALLASFAVQSELGDYDQSENLSGYLSDYSFIPNQPQDFEKEIAKLHQQHIGLSPAEAEFNYLNTARTLELYGVEFHYARDQSNNEIMIGVMSGGILIYKNRVRMNTFPWLKIVKMTF

SEQ ID NO: 856515 - protein, 247 aa, Homo sapiens
METDESPSPLPCGPAGEAVMESRARPFQALPREQSPPPPLQTSSGAEVMDVGSGGDGQSELPAEDPFNFYGASLLSKGSFSKGRLLIDPNCSGHSPRTARHAPAVRKFSPDLKLLKDVKISVSFTESCRSKDRKVLYTGAERDVRAECGLLLSPVSGDVHACPFGGSVGDGVGIGGESADKKDEENELDQEKRVEYAVLDELEDFTDNLELDEEGAGGFTAKAIVQRDRVDEEALNFPYEVCWQPLL

SEQ ID NO: 856516 - protein, 304 aa, Homo sapiens
METDESPSPLPCGPAGEAVMESRARPFQALPREQSPPPPLQTSSGAEVMDVGSGGDGQSELPAEDPFNFYGASLLSKGSFSKGRLLIDPNCSGHSPRTARHAPAVRKFSPDLKLLKDVKISVSFTESCRSKDRKVLYTGAERDVRAECGLLLSPVSGDVHACPFGGSVGDGVGIGGESADKKDEENELDQEKRVEYAVLDELEDFTDNLELDEEGAGGFTAKAIVQRDRVDEEALNFPYEDDFDNDVDALLEEGLCAPKKRRTEEKYGGDSDHPSDGETSVQPMMTKIKTVLKSRGRPPTEPVL

SEQ ID NO: 856517 - protein, 114 aa, Homo sapiens
MQDDFDNDVDALLEEGLCAPKKRRTEEKYGGDSDHPSDGETSVQPMMTKIKTVLKSRGRPPTEPLPDGWIMTFHNSGVPVYLHRESRVVTWSRPYFLGTGSIRVGEASVVTLGL

SEQ ID NO: 856518 - protein, 773 aa, Homo sapiens
METDESPSPLPCGPAGEAVMESRARPFQALPREQSPPPPLQTSSGAEVMDVGSGGDGQSELPAEDPFNFYGASLLSKGSFSKGRLLIDPNCSGHSPRTARHAPAVRKFSPDLKLLKDVKISVSFTESCRSKDRKVLYTGAERDVRAECGLLLSPVSGDVHACPFGGSVGDGVGIGGESADKKDEENELDQEKRVEYAVLDELEDFTDNLELDEEGAGGFTAKAIVQRDRVDEEALNFPYEDDFDNDVDALLEEGLCAPKKRRTEEKYGGDSDHPSDGETSVQPMMTKIKTVLKSRGRPPTEPLPDGWIMTFHNSGVPVYLHRESRVVTWSRPYFLGTGSIRKHDPPLSSIPCLHYKKMKDNEEREQSSDLTPSGDVSPVKPLSRSAELEFPLDEPDSMGADPGPPDEKDPLGAEAAPGALGQVKAKVEVCKDESVDLEEFRSYLEKRFDFEQVTVKKFRTWAERRQFNREMKRKQAESERPILPANQKLITLSVQDAPTKKEFVINPNGKSEVCILHEYMQRVLKVRPVYNFFECENPSEPFGASVTIDGVTYGSGTASSKKLAKNKAARATLEILIPDFVKQTSEEKPKDSEELEYFNHISIEDSRVYELTSKAGLLSPYQILHECLKRNHGMGDTSIKFEVVPGKNQKSEYVMACGKHTVRGWCKNKRVGKQLASQKILQLLHPHVKNWGSLLRMYGRESSKMVKQETSDKSVIELQQYAKKNKPNLHILSKLQEEMKRLAEEREETRKKPKMSIVASAQPGGEPLCTVDV

SEQ ID NO: 856519 - protein, 773 aa, Homo sapiens; identical to SEQ ID NO: 856518

SEQ ID NO: 856520 - protein, 773 aa, Homo sapiens; identical to SEQ ID NO: 856518

SEQ ID NO: 856521 - protein, 280 aa, Homo sapiens
RPTRAVYNFFECETGADLEDTLHVLVQDADLKVRPVYNFFECENPSEPFGASVTIDGVTYGSGTASSKKLAKNKAARATLEILIPDFVKQTSEEKPKDSEELEYFNHISIEDSRVYELTSKAGLLSPYQILHECLKRNHGMGDTSIKFEVVPGKNQKSEYVMACGKHTVRGWCKNKRVGKQLASQKILQLLHPHVKNWGSLLRMYGRESSKMVKQETSDKSVIELQQYAKKNKPNLHILSKLQEEMKRLAEEREETRKKPKMSIVASAQPGGEPLCTVDV

SEQ ID NO: 856522 - protein, 276 aa, Homo sapiens
MCIIFFKFDPRPVSKNAYRLILAANRDEFYSRPSKLADFWGNNNEILSGLDMEEGKEGGTWLGISTRGKLAALTNYLQPQLDWQARGRGELVTHFLTTDVDSLSYLKKVSMEGHLYNGFNLIAADLSTAKGDVICYYGNRGEPDPIVLTPGTYGLSNALLETPWRKLCFGKQLFLEAVERSQALPKDVLIASLLDVLNNEEAQLPDPAIEDQGGEYVQPMLSKYAAVCVRCPGYGTRTNTIILVDADGHVTFTERSMMDKDLSHWETRTYEFTLQS

SEQ ID NO: 856523 - protein, 328 aa, Homo sapiens
MCIIFFKFDPRPVSKNAYRLILAANRDEFYSRPSKLADFWGNNNEILSGLDMEEGKEGGTWLGISTRGKLAALTNYLQPQLDWQARGRGELVTHFLTTDVDSLSYLKKVSMEGHLYNGFNLIAADLSTAKGDVICYYGNRGEPDPIVLTPGTYGLSNALLETPWRKLCFGKQLFLEAVERSQALPKDVLIASLLDVLNNEEAQLPDPAIEDQGGEYVQPMLSKYAAVCVRCPGYGTRYCSTVGAPPPIPCPTSHARGPAKKPSAHSQSQASSSPEWIPELLPCPDAAAGTNTIILVDADGHVTFTERSMMDKDLSHWETRTYEFTLQS

SEQ ID NO: 856524 - protein, 783 aa, Homo sapiens
METDESPSPLPCGPAGEAVMESRARPFQALPREQSPPPPLQTSSGAEVMDVGSGGDGQSELPAEDPFNFYGASLLSKGSFSKGRLLIDPNCSGHSPRTARHAPAVRKFSPDLKLLKDVKISVSFTESCRSKDRKVLYTGAERDVRAECGLLLSPVSGDVHACPFGGSVGDGVGIGGESADKKDEENELDQEKRVEYAVLDELEDFTDNLELDEEGAGGFTAKAIVQRDRVDEEALNFPYEDDFDNDVDALLEEGLCAPKKRRTEEKYGGDSDHPSDGETSVQPMMTKIKTVLKSRGRPPTEPLPDGWIMTFHNSGVPVYLHRESRVVTWSRPYFLGTGSIRKHDPPLSSIPCLHYKKMKDNEEREQSSDLTPSGDVSPVKPLSRSAELEFPLDEPDSMGADPGPPDEKDPLGAEAAPGALGQVKAKVEVCKDESVDLEEFRSYLEKRFDFEQVTVKKFRTWAERRQFNREMKRKQAESERPILPANQKLITLSVQDAPTKKEFVINPNGKSEVCILHEYMQRVLKVRPVYNFFECENPSEPFGASVTIDGVTYGSGTASSKKLAKNKAARATLEILIPDFVKQTSEEKPKDSEELEYFNHISIEDSRVYELTSKAGLLSPYQILHECLKRNHGMGDTSIKFEVVPGKNQKSEYVMACGKHTVRGWCKNKRVGKQLASQKILQLLHPHVKNWGSLLRMYGRESSKMVKQETSDKSVIELQQYAKKNKPNLHILSKLQEEMKRLAEEREETRKKPKMSIVASAQPGGKQCWPVGRPQHILPSLPV

SEQ ID NO: 856525 - protein, 247 aa, Homo sapiens; identical to SEQ ID NO: 856515

SEQ ID NO: 856526 - protein, 178 aa, Homo sapiens
MAGHQHTWQAGSTHQLPAAAAGLAGPRASTAKGDVICYYGNRGEPDPIVLTPGTYGLSNALLETPWRKLCFGKQLFLEAVERSQALPKDVLIASLLDVLNNEEAQLPDPAIEDQGGEYVQPMLSKYAAVCVRCPGYGTRTNTIILVDADGHVTFTERSMMDKDLSHWETRTYEFTLQS

SEQ ID NO: 856527 - protein, 109 aa, Homo sapiens
MCIIFFKFDPRPVSKNAYRLILAANRDEFYSRPSKLADFWGNNNEILSGLDMEEGKEGGTWLGISTRGKLAALTNYLQPQLDWQARGRAQQRETSFATMGTEGSLILSF

SEQ ID NO: 856528 - protein, 263 aa, Homo sapiens
MPPKLLCAGRCVGQDGAAQAWHCPPGQGHSVWDAVRMPLGAGTPVNVQRREDSATEGSHRLILAANRDEFYSRPSKLADFWGNNNEILSGLDMEEGKEGGTWLGISTRGKLAALTNYLQPQLDWQARGRGTYGLSNALLETPWRKLCFGKQLFLEAVERSQALPKDVLIASLLDVLNNEEALSGRVLLGQLPDPAIEDQGGEYVQPMLSKYAAVCVRCPGYGTRTNTIILVDADGHVTFTERSMMDKDLSHWETRTYEFTLQS

SEQ ID NO: 856529 - protein, 276 aa, Homo sapiens; identical to SEQ ID NO: 856522

SEQ ID NO: 856530 - protein, 276 aa, Homo sapiens; identical to SEQ ID NO: 856522

SEQ ID NO: 856531 - protein, 700 aa, Homo sapiens
METDESPSPLPCGPAGEAVMESRARPFQALPREQSPPPPLQTSSGAEVMDVGSGGDGQSELPAEDPFNFYGASLLSKGSFSKGRLLIDPNCSGHSPRTARHAPAVRKFSPDLKLLKDVKISVSFTESCRSKDRKVLYTGAERDVRAECGLLLSPVSGDVHACPFGGSVGDGVGIGGESADKKDEENELDQEKRVEYAVLDELEDFTDNLELDEEGAGGFTAKAIVQRDRVDEEALNFPYEDDFDNDVDALLEEGLCAPKKRRTEEKYGGDSDHPSDGETSVQPMMTKIKTVLKSRGRPPTEPLPDGWIMTFHNSGVPVYLHRESRVVTWSRPYFLGTGSIRKHDPPLSSIPCLHYKKMKDNEEREQSSDLTPSGDVSPVKPLSRSAELEFPLDEPDSMGADPGPPDEKDPLGAEAAPGALGQVKAKVEVCKDESVDLEEFRSYLEKRFDFEQVTVKKFRTWAERRQFNREMKRKQAESERPILPANQKLITLSVQDAPTKKEFVINPNGKSEVCILHEYMQRVLKVRPVYNFFECENPSEPFGASVTIDGVTYGSGTASSKKLAKNKAARATLEILIPDFVKQTSEEKPKDSEELEYFNHISIEDSRVYELTSKAGLLSPYQILHECLKRNHGMGDTSIKFEVVPGKNQKSEYVMACGKHTVRGWCKDSFSAAWWPLGGRPLVWPCASVAWSQLLPWHCP

SEQ ID NO: 856532 - protein, 300 aa, Homo sapiens
METDESPSPLPCGPAGEAVMESRARPFQALPREQSPPPPLQTSSGAEVMDVGSGGDGQSELPAEDPFNFYGASLLSKGSFSKGRLLIDPNCSGHSPRTARHAPAVRKFSPDLKLLKDVKISVSFTESCRSKDRKVLYTGAERDVRAECGLLLSPVSGDVHACPFGGSVGDGVGIGGESADKKDEENELDQEKRVEYAVLDELEDFTDNLELDEEGAGGFTAKAIVQRDRVDEEALNFPYEDDFDNDVDALLEEGLCAPKKRRTEEKYGGDSDHPSDGETSVQPMMTKIKTVLKSRGDACL

SEQ ID NO: 856533 - protein, 158 aa, Homo sapiens
QCHLTRVAACYRKPVPEVRVCPVGSGYRSLFWSNDRSRLVFKSGPSSPVATEHRRAWTLDKQTCSCRGDSHIWNWAPRRPEKNPLSLFFFFETESCSVTQAGVQWHDLGSLQPPPPKFKQFSCPSLLISWDYRRVPPCPANFCVFSRDGVSPCWSGWS

SEQ ID NO: 856534 - protein, 180 aa, Homo sapiens
MCIIFFKFDPRPVSKNAYRLILAANRDEFYSRPSKLADFWGNNNEILSGLDMEEGKEGGTWLGISTRGKLAALTNYLQPQLDWQARGRGELVTHFLTTDVDSLSYLKKVSMEGHLYNGFNLIAADLSTGRTPCKDWNSAPRAKASPEAGRGACFRASLRAFRGSRPAVTLIMDFQHPELC

SEQ ID NO: 856535 - protein, 67 aa, Homo sapiens
GSRKSAAVAEAVSARLRGWPTPLVARPAWARGLRALGSGCADRARLLEDLATCVSRAALHHHVHHLL

SEQ ID NO: 856536 - protein, 81 aa, Homo sapiens
LQPAVLSVRCYTSQETSDKSVIELQQYAKKNKPNLHILSKLQEEMKRLAEERVSATLAGGLPGHGHSCGTCGGTADPRTRA

SEQ ID NO: 856537 - protein, 145 aa, Homo sapiens [sequence omitted]

SEQ ID NO: 856538 - protein, 773 aa, Homo sapiens; identical to SEQ ID NO: 856518

SEQ ID NO: 856539 - protein, 773 aa, Homo sapiens; identical to SEQ ID NO: 856518

SEQ ID NO: 856540 - protein, 208 aa, Homo sapiens
SGVVSAAGEGKAATASSGAVGSPARSGGLGGYFNHISIEDSRVYELTSKAGLLSPYQILHECLKRNHGMGDTSIKFEVVPGKNQKSEYVMACGKHTVRGWCKNKRVGKQLASQKILQLLHPHVKNWGSLLRMYGRESSKMVKQETSDKSVIELQQYAKKNKPNLHILSKLQEEMKRLAEEREETRKKPKMSIVASAQPGGEPLCTVDV

SEQ ID NO: 856541 - protein, 276 aa, Homo sapiens; identical to SEQ ID NO: 856522

SEQ ID NO: 856542 - protein, 276 aa, Homo sapiens; identical to SEQ ID NO: 856522

SEQ ID NO: 856543 - protein, 214 aa, Homo sapiens
MCIIFFKFDPRPVSKNAYRLILAANRDEFYSRPSKLADFWGNNNEILSGLDMEEGKEGGTWLGISTRGKLAALTNYLQPQLDWQARGRGTYGLSNALLETPWRKLCFGKQLFLEAVERSQALPKDVLIASLLDVLNNEEAQLPDPAIEDQGGEYVQPMLSKYAAVCVRCPGYGTRTNTIILVDADGHVTFTERSMMDKDLSHWETRTYEFTLQS

SEQ ID NO: 856544 - protein, 201 aa, Homo sapiens
MCIIFFKFDPRPVSKNAYRLILAANRDEFYSRPSKLADFWGNNNEILSGLDMEEGKEGGTWLGISTRGKLAALTNYLQPQLDWQARGRGELVTHFLTTDVDSLSYLKKVSMEGHLYNGFNLIAADLRQLPDPAIEDQGGEYVQPMLSKYAAVCVRCPGYGTRTNTIILVDADGHVTFTERSMMDKDLSHWETRTYEFTLQS

SEQ ID NO: 856545 - protein, 214 aa, Homo sapiens
RKQKIARYGRVCIGRGEAGELVTHFLTTDVDSLSYLKKVSMEGHLYNGFNLIAADLSTAKGDVICYYGNRGEPDPIVLTPGTYGLSNALLETPWRKLCFGKQLFLEAVERSQALPKDVLIASLLDVLNNEEALSGRVLLGQLPDPAIEDQGGEYVQPMLSKYAAVCVRCPGYGTRTNTIILVDADGHVTFTERSMMDKDLSHWETRTYEFTLQS

SEQ ID NO: 856546 - protein, 276 aa, Homo sapiens; identical to SEQ ID NO: 856522

SEQ ID NO: 856547 - protein, 276 aa, Homo sapiens; identical to SEQ ID NO: 856522

SEQ ID NO: 856548 - protein, 352 aa, Homo sapiens [sequence omitted]

SEQ ID NO: 856549 - protein, 109 aa, Homo sapiens; identical to SEQ ID NO: 856527

SEQ ID NO: 856550 - protein, 64 aa, Homo sapiens
MKRREWAGPAGVSPSVPPPGQRERQALLPREAHGSGQAGSPAAGKLMDILSSLPVPLSQLRFPT

SEQ ID NO: 856551 - protein, 195 aa, Homo sapiens
  misc_feature (155)..(155): Xaa can be any naturally occurring amino acid
  misc_feature (164)..(164): Xaa can be any naturally occurring amino acid
  misc_feature (168)..(168): Xaa can be any naturally occurring amino acid
  misc_feature (171)..(171): Xaa can be any naturally occurring amino acid
MSNEVETSATNGQPDQRGRTEKHPQEKEKKKGPEKTDEYLLARFKGDGVKYKAKLIGIDDVPDARGDKMSQDSMMKLKGMAAAGRSQGQHKQRIWVNISLSGIKIIDEKTGVIEHEHPVNKISFIARDVTDNRAFGYVCGGEGQHQFFAIKTGQXAEPLVVDLXDLFXVIXNVKKKEEEKKKIEEASKAVENGSE

SEQ ID NO: 856552 - protein, 109 aa, Homo sapiens
YRCGPLHRRSYALTVFLAAGCADIPSLPKSSCLSLTPTPSTAMVTGLFLPPPSFLELESPGLSKVLRTGAFAYPFLFDNLPLFYRCVKDRICYVGIKGLTEEVLSTWSR

SEQ ID NO: 856553 - protein, 238 aa, Homo sapiens
MSPRMRHICYFLDYGALSLYSLGCAFPYAAYSMPASWLHGHLHQFFVPAAALNSFLCTGLSCYSRFLELESPGLSKVLRTGAFAYPFLFDNLPLFYRLGLCWGRGHGCGQEALSTSHGYHLFCALLTGFLFASHLPERLAPGRFDYIGHSHQLFHICAVLGTHFQLEAVLADMGSRRAWLATQEPALGLAGTVATLVLAAAGNLLIIAAFTATLLRAPSTCPLLQGGPLEGGTQAKQQ

SEQ ID NO: 856554 - protein, 320 aa, Homo sapiens
MSGYRRPTSSALDCVLSSFQMTNETVNIWTHFLPTWYFLWRLLALAGGPGFRAEPYHWPLLVFLLPACLYPFASCCAHTFSSMSPRMRHICYFLDYGALSLYSLGCAFPYAAYSMPASWLHGHLHQFFVPAAALNSFLCTGLSCYSRFLELESPGLSKVLRTGAFAYPFLFDNLPLFYRLGLCWGRGHGCGQEALSTSHGYHLFCALLTGFLFASHLPERLAPGRFDYIGHSHQLFHICAVLGTHFQLEAVLADMGSRRAWLATQEPALGLAGTVATLVLAAAGNLLIIAAFTATLLRAPSTCPLLQGGPLEGGTQAKQQ

SEQ ID NO: 856555 - protein, 211 aa, Homo sapiens
MATISSARCSLASSSPPTCLKGWHQDALITSATATSYSTSVQCWAPTSSWRQCWLIWDHAEPGWPHRNLPWAWQAQWPHWSWLQLGTYSLLLLSQPPCFGPPVHALCCRVAHWRGVPRPNNSEAPSLTLSWRGQRPGPSADEEPRFGPNQVGTHLSLEPTGAEERGHRREGREEEGCLGGLAECERDREGALDGSGRSAEGLRGEMHACPG

SEQ ID NO: 856556 - protein, 176 aa, Homo sapiens
MLSLKLPQLLQVHQVPRVFWEDGIMSGYRRPTSSALDCVLSSFQMTNETVNIWTHFLPTWYFLWRLLALAGGPGFRAEPYHWPLLVFLLPACLYPFASCCAHTFSSMSPRMRHICYFLDYGALSLYSLVSWSWKALGSVRSSAQEPSPIHSCSTTSHSFIGSGCAGAGATAVGRRP

SEQ ID NO: 856557 - protein, 113 aa, Homo sapiens
MSPRMRHICYFLDYGALSLYSLGHSHQLFHICAVLGTHFQLEAVLADMGSRRAWLATQEPALGLAGTVATLVLAAAGNLLIIAAFTATLLRAPSTCPLLQGGPLEGGTQAKQQ

SEQ ID NO: 856558 - protein, 357 aa, Homo sapiens
MLSLKLPQLLQVHQVPRVFWEDGIMSGYRRPTSSALDCVLSSFQMTNETVNIWTHFLPTWYFLWRLLALAGGPGFRAEPYHWPLLVFLLPACLYPFASCCAHTFSSMSPRMRHICYFLDYGALSLYSLGCAFPYAAYSMPASWLHGHLHQFFVPAAALNSFLCTGLSCYSRTAMVTGLFLPPPSFLELESPGLSKVLRTGAFAYPFLFDNLPLFYRLGLCWGRGHGCGQEALSTSHGYHLFCALLTGFLFASHLPERLAPGRFDYIGHSHQLFHICAVLGTHFQLEAVLADMGSRRAWLATQEPALGLAGTVATLVLAAAGNLLIIAAFTATLLRAPSTCPLLQGGPLEGGTQAKQQ

SEQ ID NO: 856559 - protein, 186 aa, Homo sapiens
MLSLKLPQLLQVHQVPRVFWEDGIMSGYRRPTSSALDCVLSSFQMTNETVNIWTHFLPTWYFLWRLLALAGGPGFRAEPYHWPLLVFLLPACLYPFASCCAHTFSSMSPRMRHICYFLDYGALSLYSLGCAFPYAAYSMPASWLHGHLHQFFVPAAALNSFLCTGLSCYSRSGCAGAGATAVGRRP

SEQ ID NO: 856560 - protein, 143 aa, Homo sapiens
MSGYRRPTSSALDCVLSSFQMTNETVNIWTHFLPTWYFLWRLLALAGGPGFRAEPYHWPLLVFLLPACLYPFASCCAHTFSSMSPRMRHICYFLDYGALSLYSLARAVLGQGPRLWAGGPEHQPWLPSLLRAAHWLPLRLPPA

SEQ ID NO: 856561 - protein, 230 aa, Homo sapiens
MSGYRRPTSSALDCVLSSFQMTNETVNIWTHFLPTWYFLWRLLALAGGPGFRAEPYHWPLLVFLLPACLYPFASCCAHTFSSMSPRMRHICYFLDYGALSLYSLGCAFPYAAYSMPASWLHGHLHQFFVPAAALNSFLCTGLSCYSRFLELESPGLSKVLRTGAFAYPFLFDNLPLFYRLGLCWGRGHGCGQEALSTSHGYHLFCALLTGFLFASHLPERLAPGRFDYIG

SEQ ID NO: 856562 - protein, 258 aa, Homo sapiens
MLSLKLPQLLQVHQVPRVFWEDGIMSGYRRPTSSALDCVLSSFQMTNETVNIWTHFLPTWYFLWRLLALAGGPGFRAEPYHWPLLVFLLPACLYPFASCCAHTFSSMSPRMRHICYFLDYGALSLYSLGCAFPYAAYSMPASWLHGHLHQFFVPAAALNSFLCTGLSCYSRFLELESPGLSKVLRTGAFAYPFLFDNLPLFYRLGLCWGRGHGCGQEALSTSHGYHLFCALLTGFLFASHLPERLAPGRFDYIGTANS

SEQ ID NO: 856563 - protein, 344 aa, Homo sapiens
MLSLKLPQLLQVHQVPRVFWEDGIMSGYRRPTSSALDCVLSSFQMTNETVNIWTHFLPTWYFLWRLLALAGGPGFRAEPYHWPLLVFLLPACLYPFASCCAHTFSSMSPRMRHICYFLDYGALSLYSLGCAFPYAAYSMPASWLHGHLHQFFVPAAALNSFLCTGLSCYSRFLELESPGLSKVLRTGAFAYPFLFDNLPLFYRLGLCWGRGHGCGQEALSTSHGYHLFCALLTGFLFASHLPERLAPGRFDYIGHSHQLFHICAVLGTHFQLEAVLADMGSRRAWLATQEPALGLAGTVATLVLAAAGNLLIIAAFTATLLRAPSTCPLLQGGPLEGGTQAKQQ

SEQ ID NO: 856564 - protein, 238 aa, Homo sapiens; identical to SEQ ID NO: 856553

SEQ ID NO: 856565 - protein, 211 aa, Homo sapiens; identical to SEQ ID NO: 856555

SEQ ID NO: 856566 - protein, 344 aa, Homo sapiens; identical to SEQ ID NO: 856563

SEQ ID NO: 856567 - protein, 211 aa, Homo sapiens; identical to SEQ ID NO: 856555

SEQ ID NO: 856568 - protein, 344 aa, Homo sapiens; identical to SEQ ID NO: 856563

SEQ ID NO: 856569 - protein, 254 aa, Homo sapiens
MLSLKLPQLLQVHQVPRVFWEDGIMSGYRRPTSSALDCVLSSFQMTNETVNIWTHFLPTWYFLWRLLALAGGPGFRAEPYHWPLLVFLLPACLYPFASCCAHTFSSMSPRMRHICYFLDYGALSLYSLGCAFPYAAYSMPASWLHGHLHQFFVPAAALNSFLCTGLSCYSRFLELESPGLSKVLRTGAFAYPFLFDNLPLFYRLGLCWGRGHGCGQEALSTSHGYHLFCALLTGFLFASHLPERLAPGRFDYIG

SEQ ID NO: 856570 - protein, 367 aa, Homo sapiens
VDSQMSFENVFSVWNINPIFDNSSRTFGSRASELLWMASALWTVLPSRMSLRSLKWSLLLLSLLSFFVMWYLSLPHYNVIERVNWMYFYEYEPIYRQDFHFTLREHSNCSHQNPFLVILVTSHPSDVKARQAIRVTWGEKKSWWGYEVLTFFLLGQEAEKEDKMLALSLEDEHLLYGDIIRQDFLDTYNNLTLKTIMAFRWVTEFCPNAKYVMKTDTDVFINTGNLVKYLLNLNHSEKFFTGYPLIDNYSYRGFYQKTHISYQEYPFKVFPPYCSGLGYIMSRDLVPRIYEMMGHVKPIKFEDVYVGICLNLLKVNIHIPEDTNLFFLYRIHLDVCQLRRVIAAHGFSSKEIITFWQVMLRNTTCHY

SEQ ID NO: 856571 - protein, 319 aa, Homo sapiens
MSLRSLKWSLLLLSLLSFFVMWYLSLPHYNVIERVNWMYFYEYEPIYRQDFHFTLREHSNCSHQNPFLVILVTSHPSDVKARQAIRVTWGEKKSWWGYEVLTFFLLGQEAEKEDKMLALSLEDEHLLYGDIIRQDFLDTYNNLTLKTIMAFRWVTEFCPNAKYVMKTDTDVFINTGNLVKYLLNLNHSEKFFTGYPLIDNYSYRGFYQKTHISYQEYPFKVFPPYCSGLGYIMSRDLVPRIYEMMGHVKPIKFEDVYVGICLNLLKVNIHIPEDTNLFFLYRIHLDVCQLRRVIAAHGFSSKEIITFWQVMLRNTTCHY

SEQ ID NO: 856572 - protein, 319 aa, Homo sapiens; identical to SEQ ID NO: 856571

SEQ ID NO: 856573 - protein, 319 aa, Homo sapiens; identical to SEQ ID NO: 856571

SEQ ID NO: 856574 - protein, 319 aa, Homo sapiens; identical to SEQ ID NO: 856571

SEQ ID NO: 856575 - protein, 319 aa, Homo sapiens; identical to SEQ ID NO: 856571

SEQ ID NO: 856576 - protein, 319 aa, Homo sapiens; identical to SEQ ID NO: 856571

SEQ ID NO: 856577 - protein, 319 aa, Homo sapiens; identical to SEQ ID NO: 856571

SEQ ID NO: 856578 - protein, 319 aa, Homo sapiens; identical to SEQ ID NO: 856571

SEQ ID NO: 856579 - protein, 486 aa, Homo sapiens
KGPGNVVGQGLRAWLDFEGDRPPCCIPFLELLNQVVTGAASWPWEVVPFLTHKNLSQENLVLMSDHGDVSLPPEDRVRALSQLGSAVEVNEDIPPRRYFRSGVEIIRMASIYSEEGNIEHAFILYNKYITLFIEKLPKHRDYKSAVIPEKKDTVKKLKEIAFPKAEELKAELLKRYTKEYTEYNEEKKKEAEELARNMAIQQELEKEKQRVAQQKQQQLEQEQFHAFEEMIRNQELEKERLKIVQEFGKVDPGLGGPLVPDLEKPSLDVFPTLTVSSIQPSDCHTTVRPAKPPVVDRSLKPGALSNSESIPTIDGLRHVVVPGRLCPQFLQLASANTARGVETCGILCGKLMRNEFTITHVLIPKQSAGSDYCNTENEEELFLIQDQQGLITLGWIHTHPTQTAFLSSVDLHTHCSYQMMLPESVAIVCSPKFQETGFFKLTDHGLEEISSCRQKGFHPHSKDPPLFCSCSHVTVVDRAVTITDLR

SEQ ID NO: 856580 - protein, 428 aa, Homo sapiens
VTVSGTSGCHPRGKNLVLMSDHGDVSLPPEDRVRALSQLGSAVEVNEDIPPRRYFRSGVEIIRMASIYSEEGNIEHAFILYNKYITLFIEKLPKHRDYKSAVIPEKKDTVKKLKEIAFPKAEELKAELLKRYTKEYTEYNEEKKKEAEELARNMAIQQELEKEKQRVAQQKQQQLEQEQFHAFEEMIRNQELEKERLKIVQEFGKVDPGLGGPLVPDLEKPSLDVFPTLTVSSIQPSDCHTTVRPAKPPVVDRSLKPGALSNSESIPTIDGLRHVVVPGRLCPQFLQLASANTARGVETCGILCGKLMRNEFTITHVLIPKQSAGSDYCNTENEEELFLIQDQQGLITLGWIHTHPTQTAFLSSVDLHTHCSYQMMLPESVAIVCSPKFQETGFFKLTDHGLEEISSCRQKGFHPHSKDPPLFCPVLQ

SEQ ID NO: 856581 - protein, 535 aa, Homo sapiens
KGPGNVVGQGLRAWLDFEGDRPPCCIPFLELLNQVVTGAASWPWEVVPFLTHKNLSQENLVLMSDHGDVSLPPEDRVRALSQLGSAVEVNEDIPPRRYFRSGVEIIRMASIYSEEGNIEHAFILYNKYITLFIEKLPKHRDYKSAVIPEKKDTVKVGLHFHCCPSKSFRAAQTDFKIKVVVSASEYQILQEEIRPFHHNSSEEQKLKEIAFPKAEELKAELLKRYTKEYTEYNEEKKKEAEELARNMAIQQELEKEKQRVAQQKQQQLEQEQFHAFEEMIRNQELEKERLKIVQEFGKVDPGLGGPLVPDLEKPSLDVFPTLTVSSIQPSDCHTTVRPAKPPVVDRSLKPGALSNSESIPTIDGLRHVVVPGRLCPQFLQLASANTARGVETCGILCGKLMRNEFTITHVLIPKQSAGSDYCNTENEEELFLIQDQQGLITLGWIHTHPTQTAFLSSVDLHTHCSYQMMLPESVAIVCSPKFQETGFFKLTDHGLEEISSCRQKGFHPHSKDPPLFCSCSHVTVVDRAVTITDLR

SEQ ID NO: 856582 - protein, 405 aa, Homo sapiens
HLFFLSQNLVLMSDHGDVSLPPEDRVRALSQLGSAVEVNEDIPPRRYFRSGVEIIRMASIYSEEGNIEHAFILYNKYITLFIEKLPKHRDYKSAVIPEKKDTVKKLKEIAFPKAEELKAELLKRYTKEYTEYNEEKKKEAEELARNMAIQQELEKEKQRVAQQKQQQLEQEQFHAFEEMIRNQELEKERLKIVQEFGKPSDCHTTVRPAKPPVVDRSLKPGALSNSESIPTIDGLRHVVVPGRLCPQFLQLASANTARGVETCGILCGKLMRNEFTITHVLIPKQSAGSDYCNTENEEELFLIQDQQGLITLGWIHTHPTQTAFLSSVDLHTHCSYQMMLPESVAIVCSPKFQETGFFKLTDHGLEEISSCRQKGFHPHSKDPPLFCSCSHVTVVDRAVTITDLR

SEQ ID NO: 856583 - protein, 486 aa, Homo sapiens; identical to SEQ ID NO: 856579

SEQ ID NO: 856584 - protein, 391 aa, Homo sapiens
VTVSGTSGCHPRGKNLVLMSDHGDVSLPPEDRVRALSQLGSAVEVNEDIPPRRYFRSGVEIIRMASIYSEEGNIEHAFILYNKYITLFIEKLPKHRDYKSAVIPEKKDTVKKLKEIAFPKAEELKAELLKRYTKEYTEYNEEKKKEAEELARNMAIQQELEKEKQRVAQQKQQQLEQEQFHAFEEMIRNQELEKERLKIVQEFGKVDPGLGGPLVPDLEKPSLDVFPTLTVSSIQPSDCHTTVRPAKPPVVDRSLKPGALSNSESIPTIDGLRHVVVPGRLCPQFLQLASANTARGVETCGILCGKLMRNEFTITHVLIPKQSAGSDYCNTENEEELFLIQDQQGLITLGWIHTHPTQTAFLSSVDLHTHCSYQMMLPESVAIVCSPKFQE

SEQ ID NO: 856585 - protein, 442 aa, Homo sapiens
VTVSGTSGCHPRGKNLVLMSDHGDVSLPPEDRVRALSQLGSAVEVNEDIPPRRYFRSGVEIIRMASIYSEEGNIEHAFILYNKYITLFIEKLPKHRDYKSAVIPEKKDTVKKLKEIAFPKAEELKAELLKRYTKEYTEYNEEKKKEAEELARNMAIQQELEKEKQRVAQQKQQQLEQEQFHAFEEMIRNQELEKERLKIVQEFGKVDPGLGGPLVPDLEKPSLDVFPTLTVSSIQPSDCHTTVRPAKPPVVDRSLKPGALSNSESIPTIDGLRHVVVPGRLCPQFLQLASANTARGVETCGILCGKLMRNEFTITHVLIPKQSAGSDYCNTENEEELFLIQDQQGLITLGWIHTHPTQTAFLSSVDLHTHCSYQMMLPESVAIVCSPKFQETGFFKLTDHGLEEISSCRQKGFHPHSKDPPLFCSCSHVTVVDRAVTITDLR

SEQ ID NO: 856586 - protein, 370 aa, Homo sapiens
ERFPEPPGVIRGERLFIEKLPKHRDYKSAVIPEKKDTVKKLKEIAFPKAEELKAELLKRYTKEYTEYNEEKKKEAEELARNMAIQQELEKEKQRVAQQKQQQLEQEQFHAFEEMIRNQELEKERLKIVQEFGKVDPGLGGPLVPDLEKPSLDVFPTLTVSSIQPSDCHTTVRPAKPPVVDRSLKPGALSNSESIPTIDGLRHVVVPGRLCPQFLQLASANTARGVETCGILCGKLMRNEFTITHVLIPKQSAGSDYCNTENEEELFLIQDQQGLITLGWIHTHPTQTAFLSSVDLHTHCSYQMMLPESVAIVCSPKFQETGFFKLTDHGLEEISSCRQKGFHPHSKDPPLFCSCSHVTVVDRAVTITDLR

SEQ ID NO: 856587 - protein, 289 aa, Homo sapiens
MAIQQELEKEKQRVAQQKQQQLEQEQFHAFEEMIRNQELEKERLKIVQEFGKVDPGLGGPLVPDLEKPSLDVFPTLTVSSIQPSDCHTTVRPAKPPVVDRSLKPGALSNSESIPTIDGLRHVVVPGRLCPQFLQLASANTARGVETCGILCGKLMRNEFTITHVLIPKQSAGSDYCNTENEEELFLIQDQQGLITLGWIHTHPTQTAFLSSVDLHTHCSYQMMLPESVAIVCSPKFQETGFFKLTDHGLEEISSCRQKGFHPHSKDPPLFCSCSHVTVVDRAVTITDLR

SEQ ID NO: 856588 - protein, 442 aa, Homo sapiens; identical to SEQ ID NO: 856585

SEQ ID NO: 856589 - protein, 211 aa, Homo sapiens
KGPGNVVGQGLRAWLDFEGDRPPCCIPFLELLNQVVTGAASWPWEVVPFLTHKNLSQENLVLMSDHGDVSLPPEDRVRALSQLGSAVEVNEDIPPRRYFRSGVEIIRMASIYSEEGNIEHAFILYNKYITLFIEKLPKHRDYKSAVIPEKKDTVKKLKEIAFPKAEELKAELLKRYTKEYTEYNEEKKKGAGVAPDRSRPEQKSTGSSRSP

SEQ ID NO: 856590 - protein, 196 aa, Homo sapiens
LTAAGGPGVMGGLFWRSALRGLRCGPRAPGPSLLVRHGSGGPSWTRERTLVAVKPDGVQRRLVGDVIQRFERRGFTLVGMKMLQAPESVLAEHYQDLRRKPFYPALIRYMSSGPVVAMVWEGYNVVRASRAMIGHTDSAEAAPGTIRGDFSVHISRNVIHASDSVEGAQREIQLWFQSSELVSWADGGQHSSIHPA

SEQ ID NO: 856591 - protein, 196 aa, Homo sapiens; identical to SEQ ID NO: 856590

SEQ ID NO: 856592 - protein, 117 aa, Homo sapiens
MKMLQAPESVLAEHYQDLRRKPFYPALIRYMSSGPVVAMVWEGYNVVRASRAMIGHTDSAEAAPGTIRGDFSVHISRNVIHASDSVEGAQREIQLWFQSSELVSWADGGQHSSIHPA

SEQ ID NO: 856593 - protein, 146 aa, Homo sapiens
LTAAGRAGRHGRPLLALRAAGAALRPAGPGPEPASAPRLGVPSRGGRLGRSSALTLGLEATGLETPQQHRPRLLARTEPCYLPSSIFRPLFVRVSRAHRLVGKVCFSLVPCHSFTSDTGWALGSSSCGKSGLQTMSVVIQKGWSQK

SEQ ID NO: 856594 - protein, 196 aa, Homo sapiens; identical to SEQ ID NO: 856590

SEQ ID NO: 856595 - protein, 196 aa, Homo sapiens; identical to SEQ ID NO: 856590

SEQ ID NO: 856596 - protein, 117 aa, Homo sapiens; identical to SEQ ID NO: 856592

SEQ ID NO: 856597 - protein, 117 aa, Homo sapiens; identical to SEQ ID NO: 856592

SEQ ID NO: 856598 - protein, 145 aa, Homo sapiens
MKMLQVPEVRASQLLCQCPRLLSAAPPYLNATQAPESVLAEHYQDLRRKPFYPALIRYMSSGPVVAMVWEGYNVVRASRAMIGHTDSAEAAPGTIRGDFSVHISRNVIHASDSVEGAQREIQLWFQSSELVSWADGGQHSSIHPA

SEQ ID NO: 856599 - protein, 153 aa, Homo sapiens
MKMLQAPESVLAEHYQDLRRKPFYPALIRYMSSGPVVAMVWEGYNVVRASRAMIGHTDSAEAAPGTIRGDFSVHISSHRLAPLDRGQREQQMVPGFLRVHMKPEPHIAPVLAQNVIHASDSVEGAQREIQLWFQSSELVSWADGGQHSSIHPA

SEQ ID NO: 856600 - protein, 176 aa, Homo sapiens
MKMLQAPESVLAEHYQDLRRKPFYPALIRYMSSGPVVAMVWEGYNVVRASRAMIGHTDSAEAAPGTIRGDFSVHISRNVIHASDSVEGAQREIQLWFQSSELDQLPPSARTQAHIQTCLSQTTYFPVHLCPTPAQRSLSHQLQCLSVPQASTRLDQSFLHQSAGQPLWWGGVFTLS

SEQ ID NO: 856601 - protein, 120 aa, Homo sapiens
MKMLQAPESVLAEHYQDLRRKPFYPALIRYMSSGPVVAMVWEGYNVVRASRAMIGHTDSAEAAPGTIRGDFSVHISRNVIHASDSVEGAQREIQLWFQSSELGQSGLHHRRRLWDWVPDC

SEQ ID NO: 856602 - protein, 196 aa, Homo sapiens; identical to SEQ ID NO: 856590

SEQ ID NO: 856603 - protein, 268 aa, Homo sapiens
LTAAGGPGVMGGLFWRSALRGLRCGPRAPGPSLLVRHGSGGPSWTRERTLVAVKPDGVQRRLVGDVIQRFERRGFTLVGMKMLQAPESVLAEHYQDLRRKPFYPALIRYMSSGPVVAMVWEGYNVVRASRAMIGHTDSAEAAPGTIRGDFSVHISRNVIHASDSVEGAQREIQLWFQSSELSPTGSAMAQPPPDVEGDDCLPAYRHLFCPDLLRDKVAFITGGGSGIGFRIAEIFMRHGCHTVIASRSLPRVLTRWVFTTLTRLVSNS

SEQ ID NO: 856604 - protein, 97 aa, Homo sapiens
PRPLPPVVPAVPDGSAMAQPPPDVEGDDCLPAYRHLFCPDLLRDKVAFITGGGSGIGFRIAEIFMRHGCHTVIASRSLPRVLTRWVFTTLTRLVSNS

SEQ ID NO: 856605 - protein, 196 aa, Homo sapiens; identical to SEQ ID NO: 856590

SEQ ID NO: 856606 - protein, 255 aa, Homo sapiens
LTAAGRAGRHGRPLLALRAAGAALRPAGPGPEPASAPRLGVPSRGGRLGRSSALTLGLEATGLETPQQHRPRLLARTEPCYLPSSIFRPLFVRVSRAHRGPSWTRERTLVAVKPDGVQRRLVGDVIQRFERRGFTLVGMKMLQAPESVLAEHYQDLRRKPFYPALIRYMSSGPVVAMVWEGYNVVRASRAMIGHTDSAEAAPGTIRGDFSVHISRNVIHASDSVEGAQREIQLWFQSSELVSWADGGQHSSIHPA

SEQ ID NO: 856607 - protein, 117 aa, Homo sapiens; identical to SEQ ID NO: 856592

SEQ ID NO: 856608 - protein, 232 aa, Homo sapiens
SQRPGGPGVMGGLFWRSALRGLRCGPRAPGPSLLVRHGSGGPSWTRERTLVAVKPDGVQRRLVGDVIQRFERRGFTLVGMKMLQAPESVLAEHYQDLRRKPFYPALIRYMSSGPVVAMVWEGYNVVRASRAMIGHTDSAEAAPGTIRGDFSVHISSHRLAPLDRGQREQQMVPGFLRVHMKPEPHIAPVLAQNVIHASDSVEGAQREIQLWFQSSELVSWADGGQHSSIHPA

SEQ ID NO: 856609 - protein, 144 aa, Homo sapiens
MKMLQAPESVLAEHYQDLRRKPFYPALIRYMSSGPVVAMVWEGYNVVRASRAMIGHTDSAEAAPGTIRGDFSVHISRNVIHASDSVEGAQREIQLWFQSSELVSWADGGQHSSNSMQTIQKTTTRRIVDGKVVSETNDTKVLRH

SEQ ID NO: 856610 - protein, 143 aa, Homo sapiens
MKMLQAPESVLAEHYQDLRRKPFYPALIRYMSSGPVVAMVWEGYNVVRASRAMIGHTDSAEAAPGTIRGDFSVHISRTQAHIQTCLSQTTYFPVHLCPTPAQRSLSHQLQCLSVPQASTRLDQSFLHQSAGQPLWWGGVFTLS

SEQ ID NO: 856611 - protein, 148 aa, Homo sapiens
RASGLRRALAAAERPVRGSGAPPQSFCSAGIGFLDKQALTIIPKQEFKNVFRNSNDMDGKDALLHDASGGPHFPFRDTLSTQLMLHTRPTPVPTLTECRLERDADFRGGVFFGLNVFPKKGIFGLMKAKPVLPSPRVRKSQGYKQLDH

SEQ ID NO: 856612 - protein, 289 aa, Homo sapiens
MEATVTIPIWQNKPHGAARSVVRRIGTNLPLKPCARASFETLPNISDLCLRDVPPVPTLADIAWIAADEEETYARVRSDTRPLRHTWKPSPLIVMQRNASVPNLRGSEERLLALKKPALPALSRTTELQDELSHLRSQIAKIVAADAASASLTPDFLSPGSSNVSSPLPCFGSSFHSTTSFVISDITEETEVEVPELPSVPLLCSASPECCKPEHKAACSSSEEDDCVSLSKASSFADMMGILKDFHRMKQSQDLNRSLLKEEDPAVLISEVLRRKFALKEEDISRKGN

SEQ ID NO: 856613 - protein, 289 aa, Homo sapiens; identical to SEQ ID NO: 856612

SEQ ID NO: 856614 - protein, 422 aa, Homo sapiens
PAPLFRFPGRRQPPPAAAMGRARPGQRGPPSPGPAAQPPAPPRRRARSLALLGALLAAAAAAAVRVCARHAEAQAAARQELALKTLGTDGLFLFSSLDTDGDMYISPEEFKPIAEKLTGSTPAASYEEEELPPDPSEETLTIEARFQPLLPETMTKSKDGFLGVSRLALSGLRNWTAAASPSAVFATRHFQPFLPPPGQELGEPWWIIPSELSMFTGYLSNNRFYPPPPKGKEGAVACLTAISDFYYTVMFRIHAEFQLSEPPDFPFWFSPAQFTGHIILSKDATHVRDFRLFVPNHRSLNVDMEWLYGASESSNMEVDIGYIPQMELEATGPSVPSVILDEDGSMIDSHLPSGEPLQFVFEEIKWQQELSWEEAARRLEVAMYPFKKVSYLPFTEAFDRAKAENKLVHSILLWGALDDQSC

SEQ ID NO: 856615 - protein, 213 aa, Homo sapiens
MRSCRRLDFVKTRFAPQVAGGWLIDHQRLLLHGDVRIDAESSSAESVRVPLRFSSMSHVTAGQIMPLTQLGRASHVRYLLGSSVPKALRSLNVDMEWLYGASESSNMEVDIGYIPQMELEATGPSVPSVILDEDGSMIDSHLPSGEPLQFVFEEIKWQQELSWEEAARRLEVAMYPFKKVSYLPFTEAFDRAKAENKLVHSILLWGALDDQSC

SEQ ID NO: 856616 - protein, 289 aa, Homo sapiens; identical to SEQ ID NO: 856612

SEQ ID NO: 856617 - protein, 289 aa, Homo sapiens; identical to SEQ ID NO: 856612

SEQ ID NO: 856618 - protein, 445 aa, Homo sapiens
PAPLFRFPGRRQPPPAAAMGRARPGQRGPPSPGPAAQPPAPPRRRARSLALLGALLAAAAAAAVRVCARHAEAQAAARQELALKTLGTDGLFLFSSLDTDGDMYISPEEFKPIAEKLTGSTPAASYEEEELPPDPSEETLTIEARFQPLLPETMTKSKDGFLGVSRLALSGLRNWTAAASPSAVFATRHFQPFLPPPGQELGEPWWIIPSELSMFTGYLSNNRFYPPPPKGKEVIIHRLLSMFHPRPFVKTRFAPQGAVACLTAISDFYYTVMFRIHAEFQLSEPPDFPFWFSPAQFTGHIILSKDATHVRDFRLFVPNHRSLNVDMEWLYGASESSNMEVDIGYIPQMELEATGPSVPSVILDEDGSMIDSHLPSGEPLQFVFEEIKWQQELSWEEAARRLEVAMYPFKKVSYLPFTEAFDRAKAENKLVHSILLWGALDDQSC

SEQ ID NO: 856619 - protein, 289 aa, Homo sapiens; identical to SEQ ID NO: 856612

SEQ ID NO: 856620 - protein, 289 aa, Homo sapiens; identical to SEQ ID NO: 856612

SEQ ID NO: 856621 - protein, 202 aa, Homo sapiens
MEATVTIPIWQNKPHGAARSVVRRIGTNLPLKPCARASFETLPNISDLCLRDVPPVPTLADIAWIAADEEETYARVRSDTRPLRHTWKPSPLIVMQRNASVPNLRGSEERLLALKKPALPALSRTTELQDELSHLRSQIAKIVAADAVTSPRRQRWRSLSFHQSPCFVLPALNVANQNTKLPAVRLKRMTASLCPRPAALQT

SEQ ID NO: 856622 - protein, 195 aa, Homo sapiens
MQRNASVPNLRGSEERLLALKKPALPALSRTTELQDELSHLRSQIAKIVAADAASASLTPDFLSPGSSNVSSPLPCFGSSFHSTTSFVISDITEETEVEVPELPSVPLLCSASPECCKPEHKAACSSSEEDDCVSLSKASSFADMMGILKDFHRMKQSQDLNRSLLKEEDPAVLISEVLRRKFALKEEDISRKGN

SEQ ID NO: 856623 - protein, 289 aa, Homo sapiens; identical to SEQ ID NO: 856612

SEQ ID NO: 856624 - protein, 195 aa, Homo sapiens; identical to SEQ ID NO: 856622

SEQ ID NO: 856625 - protein, 195 aa, Homo sapiens; identical to SEQ ID NO: 856622

SEQ ID NO: 856626 - protein, 445 aa, Homo sapiens; identical to SEQ ID NO: 856618

SEQ ID NO: 856627 - protein, 445 aa, Homo sapiens; identical to SEQ ID NO: 856618

SEQ ID NO: 856628 - protein, 103 aa, Homo sapiens
GEGTLEHSGLLSLTDLLGFPWSRSDTRPLRHTWKPSPLIVMQRNASVPNLRGSEERLLALKKPALPALSRTTELQDELSHLRSQIAKIVAADAGRSPCARART

SEQ ID NO: 856629 - protein, 479 aa, Homo sapiens
PAPLFRFPGRRQPPPAAAMGRARPGQRGPPSPGPAAQPPAPPRRRARSLALLGALLAAAAAAAVRVCARHAEAQAAARQELALKTLGTDGLFLFSSLDTDGDMYISPEEFKPIAEKLTGSCSVTQTGVQWCSHSSLQPQLPWLNGSSCLSLLRSTPAASYEEEELPPDPSEETLTIEARFQPLLPETMTKSKDGFLGVSRLALSGLRNWTAAASPSAVFATRHFQPFLPPPGQELGEPWWIIPSELSMFTGYLSNNRFYPPPPKGKEVIIHRLLSMFHPRPFVKTRFAPQGAVACLTAISDFYYTVMFRIHAEFQLSEPPDFPFWFSPAQFTGHIILSKDATHVRDFRLFVPNHRSLNVDMEWLYGASESSNMEVDIGYIPQMELEATGPSVPSVILDEDGSMIDSHLPSGEPLQFVFEEIKWQQELSWEEAARRLEVAMYPFKKVSYLPFTEAFDRAKAENKLVHSILLWGALDDQSC

SEQ ID NO: 856630 - protein, 445 aa, Homo sapiens; identical to SEQ ID NO: 856618

SEQ ID NO: 856631 - protein, 292 aa, Homo sapiens
MTKSKDGFLGVSRLALSGLRNWTAAASPSAVFATRHFQPFLPPPGQELGEPWWIIPSELSMFTGYLSNNRFYPPPPKGKEVIIHRLLSMFHPRPFVKTRFAPQGAVACLTAISDFYYTVMFRIHAEFQLSEPPDFPFWFSPAQFTGHIILSKDATHVRDFRLFVPNHRSLNVDMEWLYGASESSNMEVDIGYIPQMELEATGPSVPSVILDEDGSMIDSHLPSGEPLQFVFEEIKWQQELSWEEAARRLEVAMYPFKKVSYLPFTEAFDRAKAENKLVHSILLWGALDDQSC

SEQ ID NO: 856632 - protein, 289 aa, Homo sapiens; identical to SEQ ID NO: 856612

SEQ ID NO: 856633 - protein, 445 aa, Homo sapiens; identical to SEQ ID NO: 856618

SEQ ID NO: 856634 - protein, 445 aa, Homo sapiens; identical to SEQ ID NO: 856618

SEQ ID NO: 856635 - protein, 289 aa, Homo sapiens; identical to SEQ ID NO: 856612

SEQ ID NO: 856636 - protein, 445 aa, Homo sapiens; identical to SEQ ID NO: 856618

SEQ ID NO: 856637 - protein, 445 aa, Homo sapiens; identical to SEQ ID NO: 856618

SEQ ID NO: 856638 - protein, 195 aa, Homo sapiens; identical to SEQ ID NO: 856622

SEQ ID NO: 856639 - protein, 195 aa, Homo sapiens; identical to SEQ ID NO: 856622

SEQ ID NO: 856640 - protein, 231 aa, Homo sapiens
MCPQSLPWLTSPGLLRMKRSDTRPLRHTWKPSPLIVMQRNASVPNLRGSEERLLALKKPALPALSRTTELQDELSHLRSQIAKIVAADAASASLTPDFLSPGSSNVSSPLPCFGSSFHSTTSFVISDITEETEVEVPELPSVPLLCSASPECCKPEHKAACSSSEEDDCVSLSKASSFADMMGILKDFHRMKQSQDLNRSLLKEEDPAVLISEVLRRKFALKEEDISRKGN

SEQ ID NO: 856641 - protein, 445 aa, Homo sapiens; identical to SEQ ID NO: 856618

SEQ ID NO: 856642 - protein, 445 aa, Homo sapiens; identical to SEQ ID NO: 856618

SEQ ID NO: 856643 - protein, 444 aa, Homo sapiens
RRPRRGAPSPAAMPARPGRLLPLLARPAALTALLLLLLGHGGGGRWGARAQEAAAAAADGPPAADGEDGQDPHSKHLYTADMFTHGIQSAAHFVMFFAPWCGHCQRLQPTWNDLGDKYNSMEDAKVYVAKVDCTAHSDVCSAQGVRGYPTLKLFKPGQEAVKYQGPRDFQTLENWMLQTLNEEPVTPEPEVEPPSAPELKQGLYELSASNFELHVAQGDHFIKFFAPWCGHCKALAPTWEQLALGLEHSETVKIGKVDCTQHYELCSGNQVRGYPTLLWFRDGKKVDQYKGKRDLESLREYVESQLQRTETGATETVTPSEAPVLAAEPEADKGTVLALTENNFDDTIAEGITFIKFYAPWCGHCKTLAPTWEELSKKEFPGLAGVKIAEVDCTAERNICSKYSVRGYPTLLLFRGGKKVSEHSGGRDLDSLHRFVLSQAKDEL

SEQ ID NO: 856644 - protein, 304 aa, Homo sapiens
LRLGTRLGGGLKLFKPGQEAVKYQGPRDFQTLENWMLQTLNEEPVTPEPEVEPPSAPELKQGLYELSASNFELHVAQGDHFIKFFAPWCGHCKALAPTWEQLALGLEHSETVKIGKVDCTQHYELCSGNQVRGYPTLLWFRDGKKVDQYKGKRDLESLREYVESQLQRTETGATETVTPSEAPVLAAEPEADKGTVLALTENNFDDTIAEGITFIKFYAPWCGHCKTLAPTWEELSKKEFPGLAGVKIAEVDCTAERNICSKYSVRGYPTLLLFRGGKKVSEHSGGRDLDSLHRFVLSQAKDEL

SEQ ID NO: 856645 - protein, 306 aa, Homo sapiens
MIDFGVFQGYPTLKLFKPGQEAVKYQGPRDFQTLENWMLQTLNEEPVTPEPEVEPPSAPELKQGLYELSASNFELHVAQGDHFIKFFAPWCGHCKALAPTWEQLALGLEHSETVKIGKVDCTQHYELCSGNQVRGYPTLLWFRDGKKVDQYKGKRDLESLREYVESQLQRTETGATETVTPSEAPVLAAEPEADKGTVLALTENNFDDTIAEGITFIKFYAPWCGHCKTLAPTWEELSKKEFPGLAGVKIAEVDCTAERNICSKYSVRGYPTLLLFRGGKKVSEHSGGRDLDSLHRFVLSQAKDEL

SEQ ID NO: 856646 - protein, 303 aa, Homo sapiens
RRPRRGAPSPAAMPARPGRLLPLLARPAALTALLLLLLGHGGGGRWGARAQEAAAAAADGPPAADGEDGQDPHSKHLYTADMFTHGIQSAAHFVMFFAPWCGHCQRLQPTWNDLGDKYNSMEDAKVYVAKVDCTAHSDVCSAQGVRGYPTLKLFKPGQEAVKYQGPRDFQTLENWMLQTLNEEPVTPEPEVEPPSAPELKQGLYELSASNFELHVAQGDHFIKFFAPWCGHCKALAPTWEQLALGLEHSETVKIGKVDCTQHYELCSGNQVRGYPTLLWFRDGKKVRLHFLVLRILHLLTPSG

SEQ ID NO: 856647 - protein, 427 aa, Homo sapiens
RRPRRGAPSPAAMPARPGRLLPLLARPAALTALLLLLLGHGGGGRWGARAQEAAAAAADGPPAADGEDGQDPHSKHLYTADMFTHGIQSAAHFVMFFAPWCGHCQRLQPTWNDLGDKYNSMEDAKVYVAKVDCTAHSDVCSAQGVRGYPTLKLFKPGQEAVKYQGPRDFQTLENWMLQTLNEEPVTPEPEVEPPSAPELKQGLYELSASNFELHVAQGDHFIKFFAPWCGHCKALAPTWEQLALGLEHSETVKIGKVDCTQHYELCSGNQVRGYPTLLWFRDGKMESQLQRTETGATETVTPSEAPVLAAEPEADKGTVLALTENNFDDTIAEGITFIKFYAPWCGHCKTLAPTWEELSKKEFPGLAGVKIAEVDCTAERNICSKYSVRGYPTLLLFRGGKKVSEHSGGRDLDSLHRFVLSQAKDEL

SEQ ID NO: 856648 - protein, 444 aa, Homo sapiens; identical to SEQ ID NO: 856643

SEQ ID NO: 856649 - protein, 444 aa, Homo sapiens; identical to SEQ ID NO: 856643

SEQ ID NO: 856650 - protein, 444 aa, Homo sapiens; identical to SEQ ID NO: 856643

SEQ ID NO: 856651 - protein, 444 aa, Homo sapiens; identical to SEQ ID NO: 856643

SEQ ID NO: 856652 - protein, 444 aa, Homo sapiens; identical to SEQ ID NO: 856643

SEQ ID NO: 856653 - protein, 206 aa, Homo sapiens
RRPRRGAPSPAAMPARPGRLLPLLARPAALTALLLLLLGHGGGGRWGARAQEAAAAAADGPPAADGEDGQDPHSKHLYTADMFTHGIQSAAHFVMFFAPWCGHCQRLQPTWNDLGDKYNSMEDAKVYVAKVDCTAHSDVCSAQGVRGYPTLKLFKPGQEAVKYQGPRDFQTLENWMLQTLNEEPVTPEPEVEPPSAPEQGHCVGTH

SEQ ID NO: 856654 - protein, 444 aa, Homo sapiens; identical to SEQ ID NO: 856643

SEQ ID NO: 856655 - protein, 444 aa, Homo sapiens; identical to SEQ ID NO: 856643

SEQ ID NO: 856656 - protein, 444 aa, Homo sapiens; identical to SEQ ID NO: 856643

SEQ ID NO: 856657 - protein, 444 aa, Homo sapiens; identical to SEQ ID NO: 856643

SEQ ID NO: 856658 - protein, 444 aa, Homo sapiens; identical to SEQ ID NO: 856643

SEQ ID NO: 856659 - protein, 410 aa, Homo sapiens
RRPRRGAPSPAAMPARPGRLLPLLARPAALTALLLLLLGHGGGGRWGARAQEAAAAAADGPPAADGEDGQDPHSKHLYTADMFTHGIQSAAHFVMFFAPWCGHCQRLQPTWNDLGDKYNSMEDAKVYVAKVDCTAHSDVCSAQGVRGYPTLKLFKPGQEAVKYQGPRDFQTLENWMLQTLNEEPVTPEPEVEPPSAPELKQGLYELSASNFELHVAQGDHFIKFFAPWCGHCKALAPTWEQLALGLEHSETVKIGKVDCTQHYELCSGNQVRGYPTLLWFRDGKKVDQYKGKRDLESLREYVESQLQRTETGATETVTPSEAPVLAAEPEADKGTVLALTENNFDDTIAEGITFIKFYAPWCGHCKTLAPTWEELSKRIPGLGGSEREKRREGIAAVRDGPGCSEREKQG

SEQ ID NO: 856660 - protein, 262 aa, Homo sapiens
RRPRRGAPSPAAMPARPGRLLPLLARPAALTALLLLLLGHGGGGRWGARAQEAAAAAADGPPAADGEDGQDPHSKHLYTADMFTHGIQSAAHFVMFFAPWCGHCQRLQPTWNDLGDKYNSMEDAKVYVAKVDCTAHSDVCSAQGVRGYPTLKLFKPGQEAVKYQGPRDFQTLENWMLQTLNEEPVTPEPEVEPPSAPELKQGLYELSASNFELHVAQGDHFIKFFAPWCGHCKALAPTWEQLALGLEHSETVKIGKVSESPY

SEQ ID NO: 856661 - protein, 248 aa, Homo sapiens
RRPRRGAPSPAAMPARPGRLLPLLARPAALTALLLLLLGHGGGGRWGARAQEAAAAAADGPPAADGEDGQDPHSKHLYTADMFTHGIQSAAHFVMFFAPWCGHCQRLQPTWNDLGDKYNSMEDAKVYVAKVDCTAHSDVCSAQGVRGYPTLKLFKPGQEAVKYQGPRDFQTLENWMLQTLNEEPVTPEPEVEPPSAPELKQGLYELSASNFELHVAQGKGDVLMPASENHYYSLACWAFPSCYSRALR

SEQ ID NO: 856662 - protein, 134 aa, Homo sapiens
GTRSWADLGPDKYLSDKDFQCLIKLLPSCLHPYIYRVTFATANESSALLIRMFNEKGTLKDLIYKAKPKDPFLKKYCNPKKIQGLELQQIKTYGRQILEVLKFLHDKGFPYGHLHASNVMLDGDTCRQPSIWQV

SEQ ID NO: 856663 - protein, 416 aa, Homo sapiens
RRPRRGAPSPAAMPARPGRLLPLLARPAAADGPPAADGEDGQDPHSKHLYTADMFTHGIQSAAHFVMFFAPWCGHCQRLQPTWNDLGDKYNSMEDAKVYVAKVDCTAHSDVCSAQGVRGYPTLKLFKPGQEAVKYQGPRDFQTLENWMLQTLNEEPVTPEPEVEPPSAPELKQGLYELSASNFELHVAQGDHFIKFFAPWCGHCKALAPTWEQLALGLEHSETVKIGKVDCTQHYELCSGNQVRGYPTLLWFRDGKKVDQYKGKRDLESLREYVESQLQRTETGATETVTPSEAPVLAAEPEADKGTVLALTENNFDDTIAEGITFIKFYAPWCGHCKTLAPTWEELSKKEFPGLAGVKIAEVDCTAERNICSKYSVRGYPTLLLFRGGKKVSEHSGGRDLDSLHRFVLSQAKDEL

SEQ ID NO: 856664 - protein, 269 aa, Homo sapiens
MLQTLNEEPVTPEPEVEPPSAPELKQGLYELSASNFELHVAQGDHFIKFFAPWCGHCKALAPTWEQLALGLEHSETVKIGKVDCTQHYELCSGNQVRGYPTLLWFRDGKKVDQYKGKRDLESLREYVESQLQRTETGATETVTPSEAPVLAAEPEADKGTVLALTENNFDDTIAEGITFIKFYAPWCGHCKTLAPTWEELSKKEFPGLAGVKIAEVDCTAERNICSKYSVRGYPTLLLFRGGKKVSEHSGGRDLDSLHRFVLSQAKDEL

SEQ ID NO: 856665 - protein, 444 aa, Homo sapiens; identical to SEQ ID NO: 856643

SEQ ID NO: 856666 - protein, 444 aa, Homo sapiens; identical to SEQ ID NO: 856643

SEQ ID NO: 856667 - protein, 444 aa, Homo sapiens; identical to SEQ ID NO: 856643

SEQ ID NO: 856668 - protein, 444 aa, Homo sapiens; identical to SEQ ID NO: 856643

SEQ ID NO: 856669 - protein, 444 aa, Homo sapiens; identical to SEQ ID NO: 856643

SEQ ID NO: 856670 - protein, 162 aa, Homo sapiens
STTTPGLSEESTTVYSSSPGSTETTVFPRSTTTSVRGEEPTTFHSRPASTHTTLFTEDSTTSGLTEESTAKPQRAELHWCGHCKTLAPTWEELSKKEFPGLAGVKIAEVDCTAERNICSKYSVRGYPTLLLFRGGKKVSEHSGGRDLDSLHRFVLSQAKDEL

SEQ ID NO: 856671 - protein, 444 aa, Homo sapiens; identical to SEQ ID NO: 856643

SEQ ID NO: 856672 - protein, 444 aa, Homo sapiens; identical to SEQ ID NO: 856643

SEQ ID NO: 856673 - protein, 68 aa, Homo sapiens
VGAMALVGAMALVGRYGLVWALMALVGAMALVGAMALVGAMALVGAMALVAALALVCTAVAAVDASVL

SEQ ID NO: 856674 - protein, 444 aa, Homo sapiens; identical to SEQ ID NO: 856643

SEQ ID NO: 856675 - protein, 439 aa, Homo sapiens
RRPRRGAPSPAAMPARPGRLLPLLARPAALTALLLLLLGHGGGGRWGARAQEAAAAAADGPPAADGEDGQDPHSKHLYTADMFTHGIQSAAHFVMFFAPWCGHCQRLQPTWNDLGDKYNSMEDAKVYVAKVDCTAHSDVCSAQGVRGYPTLKLFKPGQEAVKYQGPRDFQTLENWMLQTLNEEPVTPEPEVEPPSAPELKQGLYELSASNFELHVAQGDHFIKFFAPWCGHCKALAPTWEQLALGLEHSETVKIGKVDCTQHYELCSGNQVRGYPTLLWFRDGKKVDQYKGKRDLESLREYVESQLQRTETGATETVTPSEAPVLAAEPEADKGTVLALTENNFDDTIAEGITFIKFYAPYCSWVGPGKPGHCERTSKRILVWGGKTEKRAQNESSPPYEKDLYFFLSDITCALGNLTTVTHKLRRESLSPTIVEITPD

SEQ ID NO: 856676 - protein, 146 aa, Homo sapiens
RRPRRGAPSPAAMPARPGRLLPLLARPAALTALLLLLLGHGGGGRWGARAQEAAAAAADGPPAADGEDGQDPHSKHLYTADMFTHGIQSAAHFVMFFAPWCGHCQRLQPTWNDLGDKYNSMEDAKVYVANSPASQRTPGKRPSSGQ

SEQ ID NO: 856677 - protein, 211 aa, Homo sapiens
MAQAKINAKANEGRFCRSSSMADRSSRLLESLDQLELRVEALREAATAVEQEKEILLEMIHSIQNSQDMRQISDGEREELNLTANRLMGRTLTVEVSVETIRNPQQQESLKHATRIIDEVVNKFLDDLGNAKSHLMSLYSACSSEVPHGPVDQKFQSIVIGCALEDQKKIKRRLETLLRNIENSDKAIKLLEHSKGAGSKTLQQNAESRFN

SEQ ID NO: 856678 - protein, 211 aa, Homo sapiens; identical to SEQ ID NO: 856677

SEQ ID NO: 856679 - protein, 178 aa, Homo sapiens
MPHMWVEALREAATAVEQEKEILLEMIHSIQNSQDMRQISDGEREELNLTANRLMGRTLTVEVSVETIRNPQQQESLKHATRIIDEVVNKFLDDLGNAKSHLMSLYSACSSEVPHGPVDQKFQSIVIGCALEDQKKIKRRLETLLRNIENSDKAIKLLEHSKGAGSKTLQQNAESRFN

SEQ ID NO: 856680 - protein, 178 aa, Homo sapiens; identical to SEQ ID NO: 856679

SEQ ID NO: 856681 - protein, 160 aa, Homo sapiens
MPHMWVEALREAATAVEQEKEILLEMIHSILTANRLMGRTLTVEVSVETIRNPQQQESLKHATRIIDEVVNKFLDDLGNAKSHLMSLYSACSSEVPHGPVDQKFQSIVIGCALEDQKKIKRRLETLLRNIENSDKAIKLLEHSKGAGSKTLQQNAESRFN

SEQ ID NO: 856682 - protein, 211 aa, Homo sapiens; identical to SEQ ID NO: 856677

SEQ ID NO: 856683 - protein, 153 aa, Homo sapiens
MIHSIQNSQDMRQISDGEREELNLTANRLMGRTLTVEVSVETIRNPQQQESLKHATRIIDEVVNKFLDDLGNAKSHLMSLYSACSSEVPHGPVDQKFQSIVIGCALEDQKKIKRRLETLLRNIENSDKAIKLLEHSKGAGSKTLQQNAESRFN

SEQ ID NO: 856684 - protein, 104 aa, Homo sapiens
MEAYDQKIAEEEAKAKEEEGVPDEEGWVKVTRRGRRPVLPRTEAASLRVLERERRKRSRKELLNFYAWQHRESKMEHLAQLRKKFEEDKQRIELLRAQRKFRPY

SEQ ID NO: 856685 - protein, 104 aa, Homo sapiens; identical to SEQ ID NO: 856684

SEQ ID NO: 856686 - protein, 104 aa, Homo sapiens; identical to SEQ ID NO: 856684

SEQ ID NO: 856687 - protein, 104 aa, Homo sapiens; identical to SEQ ID NO: 856684

SEQ ID NO: 856688 - protein, 104 aa, Homo sapiens; identical to SEQ ID NO: 856684

SEQ ID NO: 856689 - protein, 253 aa, Homo sapiens
EERGERTARYEAWVARSRVARWWRAGGSAPRGTRRTVSPAHWATQESLSRLLSTCGLVQSVELQEKPDLAESPKESRSKFFHPKPVPGFQVAYVVFQKPSGVSAALALKGPLLVSTESHPVKSGIHKWISDYADSVPDPEALRVEVDTFMEAYDQKIAEEEAKAKEEEGVPDEEGWVKVTRRGRRPVLPRTEAASLRVLERERRKRSRKELLNFYAWQHRESKMEHLAQLRKKFEEDKQRIELLRAQRKFRPY

SEQ ID NO: 856690 - protein, 103 aa, Homo sapiens
MEAYDQKIAEEEAKAKEEEGVPDEEGWVKVTRRGRRPVLPRTEAASLRVLERERRKRSQKELLNYAWQHRESKMEHLAQLRKKFEEDKQRIELLRAQRKFRPY

SEQ ID NO: 856691 - protein, 257 aa, Homo sapiens
MVARRRKCAARDPEDRIPSPLGYAAIPIKFSEKQQASHYLYVRAHGVRQGTKSTWPQKRTLFVLNVPPYCTSRSEAMVPTVSRLGQMWLWLSPSAALDPWQRHPWCREALGWPCGCSHLASLSLRQESLSRLLSTCGLVQSVELQEKPDLAESPKESRSKFFHPKPVPGFQVAYVVFQKPSGVSAALALKGPLLVSTESHPVKSGIHKWISDYADSVPDPEALRVEVDTFMEAYDQKIAEEEAKGKRGGSRCLGVRF

SEQ ID NO: 856692 - protein, 103 aa, Homo sapiens; identical to SEQ ID NO: 856690

SEQ ID NO: 856693 - protein, 104 aa, Homo sapiens; identical to SEQ ID NO: 856684

SEQ ID NO: 856694 - protein, 104 aa, Homo sapiens; identical to SEQ ID NO: 856684

SEQ ID NO: 856695 - protein, 104 aa, Homo sapiens; identical to SEQ ID NO: 856684

SEQ ID NO: 856696 - protein, 99 aa, Homo sapiens
RRPPRALPGGKMVARRRKCAARDPEDRIPSPLGYAAIPIKFSEKQQASHYLYVRAHGVRQGTKSTWPQKRTLFVLNVPPYCTSRRACPASCPPVASSSL

SEQ ID NO: 856697 - protein, 126 aa, Homo sapiens
MSVMDLANTCSSFQSDLDFCSDCGSVLPLPGAQDTVTCIRCGFNINVRDFEGKVVKTSVVFHQLGTAMPMSVEEGPECQGPVVDRRCPRCGHEGMAYHTRQMRSADEGQTVFYTCTNCKFQEKEDS

SEQ ID NO: 856698 - protein, 88 aa, Homo sapiens
FAAASTTAREDDRRANCLLHLYQLQVPGEGRLLTFFLGNSTVPPSFRKVKDTGFLDALSILSGCNVLLPEENQIIMWGLPLFLEYSYP

SEQ ID NO: 856699 - protein, 126 aa, Homo sapiens; identical to SEQ ID NO: 856697

SEQ ID NO: 856700 - protein, 111 aa, Homo sapiens
  misc_feature (25)..(25): Xaa can be any naturally occurring amino acid
MTRICSVHRTDVNAPSACRAQIRHXIAVLTHVRDFEGKVVKTSVVFHQLGTAMPMSVEEGPECQGPVVDRRCPRCGHEGMAYHTRQMRSADEGQTVFYTCTNCKFQEKEDS

SEQ ID NO: 856701 - protein, 66 aa, Homo sapiens
RWELKQRRWKKLHKAREITAGGKSMMGSRVLRTGKLLEAAGAGPGSPALAVFAFGRGQSLLFQVPA

SEQ ID NO: 856702 - protein, 45 aa, Homo sapiens
MVQTGLWPCFRSYGRSSPLSATSLDSCRRRKQQEQEEAGEGGRRR

SEQ ID NO: 856703 - protein, 526 aa, Homo sapiens
AAASSPGVQSPVAPPRYSVNHWESGSMEAARPPPTAGKFVVVGGGIAGVTCAEQLATHFPSEDILLVTASPVIKAVTNFKQISKILEEFDVEEQSSTMLGKRFPNIKVIESGVKQLKSEEHCIVTEDGNQHVYKKLCLCAGAKPKLICEGNPYVLGIRDTDSAQEFQKQLTKAKRIMIIGNGGIALELVYEIEGCEVIWAIKDKAIGNTFFDAGAAEFLTSKLIAEKSEAKIAHKRTRYTTEGRKKEARSKSKADNVGSALGPDWHEGLNLKGTKEFSHKIHLETMCEVKKIYLQDEFRILKKKSFTFPRDHKSVTADTEMWPVYVELTNEKIYGCDFIVSATGVTPNVEPFLHGNSFDLGEDGGLKVDDHMHTSLPDIYAAGDICTTSWQLSPVWQQMRLWTQARQMGWYAAKCMAAASSGDSIDMDFSFELFAHVTKFFNYKVVLLGKYNAQGLGSDHELMLRCTKGREYIKVVMQNGRMMGAVLIGETDLEETFENLILNQMNLSSYGEDLLDPNIDIEDYFD

SEQ ID NO: 856704 - protein, 139 aa, Homo sapiens [sequence omitted]

SEQ ID NO: 856705 - protein, 285 aa, Homo sapiens
AAASSPGVQSPVAPPRYSVNHWESGSMEAARPPPTAGKFVVVGGGIAGVTCAEQLATHFPSEDILLVTASPVIKAVTNFKQISKILEEFDVEEQSSTMLGKRFPNIKVIESGVKQLKSEEHCIVTEDGNQHVYKKLCLCAGAKPKLICEGNPYVLGIRDTDSAQEFQKQLTKAKRIMIIGNGGIALELVYEIEGCEVIWAIKDKAIGNTFFDAGAAEFLTSKLIAEKSEAKIAHKRTRYTTEGRKKEARSKSKADNVGSALGPDWHEGLNLKGTKEQYSQHPHQK

SEQ ID NO: 856706 - protein, 359 aa, Homo sapiens
AAASSPGVQSPVAPPRYSVNHWESGSMEAARPPPTAGKFVVVGGGIAGVTCAEQLATHFPSEDILLVTASPVIKAVTNFKQISKILEEFDVEEQSSTMLGKRFPNIKVIESGVKQLKSEEHCIVTEDGNQHVYKKLCLCAGAKPKLICEGNPYVLGIRDTDSAQEFQKQLTKAKRIMIIGNGGIALELVYEIEGCEVIWAIKDKAIGNTFFDAGAAEFLTSKLIAEKSEAKIAHKRTRYTTEGRKKEARSKSKADNVGSALGPDWHEGLNLKGTKEFSHKIHLETMCEVKKIYLQDEFRILKKKSFTFPRDHKSVTADTEMWPVYVELTNEKIYGCDFIVSATGVTPNVEPFLHGNSVR

SEQ ID NO: 856707 - protein, 745 aa, Homo sapiens
MSLKPRVVDFDETWNKLLTTIKAVVMLEYVERATWNDRFSDIYALCVAYPEPLGERLYTETKIFLENHVRHLHKRVLESEEQVLVMYHRYWEEYSKGADYMDCLYRYLNTQFIKKNKLTEADLQYGYGGVDMNEPLMEIGELALDMWRKLMVEPLQAILIRMLLREIKNDRGGEDPNQKVIHGVINSFVHVEQYKKKFPLKFYQEIFESPFLTETGEYYKQEASNLLQESNCSQYMEKVLGRLKDEEIRCRKYLHPSSYTKVIHECQQRMVADHLQFLHAECHNIIRQEKKNDMANMYVLLRAVSTGLPHMIQELQNHIHDEGLRATSNLTQENMPTLFVESVLEVHGKFVQLINTVLNGDQHFMSALDKALTSVVNYREPKSVCKAPELLAKYCDNLLKKSAKGMTENEVEDRLTSFITVFKYIDDKDVFQKFYARMLAKRLIHGLSMSMDSEEAMINKLKQACGYEFTSKLHRMYTDMSVSADLNNKFNNFIKNQDTVIDLGISFQIYVLQAGAWPLTQAPSSTFAIPQELEKSVQMFELFYSQHFSGRKLTWLHYLCTGEVKMNYLGKPYVAMVTTYQMAVLLAFNNSETVSYKELQDSTQMNEKELTKTIKSLLDVKMINHDSEKEDIDAESSFSLNMNFSSKRTKFKITTSMQKDTPQEMEQTRSAVDEDRKMYLQAAIVRIMKARKVLRHNALIQEVISQSRARFNPSISMIKKCIEVLIDKQYIERSQASADEYSYVA

SEQ ID NO: 856708 - protein, 824 aa, Homo sapiens
PLLSGWRGGFGSSGRRRPEGVCWAKPEAEEDDCFTDPVIGPSFSPFPPSLPPLSRRGAAAALDFAVFPRGDRFQHYTCTMSLKPRVVDFDETWNKLLTTIKAVVMLEYVERATWNDRFSDIYALCVAYPEPLGERLYTETKIFLENHVRHLHKRVLESEEQVLVMYHRYWEEYSKGADYMDCLYRYLNTQFIKKNKLTEADLQYGYGGVDMNEPLMEIGELALDMWRKLMVEPLQAILIRMLLREIKNDRGGEDPNQKVIHGVINSFVHVEQYKKKFPLKFYQEIFESPFLTETGEYYKQEASNLLQESNCSQYMEKVLGRLKDEEIRCRKYLHPSSYTKVIHECQQRMVADHLQFLHAECHNIIRQEKKNDMANMYVLLRAVSTGLPHMIQELQNHIHDEGLRATSNLTQENMPTLFVESVLEVHGKFVQLINTVLNGDQHFMSALDKALTSVVNYREPKSVCKAPELLAKYCDNLLKKSAKGMTENEVEDRLTSFITVFKYIDDKDVFQKFYARMLAKRLIHGLSMSMDSEEAMINKLKQACGYEFTSKLHRMYTDMSVSADLNNKFNNFIKNQDTVIDLGISFQIYVLQAGAWPLTQAPSSTFAIPQELEKSVQMFELFYSQHFSGRKLTWLHYLCTGEVKMNYLGKPYVAMVTTYQMAVLLAFNNSETVSYKELQDSTQMNEKELTKTIKSLLDVKMINHDSEKEDIDAESSFSLNMNFSSKRTKFKITTSMQKDTPQEMEQTRSAVDEDRKMYLQAAIVRIMKARKVLRHNALIQEVISQSRARFNPSISMIKKCIEVLIDKQYIERSQASADEYSYVA

SEQ ID NO: 856709 - protein, 824 aa, Homo sapiens; identical to SEQ ID NO: 856708

SEQ ID NO: 856710 - protein, 764 aa, Homo sapiens
MYRVTWSTFWLRFQHYTCTMSLKPRVVDFDETWNKLLTTIKAVVMLEYVERATWNDRFSDIYALCVAYPEPLGERLYTETKIFLENHVRHLHKRVLESEEQVLVMYHRYWEEYSKGADYMDCLYRYLNTQFIKKNKLTEADLQYGYGGVDMNEPLMEIGELALDMWRKLMVEPLQAILIRMLLREIKNDRGGEDPNQKVIHGVINSFVHVEQYKKKFPLKFYQEIFESPFLTETGEYYKQEASNLLQESNCSQYMEKVLGRLKDEEIRCRKYLHPSSYTKVIHECQQRMVADHLQFLHAECHNIIRQEKKNDMANMYVLLRAVSTGLPHMIQELQNHIHDEGLRATSNLTQENMPTLFVESVLEVHGKFVQLINTVLNGDQHFMSALDKALTSVVNYREPKSVCKAPELLAKYCDNLLKKSAKGMTENEVEDRLTSFITVFKYIDDKDVFQKFYARMLAKRLIHGLSMSMDSEEAMINKLKQACGYEFTSKLHRMYTDMSVSADLNNKFNNFIKNQDTVIDLGISFQIYVLQAGAWPLTQAPSSTFAIPQELEKSVQMFELFYSQHFSGRKLTWLHYLCTGEVKMNYLGKPYVAMVTTYQMAVLLAFNNSETVSYKELQDSTQMNEKELTKTIKSLLDVKMINHDSEKEDIDAESSFSLNMNFSSKRTKFKITTSMQKDTPQEMEQTRSAVDEDRKMYLQAAIVRIMKARKVLRHNALIQEVISQSRARFNPSISMIKKCIEVLIDKQYIERSQASADEYSYVA

SEQ ID NO: 856711 - protein, 745 aa, Homo sapiens; identical to SEQ ID NO: 856707

SEQ ID NO: 856712 - protein, 808 aa, Homo sapiens
MTGKKGEKLRWQRTWTKTHGDMERKPCDIERKSTGQLIGENGTLLYPDCGDGHAWLFQHYTCTMSLKPRVVDFDETWNKLLTTIKAVVMLEYVERATWNDRFSDIYALCVAYPEPLGERLYTETKIFLENHVRHLHKRVLESEEQVLVMYHRYWEEYSKGADYMDCLYRYLNTQFIKKNKLTEADLQYGYGGVDMNEPLMEIGELALDMWRKLMVEPLQAILIRMLLREIKNDRGGEDPNQKVIHGVINSFVHVEQYKKKFPLKFYQEIFESPFLTETGEYYKQEASNLLQESNCSQYMEKVLGRLKDEEIRCRKYLHPSSYTKVIHECQQRMVADHLQFLHAECHNIIRQEKKNDMANMYVLLRAVSTGLPHMIQELQNHIHDEGLRATSNLTQENMPTLFVESVLEVHGKFVQLINTVLNGDQHFMSALDKALTSVVNYREPKSVCKAPELLAKYCDNLLKKSAKGMTENEVEDRLTSFITVFKYIDDKDVFQKFYARMLAKRLIHGLSMSMDSEEAMINKLKQACGYEFTSKLHRMYTDMSVSADLNNKFNNFIKNQDTVIDLGISFQIYVLQAGAWPLTQAPSSTFAIPQELEKSVQMFELFYSQHFSGRKLTWLHYLCTGEVKMNYLGKPYVAMVTTYQMAVLLAFNNSETVSYKELQDSTQMNEKELTKTIKSLLDVKMINHDSEKEDIDAESSFSLNMNFSSKRTKFKITTSMQKDTPQEMEQTRSAVDEDRKMYLQAAIVRIMKARKVLRHNALIQEVISQSRARFNPSISMIKKCIEVLIDKQYIERSQASADEYSYVA

SEQ ID NO: 856713 - protein, 745 aa, Homo sapiens; identical to SEQ ID NO: 856707

SEQ ID NO: 856714 - protein, 808 aa, Homo sapiens
PLLSGWRGGFGSSGRRRPEGVCWAKPEAEEDDCFTDPVIGPSFSPFPPSLPPLSRRGAAAALDFAVFPRGDRFQHYTCTMSLKPRVVDFDETWNKLLTTIKAVVMLEYVERATWNDRFSDIYALCVAYPEPLGERLYTETKIFLENHVRHLHKRVLESEEQVLVMYHRYWEEYSKGADYMDCLYRYLNTQFIKKNKLTEADLQYGYGGVDMNEPLMEIGELALDMWRKLMVEPLQAILIRMLLREIKNDRGGEDPNQKVIHGVINSFVHVEQYKKKFPLKFYQEIFESPFLTETGEYYKQEASNLLQESNCSQYMEKVLGRLKDEEIRCRKYLHPSSYTKVIHECQQRMVADHLQFLHAECHNIIRQEKKNDMANMYVLLRAVSTGLPHMIQELQNHIHDEGLRATSNLTQENVQLINTVLNGDQHFMSALDKALTSVVNYREPKSVCKAPELLAKYCDNLLKKSAKGMTENEVEDRLTSFITVFKYIDDKDVFQKFYARMLAKRLIHGLSMSMDSEEAMINKLKQACGYEFTSKLHRMYTDMSVSADLNNKFNNFIKNQDTVIDLGISFQIYVLQAGAWPLTQAPSSTFAIPQELEKSVQMFELFYSQHFSGRKLTWLHYLCTGEVKMNYLGKPYVAMVTTYQMAVLLAFNNSETVSYKELQDSTQMNEKELTKTIKSLLDVKMINHDSEKEDIDAESSFSLNMNFSSKRTKFKITTSMQKDTPQEMEQTRSAVDEDRKMYLQAAIVRIMKARKVLRHNALIQEVISQSRARFNPSISMIKKCIEVLIDKQYIERSQASADEYSYVA

SEQ ID NO: 856715 - protein, 104 aa, Homo sapiens
MNFSSKRTKFKITTSMQKDTPQEMEQTRSAVDEDRKMYLQAAIVRIMKARKVLRHNALIQEVISQSRARFNPSISMIKKCIEVLIDKQYIERSQASADEYSYVA

SEQ ID NO: 856716 - protein, 784 aa, Homo sapiens
PLLSGWRGGFGSSGRRRPEGVCWAKPEAEEDDCFTDPVIGPSFSPFPPSLPPLSRRGAAAALDFAVFPRGDRFQHYTCTMSLKPRVVDFDETWNKLLTTIKAVVMLEYVERATWNDRFSDIYALCVAYPEPLGERLYTETKIFLENHVRHLHKRVLESEEQVLVMYHRYWEEYSKGADYMDCLYRYLNTQFIKKNKLTEADLQYGYGGVDMNEPLMEIGELALDMWRKLMVEPLQAILIRMLLREIKNDRGGEDPNQKVIHGVINSFVHVEQYKKKFPLKFYQEIFESPFLTETGEYYKQEASNLLQESNCSQYMEKVLGRLKDEEIRCRKYLHPSSYTKVIHECQQRMVADHLQFLHAECHNIIRQEKKNDMANMYVLLRAVSTGLPHMIQELQNHIHDEGLRATSNLTQENMPTLFVESVLEVHGKFVQLINTVLNGDQHFMSALDKALTSVVNYREPKSVCKAPELLAKYCDNLLKKSAKGMTENEVEDRLTSFITVFKYIDDKDVFQKFYARMLAKRLIHGLSMSMDSEEAMINKLKQACGYEFTSKLHRMYTDMSVSADLNNKFNNFIKNQDTVIDLGISFQIYVLQAGAWPLTQAPSSTFAIPQELEKSVQMFELFYSQHFSGRKLTWLHYLCTGEVKMNYLGKPYVAMVTTYQMAVLLAFNNSETVSYKELQDSTQMNEKELTKTIKSLLDVKMINHDSEKEDIDAESSFSLNMNFSSKRTKFKITTSMQKDTPQEMEQTKSAADVERITYGQQQIVRIIKARRVPRREPYSTKMIS

SEQ ID NO: 856717 - protein, 136 aa, Homo sapiens
GSGPCRGGGAGTARGGRARAGARRAGEARSLRAPFARSFPPPSAAAAAAAAASAHLPRRGFVFHSFGLPPPPLVPCPLPCFCRRALTRKPCHPLDWIPGLPNPILAASPAAPFSFEGGKISTLHLHNVFETKSSRF

SEQ ID NO: 856718 - protein, 71 aa, Homo sapiens
PCRPRTKSSAAADRTASSRPVLPSPTPGRPPGGGPEEKNPGSNSAPCRPPAGVKRHNPTMKWNRGGAAGRL

SEQ ID NO: 856719 - protein, 177 aa, Homo sapiens
LNPTQPIHQGMSMLKYMFYDVWMRGHLTLSSYHLRLANPLASEYSVQMFELFYSQHFSGRKLTWLHYLCTGEVKMNYLGKPYVAMVTTYQMAVLLAFNNSETVSYKELQDSTQMNEKELTKTIKSLLDVKMINHDSEKEDIDAESSFSLNMNFSSKRTKFKITTSMQKDTPQEMEQS

SEQ ID NO: 856720 - protein, 824 aa, Homo sapiens; identical to SEQ ID NO: 856708

SEQ ID NO: 856721 - protein, 745 aa, Homo sapiens; identical to SEQ ID NO: 856707

SEQ ID NO: 856722 - protein, 808 aa, Homo sapiens; identical to SEQ ID NO: 856712

SEQ ID NO: 856723 - protein, 745 aa, Homo sapiens; identical to SEQ ID NO: 856707

SEQ ID NO: 856724 - protein, 824 aa, Homo sapiens; identical to SEQ ID NO: 856708

SEQ ID NO: 856725 - protein, 752 aa, Homo sapiens
PLLSGWRGGFGSSGRRRPEGVCWAKPEAEEDDCFTDPVIGPSFSPFPPSLPPLSRRGAAAALDFAVFPRGDRFQHYTCTMSLKPRVVDFDETWNKLLTTIKAVVMLEYVERATWNDRFSDIYALCVAYPEPLGERLYTETKIFLENHVRHLHKRVLESEEQVLVMYHRYWEEYSKGADYMDCLYRYLNTQFIKKNKLTEADLQYGYGGVDMNEPLMEIGELALDMWRKLMVEPLQAILIRMLLREIKNDRGGEDPNQKVIHGVINSFVHVEQYKKKFPLKFYQEIFESPFLTETGEYYKQEASNLLQESNCSQYMEKVLGRLKDEEIRCRKYLHPSSYTKVIHECQQRMVADHLQFLHAECHNIIRQEKKNDMANMYVLLRAVSTGLPHMIQELQNHIHDEGLRATSNLTQENMPTLFVESVLEVHGKFVQLINTVLNGDQHFMSALDKALTSVVNYREPKSVCKAPELLAKYCDNLLKKSAKGMTENEVEDRLTSFITVFKYIDDKDVFQKFYARMLAKRLIHGLSMSMDSEEAMINKLKQACGYEFTSKLHRMYTDMSVSADLNNKFNNFIKNQDTVIDLGISFQIYVLQAGAWPLTQAPSSTFAIPQELEKSVQMFELFYSQHFSGRKLTWLHYLCTGEVKMNYLGKPYVAMVTTYQMAVLLAFNNSETVSYKELQDSTQMNEKELTKTIKSLLDVKMINHDSEKEDIDAESSFSLNMNFSSKRTKFKITTSMQKDTPQEYEPTLNSLM

SEQ ID NO: 856726 - protein, 71 aa, Homo sapiens; identical to SEQ ID NO: 856718

SEQ ID NO: 856727 - protein, 947 aa, Homo sapiens
MAVMEMACPGAPGSAVGQQKELPKAKEKTPPLGKKQSSVYKLEAVEKSPVFCGKWEILNDVITKGTAKEGSEAGPAAISIIAQAECENSQEFSPTFSERIFIAGSKQYSQSESLDQIPNNVAHATEGKMARVCWKGKRRSKARKKRKKKSSKSLAHAGVALAKPLPRTPEQESCTIPVQEDESPLGAPYVRNTPQFTKPLKEPGLGQLCFKQLGEGLRPALPRSELHKLISPLQCLNHVWKLHHPQDGGPLPLPTHPFPYSRLPHPFPFHPLQPWKPHPLESFLGKLACVDSQKPLPDPHLSKLACVDSPKPLPGPHLEPSCLSRGAHEKFSVEEYLVHALQGSVSSGQAHSLTSLAKTWAARGSRSREPSPKTEDNEGVLLTEKLKPVDYEYREEVHWATHQLRLGRGSFGEVHRMEDKQTGFQCAVKKVRLEVFRAEELMACAGLTSPRIVPLYGAVREGPWVNIFMELLEGGSLGQLVKEQGCLPEDRALYYLGQALEGLEYLHSRRILHGDVKADNVLLSSDGSHAALCDFGHAVCLQPDGLGKSLLTGDYIPGTETHMAPEVVLGRSCDAKVDVWSSCCMMLHMLNGCHPWTQFFRGPLCLKIASEPPPVREIPPSCAPLTAQAIQEGLRKEPIHRVSAAELGGKVNRALQQVGGLKSPWRGEYKEPRHPPPNQANYHQTLHAQPRELSPRAPGPRPAEETTGRAPKLQPPLPPEPPEPNKSPPLTLSKEESGMWEPLPLSSLEPAPARNPSSPERKATVPEQELQQLEIELFLNSLSQPFSLEEQEQILSCLSIDSLSLSDDSEKNPSKASQSSRDTLSSGVHSWSSQAEARSSSWNMVLARGRPTDTPSYFNGVKVQIQSLNGEHLHIREFHRVKVGDIATGISSQIPAAAFSLVTKDGQPVRYDMEVPDSGIDLQCTLAPDGSFAWSWRVKHGQLENRP

SEQ ID NO: 856728 - protein, 175 aa, Homo sapiens
RPSSLFLPSLHLLAPEFCFFIVKVIGSSVSVSPSQVWDVFHHKDQWPQPMNPSLCLHFIPLPPLWCCPAQIPAFAPGLPGCEGSAQQPWQGHQLESLPHCSPVSPLLPWPLKLSSLSCQPQKLKPVDYEYREEVHWATHQLRLGRGSFGEVHRMEDKQTGFQCAVKKVRQGSGAE

SEQ ID NO: 856729 - protein, 926 aa, Homo sapiens
PSSCFLVLNMQICPFCDSQSESLDQIPNNVAHATEGKMARVCWKGKRRSKARKKRKKKSSKSLAHAGVALAKPLPRTPEQESCTIPVQEDESPLGAPYVRNTPQFTKPLKEPGLGQLCFKQLGEGLRPALPRSELHKLISPLQCLNHVWKLHHPQDGGPLPLPTHPFPYSRLPHPFPFHPLQPWKPHPLESFLGKLACVDSQKPLPDPHLSKLACVDSPKPLPGPHLEPSCLSRGAHEKFSVEEYLVHALQGSVSSGQAHSLTSLAKTWAARGSRSREPSPKTEDNEGVLLTEKLKPVDYEYREEVHWATHQLRLGRGSFGEVHRMEDKQTGFQCAVKKVRLEVFRAEELMACAGLTSPRIVPLYGAVREGPWVNIFMELLEGKEPGPTLSPNSGPRVPPWVLPKLALVTDLSIVNLLTLLTLLSTACPVLLPLAGMEARASPMYSLAFGLLGGSLGQLVKEQGCLPEDRALYYLGQALEGLEYLHSRRILHGDVKADNVLLSSDGSHAALCDFGHAVCLQPDGLGKSLLTGDYIPGTETHMAPEVVLGRSCDAKVDVWSSCCMMLHMLNGCHPWTQFFRGPLCLKIASEPPPVREIPPSCAPLTAQAIQEGLRKEPIHRVSAAELGGKVNRALQQVGGLKSPWRGEYKEPRHPPPNQANYHQTLHAQPRELSPRAPGPRPAEETTGRAPKLQPPLPPEPPEPNKSPPLTLSKEESGMWEPLPLSSLEPAPARNPSSPERKATVPEQELQQLEIELFLNSLSQPFSLEEQEQILSCLSIDSLSLSDDSEKNPSKASQSSRDTLSSGVHSWSSQAEARSSSWNMVLARGRPTDTPSYFNGVKVQIQSLNGEHLHIREFHRVKVGDIATGISSQIPAAAFSLVTKDGQPVRYDMEVPDSGIDLQCTLAPDGSFAWSWRVKHGQLENRP

SEQ ID NO: 856730 - protein, 948 aa, Homo sapiens
KFLFFLLSANPTPFALGENSQEFSPTFSERIFIAGSKQYSQSESLDQIPNNVAHATEGKMARVCWKGKRRSKARKKRKKKSSKSLAHAGVALAKPLPRTPEQESCTIPVQEDESPLGAPYVRNTPQFTKPLKEPGLGQLCFKQLGEGLRPALPRSELHKLISPLQCLNHVWKLHHPQDGGPLPLPTHPFPYSRLPHPFPFHPLQPWKPHPLESFLGKLACVDSQKPLPDPHLSKLACVDSPKPLPGPHLEPSCLSRGAHEKFSVEEYLVHALQGSVSSGQAHSLTSLAKTWAARGSRSREPSPKTEDNEGVLLTEKLKPVDYEYREEVHWATHQLRLGRGSFGEVHRMEDKQTGFQCAVKKVRLEVFRAEELMACAGLTSPRIVPLYGAVREGPWVNIFMELLEGKEPGPTLSPNSGPRVPPWVLPKLALVTDLSIVNLLTLLTLLSTACPVLLPLAGMEARASPMYSLAFGLLGGSLGQLVKEQGCLPEDRALYYLGQALEGLEYLHSRRILHGDVKADNVLLSSDGSHAALCDFGHAVCLQPDGLGKSLLTGDYIPGTETHMAPEVVLGRSCDAKVDVWSSCCMMLHMLNGCHPWTQFFRGPLCLKIASEPPPVREIPPSCAPLTAQAIQEGLRKEPIHRVSAAELGGKVNRALQQVGGLKSPWRGEYKEPRHPPPNQANYHQTLHAQPRELSPRAPGPRPAEETTGRAPKLQPPLPPEPPEPNKSPPLTLSKEESGMWEPLPLSSLEPAPARNPSSPERKATVPEQELQQLEIELFLNSLSQPFSLEEQEQILSCLSIDSLSLSDDSEKNPSKASQSSRDTLSSGVHSWSSQAEARSSSWNMVLARGRPTDTPSYFNGVKVQIQSLNGEHLHIREFHRVKVGDIATGISSQIPAAAFSLVTKDGQPVRYDMEVPDSGIDLQCTLAPDGSFAWSWRVKHGQLENRP

SEQ ID NO: 856731 - protein, 446 aa, Homo sapiens
TRHDSPVPLPPRGGLAADNVLLSSDGSHAALCDFGHAVCLQPDGLGKSLLTGDYIPGTETHMAPEVVLGRSCDAKVDVWSSCCMMLHMLNGCHPWTQFFRGPLCLKIASEPPPVREIPPSCAPLTAQAIQEGLRKEPIHRVSAAELGGKVNRALQQVGGLKSPWRGEYKEPRHPPPNQANYHQTLHAQPRELSPRAPGPRPAEETTGRAPKLQPPLPPEPPEPNKSPPLTLSKEESGMWEPLPLSSLEPAPARNPSSPERKATVPEQELQQLEIELFLNSLSQPFSLEEQEQILSCLSIDSLSLSDDSEKNPSKASQSSRDTLSSGVHSWSSQAEARSSSWNMVLARGRPTDTPSYFNGVKVQIQSLNGEHLHIREFHRVKVGDIATGISSQIPAAAFSLVTKDGQPVRYDMEVPDSGIDLQCTLAPDGSFAWSWRVKHGQLENRP

SEQ ID NO: 856732 - protein, 356 aa, Homo sapiens
QEMREGRPHLLSFAPQIASEPPPVREIPPSCAPLTAQAIQEGLRKEPIHRVSAAELGGKVNRALQQVGGLKSPWRGEYKEPRHPPPNQANYHQTLHAQPRELSPRAPGPRPAEETTGRAPKLQPPLPPEPPEPNKSPPLTLSKEESGMWEPLPLSSLEPAPARNPSSPERKATVPEQELQQLEIELFLNSLSQPFSLEEQEQILSCLSIDSLSLSDDSEKNPSKASQSSRDTLSSGVHSWSSQAEARSSSWNMVLARGRPTDTPSYFNGVKVQIQSLNGEHLHIREFHRVKVGDIATGISSQIPAAAFSLVTKDGQPVRYDMEVPDSGIDLQCTLAPDGSFAWSWRVKHGQLENRP

SEQ ID NO: 856733 - protein, 970 aa, Homo sapiens
MAVMEMACPGAPGSAVGQQKELPKAKEKTPPLGKKQSSVYKLEAVEKSPVFCGKWEILNDVITKGTAKEGSEAGPAAISIIAQAECENSQEFSPTFSERIFIAGSKQYSQSESLDQIPNNVAHATEGKMARVCWKGKRRSKARKKRKKKSSKSLAHAGVALAKPLPRTPEQESCTIPVQEDESPLGAPYVRNTPQFTKPLKEPGLGQLCFKQLGEGLRPALPRSELHKLISPLQCLNHVWKLHHPQDGGPLPLPTHPFPYSRLPHPFPFHPLQPWKPHPLESFLGKLACVDSQKPLPDPHLSKLACVDSPKPLPGPHLEPSCLSRGAHEKFSVEEYLVHALQGSVSSGQAHSLTSLAKTWAARGSRSREPSPKTEDNEGVLLTEKLKPVDYEYREEVHWATHQLRLGRGSFGEVHRMEDKQTGFQCAVKKVRLEVFRAEELMACAGLTSPRIVPLYGAVREGPWVNIFMELLEGKEPGPTLSPNSGPRVPPWVLPKLALVTDLSIVNLLTLLTLLSTACPVLLPLAGMEARASPMYSLAFGLLGGSLGQLVKEQGCLPEDRALYYLGQALEGLEYLHSRRILHGDVKADNVLLSSDGSHAALCDFGHAVCLQPDGLGKSLLTGDYIPGTETHMAPEVVLGRSCDAKVDVWSSCCMMLHMLNGCHPWTQFFRGPLCLKIASEPPPVREIPPSCAPLTAQAIQEGLRKEPIHRVSAAELGGKVNRALQQVGGLKSPWRGEYKEPRHPPPNQANYHQTLHAQPRELSPRAPGPRPAEETTGRAPKLQPPLPPEPPEPNKSPPLTLSKEESGMWEPLPLSSLEPAPARNPSSPERKATVPEQELQQLEIELFLNSLSQPFSLEEQEQILSCLSIDSLSLSDDSEKNPSKASQSSRDTLSSGVHSWSSQAEARSSSWNMVLARGRPTDTPSYFNGVKVQIQSLNGEHLHIREFHRVKVGDIATGISSQVRGAGTL

SEQ ID NO: 856734 - protein, 897 aa, Homo sapiens
MAVMEMACPGAPGSAVGQQKELPKAKEKTPPLGKKQSSVYKLEAVEKSPVFCGKWEILNDVITKGTAKEGSEAGPAAISIIAQAECENSQEFSPTFSERIFIAGSKQYSQSESLDQIPNNVAHATEGKMARVCWKGKRRSKARKKRKKKSSKSLAHAGVALAKPLPRTPEQESCTIPVQEDESPLGAPYVRNTPQFTKPLKEPGLGQLCFKQLGEGLRPALPRSELHKLISPLQCLNHVWKLHHPQDGGPLPLPTHPFPYSRLPHPFPFHPLQPWKPHPLESFLGKLACVDSQKPLPDPHLSKLACVDSPKPLPGPHLEPSCLSRGAHEKFSVEEYLVHALQGSVSSGQAHSLTSLAKTWAARGSRSREPSPKTEDNEGVLLTEKLKPVDYEYREEVHWATHQLRLGRGSFGEVHRMEDKQTGFQCAVKKVRLEVFRAEELMACAGLTSPRIVPLYGAVREGPWVNIFMELLEGKEPGPTLSPNSGPRVPPWVLPKLALVTDLSIVNLLTLLTLLSTACPVLLPLAGMEARASPMYSLAFGLLGGSLGQLVKEQGCLPEDRALYYLGQALEGLEYLHSRRILHGDVKADNVLLSSDGSHAALCDFGHAVCLQPDGLGKSLLTGDYIPGTETHMAPEVVLGRSCDAKVDVWSSCCMMLHMLNGCHPWTQFFRGPLCLKIASEPPPVREIPPSCAPLTAQAIQEGLRKEPIHRVSAAELGGKVNRALQQVGGLKSPWRGEYKEPRHPPPNQANYHQTLHAQPRELSPRAPGPRPAEETTGRAPKLQPPLPPEPPEPNKSPPLTLSKEESGMWEPLPLSSLEPAPARNPSSPERKATVPEQELQQLEIELFLNSLSQPFSLEEQEQILSCLSIDSLSLSDDSEKVSRLWPRSHGSRGVVF

SEQ ID NO: 856735 - protein, 744 aa, Homo sapiens
MAVMEMACPGAPGSAVGQQKELPKAKEKTPPLGKKQSSVYKLEAVEKSPVFCGKWEILNDVITKGTAKEGSEAGPAAISIIAQAECENSQEFSPTFSERIFIAGSKQYSQSESLDQIPNNVAHATEGKMARVCWKGKRRSKARKKRKKKSSKSLAHAGVALAKPLPRTPEQESCTIPVQEDESPLGAPYVRNTPQFTKPLKEPGLGQLCFKQLGEGLRPALPRSELHKLISPLQCLNHVWKLHHPQDGGPLPLPTHPFPYSRLPHPFPFHPLQPWKPHPLESFLGKLACVDSQKPLPDPHLSKLACVDSPKPLPGPHLEPSCLSRGAHEKFSVEEYLVHALQGSVSSGQAHSLTSLAKTWAARGSRSREPSPKTEDNEGVLLTEKLKPVDYEYREEVHWATHQLRLGRGSFGEVHRMEDKQTGFQCAVKKVRLEVFRAEELMACAGLTSPRIVPLYGAVREGPWVNIFMELLEGKEPGPTLSPNSGPRVPPWVLPKLALVTDLSIVNLLTLLTLLSTACPVLLPLAGMEARASPMYSLAFGLLGGSLGQLVKEQGCLPEDRALYYLGQALEGLEYLHSRRILHGDVKADNVLLSSDGSHAALCDFGHAVCLQPDGLGKSLLTGDYIPGTETHMAPEVVLGRSCDAKVDVWSSCCMMLHMLNGCHPWTQFFRGPLCLKIASEPPPVREIPPSCAPLTAQAIQEGLRKEPIHRVSAAELGGKVNRALQQGRKSPTLADPGGRRQRW

SEQ ID NO: 856736 - protein, 638 aa, Homo sapiens
MAVMEMACPGAPGSAVGQQKELPKAKEKTPPLGKKQSSVYKLEAVEKSPVFCGKWEILNDVITKGTAKEGSEAGPAAISIIAQAECENSQEFSPTFSERIFIAGSKQYSQSESLDQIPNNVAHATEGKMARVCWKGKRRSKARKKRKKKSSKSLAHAGVALAKPLPRTPEQESCTIPVQEDESPLGAPYVRNTPQFTKPLKEPGLGQLCFKQLGEGLRPALPRSELHKLISPLQCLNHVWKLHHPQDGGPLPLPTHPFPYSRLPHPFPFHPLQPWKPHPLESFLGKLACVDSQKPLPDPHLSKLACVDSPKPLPGPHLEPSCLSRGAHEKFSVEEYLVHALQGSVSSGQAHSLTSLAKTWAARGSRSREPSPKTEDNEGVLLTEKLKPVDYEYREEVHWATHQLRLGRGSFGEVHRMEDKQTGFQCAVKKVRLEVFRAEELMACAGLTSPRIVPLYGAVREGPWVNIFMELLEGKEPGPTLSPNSGPRVPPWVLPKLALVTDLSIVNLLTLLTLLSTACPVLLPLAGMEARASPMYSLAFGLLGGSLGQLVKEQGCLPEDRALYYLGQALEGLEYLHSRRILHGDVKADNVLLSSDGSHAALCDFGHAVCLQPDGLGKSLLTGKAPHQLPCPPMHSFA

SEQ ID NO: 856737 - protein, 438 aa, Homo sapiens
MAVMEMACPGAPGSAVGQQKELPKAKEKTPPLGKKQSSVYKLEAVEKSPVFCGKWEILNDVITKGTAKEGSEAGPAAISIIAQAECENSQEFSPTFSERIFIAGSKQYSQSESLDQIPNNVAHATEGKMARVCWKGKRRSKARKKRKKKSSKSLAHAGVALAKPLPRTPEQESCTIPVQEDESPLGAPYVRNTPQFTKPLKEPGLGQLCFKQLGEGLRPALPRSELHKLISPLQCLNHVWKLHHPQDGGPLPLPTHPFPYSRLPHPFPFHPLQPWKPHPLESFLGKLACVDSQKPLPDPHLSKLACVDSPKPLPGPHLEPSCLSRGAHEKFSVEEYLVHALQGSVSSGQAHSLTSLAKTWAARGSRSREPSPKTEDNEGVLLTEKLKPVDYEYREEVHWATHQLRLGRGSFGEVHRMEDKQTGFQCAVKKVRQGSGAE

SEQ ID NO: 856738 - protein, 109 aa, Homo sapiens
MAVMEMACPGAPGSAVGQQKELPKAKEKTPPLGKKQSSVYKLEAVEKSPVFCGKWEILNDVITKGTAKEGSEAGPAAISIIAQAECENSQEFSPTFSERIFIAGSKQYR

SEQ ID NO: 856739 - protein, 102 aa, Homo sapiens
MAVMEMACPGAPGSAVGQQKELPKAKEKTPPLGKKQSSVYKLEAVEKSPVFCGKWEILNDVITKGTAKEGSEAGPAAISIIAQAECRGLGLLWARGRWVGLQ

SEQ ID NO: 856740 - protein, 177 aa, Homo sapiens
MAVMEMACPGAPGSAVGQQKELPKAKEKTPPLGKKQSSVYKLEAVEKSPVFCGKWEILNDVITKGTAKEGSEAGPAAISIIAQAECENSQEFSPTFSERIFIAGSKQYSQSESLDQIPNNVAHATEGKMARVCWKGKRRSKARKKRKKKSSKSLGNIARSHVYKRVKNRNKKEISKV

SEQ ID NO: 856741 - protein, 1017 aa, Homo sapiens
MAVMEMACPGAPGSAVGQQKELPKAKEKTPPLGKKQSSVYKLEAVEKSPVFCGKWEILNDVITKGTAKEGSEAGPAAISIIAQAECENSQEFSPTFSERIFIAGSKQYSQSESLDQIPNNVAHATEGKMARVCWKGKRRSKARKKRKKKSSKSLAHAGVALAKPLPRTPEQESCTIPVQEDESPLGAPYVRNTPQFTKPLKEPGLGQLCFKQLGEGLRPALPRSELHKLISPLQCLNHVWKLHHPQDGGPLPLPTHPFPYSRLPHPFPFHPLQPWKPHPLESFLGKLACVDSQKPLPDPHLSKLACVDSPKPLPGPHLEPSCLSRGAHEKFSVEEYLVHALQGSVSSGQAHSLTSLAKTWAARGSRSREPSPKTEDNEGVLLTEKLKPVDYEYREEVHWATHQLRLGRGSFGEVHRMEDKQTGFQCAVKKVRLEVFRAEELMACAGLTSPRIVPLYGAVREGPWVNIFMELLEGKEPGPTLSPNSGPRVPPWVLPKLALVTDLSIVNLLTLLTLLSTACPVLLPLAGMEARASPMYSLAFGLLGGSLGQLVKEQGCLPEDRALYYLGQALEGLEYLHSRRILHGDVKADNVLLSSDGSHAALCDFGHAVCLQPDGLGKSLLTGDYIPGTETHMAPEVVLGRSCDAKVDVWSSCCMMLHMLNGCHPWTQFFRGPLCLKIASEPPPVREIPPSCAPLTAQAIQEGLRKEPIHRVSAAELGGKVNRALQQVGGLKSPWRGEYKEPRHPPPNQANYHQTLHAQPRELSPRAPGPRPAEETTGRAPKLQPPLPPEPPEPNKSPPLTLSKEESGMWEPLPLSSLEPAPARNPSSPERKATVPEQELQQLEIELFLNSLSQPFSLEEQEQILSCLSIDSLSLSDDSEKNPSKASQSSRDTLSSGVHSWSSQAEARSSSWNMVLARGRPTDTPSYFNGVKVQIQSLNGEHLHIREFHRVKVGDIATGISSQIPAAAFSLVTKDGQPVRYDMEVPDSGIDLQCTLAPDGSFAWSWRVKHGQLENRP

SEQ ID NO: 856742 - protein, 483 aa, Homo sapiens
MYSLAFGLLGGSLGQLVKEQGCLPEDRALYYLGQALEGLEYLHSRRILHGDVKADNVLLSSDGSHAALCDFGHAVCLQPDGLGKSLLTGDYIPGTETHMAPEVVLGRSCDAKVDVWSSCCMMLHMLNGCHPWTQFFRGPLCLKIASEPPPVREIPPSCAPLTAQAIQEGLRKEPIHRVSAAELGGKVNRALQQVGGLKSPWRGEYKEPRHPPPNQANYHQTLHAQPRELSPRAPGPRPAEETTGRAPKLQPPLPPEPPEPNKSPPLTLSKEESGMWEPLPLSSLEPAPARNPSSPERKATVPEQELQQLEIELFLNSLSQPFSLEEQEQILSCLSIDSLSLSDDSEKNPSKASQSSRDTLSSGVHSWSSQAEARSSSWNMVLARGRPTDTPSYFNGVKVQIQSLNGEHLHIREFHRVKVGDIATGISSQIPAAAFSLVTKDGQPVRYDMEVPDSGIDLQCTLAPDGSFAWSWRVKHGQLENRP

SEQ ID NO: 856743 - protein, 855 aa, Homo sapiens
CPWALALCADELCFPPQEDESPLGAPYVRNTPQFTKPLKEPGLGQLCFKQLGEGLRPALPRSELHKLISPLQCLNHVWKLHHPQDGGPLPLPTHPFPYSRLPHPFPFHPLQPWKPHPLESFLGKLACVDSQKPLPDPHLSKLACVDSPKPLPGPHLEPSCLSRGAHEKFSVEEYLVHALQGSVSSGQAHSLTSLAKTWAARGSRSREPSPKTEDNEGVLLTEKLKPVDYEYREEVHWATHQLRLGRGSFGEVHRMEDKQTGFQCAVKKVRLEVFRAEELMACAGLTSPRIVPLYGAVREGPWVNIFMELLEGKEPGPTLSPNSGPRVPPWVLPKLALVTDLSIVNLLTLLTLLSTACPVLLPLAGMEARASPMYSLAFGLLGGSLGQLVKEQGCLPEDRALYYLGQALEGLEYLHSRRILHGDVKADNVLLSSDGSHAALCDFGHAVCLQPDGLGKSLLTGDYIPGTETHMAPEVVLGRSCDAKVDVWSSCCMMLHMLNGCHPWTQFFRGPLCLKIASEPPPVREIPPSCAPLTAQAIQEGLRKEPIHRVSAAELGGKVNRALQQVGGLKSPWRGEYKEPRHPPPNQANYHQTLHAQPRELSPRAPGPRPAEETTGRAPKLQPPLPPEPPEPNKSPPLTLSKEESGMWEPLPLSSLEPAPARNPSSPERKATVPEQELQQLEIELFLNSLSQPFSLEEQEQILSCLSIDSLSLSDDSEKNPSKASQSSRDTLSSGVHSWSSQAEARSSSWNMVLARGRPTDTPSYFNGVKVQIQSLNGEHLHIREFHRVKVGDIATGISSQIPAAAFSLVTKDGQPVRYDMEVPDSGIDLQCTLAPDGSFAWSWRVKHGQLENRP

SEQ ID NO: 856744 - protein, 754 aa, Homo sapiens
RPSSLFLPSLHLLAPEFCFFIVKVIGSSVSVSPSQVWDVFHHKDQWPQPMNPSLCLHFIPLPPLWCCPAQIPAFAPGLPGCEGSAQQPWQGHQLESLPHCSPVSPLLPWPLKLSSLSCQPQKLKPVDYEYREEVHWATHQLRLGRGSFGEVHRMEDKQTGFQCAVKKVRLEVFRAEELMACAGLTSPRIVPLYGAVREGPWVNIFMELLEGKEPGPTLSPNSGPRVPPWVLPKLALVTDLSIVNLLTLLTLLSTACPVLLPLAGMEARASPMYSLAFGLLGGSLGQLVKEQGCLPEDRALYYLGQALEGLEYLHSRRILHGDVKADNVLLSSDGSHAALCDFGHAVCLQPDGLGKSLLTGDYIPGTETHMAPEVVLGRSCDAKVDVWSSCCMMLHMLNGCHPWTQFFRGPLCLKIASEPPPVREIPPSCAPLTAQAIQEGLRKEPIHRVSAAELGGKVNRALQQVGGLKSPWRGEYKEPRHPPPNQANYHQTLHAQPRELSPRAPGPRPAEETTGRAPKLQPPLPPEPPEPNKSPPLTLSKEESGMWEPLPLSSLEPAPARNPSSPERKATVPEQELQQLEIELFLNSLSQPFSLEEQEQILSCLSIDSLSLSDDSEKNPSKASQSSRDTLSSGVHSWSSQAEARSSSWNMVLARGRPTDTPSYFNGVKVQIQSLNGEHLHIREFHRVKVGDIATGISSQIPAAAFSLVTKDGQPVRYDMEVPDSGIDLQCTLAPDGSFAWSWRVKHGQLENRP

SEQ ID NO: 856745 - protein, 152 aa, Homo sapiens
ILEPRALSPYPILLFQNPSKASQSSRDTLSSGVHSWSSQAEARSSSWNMVLARGRPTDTPSYFNGVKVQIQSLNGEHLHIREFHRVKVGDIATGISSQIPAAAFSLVTKDGQPVRYDMEVPDSGIDLQCTLAPDGSFAWSWRVKHGQLENRP

SEQ ID NO: 856746 - protein, 104 aa, Homo sapiens
WGASSRSPDYHLVRLLGVKVQIQSLNGEHLHIREFHRVKVGDIATGISSQIPAAAFSLVTKDGQPVRYDMEVPDSGIDLQCTLAPDGSFAWSWRVKHGQLENRP

SEQ ID NO: 856747 - protein, 1017 aa, Homo sapiens; identical to SEQ ID NO: 856741

SEQ ID NO: 856748 - protein, 945 aa, Homo sapiens
MAVMEMACPGAPGSAVGQQKELPKAKEKTPPLGKKQSSVYKLEAVEKSPVFCGKWEILNDVITKGTAKEGSEAGPAAISIIAQAECENSQEFSPTFSERIFIAGSKQYSQSESLDQIPNNVAHATEGKMARVCWKGKRRSKARKKRKKKSSKSLAHAGVALAKPLPRTPEQESCTIPVQEDESPLGAPYVRNTPQFTKPLKEPGLGQLCFKQLGEGLRPALPRSELHKLISPLQCLNHVWKLHHPQDGGPLPLPTHPFPYSRLPHPFPFHPLQPWKPHPLESFLGKLACVDSQKPLPDPHLSKLACVDSPKPLPGPHLEPSCLSRGAHEKFSVEEYLVHALQGSVSSGQAHSLTSLAKTWAARGSRSREPSPKTEDNEGVLLTEKLKPVDYEYREEVHWATHQLRLGRGSFGEVHRMEDKQTGFQCAVKKVRLEVFRAEELMACAGLTSPRIVPLYGAVREGPWVNIFMELLEGKEPGPTLSPNSGPRVPPWVLPKLALVTDLSIVNLLTLLTLLSTACPVLLPLAGMEARASPMYSLAFGLLGGSLGQLVKEQGCLPEDRALYYLGQALEGLEYLHSRRILHGDVKADNVLLSSDGSHAALCDFGHAVCLQPDGLGKSLLTGDYIPGTETHMAPEVVLGRSCDAKVDVWSSCCMMLHMLNGCHPWTQFFRGPLCLKIASEPPPVREIPPSCAPLTAQAIQEGLRKEPIHRVSAAELGGKVNRALQQVGGLKSPWRGEYKEPRHPPPNQANYHQTLHAQPRELSPRAPGPRPAEETTGRAPKLQPPLPPEPPEPNKSPPLTLSKEESGMWEPLPLSSLEPAPARNPSSPERKATVPEQELQQLEIELFLNSLSQPFSLEEQEQILSCLSIDSLSLSDDSEKNPSKASQSSRDTLSSGVHSWSSQAEARSSSWNMVLARGRPTDTPSYFNGTVQFPPAQQSPWQLI

SEQ ID NO: 856749 - protein, 491 aa, Homo sapiens
MAVMEMACPGAPGSAVGQQKELPKAKEKTPPLGKKQSSVYKLEAVEKSPVFCGKWEILNDVITKGTAKEGSEAGPAAISIIAQAECENSQEFSPTFSERIFIAGSKQYSQSESLDQIPNNVAHATEGKMARVCWKGKRRSKARKKRKKKSSKSLAHAGVALAKPLPRTPEQESCTIPVQEDESPLGAPYVRNTPQFTKPLKEPGLGQLCFKQLGEGLRPALPRSELHKLISPLQCLNHVWKLHHPQDGGPLPLPTHPFPYSRLPHPFPFHPLQPWKPHPLESFLGKLACVDSQKPLPDPHLSKLACVDSPKPLPGPHLEPSCLSRGAHEKFSVEEYLVHALQGSVSSGQAHSLTSLAKTWAARGSRSREPSPKTEDNEGVLLTEKLKPVDYEYREEVHWATHQLRLGRGSFGEVHRMEDKQTGFQCAVKKVRLEVFRAEELMACAGLTSPRIVPLYGAVREGPWVNIFMELLEGKEPGPTLSPNSGPRVPP

SEQ ID NO: 856750 - protein, 693 aa, Homo sapiens
MAVMEMACPGAPGSAVGQQKELPKAKEKTPPLGKKQSSVYKLEAVEKSPVFCGKWEILNDVITKGTAKEGSEAGPAAISIIAQAECENSQEFSPTFSERIFIAGSKQYSQSESLDQIPNNVAHATEGKMARVCWKGKRRSKARKKRKKKSSKSLAHAGVALAKPLPRTPEQESCTIPVQEDESPLGAPYVRNTPQFTKPLKEPGLGQLCFKQLGEGLRPALPRSELHKLISPLQCLNHVWKLHHPQDGGPLPLPTHPFPYSRLPHPFPFHPLQPWKPHPLESFLGKLACVDSQKPLPDPHLSKLACVDSPKPLPGPHLEPSCLSRGAHEKFSVEEYLVHALQGSVSSGQAHSLTSLAKTWAARGSRSREPSPKTEDNEGVLLTEKLKPVDYEYREEVHWATHQLRLGRGSFGEVHRMEDKQTGFQCAVKKVRLEVFRAEELMACAGLTSPRIVPLYGAVREGPWVNIFMELLEGKEPGPTLSPNSGPRVPPWVLPKLALVTDLSIVNLLTLLTLLSTACPVLLPLAGMEARASPMYSLAFGLLGGSLGQLVKEQGCLPEDRALYYLGQALEGLEYLHSRRILHGDVKADNVLLSSDGSHAALCDFGHAVCLQPDGLGKSLLTGDYIPGTETHMAPEVVLGRSCDAKVDVWSSCCMMLHMLNGCHPWTQFFRGPLCLKVGDGTQHGQQGELQGP

SEQ ID NO: 856751 - protein, 400 aa, Homo sapiens
MAVMEMACPGAPGSAVGQQKELPKAKEKTPPLGKKQSSVYKLEAVEKSPVFCGKWEILNDVITKGTAKEGSEAGPAAISIIAQAECENSQEFSPTFSERIFIAGSKQYSQSESLDQIPNNVAHATEGKMARVCWKGKRRSKARKKRKKKSSKSLAHAGVALAKPLPRTPEQESCTIPVQEDESPLGAPYVRNTPQFTKPLKEPGLGQLCFKQLGEGLRPALPRSELHKLISPLQCLNHVWKLHHPQDGGPLPLPTHPFPYSRLPHPFPFHPLQPWKPHPLESFLGKLACVDSQKPLPDPHLSKLACVDSPKPLPGPHLEPSCLSRGAHEKFSVEEYLVHALQGSVSSGQAHSLTSLAKTWAARGSRSREPSPKTEDNEGVLLTEVTNPPAPVYVPLPATW

SEQ ID NO: 856752 - protein, 194 aa, Homo sapiens
MAVMEMACPGAPGSAVGQQKELPKAKEKTPPLGKKQSSVYKLEAVEKSPVFCGKWEILNDVITKGTAKEGSEAGPAAISIIAQAECENSQEFSPTFSERIFIAGSKQYSQSESLDQIPNNVAHATEGKMARVCWKGKRRSKARKKRKKKSSKSLAHAGVALAKPLPRTPEQESCTIPVQVRPSTHCPDPRFMGP

SEQ ID NO: 856753 - protein, 134 aa, Homo sapiens
RERALCGTGNRPLWRGGASRARRGGDPAKDNKSSLIKMSSAPEPPTFKKEPPKEKEFQSPGLRGVRTTTLFRAVNPELFIKPNKPVMAFGLVTLSLCVAYIGYLHAIQENKKDLYEAIDSEGHSYMRRKTSKWD

SEQ ID NO: 856754 - protein, 134 aa, Homo sapiens; identical to SEQ ID NO: 856753

SEQ ID NO: 856755 - protein, 99 aa, Homo sapiens
SPAPLPTSRSSLRFRSRLPLSSAPVTPTLPHLSRPSPPPPRYPTPPRLVPCTHASHTRPIRSLAPSGIPRGKSTIFVPTRRFPVLSPRQRGFFPHPPAP

SEQ ID NO: 856756 - protein, 134 aa, Homo sapiens; identical to SEQ ID NO: 856753

SEQ ID NO: 856757 - protein, 134 aa, Homo sapiens; identical to SEQ ID NO: 856753

SEQ ID NO: 856758 - protein, 134 aa, Homo sapiens; identical to SEQ ID NO: 856753

SEQ ID NO: 856759 - protein, 134 aa, Homo sapiens; identical to SEQ ID NO: 856753

SEQ ID NO: 856760 - protein, 212 aa, Homo sapiens
LSAILTSSSLSSPFPSSATGYRLPTTPPPHPPPALAAPHCPATTPILVPHRNCTRLNPHNVFARHGIPPVASQTFLPKSPPMLYARRAGLCTTVRTNRHYFLITTGPDNKSSLIKMSSAPEPPTFKKEPPKEKEFQSPGLRGVRTTTLFRAVNPELFIKPNKPVMAFGLVTLSLCVAYIGYLHAIQENKKDLYEAIDSEGHSYMRRKTSKWD

SEQ ID NO: 856761 - protein, 113 aa, Homo sapiens
RERALCGTGNRPLWRGGASRARRGGDPAKDNKSSLIKMSSAPEPPTFKKEPPKEKEFQSPGLRGVRTTTLFRAVNPELFIKPNVSYSLKHQHFEVSFMEVGTEMGVKMSVNKA

SEQ ID NO: 856762 - protein, 1675 aa, Homo sapiens
TAAAAAGGAIAAAVAATGRGAAVGDRGRGCRRRSGWKKLDSMGSKRRRATSPSSSVSGDFDDGHHSVSTPGPSRKRRRLSNLPTVDPIAVCHELYNTIRDYKDEQGRLLCELFIRAPKRRNQPDYYEVVSQPIDLMKIQQKLKMEEYDDVNLLTADFQLLFNNAKSYYKPDSPEYKAACKLWDLYLRTRNEFVQKGEADDEDDDEDGQDNQGTVTEGSSPAYLKEILEQLLEAIVVATNPSGRLISELFQKLPSKVQYPDYYAIIKEPIDLKTIAQRIQNGSYKSIHAMAKDIDLLAKNAKTYNEPGSQVFKDANSIKKIFYMKKAEIEHHEMAKSSLRMRTPSNLAAARLTGPSHSKGSLGEERNPTSKYYRNKRAVQGGRLSAITMALQYGSESEEDAALAAARYEEGESEAESITSFMDVSNPFYQLYDTVRSCRNNQGQLIAEPFYHLPSKKKYPDYYQQIKMPISLQQIRTKLKNQEYETLDHLECDLNLMFENAKRYNVPNSAIYKRVLKLQQVMQAKKKELARRDDIEDGDSMISSATSDTGSAKRKSKKNIRKQRMKILFNVVLEAREPGSGRRLCDLFMVKPSKKDYPDYYKIILEPMDLKIIEHNIRNDKYAGEEGMIEDMKLMFRNARHYNEEGSQVYNDAHILEKLLKEKRKELGPLPDDDDMASPKLKLSRKSGISPKKSKYMTPMQQKLNEVYEAVKNYTDKRGRRLSAIFLRLPSRSELPDYYLTIKKPMDMEKIRSHMMANKYQDIDSMVEDFVMMFNNACTYNEPESLIYKDALVLHKVLLETRRDLEGDEDSHVPNVTLLIQELIHNLFVSVMSHQDDEGRCYSDSLAEIPAVDPNFPNKPPLTFDIIRKNVENNRYRRLDLFQEHMFEVLERARRMNRTDSEIYEDAVELQQFFIKIRDELCKNGEILLSPALSYTTKHLHNDVEKERKEKLPKEIEEDKLKREEEKREAEKSEDSSGAAGLSGLHRTYSQDCSFKNSMYHVGDYVYVEPAEANLQPHIVCIERLWEDSAGEKWLYGCWFYRPNETFHLATRKFLEKEVFKSDYYNKVPVSKILGKCVVMFVKEYFKLCPENFRDEDVFVCESRYSAKTKSFKKIKLWTMPISSVRFVPRDVPLPVVRVASVFANADKGDDEKNTDNSEDSRAEDNFNLEKEKEDVPVEMSNGEPGCHYFEQLHYNDMWLKVGDCVFIKSHGLVRPRVGRIEKVWVRDGAAYFYGPIFIHPEETEHEPTKMFYKKEVFLSNLEETCPMTCILGKCAVLSFKDFLSCRPTEIPENDILLCESRYNESDKQMKKFKGLKRFSLSAKVVDDEIYYFRKPIVPQKEPSPLLEKKIQLLEAKFAELEGGDDDIEEMGEEDSEVIEPPSLPQLQTPLASELDLMPYTPPQSTPKSAKGSAKKEGSKRKINMSGYILFSSEMRAVIKAQHPDYSFGELSRLVGTEWRNLETAKKAEYEGMMGGYPPGLPPLQGPVDGLVSMGSMQPLHPGGPPPHHLPPGVPGLPGIPPPGVMNQGVAPMVGTPAPGGSPYGQQVGVLGPPGQQAPPPYPGPHPAGPPVIQQPTTPMFVAPPPKTQRLLHSEAYLKYIEGLSAESNSISKWDQTLAARRRDVHLSKEQESRLPSHWLKSKGAHTTMADALWRLRDLMLRDTLNIRQAYNLENV

SEQ ID NO: 856763 - protein, 1604 aa, Homo sapiens
TAAAAAGGAIAAAVAATGRGAAVGDRGRGCRRRSGWKKLDSMGSKRRRATSPSSSVSGDFDDGHHSVSTPGPSRKRRRLSNLPTVDPIAVCHELYNTIRDYKDEQGRLLCELFIRAPKRRNQPDYYEVVSQPIDLMKIQQKLKMEEYDDVNLLTADFQLLFNNAKSYYKPDSPEYKAACKLWDLYLRTRNEFVQKGEADDEDDDEDGQDNQGTVTEGSSPAYLKEILEQLLEAIVVATNPSGRLISELFQKLPSKVQYPDYYAIIKEPIDLKTIAQRIQNGSYKSIHAMAKDIDLLAKNAKTYNEPGSQVFKDANSIKKIFYMKKAEIEHHEMAKSSLRMRTPSNLAAARLTGPSHSKGSLGEERNPTSKYYRNKRAVQGGRLSAITMALQYGSESEEDAALAAARYEEGESEAESITSFMDVSNPFYQLYDTVRSCRNNQGQLIAEPFYHLPSKKKYPDYYQQIKMPISLQQIRTKLKNQEYETLDHLECDLNLMFENAKRYNVPNSAIYKRVLKLQQVMQAKKKELARRDDIEDGDSMISSATSDTGSAKRKSKKNIRKQRMKILFNVVLEAREPGSGRRLCDLFMVKPSKKDYPDYYKIILEPMDLKIIEHNIRNDKYAGEEGMIEDMKLMFRNARHYNEEGSQVYNDAHILEKLLKEKRKELGPLPDDDDMASPKLKLSRKSGISPKKSKYMTPMQQKLNEVYEAVKNYTDKRGRRLSAIFLRLPSRSELPDYYLTIKKPMDMEKIRSHMMANKYQDIDSMVEDFVMMFNNACTYNEPESLIYKDALVLHKVLLETRRDLEGDEDSHVPNVTLLIQELIHNLFVSVMSHQDDEGRCYSDSLAEIPAVDPNFPNKPPLTFDIIRKNVENNRYRRLDLFQEHMFEVLERARRMNRAEKSEDSSGAAGLSGLHRTYSQDCSFKNSMYHVGDYVYVEPAEANLQPHIVCIERLWEDSAGEKWLYGCWFYRPNETFHLATRKFLEKEVFKSDYYNKVPVSKILGKCVVMFVKEYFKLCPENFRDEDVFVCESRYSAKTKSFKKIKLWTMPISSVRFVPRDVPLPVVRVASVFANADKGDDEKNTDNSEDSRAEDNFNLEKEKEDVPVEMSNGEPGCHYFEQLHYNDMWLKVGDCVFIKSHGLVRPRVGRIEKVWVRDGAAYFYGPIFIHPEETEHEPTKMFYKKEVFLSNLEETCPMTCILGKCAVLSFKDFLSCRPTEIPENDILLCESRYNESDKQMKKFKGLKRFSLSAKVVDDEIYYFRKPIVPQKEPSPLLEKKIQLLEAKFAELEGGDDDIEEMGEEDSEVIEPPSLPQLQTPLASELDLMPYTPPQSTPKSAKGSAKKEGSKRKINMSGYILFSSEMRAVIKAQHPDYSFGELSRLVGTEWRNLETAKKAEYEGMMGGYPPGLPPLQGPVDGLVSMGSMQPLHPGGPPPHHLPPGVPGLPGIPPPGVMNQGVAPMVGTPAPGGSPYGQQVGVLGPPGQQAPPPYPGPHPAGPPVIQQPTTPMFVAPPPKTQRLLHSEAYLKYIEGLSAESNSISKWDQTLAARRRDVHLSKEQESRLPSHWLKSKGAHTTMADALWRLRDLMLRDTLNIRQAYNLENV

SEQ ID NO: 856764 - protein, 1634 aa, Homo sapiens
MGSKRRRATSPSSSVSGDFDDGHHSVSTPGPSRKRRRLSNLPTVDPIAVCHELYNTIRDYKDEQGRLLCELFIRAPKRRNQPDYYEVVSQPIDLMKIQQKLKMEEYDDVNLLTADFQLLFNNAKSYYKPDSPEYKAACKLWDLYLRTRNEFVQKGEADDEDDDEDGQDNQGTVTEGSSPAYLKEILEQLLEAIVVATNPSGRLISELFQKLPSKVQYPDYYAIIKEPIDLKTIAQRIQNGSYKSIHAMAKDIDLLAKNAKTYNEPGSQVFKDANSIKKIFYMKKAEIEHHEMAKSSLRMRTPSNLAAARLTGPSHSKGSLGEERNPTSKYYRNKRAVQGGRLSAITMALQYGSESEEDAALAAARYEEGESEAESITSFMDVSNPFYQLYDTVRSCRNNQGQLIAEPFYHLPSKKKYPDYYQQIKMPISLQQIRTKLKNQEYETLDHLECDLNLMFENAKRYNVPNSAIYKRVLKLQQVMQAKKKELARRDDIEDGDSMISSATSDTGSAKRKSKKNIRKQRMKILFNVVLEAREPGSGRRLCDLFMVKPSKKDYPDYYKIILEPMDLKIIEHNIRNDKYAGEEGMIEDMKLMFRNARHYNEEGSQVYNDAHILEKLLKEKRKELGPLPDDDDMASPKLKLSRKSGISPKKSKYMTPMQQKLNEVYEAVKNYTDKRGRRLSAIFLRLPSRSELPDYYLTIKKPMDMEKIRSHMMANKYQDIDSMVEDFVMMFNNACTYNEPESLIYKDALVLHKVLLETRRDLEGDEDSHVPNVTLLIQELIHNLFVSVMSHQDDEGRCYSDSLAEIPAVDPNFPNKPPLTFDIIRKNVENNRYRRLDLFQEHMFEVLERARRMNRTDSEIYEDAVELQQFFIKIRDELCKNGEILLSPALSYTTKHLHNDVEKERKEKLPKEIEEDKLKREEEKREAEKSEDSSGAAGLSGLHRTYSQDCSFKNSMYHVGDYVYVEPAEANLQPHIVCIERLWEDSAGEKWLYGCWFYRPNETFHLATRKFLEKEVFKSDYYNKVPVSKILGKCVVMFVKEYFKLCPENFRDEDVFVCESRYSAKTKSFKKIKLWTMPISSVRFVPRDVPLPVVRVASVFANADKGDDEKNTDNSEDSRAEDNFNLEKEKEDVPVEMSNGEPGCHYFEQLHYNDMWLKVGDCVFIKSHGLVRPRVGRIEKVWVRDGAAYFYGPIFIHPEETEHEPTKMFYKKEVFLSNLEETCPMTCILGKCAVLSFKDFLSCRPTEIPENDILLCESRYNESDKQMKKFKGLKRFSLSAKVVDDEIYYFRKPIVPQKEPSPLLEKKIQLLEAKFAELEGGDDDIEEMGEEDSEVIEPPSLPQLQTPLASELDLMPYTPPQSTPKSAKGSAKKEGSKRKINMSGYILFSSEMRAVIKAQHPDYSFGELSRLVGTEWRNLETAKKAEYEGMMGGYPPGLPPLQGPVDGLVSMGSMQPLHPGGPPPHHLPPGVPGLPGIPPPGVMNQGVAPMVGTPAPGGSPYGQQVGVLGPPGQQAPPPYPGPHPAGPPVIQQPTTPMFVAPPPKTQRLLHSEAYLKYIEGLSAESNSISKWDQTLAARRRDVHLSKEQESRLPSHWLKSKGAHTTMADALWRLRDLMLRDTLNIRQAYNLENV

SEQ ID NO: 856765 - protein, 1634 aa, Homo sapiens; identical to SEQ ID NO: 856764

SEQ ID NO: 856766 - protein, 1675 aa, Homo sapiens; identical to SEQ ID NO: 856762

SEQ ID NO: 856767 - protein, 1650 aa, Homo sapiens
TAAAAAGGAIAAAVAATGRGAAVGDRGRGCRRRSGWKKLDSMGSKRRRATSPSSSVSGDFDDGHHSVSTPGPSRKRRRLSNLPTVDPIAVCHELYNTIRDYKDEQGRLLCELFIRAPKRRNQPDYYEVVSQPIDLMKIQQKLKMEEYDDVNLLTADFQLLFNNAKSYYKPDSPEYKAACKLWDLYLRTRNEFVQKGEADDEDDDEDGQDNQGTVTEGSSPAYLKEILEQLLEAIVVATNPSGRLISELFQKLPSKVQYPDYYAIIKEPIDLKTIAQRIQNGSYKSIHAMAKDIDLLAKNAKTYNEPGSQVFKDANSIKKIFYMKKAEIEHHEMAKSSLRMRTPSNLAAARLTGPSHSKGSLGEERNPTSKYYRNKRAVQGGRLSAITMALQYGSESEEDAALAAARYEEGESEAESITSFMDVSNPFYQLYDTVRSCRNNQGQLIAEPFYHLPSKKKYPDYYQQIKMPISLQQIRTKLKNQEYETLDHLECDLNLMFENAKRYNVPNSAIYKRVLKLQQVMQAKKKELARRDDIEDGDSMISSATSDTGSAKRKSKKNIRKQRMKILFNVVLEAREPGSGRRLCDLFMVKPSKKDYPDYYKIILEPMDLKIIEHNIRNDKYAGEEGMIEDMKLMFRNARHYNEEGSQVYNDAHILEKLLKEKRKELGPLPDDDDMASPKLKLSRKSGISPKKSKYMTPMQQKLNEVYEAVKNYTDKRGRRLSAIFLRLPSRSELPDYYLTIKKPMDMEKIRSHMMANKYQDIDSMVEDFVMMFNNACTYNEPESLIYKDALVLHKVLLETRRDLEGDEDSHVPNVTLLIQELIHNLFVSVMSHQDDEGRCYSDSLAEIPAVDPNFPNKPPLTFDIIRKNVENNRYRRLDLFQEHMFEVLERARRMNRTDSEIYEDAVELQQFFIKIRDELCKNGEILLSPALSYTTKHLHNDVEKERKEKLPKEIEEDKLKREEEKREAEKSEDSSGAAGLSGLHRTYSQDCSFKNSMYHVGDYVYVEPAEANLQPHIVCIERLWEDSAEKEVFKSDYYNKVPVSKILGKCVVMFVKEYFKLCPENFRDEDVFVCESRYSAKTKSFKKIKLWTMPISSVRFVPRDVPLPVVRVASVFANADKGDDEKNTDNSEDSRAEDNFNLEKEKEDVPVEMSNGEPGCHYFEQLHYNDMWLKVGDCVFIKSHGLVRPRVGRIEKVWVRDGAAYFYGPIFIHPEETEHEPTKMFYKKEVFLSNLEETCPMTCILGKCAVLSFKDFLSCRPTEIPENDILLCESRYNESDKQMKKFKGLKRFSLSAKVVDDEIYYFRKPIVPQKEPSPLLEKKIQLLEAKFAELEGGDDDIEEMGEEDSEVIEPPSLPQLQTPLASELDLMPYTPPQSTPKSAKGSAKKEGSKRKINMSGYILFSSEMRAVIKAQHPDYSFGELSRLVGTEWRNLETAKKAEYEGMMGGYPPGLPPLQGPVDGLVSMGSMQPLHPGGPPPHHLPPGVPGLPGIPPPGVMNQGVAPMVGTPAPGGSPYGQQVGVLGPPGQQAPPPYPGPHPAGPPVIQQPTTPMFVAPPPKTQRLLHSEAYLKYIEGLSAESNSISKWDQTLAARRRDVHLSKEQESRLPSHWLKSKGAHTTMADALWRLRDLMLRDTLNIRQAYNLENV

SEQ ID NO: 856768 - protein, 1644 aa, Homo sapiens
TAAAAAGGAIAAAVAATGRGAAVGDRGRGCRRRSGWKKLDSMGSKRRRATSPSSSVSGDFDDGHHSVSTPGPSRKRRRLSNLPTVDPIAVCHELYNTIRDYKDEQGRLLCELFIRAPKRRNQPDYYEVVSQPIDLMKIQQKLKMEEYDDVNLLTADFQLLFNNAKSYYKPDSPEYKAACKLWDLYLRTRNEFVQKGEADDEDDDEDGQDNQGTVTEGSSPAYLKEILEQLLEAIVVATNPSGRLISELFQKLPSKVQYPDYYAIIKEPIDLKTIAQRIQNGSYKSIHAMAKDIDLLAKNAKTYNEPGSQVFKDANSIKKIFYMKKAEIEHHEMAKSSLRMRTPSNLAAARLTGPSHSKGSLGEERNPTSKYYPARYEEGESEAESITSFMDVSNPFYQLYDTVRSCRNNQGQLIAEPFYHLPSKKKYPDYYQQIKMPISLQQIRTKLKNQEYETLDHLECDLNLMFENAKRYNVPNSAIYKRVLKLQQVMQAKKKELARRDDIEDGDSMISSATSDTGSAKRKSKKNIRKQRMKILFNVVLEAREPGSGRRLCDLFMVKPSKKDYPDYYKIILEPMDLKIIEHNIRNDKYAGEEGMIEDMKLMFRNARHYNEEGSQVYNDAHILEKLLKEKRKELGPLPDDDDMASPKLKLSRKSGISPKKSKYMTPMQQKLNEVYEAVKNYTDKRGRRLSAIFLRLPSRSELPDYYLTIKKPMDMEKIRSHMMANKYQDIDSMVEDFVMMFNNACTYNEPESLIYKDALVLHKVLLETRRDLEGDEDSHVPNVTLLIQELIHNLFVSVMSHQDDEGRCYSDSLAEIPAVDPNFPNKPPLTFDIIRKNVENNRYRRLDLFQEHMFEVLERARRMNRTDSEIYEDAVELQQFFIKIRDELCKNGEILLSPALSYTTKHLHNDVEKERKEKLPKEIEEDKLKREEEKREAEKSEDSSGAAGLSGLHRTYSQDCSFKNSMYHVGDYVYVEPAEANLQPHIVCIERLWEDSAGEKWLYGCWFYRPNETFHLATRKFLEKEVFKSDYYNKVPVSKILGKCVVMFVKEYFKLCPENFRDEDVFVCESRYSAKTKSFKKIKLWTMPISSVRFVPRDVPLPVVRVASVFANADKGDDEKNTDNSEDSRAEDNFNLEKEKEDVPVEMSNGEPGCHYFEQLHYNDMWLKVGDCVFIKSHGLVRPRVGRIEKVWVRDGAAYFYGPIFIHPEETEHEPTKMFYKKEVFLSNLEETCPMTCILGKCAVLSFKDFLSCRPTEIPENDILLCESRYNESDKQMKKFKGLKRFSLSAKVVDDEIYYFRKPIVPQKEPSPLLEKKIQLLEAKFAELEGGDDDIEEMGEEDSEVIEPPSLPQLQTPLASELDLMPYTPPQSTPKSAKGSAKKEGSKRKINMSGYILFSSEMRAVIKAQHPDYSFGELSRLVGTEWRNLETAKKAEYEGMMGGYPPGLPPLQGPVDGLVSMGSMQPLHPGGPPPHHLPPGVPGLPGIPPPGVMNQGVAPMVGTPAPGGSPYGQQVGVLGPPGQQAPPPYPGPHPAGPPVIQQPTTPMFVAPPPKTQRLLHSEAYLKYIEGLSAESNSISKWDQTLAARRRDVHLSKEQESRLPSHWLKSKGAHTTMADALWRLRDLMLRDTLNIRQAYNLENV

SEQ ID NO: 856769 - protein, 1623 aa, Homo sapiens
TAAAAAGGAIAAAVAATGRGAAVGDRGRGCRRRSGWKKLDSMGSKRRRATSPSSSVSGDFDDGHHSVSTPGPSRKRRRLSNLPTVDPIAVCHELYNTIRDYKDEQGRLLCELFIRAPKRRNQPDYYEVVSQPIDLMKIQQKLKMEEYDDVNLLTADFQLLFNNAKSYYKPDSPEYKAACKLWDLYLRTRNEFVQKGEADDEDDDEDGQDNQGTVTEGSSPAYLKEILEQLLEAIVVATNPSGRLISELFQKLPSKVQYPDYYAIIKEPIDLKTIAQRIQNGSYKSIHAMAKDIDLLAKNAKTYNEPGSQVFKDANSIKKIFYMKKAEIEHHEMAKSSLRMRTPSNLAAARLTGPSHSKGSLGEERNPTSKYYRNKRAVQGGRLSAITMALQYGSESEEDAALAAARYEEGESEAESITSFMDVSNPFYQLYDTVRSCRNNQGQLIAEPFYHLPSKKKYPDYYQQIKMPISLQQIRTKLKNQEYETLDHLECDLNLMFENAKRYNVPNSAIYKRVLKLQQVMQAKKKELARRDDIEDGDSMISSATSDTGSAKRKSKKNIRKQRMKILFNVVLEAREPGSGRRLCDLFMVKPSKKDYPDYYKIILEPMDLKIIEHNIRNDKYAGEEGMIEDMKLMFRNARHYNEEGSQVYNDAHILEKLLKEKRKELGPLPDDDDMASPKLKLSRKSGISPKKSKYMTPMQQKLNEVYEAVKNYTDKRGRRLSAIFLRLPSRSELPDYYLTIKKPMDMEKIRSHMMANKYQDIDSMVEDFVMMFNNACTYNEPESLIYKDALVLHKVLLETRRDLEGDEDSHVPNVTLLIQELIHNLFVSVMSHQDDEGRCYSDSLAEIPAVDPNFPNKPPLTFDIIRKNVENNRYRRLDLFQEHMFEVLERARRMNRTDSEIYEDAVELQQFFIKIRDELCKNGEILLSPALSYTTKHLHNDVEKERKEKLPKEIEEDKLKREEEKREAEKSEDSSGAAGLSGLHRTYSQDCSFKNSMYHVGDYVYVEPAEANLQPHIVCIERLWEDSAGEKWLYGCWFYRPNETFHLATRKFLEKEVFKSDYYNKVPVSKILGKCVVMFVKEYFKLCPENFRDEDVFVCESRYSAKTKSFKKIKLWTMPISSVRFVPRDVPLPVVRVASVFANADKGDDEKNTDNSEDSRAEDNFNLEKEKEDVPVEMSNGEPGCHYFEQLHYNDMWLKVGDCVFIKSHGLVRPRVGRIEKVWVRDGAAYFYGPIFIHPEETEHEPTKMFYKKEVFLSNLEETCPMTCILGKCAVLSFKDFLSCRPTEIPENDILLCESRYNESDKQMKKFKGLKRFSLSAKVVDDEIYYFRKPIVPQKEPSPLLEKKIQLLEAKFAELEGGDDDIEEMGEEDSEVIEPPSLPQLQTPLASELDLMPYTPPQSTPKSAKGSAKKEGSKRKINMSGYILFSSEMRAVIKAQHPDYSFGELSRLVGTEWRNLETAKKAEYEGVMNQGVAPMVGTPAPGGSPYGQQVGVLGPPGQQAPPPYPGPHPAGPPVIQQPTTPMFVAPPPKTQRLLHSEAYLKYIEGLSAESNSISKWDQTLAARRRDVHLSKEQESRLPSHWLKSKGAHTTMADALWRLRDLMLRDTLNIRQAYNLENV

SEQ ID NO: 856770 - protein, 983 aa, Homo sapiens
RPLQHQNGQKLNEVYEAVKNYTDKRGRRLSAIFLRLPSRSELPDYYLTIKKPMDMEKIRSHMMANKYQDIDSMVEDFVMMFNNACTYNEPESLIYKDALVLHKVLLETRRDLEGDEDSHVPNVTLLIQELIHNLFVSVMSHQDDEGRCYSDSLAEIPAVDPNFPNKPPLTFDIIRKNVENNRYRRLDLFQEHMFEVLERARRMNRTDSEIYEDAVELQQFFIKIRDELCKNGEILLSPALSYTTKHLHNDVEKERKEKLPKEIEEDKLKREEEKREAEKSEDSSGAAGLSGLHRTYSQDCSFKNSMYHVGDYVYVEPAEANLQPHIVCIERLWEDSAGEKWLYGCWFYRPNETFHLATRKFLEKEVFKSDYYNKVPVSKILGKCVVMFVKEYFKLCPENFRDEDVFVCESRYSAKTKSFKKIKLWTMPISSVRFVPRDVPLPVVRVASVFANADKGDDEKNTDNSEDSRAEDNFNLEKEKEDVPVEMSNGEPGCHYFEQLHYNDMWLKVGDCVFIKSHGLVRPRVGRIEKVWVRDGAAYFYGPIFIHPEETEHEPTKMFYKKEVFLSNLEETCPMTCILGKCAVLSFKDFLSCRPTEIPENDILLCESRYNESDKQMKKFKGLKRFSLSAKVVDDEIYYFRKPIVPQKEPSPLLEKKIQLLEAKFAELEGGDDDIEEMGEEDSEVIEPPSLPQLQTPLASELDLMPYTPPQSTPKSAKGSAKKEGSKRKINMSGYILFSSEMRAVIKAQHPDYSFGELSRLVGTEWRNLETAKKAEYEGMMGGYPPGLPPLQGPVDGLVSMGSMQPLHPGGPPPHHLPPGVPGLPGIPPPGVMNQGVAPMVGTPAPGGSPYGQQVGVLGPPGQQAPPPYPGPHPAGPPVIQQPTTPMFVAPPPKTQRLLHSEAYLKYIEGLSAESNSISKWDQTLAARRRDVHLSKEQESRLPSHWLKSKGAHTTMADALWRLRDLMLRDTLNIRQAYNLENV

SEQ ID NO: 856771 - protein, 1551 aa, Homo sapiens
TAAAAAGGAIAAAVAATGRGAAVGDRGRGCRRRSGWKKLDSMGSKRRRATSPSSSVSGDFDDGHHSVSTPGPSRKRRRLSNLPTVDPIAVCHELYNTIRDYKDEQGRLLCELFIRAPKRRNQPDYYEVVSQPIDLMKIQQKLKMEEYDDVNLLTADFQLLFNNAKSYYKPDSPEYKAACKLWDLYLRTRNEFVQKGEADDEDDDEDGQDNQGTVTEGSSPAYLKEILEQLLEAIVVATNPSGRLISELFQKLPSKVQYPDYYAIIKEPIDLKTIAQRIQNGSYKSIHAMAKDIDLLAKNAKTYNEPGSQVFKDANSIKKIFYMKKAEIEHHEMAKSSLRMRTPSNLAAARLTGPSHSKGSLGEERNPTSKYYRNKRAVQGGRLSAITMALQYGSESEEDAALAAARYEEGESEAESITSFMDVSNPFYQLYDTVRSCRNNQGQLIAEPFYHLPSKKKYPDYYQQIKMPISLQQIRTKLKNQEYETLDHLECDLNLMFENAKRYNVPNSAIYKRVLKLQQVMQAKKKELARRDDIEDGDSMISSATSDTGSAKRKSKKNIRKQRMKILFNVVLEAREPGSGRRLCDLFMVKPSKKDYPDYYKIILEPMDLKIIEHNIRNDKYAGEEGMIEDMKLMFRNARHYNEEGSQVYNDAHILEKLLKEKRKELGPLPDDDDMASPKLKLSRKSGISPKKSKYMTPMQQKLNEVYEAVKNYTDKRGRRLSAIFLRLPSRSELPDYYLTIKKPMDMEKIRSHMMANKYQDIDSMVEDFVMMFNNACTYNEPESLIYKDALVLHKVLLETRRDLEGDEDSHVPNVTLLIQELIHNLFVSVMSHQDDEGRCYSDSLAEIPAVDPNFPNKPPLTFDIIRKNVENNRYRRLDLFQEHMFEVLERARRMNRTDSEIYEDAVELQQFFIKIRDELCKNGEILLSPALSYTTKHLHNDVEKERKEKLPKEIEEDKLKREEEKREAEKSEDSSGAAGLSGLHRTYSQDCSFKNSMYHVGDYVYVEPAEANLQPHIVCIERLWEDSAGEKWLYGCWFYRPNETFHLATRKFLEKEVFKSDYYNKVPVSKILGKCVVMFVKEYFKLCPENFRDEDVFVCESRYSAKTKSFKKIKLWTMPISSVRFVPRDVPLPVVRVASVFANADKGDDEKNTDNSEDSRAEDNFNLEKEKEDVPVEMSNGEPGCHYFEQLHYNDMWLKVGDCVFIKSHGLVRPRVGRIEKVWVRDGAAYFYGPIFIHPEETEHEPTKMFYKKEVFLSNLEETCPMTCILGKCAVLSFKDFLSCRPTEIPENDILLCESRYNESDKQMKKFKGLKRFSLSAKVVDDEIYYFRKPIVPQKEPSPLLEKKIQLLEAKFAELEGGDDDIEEMGEEDSEVIEPPSLPQLQTPLASELDLMPYTPPQSTPKSAKGSAKKEGSKRKINMSGYILFSSEMRAVIKAQHPDYSFGELSRLVGTEWRNLETAKKAEYEGMMGGYPPGLPPLQGPVDGLVSMGSMQPLHPGGPPPHHLPPGVPGLPGIPPPGVMNQGVAPMVGTPAPGGSPYGQQVSLPV

SEQ ID NO: 856772 - protein, 1530 aa, Homo sapiens
TAAAAAGGAIAAAVAATGRGAAVGDRGRGCRRRSGWKKLDSMGSKRRRATSPSSSVSGDFDDGHHSVSTPGPSRKRRRLSNLPTVDPIAVCHELYNTIRDYKDEQGRLLCELFIRAPKRRNQPDYYEVVSQPIDLMKIQQKLKMEEYDDVNLLTADFQLLFNNAKSYYKPDSPEYKAACKLWDLYLRTRNEFVQKGEADDEDDDEDGQDNQGTVTEGSSPAYLKEILEQLLEAIVVATNPSGRLISELFQKLPSKVQYPDYYAIIKEPIDLKTIAQRIQNGSYKSIHAMAKDIDLLAKNAKTYNEPGSQVFKDANSIKKIFYMKKAEIEHHEMAKSSLRMRTPSNLAAARLTGPSHSKGSLGEERNPTSKYYRNKRAVQGGRLSAITMALQYGSESEEDAALAAARYEEGESEAESITSFMDVSNPFYQLYDTVRSCRNNQGQLIAEPFYHLPSKKKYPDYYQQIKMPISLQQIRTKLKNQEYETLDHLECDLNLMFENAKRYNVPNSAIYKRVLKLQQVMQAKKKELARRDDIEDGDSMISSATSDTGSAKRKSKKNIRKQRMKILFNVVLEAREPGSGRRLCDLFMVKPSKKDYPDYYKIILEPMDLKIIEHNIRNDKYAGEEGMIEDMKLMFRNARHYNEEGSQVYNDAHILEKLLKEKRKELGPLPDDDDMASPKLKLSRKSGISPKKSKYMTPMQQKLNEVYEAVKNYTDKRGRRLSAIFLRLPSRSELPDYYLTIKKPMDMEKIRSHMMANKYQDIDSMVEDFVMMFNNACTYNEPESLIYKDALVLHKVLLETRRDLEGDEDSHVPNVTLLIQELIHNLFVSVMSHQDDEGRCYSDSLAEIPAVDPNFPNKPPLTFDIIRKNVENNRYRRLDLFQEHMFEVLERARRMNRTDSEIYEDAVELQQFFIKIRDELCKNGEILLSPALSYTTKHLHNDVEKERKEKLPKEIEEDKLKREEEKREAEKSEDSSGAAGLSGLHRTYSQDCSFKNSMYHVGDYVYVEPAEANLQPHIVCIERLWEDSAGEKWLYGCWFYRPNETFHLATRKFLEKEVFKSDYYNKVPVSKILGKCVVMFVKEYFKLCPENFRDEDVFVCESRYSAKTKSFKKIKLWTMPISSVRFVPRDVPLPVVRVASVFANADKGDDEKNTDNSEDSRAEDNFNLEKEKEDVPVEMSNGEPGCHYFEQLHYNDMWLKVGDCVFIKSHGLVRPRVGRIEKVWVRDGAAYFYGPIFIHPEETEHEPTKMFYKKEVFLSNLEETCPMTCILGKCAVLSFKDFLSCRPTEIPENDILLCESRYNESDKQMKKFKGLKRFSLSAKVVDDEIYYFRKPIVPQKEPSPLLEKKIQLLEAKFAELEGGDDDIEEMGEEDSEVIEPPSLPQLQTPLASELDLMPYTPPQSTPKSAKGSAKKEGSKRKINMSGYILFSSEMRAVIKAQHPDYSFGELSRLVGTEWRNLETAKKAEYEERAAKVAEQQERERAAQQQQPSASPRAGTPVGALMGVVPPPTPMGMLNQQLTPVAGKNRS

SEQ ID NO: 856773 - protein, 1730 aa, Homo sapiens
TAAAAAGGAIAAAVAATGRGAAVGDRGRGCRRRSGWKKLDSMGSKRRRATSPSSSVSGDFDDGHHSVSTPGPSRKRRRLSNLPTVDPIAVCHELYNTIRDYKDEQGRLLCELFIRAPKRRNQPDYYEVVSQPIDLMKIQQKLKMEEYDDVNLLTADFQLLFNNAKSYYKPDSPEYKAACKLWDLYLRTRNEFVQKGEADDEDDDEDGQDNQGTVTEGSSPAYLKEILEQLLEAIVVATNPSGRLISELFQKLPSKVQYPDYYAIIKEPIDLKTIAQRIQNGSYKSIHAMAKDIDLLAKNAKTYNEPGSQVFKDANSIKKIFYMKKAEIEHHEMAKSSLRMRTPSNLAAARLTGPSHSKGSLGEERNPTSKYYRNKRAVQGGRLSAITMALQYGSESEEDAALAAARYEEGESEAESITSFMDVSNPFYQLYDTVRSCRNNQGQLIAEPFYHLPSKKKYPDYYQQIKMPISLQQIRTKLKNQEYETLDHLECDLNLMFENAKRYNVPNSAIYKRVLKLQQVMQAKKKELARRDDIEDGDSMISSATSDTGSAKRKSKKNIRKQRMKILFNVVLEAREPGSGRRLCDLFMVKPSKKDYPDYYKIILEPMDLKIIEHNIRNDKYAGEEGMIEDMKLMFRNARHYNEEGSQVYNDAHILEKLLKEKRKELGPLPDDDDMASPKLKLSRKSGISPKKSKYMTPMQQKLNEVYEAVKNYTDKRGRRLSAIFLRLPSRSELPDYYLTIKKPMDMEKIRSHMMANKYQDIDSMVEDFVMMFNNACTYNEPESLIYKDALVLHKVLLETRRDLEGDEDSHVPNVTLLIQELIHNLFVSVMSHQDDEGRCYSDSLAEIPAVDPNFPNKPPLTFDIIRKNVENNRYRRLDLFQEHMFEVLERARRMNRTDSEIYEDAVELQQFFIKIRDELCKNGEILLSPALSYTTKHLHNDVEKERKEKLPKEIEEDKLKREEEKREAEKSEDSSGAAGLSGLHRTYSQDCSFKNSMYHVGDYVYVEPAEANLQPHIVCIERLWEDSAGEKWLYGCWFYRPNETFHLATRKFLEKEVFKSDYYNKVPVSKILGKCVVMFVKEYFKLCPENFRDEDVFVCESRYSAKTKSFKKIKLWTMPISSVRFVPRDVPLPVVRVASVFANADKGDDEKNTDNSEDSRAEDNFNLEKEKEDVPVEMSNGEPGCHYFEQLHYNDMWLKVGDCVFIKSHGLVRPRVGRIEKVWVRDGAAYFYGPIFIHPEETEHEPTKMFYKKEVFLSNLEETCPMTCILGKCAVLSFKDFLSCRPTEIPENDILLCESRYNESDKQMKKFKGLKRFSLSAKVVDDEIYYFRKPIVPQKEPSPLLEKKIQLLEAKFAELEGGDDDIEEMGEEDSEVIEPPSLPQLQTPLASELDLMPYTPPQSTPKSAKGSAKKEGSKRKINMSGYILFSSEMRAVIKAQHPDYSFGELSRLVGTEWRNLETAKKAEYEERAAKVAEQQERERAAQQQQPSASPRAGTPVGALMGVVPPPTPMGMLNQQLTPVAGMMGGYPPGLPPLQGPVDGLVSMGSMQPLHPGGPPPHHLPPGVPGLPGIPPPGVMNQGVAPMVGTPAPGGSPYGQQVGVLGPPGQQAPPPYPGPHPAGPPVIQQPTTPMFVAPPPKTQRLLHSEAYLKYIEGLSAESNSISKWDQTLAARRRDVHLSKEQESRLPSHWLKSKGAHTTMADALWRLRDLMLRDTLNIRQAYNLENV

SEQ ID NO: 856774 - protein, 107 aa, Homo sapiens
MSGYILFSSEMRAVIKAQHPDYSFGELSRLVGTEWRNLETAKKAEYEERAAKVAEQQERERAAQQQQPSASPRAGTPVGALMGVVPPPTPMGMLNQQLTPVAGKNRS

SEQ ID NO: 856775 - protein, 1373 aa, Homo sapiens
TAAAAAGGAIAAAVAATGRGAAVGDRGRGCRRRSGWKKLDSMGSKRRRATSPSSSVSGDFDDGHHSVSTPGPSRKRRRLSNLPTVDPIAVCHELYNTIRDYKDEQGRLLCELFIRAPKRRNQPDYYEVVSQPIDLMKIQQKLKMEEYDDVNLLTADFQLLFNNAKSYYKPDSPEYKAACKLWDLYLRTRNEFVQKGEADDEDDDEDGQDNQGTVTEGSSPAYLKEILEQLLEAIVVATNPSGRLISELFQKLPSKVQYPDYYAIIKEPIDLKTIAQRIQNGSYKSIHAMAKDIDLLAKNAKTYNEPGSQVFKDANSIKKIFYMKKAEIEHHEMAKSSLRMRTPSNLAAARLTGPSHSKGSLGEERNPTSKYYRNKRAVQGGRLSAITMALQYGSESEEDAALAAARYEEGESEAESITSFMDVSNPFYQLYDTVRSCRNNQGQLIAEPFYHLPSKKKYPDYYQQIKMPISLQQIRTKLKNQEYETLDHLECDLNLMFENAKRYNVPNSAIYKRVLKLQQVMQAKKKELARRDDIEDGDSMISSATSDTGSAKRKSKKNIRKQRMKILFNVVLEAREPGSGRRLCDLFMVKPSKKDYPDYYKIILEPMDLKIIEHNIRNDKYAGEEGMIEDMKLMFRNARHYNEEGSQVYNDAHILEKLLKEKRKELGPLPDDDDMASPKLKLSRKSGISPKKSKYMTPMQQKLNEVYEAVKNYTDKRGRRLSAIFLRLPSRSELPDYYLTIKKPMDMEKIRSHMMANKYQDIDSMVEDFVMMFNNACTYNEPESLIYKDALVLHKVLLETRRDLEGDEDSHVPNVTLLIQELIHNLFVSVMSHQDDEGRCYSDSLAEIPAVDPNFPNKPPLTFDIIRKNVENNRYRRLDLFQEHMFEVLERARRMNRTDSEIYEDAVELQQFFIKIRDELCKNGEILLSPALSYTTKHLHNDVEKERKEKLPKEIEEDKLKREEEKREAEKSEDSSGAAGLSGLHRTYSQDCSFKNSMYHVGDYVYVEPAEANLQPHIVCIERLWEDSAEKEVFKSDYYNKVPVSKILGKCVVMFVKEYFKLCPENFRDEDVFVCESRYSAKTKSFKKIKLWTMPISSVRFVPRDVPLPVVRVASVFANADKGDDEKNTDNSEDSRAEDNFNLEKEKEDVPVEMSNGEPGCHYFEQLHYNDMWLKVGDCVFIKSHGLVRPRVGRIEKVWVRDGAAYFYGPIFIHPEETEHEPTKMFYKKEVFLSNLEETCPMTCILGKCAVLSFKDFLSCRPTEIPENDILLCESRYNESDKQMKKFKGLKRFSLSAKVVDDEIYYFRKPIVPQKEPSPLLEKKIQLLEAKFAELEGGDDDIEEMGEEDSEVILPQSLPKAVQRRKAPNGKST

SEQ ID NO: 856776 - protein, 1643 aa, Homo sapiens
TAAAAAGGAIAAAVAATGRGAAVGDRGRGCRRRSGWKKLDSMGSKRRRATSPSSSVSGDFDDGHHSVSTPGPSRKRRRLSNLPTVDPIAVCHELYNTIRDYKDEQGRLLCELFIRAPKRRNQPDYYEVVSQPIDLMKIQQKLKMEEYDDVNLLTADFQLLFNNAKSYYKPDSPEYKAACKLWDLYLRTRNEFVQKGEADDEDDDEDGQDNQGTVTEGSSPAYLKEILEQLLEAIVVATNPSGRLISELFQKLPSKVQYPDYYAIIKEPIDLKTIAQRIQNGSYKSIHAMAKDIDLLAKNAKTYNEPGSQVFKDANSIKKIFYMKKAEIEHHEMAKSSLRMSNKRAVQGGRLSAITMALQYGSESEEDAALAAARYEEGESEAESITSFMDVSNPFYQLYDTVRSCRNNQGQLIAEPFYHLPSKKKYPDYYQQIKMPISLQQIRTKLKNQEYETLDHLECDLNLMFENAKRYNVPNSAIYKRVLKLQQVMQAKKKELARRDDIEDGDSMISSATSDTGSAKRKSKKNIRKQRMKILFNVVLEAREPGSGRRLCDLFMVKPSKKDYPDYYKIILEPMDLKIIEHNIRNDKYAGEEGMIEDMKLMFRNARHYNEEGSQVYNDAHILEKLLKEKRKELGPLPDDDDMASPKLKLSRKSGISPKKSKYMTPMQQKLNEVYEAVKNYTDKRGRRLSAIFLRLPSRSELPDYYLTIKKPMDMEKIRSHMMANKYQDIDSMVEDFVMMFNNACTYNEPESLIYKDALVLHKVLLETRRDLEGDEDSHVPNVTLLIQELIHNLFVSVMSHQDDEGRCYSDSLAEIPAVDPNFPNKPPLTFDIIRKNVENNRYRRLDLFQEHMFEVLERARRMNRTDSEIYEDAVELQQFFIKIRDELCKNGEILLSPALSYTTKHLHNDVEKERKEKLPKEIEEDKLKREEEKREAEKSEDSSGAAGLSGLHRTYSQDCSFKNSMYHVGDYVYVEPAEANLQPHIVCIERLWEDSAGEKWLYGCWFYRPNETFHLATRKFLEKEVFKSDYYNKVPVSKILGKCVVMFVKEYFKLCPENFRDEDVFVCESRYSAKTKSFKKIKLWTMPISSVRFVPRDVPLPVVRVASVFANADKGDDEKNTDNSEDSRAEDNFNLEKEKEDVPVEMSNGEPGCHYFEQLHYNDMWLKVGDCVFIKSHGLVRPRVGRIEKVWVRDGAAYFYGPIFIHPEETEHEPTKMFYKKEVFLSNLEETCPMTCILGKCAVLSFKDFLSCRPTEIPENDILLCESRYNESDKQMKKFKGLKRFSLSAKVVDDEIYYFRKPIVPQKEPSPLLEKKIQLLEAKFAELEGGDDDIEEMGEEDSEVIEPPSLPQLQTPLASELDLMPYTPPQSTPKSAKGSAKKEGSKRKINMSGYILFSSEMRAVIKAQHPDYSFGELSRLVGTEWRNLETAKKAEYEGMMGGYPPGLPPLQGPVDGLVSMGSMQPLHPGGPPPHHLPPGVPGLPGIPPPGVMNQGVAPMVGTPAPGGSPYGQQVGVLGPPGQQAPPPYPGPHPAGPPVIQQPTTPMFVAPPPKTQRLLHSEAYLKYIEGLSAESNSISKWDQTLAARRRDVHLSKEQESRLPSHWLKSKGAHTTMADALWRLRDLMLRDTLNIRQAYNLENV

SEQ ID NO: 856777 - protein, 1652 aa, Homo sapiens
MRRLAFRGAGCALKKLDSMGSKRRRATSPSSSVSGDFDDGHHSVSTPGPSRKRRRLSNLPTVDPIAVCHELYNTIRDYKDEQGRLLCELFIRAPKRRNQPDYYEVVSQPIDLMKIQQKLKMEEYDDVNLLTADFQLLFNNAKSYYKPDSPEYKAACKLWDLYLRTRNEFVQKGEADDEDDDEDGQDNQGTVTEGSSPAYLKEILEQLLEAIVVATNPSGRLISELFQKLPSKVQYPDYYAIIKEPIDLKTIAQRIQNGSYKSIHAMAKDIDLLAKNAKTYNEPGSQVFKDANSIKKIFYMKKAEIEHHEMAKSSLRMRTPSNLAAARLTGPSHSKGSLGEERNPTSKYYRNKRAVQGGRLSAITMALQYGSESEEDAALAAARYEEGESEAESITSFMDVSNPFYQLYDTVRSCRNNQGQLIAEPFYHLPSKKKYPDYYQQIKMPISLQQIRTKLKNQEYETLDHLECDLNLMFENAKRYNVPNSAIYKRVLKLQQVMQAKKKELARRDDIEDGDSMISSATSDTGSAKRKSKKNIRKQRMKILFNVVLEAREPGSGRRLCDLFMVKPSKKDYPDYYKIILEPMDLKIIEHNIRNDKYAGEEGMIEDMKLMFRNARHYNEEGSQVYNDAHILEKLLKEKRKELGPLPDDDDMASPKLKLSRKSGISPKKSKYMTPMQQKLNEVYEAVKNYTDKRGRRLSAIFLRLPSRSELPDYYLTIKKPMDMEKIRSHMMANKYQDIDSMVEDFVMMFNNACTYNEPESLIYKDALVLHKVLLETRRDLEGDEDSHVPNVTLLIQELIHNLFVSVMSHQDDEGRCYSDSLAEIPAVDPNFPNKPPLTFDIIRKNVENNRYRRLDLFQEHMFEVLERARRMNRTDSEIYEDAVELQQFFIKIRDELCKNGEILLSPALSYTTKHLHNDVEKERKEKLPKEIEEDKLKREEEKREAEKSEDSSGAAGLSGLHRTYSQDCSFKNSMYHVGDYVYVEPAEANLQPHIVCIERLWEDSAGEKWLYGCWFYRPNETFHLATRKFLEKEVFKSDYYNKVPVSKILGKCVVMFVKEYFKLCPENFRDEDVFVCESRYSAKTKSFKKIKLWTMPISSVRFVPRDVPLPVVRVASVFANADKGDDEKNTDNSEDSRAEDNFNLEKEKEDVPVEMSNGEPGCHYFEQLHYNDMWLKVGDCVFIKSHGLVRPRVGRIEKVWVRDGAAYFYGPIFIHPEETEHEPTKMFYKKEVFLSNLEETCPMTCILGKCAVLSFKDFLSCRPTEIPENDILLCESRYNESDKQMKKFKGLKRFSLSAKVVDDEIYYFRKPIVPQKEPSPLLEKKIQLLEAKFAELEGGDDDIEEMGEEDSEVIEPPSLPQLQTPLASELDLMPYTPPQSTPKSAKGSAKKEGSKRKINMSGYILFSSEMRAVIKAQHPDYSFGELSRLVGTEWRNLETAKKAEYEGMMGGYPPGLPPLQGPVDGLVSMGSMQPLHPGGPPPHHLPPGVPGLPGIPPPGVMNQGVAPMVGTPAPGGSPYGQQVGVLGPPGQQAPPPYPGPHPAGPPVIQQPTTPMFVAPPPKTQRLLHSEAYLKYIEGLSAESNSISKWDQTLAARRRDVHLSKEQESRLPSHWLKSKGAHTTMADALWRLRDLMLRDTLNIRQAYNLENV

SEQ ID NO: 856778 - protein, 1634 aa, Homo sapiens; identical to SEQ ID NO: 856764

SEQ ID NO: 856779 - protein, 1675 aa, Homo sapiens; identical to SEQ ID NO: 856762

SEQ ID NO: 856780 - protein, 347 aa, Homo sapiens
IEDPRIIILLNEPPSLPQLQTPLASELDLMPYTPPQSTPKSAKGSAKKEGSKRKINMSGYILFSSEMRAVIKAQHPDYSFGELSRLVGTEWRNLETAKKAEYEERAAKVAEQQERERAAQQQQPSASPRAGTPVGALMGVVPPPTPMGMLNQQLTPVAGVMNQGVAPMVGTPAPGGSPYGQQVSPQFDFLGLDRIRVILLRTCAESLFASPCGPVLFQVGVLGPPGQQAPPPYPGPHPAGPPVIQQPTTPMFVAPPPKTQRLLHSEAYLKYIEGLSAESNSISKWDQTLAARRRDVHLSKEQESRLPSHWLKSKGAHTTMADALWRLRDLMLRDTLNIRQAYNLENV

SEQ ID NO: 856781 - protein, 124 aa, Homo sapiens
MSYIPGQPVTAVVQRVEIHKLRQGENLILGFSIGGGIDQDPSQNPFSEDKTDKGIYVTRVSEGGPAEIAGLQIGDKIMQVNGWDMTMVTHDQARKRLTKRSEEVVRLLVTRQSLQKAVQQSMLS

SEQ ID NO: 856782 - protein, 124 aa, Homo sapiens; identical to SEQ ID NO: 856781

SEQ ID NO: 856783 - protein, 124 aa, Homo sapiens; identical to SEQ ID NO: 856781

SEQ ID NO: 856784 - protein, 124 aa, Homo sapiens; identical to SEQ ID NO: 856781

SEQ ID NO: 856785 - protein, 135 aa, Homo sapiens
MRGRAERGGLCEAARARPRVLCCRLLGAALGDQSRVEMSYIPGQPVTAVVQRVEIHKLRQGENLILGFSIGGGIDQDPSQNPFSEDKTDKVNGWDMTMVTHDQARKRLTKRSEEVVRLLVTRQSLQKAVQQSMLS

SEQ ID NO: 856786 - protein, 124 aa, Homo sapiens; identical to SEQ ID NO: 856781

SEQ ID NO: 856787 - protein, 124 aa, Homo sapiens; identical to SEQ ID NO: 856781

SEQ ID NO: 856788 - protein, 124 aa, Homo sapiens; identical to SEQ ID NO: 856781

SEQ ID NO: 856789 - protein, 160 aa, Homo sapiens
MSYIPGQPVTAVVQRVEIHKLRQGENLILGFSIGGGIDQDPSQNPFSEDKTDKVRGSGVLGPLHGAQGPEMVGLCFLGLHGRNRLHLSNHALYEGIGSDLVRIRTGGVRKGCSDRAQEEQEAAISRAGAWWCSNSAPALSEQSSLTICAGRGWVQGQRDG

SEQ ID NO: 856790 - protein, 139 aa, Homo sapiens
MALRLLLGTPTSLILQPPTSLNWLFSCQQRVEIHKLRQGENLILGFSIGGGIDQDPSQNPFSEDKTDKGIYVTRVSEGGPAEIAGLQIGDKIMQVNGWDMTMVTHDQARKRLTKRSEEVVRLLVTRQSLQKAVQQSMLS

SEQ ID NO: 856791 - protein, 350 aa, Homo sapiens
MSYIPGQPVTAVVQRVEIHKLRQGENLILGFSIGGGIDQDPSQNPFSEDKTDKGIYVTRVSEGGPAEIAGLQIGDKIMQRETGWGTMEPMGSTPRNQAPANAAYTQRASKSSVWRCSCRVVARARSRVDEKRRAATTASAGCSLEQHNPPLLTNFRDRADHLTATRYTAHFIQHSSTLCPHLASADRWAPAQKGYSWSQRPGLAFLPFSHPWPGASGTSFLSWTPRIGNKGLELSSSQSAVTTGSGPTLLLGHSSGWASGNHYLLGAPKSWEMLEEPGLSRFCLAAGFGSAPAPQPSCVHTAVPLPLGGLDTHPARGATKLCPDEARWAPRSLPLSRGVLASPGFAFLRI

SEQ ID NO: 856792 - protein, 124 aa, Homo sapiens; identical to SEQ ID NO: 856781

SEQ ID NO: 856793 - protein, 805 aa, Homo sapiens
MDEDGLELQQEPNSFFDATGADGTHMDGDQIVVEVQETVFVSDVVDSDITVHNFVPDDPDSVVIQDVIEDVVIEDVQCPDIMEEADVSETVIIPEQVLDSDVTEEVSLAHCTVPDDVLASDITSASMSMPEHVLTGDSIHVSDVGHVGHVGHVEHVVHDSVVEAEIVTDPLTTDVVSEEVLVADCASEAVIDANGIPVDQQDDDKGNCEDYLMISLDDAGKIEHDGSSGMTMDTESEIDPCKVDGTCPEVIKVYIFKADPGEDDLGGTVDIVESEPENDHGVELLDQNSSIRVPREKMVYMTVNDSQPEDEDLNVAEIADEVYMEVIVGEEDAAAAAAAAAVHEQQMDDNEIKTFMPIAWAAAYGNNSDGIENRNGTASALLHIDESAGLGRLAKQKPKKRRRPDSRQYQTAIIIGPDGHPLTVYPCMICGKKFKSRGFLKRHMKNHPEHLAKKKYRCTDCDYTTNKKISLHNHLESHKLTSKAEKAIECDECGKHFSHAGALFTHKMVHKEKGANKMHKCKFCEYETAEQGLLNRHLLAVHSKNFPHICVECGKGFRHPSELKKHMRIHTGEKPYQCQYCEYRSADSSNLKTHVKTKHSKEMPFKCDICLLTFSDTKEVQQHALIHQESKTHQCLHCDHKSSNSSDLKRHIISVHTKDYPHKCDMCDKGFHRPSELKKHVAAHKGKKMHQCRHCDFKIADPFVLSRHILSVHTKDLPFRCKRCRKGFRQQSELKKHMKTHSGRKVYQCEYCEYSTTDASGFKRHVISIHTKDYPHRCEYCKKGFRRPSEKNQHIMRHHKEVGLP

SEQ ID NO: 856794 - protein, 805 aa, Homo sapiens; identical to SEQ ID NO: 856793

SEQ ID NO: 856795 - protein, 640 aa, Homo sapiens
RGAGPLFVSSELGPSSLPPPAPPAGARPSAPEKGRPAAPATVAGRPQRPSVDDAGKIEHDGSSGMTMDTESEIDPCKVDGTCPEVIKVYIFKADPGEDDLGGTVDIVESEPENDHGVELLDQNSSIRVPREKMVYMTVNDSQPEDEDLNVAEIADEVYMEVIVGEEDAAAAAAAAAVHEQQMDDNEIKTFMPIAWAAAYGNNSDGIENRNGTASALLHIDESAGLGRLAKQKPKKRRRPDSRQYQTAIIIGPDGHPLTVYPCMICGKKFKSRGFLKRHMKNHPEHLAKKKYRCTDCDYTTNKKISLHNHLESHKLTSKAEKAIECDECGKHFSHAGALFTHKMVHKEKGANKMHKCKFCEYETAEQGLLNRHLLAVHSKNFPHICVECGKGFRHPSELKKHMRIHTGEKPYQCQYCEYRSADSSNLKTHVKTKHSKEMPFKCDICLLTFSDTKEVQQHALIHQESKTHQCLHCDHKSSNSSDLKRHIISVHTKDYPHKCDMCDKGFHRPSELKKHVAAHKGKKMHQCRHCDFKIADPFVLSRHILSVHTKDLPFRCKRCRKGFRQQSELKKHMKTHSGRKVYQCEYCEYSTTDASGFKRHVISIHTKDYPHRCEYCKKGFRRPSEKNQHIMRHHKEVGLP

SEQ ID NO: 856796 - protein, 129 aa, Homo sapiens
GSWAAFCQLRARPLLPPSARPTSRSPAQCSRERPACSTRHRRRPPATSVRPVTGCSFRCVSAELPQAATAAARTPGPFHPQRPWPCAFPRACSHPRAVGAGGIPDTWAYQGIRDPRKCYFCLSQIICGC

SEQ ID NO: 856797 - protein, 805 aa, Homo sapiens; identical to SEQ ID NO: 856793

SEQ ID NO: 856798 - protein, 780 aa, Homo sapiens
MDGDQIVVEVQETVFVSDVVDSDITVHNFVPDDPDSVVIQDVIEDVVIEDVQCPDIMEEADVSETVIIPEQVLDSDVTEEVSLAHCTVPDDVLASDITSASMSMPEHVLTGDSIHVSDVGHVGHVGHVEHVVHDSVVEAEIVTDPLTTDVVSEEVLVADCASEAVIDANGIPVDQQDDDKGNCEDYLMISLDDAGKIEHDGSSGMTMDTESEIDPCKVDGTCPEVIKVYIFKADPGEDDLGGTVDIVESEPENDHGVELLDQNSSIRVPREKMVYMTVNDSQPEDEDLNVAEIADEVYMEVIVGEEDAAAAAAAAAVHEQQMDDNEIKTFMPIAWAAAYGNNSDGIENRNGTASALLHIDESAGLGRLAKQKPKKRRRPDSRQYQTAIIIGPDGHPLTVYPCMICGKKFKSRGFLKRHMKNHPEHLAKKKYRCTDCDYTTNKKISLHNHLESHKLTSKAEKAIECDECGKHFSHAGALFTHKMVHKEKGANKMHKCKFCEYETAEQGLLNRHLLAVHSKNFPHICVECGKGFRHPSELKKHMRIHTGEKPYQCQYCEYRSADSSNLKTHVKTKHSKEMPFKCDICLLTFSDTKEVQQHALIHQESKTHQCLHCDHKSSNSSDLKRHIISVHTKDYPHKCDMCDKGFHRPSELKKHVAAHKGKKMHQCRHCDFKIADPFVLSRHILSVHTKDLPFRCKRCRKGFRQQSELKKHMKTHSGRKVYQCEYCEYSTTDASGFKRHVISIHTKDYPHRCEYCKKGFRRPSEKNQHIMRHHKEVGLP

SEQ ID NO: 856799 - protein, 805 aa, Homo sapiens; identical to SEQ ID NO: 856793

SEQ ID NO: 856800 - protein, 780 aa, Homo sapiens; identical to SEQ ID NO: 856798

SEQ ID NO: 856801 - protein, 121 aa, Homo sapiens
AAAAIARRWPAEPPRRRRARRPREVRRPGPGRRPDGREGQPNCGRGRFLALRGLPLVSLQRRPVPRAPGPTGLESRPGDGCSGSRRPSLDWPRNVLSCWIARLQARLGLVDVVGCPACLLF

SEQ ID NO: 856802 - protein, 471 aa, Homo sapiens
RPLPLPGDGRQSRRDAEEPAARARCRRGTAFRAGPASLAGEDALVSVMGCGTSKVLPEPPKDVQLDLVKKVEPFSGTKSDVYKHFITEVDSVGPVKAGFPAASQYAHPCPGPPTAGHTEPPSEPPRRARVAKYRAKFDPRVTAKYDIKALIGRGSFSRVVRVEHRATRQPYAIKMIETKYREGREVCESELRVLRRVRHANIIQLVEVFETQERVYMVMELATGGELFDRIIAKGSFTERDATRVLQMVLDGVRYLHALGITHRDLKPENLLYYHPGTDSKIIITDFGLASARKKGDDCLMKTTCGTPEYIAPEVLVRKPYTNSVDMWALGVIAYILLSGTMPFEDDNRTRLYRQILRGKYSYSGEPWPSVSNLAKDFIDRLLTVDPGARMTALQALRHPWVVSMAASSSMKNLHRSISQNLLKRASSRCQSTKSAQSTRSSRSTRSNKSRRVRERELRELNLRYQQQYNG

SEQ ID NO: 856803 - protein, 471 aa, Homo sapiens; identical to SEQ ID NO: 856802

SEQ ID NO: 856804 - protein, 490 aa, Homo sapiens
MPTYIQLVEVFETQERVYMVMELATGGERFDRIIAKGSFTERECRRGTAFRAGPASLAGEDALVSVMGCGTSKVLPEPPKDVQLDLVKKVEPFSGTKSDVYKHFITEVDSVGPVKAGFPAASQYAHPCPGPPTAGHTEPPSEPPRRARVAKYRAKFDPRVTAKYDIKALIGRGSFSRVVRVEHRATRQPYAIKMIETKYREGREVCESELRVLRRVRHANIIQLVEVFETQERVYMVMELATGGELFDRIIAKGSFTERDATRVLQMVLDGVRYLHALGITHRDLKPENLLYYHPGTDSKIIITDFGLASARKKGDDCLMKTTCGTPEYIAPEVLVRKPYTNSVDMWALGVIAYILLSGTMPFEDDNRTRLYRQILRGKYSYSGEPWPSVSNLAKDFIDRLLTVDPGARMTALQALRHPWVVSMAASSSMKNLHRSISQNLLKRASSRCQSTKSAQSTRSSRSTRSNKSRRVRERELRELNLRYQQQYNG

SEQ ID NO: 856805 - protein, 156 aa, Homo sapiens
VYENKGTSSRWQLDLPGAWFVPHDCHQKGPKQQINNYISIGESETVYRGAPGEQSDPCGAWKCSVTPQRGEQGILPLQYCLPCHACPGAKGTSYGEMVSRRSLAVPHHHHKHWQQFLQEGPPVFKGHKSCVDSCHTCTQLHCPREGTSGIAPTPVA

SEQ ID NO: 856806 - protein, 176 aa, Homo sapiens
YQRRVPITAGEQGPRAVSEGWAAMASYFDEHDCEPSDPEQETRTNMLLELARSLFNRMDFEDLGLVVDWDHHLPPPAAKTVVENLPRTVIRGSQAELKCPVCLLEFEEEETAIEMPCHHLFHSSCILPWLSKTNSCPLCRYELPTDDDTYEEHRRDKARKQQQQHRLENLHGAMYT

SEQ ID NO: 856807 - protein, 87 aa, Homo sapiens
ELGNRAPPRCRKNRRKKAQPQVHHRKGHLVGAMARGGRMPLHSSLGNKSKTPSQKKKKKKLDKLACTLLPLQCLVNFVIPQVFFLLH

SEQ ID NO: 856808 - protein, 75 aa, Homo sapiens
RRIRGRSLELARSLFNRMDFEDLGLVVDWDHHLPPPAAKTVVENLPRTVIRGSQAEEETAIEMPCHHLFHSSFSS

SEQ ID NO: 856809 - protein, 176 aa, Homo sapiens; identical to SEQ ID NO: 856806

SEQ ID NO: 856810 - protein, 176 aa, Homo sapiens; identical to SEQ ID NO: 856806

SEQ ID NO: 856811 - protein, 176 aa, Homo sapiens; identical to SEQ ID NO: 856806

SEQ ID NO: 856812 - protein, 180 aa, Homo sapiens
YQRRVPITAGEQGPRAVSEGWAAMASYFDEHDCEPSDPEQETRTNMLLELARSLFNRMDFEDLGLVVDWDHHLPPPAAKTVVENLPRTVIRGSQAELKCPVCLLEFEEEETAIEMPCHHLFHSSCILPWLSKTNSCPLCRYELPTDDDTYEEHRRDKCTREEVGAECWPSASSLLTLNPH

SEQ ID NO: 856813 - protein, 208 aa, Homo sapiens
YQRRVPITAGEQGPRAVSEGWAAMASYFDEHDCEPSDPEQETRTNMLLELARSLFNRMDFEDLGLVVDWDHHLPPPAAKTVVENLPRTVIRGSQAVFQVRWGQVSFRSGSLGGRACSSSPDQHSFLKELKCPVCLLEFEEEETAIEMPCHHLFHSSCILPWLSKTNSCPLCRYELPTDDDTYEEHRRDKARKQQQQHRLENLHGAMYT

SEQ ID NO: 856814 - protein, 164 aa, Homo sapiens
YQRRVPITAGEQGPRAVSEGWAAMASYFDEHDCEPSDPEQETRTNMLLELARSLFNRMDFEDLGLVVDWDHHLPPPAAKTVVENLPRTVIRGSQAEEETAIEMPCHHLFHSSCILPWLSKTNSCPLCRYELPTDDDTYEEHRRDKARKQQQQHRLENLHGAMYT

SEQ ID NO: 856815 - protein, 104 aa, Homo sapiens
YQRRVPITAGEQGPRAVSEGWAAMASYFDEHDCEPSDPEQETRTNMLLELARSLFNRMDFEDLGLVVDWDHHLPPPAAKTVVENLPRTVIRGSQADKFLSLVPL

SEQ ID NO: 856816 - protein, 151 aa, Homo sapiens
YQRRVPITAGEQGPRAVSEGWAAMASYFDEHDCEPSDPEQETRTNMLLELARSLFNRMDFEDLGLVVDWDHHLPPPAAKTVVENLPRTVIRGSQAELKCPVCLLEFEEEETAIEMPCHHLFHSSCILPWLSKARKQQQQHRLENLHGAMYT

SEQ ID NO: 856817 - protein, 104 aa, Homo sapiens; identical to SEQ ID NO: 856815

SEQ ID NO: 856818 - protein, 190 aa, Homo sapiens
YQRRVPITAGEQGPRAVSEGWAAMASYFDEHDCEPSDPEQETRTNMLLELARSLFNRMDFEDLGLVVDWDHHLPPPAAKTVVENLPRTVIRGSQAALTVPWAQYSSFFLFMDCWGMEEEWQLGAGEGGYQLMKIRPRLEHYSTFLQTNSCPLCRYELPTDDDTYEEHRRDKARKQQQQHRLENLHGAMYT

SEQ ID NO: 856819 - protein, 104 aa, Homo sapiens
YQRRVPITAGEQGPRAVSEGWAAMASYFDEHDCEPSDPEQETRTNMLLELASCILPWLSKTNSCPLCRYELPTDDDTYEEHRRDKARKQQQQHRLENLHGAMYT

SEQ ID NO: 856820 - protein, 153 aa, Homo sapiens
MASYFDEHDCEPSDPEQETRTNMLLELARSLFNRMDFEDLGLVVDWDHHLPPPAAKTVVENLPRTVIRGSQAELKCPVCLLEFEEEETAIEMPCHHLFHSSCILPWLSKTNSCPLCRYELPTDDDTYEEHRRDKARKQQQQHRLENLHGAMYT

SEQ ID NO: 856821 - protein, 133 aa, Homo sapiens
VAAHTSYIIIIRSYQISARHPRVSVDPMCPSPLKPLNQAVWPGSLQANKSPTSIELLGLFLCPLITTQLFSDYLAWSLILLSSPDLLWLYCLLSYNSTSSTSPVIAQLGPQSCRSSLCSTTPTCPRDCSVMYT

SEQ ID NO: 856822 - protein, 176 aa, Homo sapiens; identical to SEQ ID NO: 856806

SEQ ID NO: 856823 - protein, 176 aa, Homo sapiens; identical to SEQ ID NO: 856806

SEQ ID NO: 856824 - protein, 176 aa, Homo sapiens; identical to SEQ ID NO: 856806

SEQ ID NO: 856825 - protein, 138 aa, Homo sapiens
YQRRVPITAGEQGPRAVSEGWAAMASYFDEHDCEPSDPEQETRTNMLLELARSLFNRMDFEDLGLVVDWDHHLPPPAAKTVVENLPRTVIRGSQAELKCPVCLLEFEEEETAIEMPCHHLFHSSCILPWLSKVLLLFF

SEQ ID NO: 856826 - protein, 217 aa, Homo sapiens
YQRRVPITAGEQGPRAVSEGWAAMASYFDEHDCEPSDPEQETRTNMLLELARSLFNRMDFEDLGLVVDWDHHLPPPAAKTVVENLPRTVIRGSQAELKCPVCLLEFEEEETAIEMPCHHLFHSRACPNFFFSPFLGGPPPPPLFWGGGPSRARQIPVPCAAMSCPLMTTLMRSTDEIRLENSSSNTDWRTSMEPCTREEVGAECWPSASSLLTLNPH

SEQ ID NO: 856827 - protein, 92 aa, Homo sapiens
TSHSERSQCVQSPVPFFNLFSEEEEETAIEMPCHHLFHSSCILPWLSKTNSCPLCRYELPTDDDTYEEHRRDKARKQQQQHRLENLHGAMYT

SEQ ID NO: 856828 - protein, 138 aa, Homo sapiens; identical to SEQ ID NO: 856825

SEQ ID NO: 856829 - protein, 164 aa, Homo sapiens; identical to SEQ ID NO: 856814

SEQ ID NO: 856830 - protein, 104 aa, Homo sapiens; identical to SEQ ID NO: 856815

SEQ ID NO: 856831 - protein, 1788 aa, Homo sapiens [sequence omitted]

SEQ ID NO: 856832 - protein, 2214 aa, Homo sapiens
MKRKERIARRLEGIENDTQPILLQSCTGLVTHRLLEEDTPRYMRASDPASPHIGRSNEEEETSDSSLEKQTRSKYCTETSGVHGDSPYGSGTMDTHSLESKAERIARYKAERRRQLAEKYGLTLDPEADSEYLSRYTKSRKEPDAVEKRGGKSDKQEESSRDASSLYPGTETMGLRTCAGESKDYALHAGDGSSDPEVLLNIENQRRGQELSATRQAHDLSPAAESSSTFSFSGRDSSFTEVPRSPKHAHSSSLQQAASRSPSFGDPQLSPEARPSTGKPKHEWFLQKDSEGDTPSLINWPSRVKVREKLVKEESARNSPELASESVTQRRHQPAPVHYVSFQSEHSAFDRVPSKAAGSTRQPIRGYVQPADTGHTAKLVTPETPENASECSWVASATQNVPKPPSLTVLEGDGRDSPVLHICESKAEEEEGEGEGEEKEEDVCFTEALEQSKKTLLALEGDGLVRSPEDPSRNEDFGKPAVSTVTLEHQKELENVAQPPQAPHQPTERTGRSEMVLYIQSEPVSQDAKPTGHNREASKKRKVRTRSLSDFTGPPQLQALKYKDPASRRELELPSSKTEGPYGEISMLDTKVSVAQLRSAFLASANACRRPELKSRVERSAEGPGLPTGVERERGSRKPRRYFSPGESRKTSERFRTQPITSAERKESDRCTSHSETPTVDDEEKVDERAKLSVAAKRLLFREMEKSFDEQNVPKRRSRNTAVEQRLRRLQDRSLTQPITTEEVVIAATEPIPASCSGGTHPVMARLPSPTVARSAVQPARLQASAHQKALAKDQTNEGKELAEQGEPDSSTLSLAEKLALFNKLSQPVSKAISTRNRIDTRQRRMNARYQTQPVTLGEVEQVQSGKLIPFSPAVNTSVSTVASTVAPMYAGDLRTKPPLDHNASATDYKFSSSIENSDSPVRSILKSQAWQPLVEGSENKGMLREYGETESKRALTGRDSGMEKYGSFEEAEASYPILNRAREGDSHKESKYAVPRRGSLERANPPITHLGDEPKEFSMAKMNAQGNLDLRDRLPFEEKVEVENVMKRKFSLRAAEFGEPTSEQTGTAAGKTIAQTTAPVSWKPQDSSEQPQEKLCKNPCAMFAAGEIKTPTGEGLLDSPSKTMSIKERLALLKKSGEEDWRNRLSRRQEGGKAPASSLHTQEAGRSLIKKRVTESRESQMTIEERKQLITVREEAWKTRGRGAANDSTQFTVAGRMVKKGLASPTAITPVASAICGKTRGTTPVSKPLEDIEARPDMQLESDLKLDRLETFLRRLNNKVGGMHETVLTVTGKSVKEVMKPDDDETFAKFYRSVDYNMPRSPVEMDEDFDVIFDPYAPKLTSSVAEHKRAVRPKRRVQASKNPLKMLAAREDLLQEYTEQRLNVAFMESKRMKVEKMSSNSNFSEVTLAGLASKENFSNVSLRSVNLTEQNSNNSAVPYKRLMLLQIKGRRHVQTRLVEPRASALNSGDCFLLLSPHCCFLWVGEFANVIEKAKASELATLIQTKRELGCRATYIQTIEEGINTHTHAAKDFWKLLGGQTSYQSAGDPKEDELYEAAIIETNCIYRLMDDKLVPDDDYWGKIPKCSLLQPKEVLVFDFGSEVYVWHGKEVTLAQRKIAFQLAKHLWNGTFDYENCDINPLDPGECNPLIPRKGQGRPDWAIFGRLTEHNETILFKEKFLDWTELKRSNEKNPGELAQHKEDPRTDVKAYDVTRMVSMPQTTAGTILDGVNVGRGYGLVEGHDRRQFEITSVSVDVWHILEFDYSRLPKQSIGQFHEGDAYVVKWKFMVSTAVGSRQKGEHSVRAAGKEKCVYFFWQGRHSTVSEKGTSALMTVELDEERGAQVQVLQGKEPPCFLQCFQGGMVVHSGRREEEEENVQSEWRLYCVRGEVPVEGNLLEVACHCSSLRSRTSMVVLNVNKALIYLWHGCKAQAHTKEVGRTAANKIKEQCPLEAGLHSSSKVTIHECDEGSEPLGFWDALGRRDRKAYDCMLQDPGSFNFAPRLFILSSSSGDFAATEFVYPARAPSVVSSMPFLQEDLYSAPQPALFLVDNHHEVYLWQGWWPIENKITGSARIRWASDRKSAMETVLQYCKGKNLKKPAPKSYLIHAGLEPLTFTNMFPSWEHREDIAEITEMDTEVSNQITLVEDVLAKLCKTIYPLADLLARPLPEGVDPLKLEIYLTDEDFEFALDMTRDEYNALPAWKQVNLKKAKGLF

SEQ ID NO: 856833 - protein, 1885 aa, Homo sapiens
TWAVVSWRWEIGSFGVLLEGFRKRPRLLQNYFNKKNLSFLGFPRQRKVSSFQKEFSLEDKEQLANHERGIDAQLLVALPKVAELRQIFEPKKKEFLEMKRKERIARRLEGIENDTQPILLQSCTGLVTHRLLEEDTPRYMRASDPASPHIGRSNEEEETSDSSLEKQTRSKYCTETSGVHGDSPYGSGTMDTHSLESKAERIARYKAERRRQLAEKYGLTLDPEADSEYLSRYTKSRKEPDAVEKRGGKSDKQEESSRDASSLYPGTETMGLRTCAGESKDYALHAGDGSSDPEVLLNIENQRRGQELSATRQAHDLSPAAESSSTFSFSGRDSSFTEVPRSPKHAHSSSLQQAASRSPSFGDPQLSPEARPRCTSHSETPTVDDEEKVDERAKLSVAAKRLLFREMEKSFDEQNVPKRRSRNTAVEQRLRRLQDRSLTQPITTEEVVIAATLQASAHQKALAKDQTNEGKELAEQGEPDSSTLSLAEKLALFNKLSQPVSKAISTRNRIDTRQRRMNARYQTQPVTLGEVEQVQSGKLIPFSPAVNTSVSTVASTVAPMYAGDLRTKPPLDHNASATDYKFSSSIENSDSPVRSILKSQAWQPLVEGSENKGMLREYGETESKRALTGRDSGMEKYGSFEEAEASYPILNRAREGDSHKESKYAVPRRGSLERANPPITHLGDEPKEFSMAKMNAQGNLDLRDRLPFEEKVEVENVMKRKFSLRAAEFGEPTSEQTGTAAGKTIAQTTAPVSWKPQDSSEQPQEKLCKNPCAMFAAGEIKTPTGEGLLDSPSKTMSIKERLALLKKSGEEDWRNRLSRRQEGGKAPASSLHTQEAGRSLIKKRVTESRESQMTIEERKQLITVREEAWKTRGRGAANDSTQFTVAGRMVKKGLASPTAITPVASAICGKTRGTTPVSKPLEDIEARPDMQLESDLKLDRLETFLRRLNNKVGGMHETVLTVTGKSVKEVMKPDDDETFAKFYRSVDYNMPRSPVEMDEDFDVIFDPYAPKLTSSVAEHKRAVRPKRRVQASKNPLKMLAAREDLLQEYTEQRLNVAFMESKRMKVEKMSSNSNFSEVTLAGLASKENFSNVSLRSVNLTEQNSNNSAVPYKRLMLLQIKGRRHVQTRLVEPRASALNSGDCFLLLSPHCCFLWVGEFANVIEKAKASELATLIQTKRELGCRATYIQTIEEGINTHTHAAKDFWKLLGGQTSYQSAGDPKEDELYEAAIIETNCIYRLMDDKLVPDDDYWGKIPKCSLLQPKEVLVFDFGSEVYVWHGKEVTLAQRKIAFQLAKHLWNGTFDYENCDINPLDPGECNPLIPRKGQGRPDWAIFGRLTEHNETILFKEKFLDWTELKRSNEKNPGELAQHKEDPRTDVKAYDVTRMVSMPQTTAGTILDGVNVGRGYGLVEGHDRRQFEITSVSVDVWHILEFDYSRLPKQSIGQFHEGDAYVVKWKFMVSTAVGSRQKGEHSVRAAGKEKCVYFFWQGRHSTVSEKGTSALMTVELDEERGAQVQVLQGKEPPCFLQCFQGGMVVHSGRREEEEENVQSEWRLYCVRGEVPVEGNLLEVACHCSSLRSRTSMVVLNVNKALIYLWHGCKAQAHTKEVGRTAANKIKEQCPLEAGLHSSSKVTIHECDEGSEPLGFWDALGRRDRKAYDCMLQDPGSFNFAPRLFILSSSSGDFAATEFVYPARAPSVVSSMPFLQEDLYSAPQPALFLVDNHHEVYLWQGWWPIENKITGSARIRWASDRKSAMETVLQYCKGKNLKKPAPKSYLIHAGLEPLTFTNMFPSWEHREDIAEITEMDTEVSNQITLVEDVLAKLCKTIYPLADLLARPLPEGVDPLKLEIYLTDEDFEFALDMTRDEYNALPAWKQVNLKKAKGLF

SEQ ID NO: 856834 - protein, 2128 aa, Homo sapiens
MKRKERIARRLEGIENDTQPILLQSCTGLVTHRLLEEDTPRYMRASDPASPHIGRSNEEEETSDSSLEKQTRSKYCTETSGVHGDSPYGSGTMDTHSLESKAERIARYKAERRRQLAEKYGLTLDPEADSEYLSRYTKSRKEPDAVEKRGGKSDKQEESSRDASSLYPGTETMGLRTCAGESKDYALHAGDGSSDPEVLLNIENQRRGQELSATRQAHDLSPAAESSSTFSFSGRDSSFTEVPRSPKHAHSSSLQQAASRSPSFGDPQLSPEARPSTGKPKHEWFLQKDSEGDTPSLINWPSRVKVREKLVKEESARNSPELASESVTQRRHQPAPVHYVSFQSEHSAFDRVPSKAAGSTRQPIRGYVQPADTGHTAKLVTPETPENASECSWVASATQNVPKPPSLTVLEGDGRDSPVLHICESKAEEEEGEGEGEEKEEDVCFTEALEQSKKTLLALEGDGLVRSPEDPSRNEDFGKPAVSTVTLEHQKELENVAQPPQAPHQPTERTGRSEMVLYIQSEPVSQDAKPTGHNREASKKRKVRTRSLSDFTGPPQLQALKYKDPASRRELELPSSKTEGPYGEISMLDTKVSVAQLRSAFLASANACRRPELKSRVERSAEGPGLPTGVERERGSRKPRRYFSPGESRKTSERFRTQPITSAERKESDRCTSHSETPTVDDEEKVDERAKLSVAAKRLLFREMEKSFDEQNVPKRRSRNTAVEQRLRRLQDRSLTQPITTEEVVIAATEPIPASCSGGTHPVMARLPSPTVARSAVQPARLQASAHQKALAKDQTNEGKELAEQGEPDSSTLSLAEKLALFNKLSQPVSKAISTRNRIDTRQRRMNARYQTQPVTLGEVEQVQSGKLIPFSPAVNTSVSTVASTVAPMYAGDLRTKPPLDHNASATDYKFSSSIENSDSPVRSILKSQAWQPLVEGSENKGMLREYGETESKRALTGRDSGMEKYGSFEEAEASYPILNRAREGDSHKESKYAVPRRGSLERANPPITHLGDEPKEFSMAKMNAQGNLDLRDRLPFEEKVEVENVMKRKFSLRAAEFGEPTSEQTGTAAGKTIAQTTAPVSWKPQDSSEQPQEKLCKNPCAMFAAGEIKTPTGEGLLDSPSKTMSIKERLALLKKSGEEDWRNRLSRRQEGGKAPASSLHTQEAGRSLIKKRVTESRESQMTIEERKQLITVREEAWKTRGRGAANDSTQFTVAGRMVKKGLASPTAITPVASAICGKTRGTTPVSKPLEDIEARPDMQLESDLKLDRLETFLRRLNNKVGGMHETVLTVTGKSVKEVMKPDDDETFAKFYRSVDYNMPRSPVEMDEDFDVIFDPYAPKLTSSVAEHKRAVRPKRRVQASKNPLKMLAAREDLLQEYTEQRLNVAFMESKRMKVEKMSSNSNFSEVTLAGLASKENFSNVSLRSVNLTEQNSNNSAVPYKRLMLLQIKGRRHVQTRLVEPRASALNSGDCFLLLSPHCCFLWVGEFANVIEKAKASELATLIQTKRELGCRATYIQTIEEGINTHTHAAKDFWKLLGGQTSYQSAGDPKEDELYEAAIIETNCIYRLMDDKLVPDDDYWGKIPKCSLLQPKEVLVFDFGSEVYVWHGKEVTLAQRKIAFQLAKHLWNGTFDYENCDINPLDPGECNPLIPRKGQGRPDWAIFGRLTEHNETILFKEKFLDWTELKRSNEKNPGELAQHKEDPRTDVKAYDVTRMVSMPQTTAGTILDGVNVGRGYGLVEGHDRRQFEITSVSVDVWHILEFDYSRLPKQSIGQFHEGDAYVVKWKFMVSTAGEWRLYCVRGEVPVEGNLLEVACHCSSLRSRTSMVVLNVNKALIYLWHGCKAQAHTKEVGRTAANKIKEQCPLEAGLHSSSKVTIHECDEGSEPLGFWDALGRRDRKAYDCMLQDPGSFNFAPRLFILSSSSGDFAATEFVYPARAPSVVSSMPFLQEDLYSAPQPALFLVDNHHEVYLWQGWWPIENKITGSARIRWASDRKSAMETVLQYCKGKNLKKPAPKSYLIHAGLEPLTFTNMFPSWEHREDIAEITEMDTEVSNQITLVEDVLAKLCKTIYPLADLLARPLPEGVDPLKLEIYLTDEDFEFALDMTRDEYNALPAWKQVNLKKAKGLF

SEQ ID NO: 856835 - protein, 2214 aa, Homo sapiens; identical to SEQ ID NO: 856832

SEQ ID NO: 856836 - protein, 1365 aa, Homo sapiens
MARLPSPTVARSAVQPARLQASAHQKALAKDQTNEGKELAEQGEPDSSTLSLAEKLALFNKLSQPVSKAISTRNRIDTRQRRMNARYQTQPVTLGEVEQVQSGKLIPFSPAVNTSVSTVASTVAPMYAGDLRTKPPLDHNASATDYKFSSSIENSDSPVRSILKSQAWQPLVEGSENKGMLREYGETESKRALTGRDSGMEKYGSFEEAEASYPILNRAREGDSHKESKYAVPRRGSLERANPPITHLGDEPKEFSMAKMNAQGNLDLRDRLPFEEKVEVENVMKRKFSLRAAEFGEPTSEQTGTAAGKTIAQTTAPVSWKPQDSSEQPQEKLCKNPCAMFAAGEIKTPTGEGLLDSPSKTMSIKERLALLKKSGEEDWRNRLSRRQEGGKAPASSLHTQEAGRSLIKKRVTESRESQMTIEERKQLITVREEAWKTRGRGAANDSTQFTVAGRMVKKGLASPTAITPVASAICGKTRGTTPVSKPLEDIEARPDMQLESDLKLDRLETFLRRLNNKVGGMHETVLTVTGKSVKEVMKPDDDETFAKFYRSVDYNMPRSPVEMDEDFDVIFDPYAPKLTSSVAEHKRAVRPKRRVQASKNPLKMLAAREDLLQEYTEQRLNVAFMESKRMKVEKMSSNSNFSEVTLAGLASKENFSNVSLRSVNLTEQNSNNSAVPYKRLMLLQIKGRRHVQTRLVEPRASALNSGDCFLLLSPHCCFLWVGEFANVIEKAKASELATLIQTKRELGCRATYIQTIEEGINTHTHAAKDFWKLLGGQTSYQSAGDPKEDELYEAAIIETNCIYRLMDDKLVPDDDYWGKIPKCSLLQPKEVLVFDFGSEVYVWHGKEVTLAQRKIAFQLAKHLWNGTFDYENCDINPLDPGECNPLIPRKGQGRPDWAIFGRLTEHNETILFKEKFLDWTELKRSNEKNPGELAQHKEDPRTDVKAYDVTRMVSMPQTTAGTILDGVNVGRGYGLVEGHDRRQFEITSVSVDVWHILEFDYSRLPKQSIGQFHEGDAYVVKWKFMVSTAGEWRLYCVRGEVPVEGNLLEVACHCSSLRSRTSMVVLNVNKALIYLWHGCKAQAHTKEVGRTAANKIKEQCPLEAGLHSSSKVTIHECDEGSEPLGFWDALGRRDRKAYDCMLQDPGSFNFAPRLFILSSSSGDFAATEFVYPARAPSVVSSMPFLQEDLYSAPQPALFLVDNHHEVYLWQGWWPIENKITGSARIRWASDRKSAMETVLQYCKGKNLKKPAPKSYLIHAGLEPLTFTNMFPSWEHREDIAEITEMDTEVSNQITLVEDVLAKLCKTIYPLADLLARPLPEGVDPLKLEIYLTDEDFEFALDMTRDEYNALPAWKQVNLKKAKGLF

SEQ ID NO: 856837 - protein, 2229 aa, Homo sapiens
MKRKERIARRLEGIENDTQPILLQSCTGLVTHRLLEEDTPRYMRASDPASPHIGRSNEEEETSDSSLEKQTRSKYCTETSGVHGDSPYGSGTMDTHSLESKAERIARYKAERRRQLAEKYGLTLDPEADSEYLSRYTKSRKEPDAVEKRGGKSDKQEESSRDASSLYPGTETMGLRTCAGESKDYALHAGDGSSDPEVLLNIENQRRGQELSATRQAHDLSPAAESSSTFSFSGRDSSFTEVPRSPKHAHSSSLQQAASRSPSFGDPQLSPEARPSTGKPKHEWFLQKDSEGDTPSLINWPSRVKVREKLVKEESARNSPELASESVTQRRHQPAPVHYVSFQSEHSAFDRVPSKAAGSTRQPIRGYVQPADTGHTAKLVTPETPENASECSWVASATQNVPKPPSLTVLEGDGRDSPVLHICESKAEEEEGEGEGEEKEEDVCFTEALEQSKKTLLALEGDGLVRSPEDPSRNEDFGKPAVSTVTLEHQKELENVAQPPQAPHQPTERTGRSEMVLYIQSEPVSQDAKPTGHNREASKKRKVRTRSLSDFTGPPQLQALKYKDPASRRELELPSSKTEGPYGEISMLDTKVSVAQLRSAFLASANACRRPELKSRVERSAEGPGLPTGVERERGSRKPRRYFSPGESRKTSERFRTQPITSAERKESDRCTSHSETPTVDDEEKVDERAKLSVAAKRLLFREMEKSFDEQNVPKRRSRNTAVEQRLRRLQDRSLTQPITTEEVVIAATEPIPASCSGGTHPVMARLPSPTVARSAVQPARLQASAHQKALAKDQTNEGKELAEQGEPDSSTLSLAEKLALFNKLSQPVSKAISTRNRIDTRQRRMNARYQTQPVTLGEVEQVQSGKLIPFSPAVNTSVSTVASTVAPMYAGDLRTKPPLDHNASATDYKFSSSIENSDSPVRSILKSQAWQPLVEGSENKGMLREYGETESKRALTGRDSGMEKYGSFEEAEASYPILNRAREGDSHKESKYAVPRRGSLERANPPITHLGDEPKEFSMAKMNAQGNLDLRDRLPFEEKVEVENVMKRKFSLRAAEFGEPTSEQTGTAAGKTIAQTTAPVSWKPQDSSEQPQEKLCKNPCAMFAAGEIKTPTGEGLLDSPSKTMSIKERLALLKKSGEEDWRNRLSRRQEGGKAPASSLHTQEAGRSLIKKRVTESRESQMTIEERKQLITVREEAWKTRGRGAANDSTQFTVAGRMVKKGLASPTAITPVASAICGKTRGTTPVSKPLEDIEARPDMQLESDLKLDRLETFLRRLNNKVGGMHETVLTVTGKSVKEVMKPDDDETFAKFYRSVDYNMPRSPVEMDEDFDVIFDPYAPKLTSSVAEHKRAVRPKRRVQASKNPLKMLAAREDLLQEYTEQRLNVAFMESKRMKVEKMSSNSNFSEVTLAGLASKENFSNVSLRSVNLTEQNSNNSAVPYKRLMLLQIKGRRHVQTRLVEPRASALNSGDCFLLLSPHCCFLWVGEFANVIEKAKASELATLIQTKRELGCRATYIQTIEEGINTHTHAAKDFWKLLGGQTSYQSAGDPKEDELYEAAIIETNCIYRLMDDKLVPDDDYWGKIPKCSLLQPKEVLVFDFGSEVYVWHGKEVTLAQRKIAFQLAKHLWNGTFDYENCDINPLDPGECNPLIPRKGQGRPDWAIFGRLTEHNETILFKEKFLDWTELKRSNEKNPGELAQHKEDPRTDVKAYDVTRMVSMPQTTAGTILDGVNVGRGYGLVEGHDRRQFEITSVSVDVWHILEFDYSRLPKQSIGQFHEGDAYVVKWKFMVSTAVGSRQKGEHSVRAAGKEKCVYFFWQGRHSTVSEKGTSALMTVELDEERGAQVQVLQGKEPPCFLQCFQGGMVVHSGRREEEEENVQSEWRLYCVRGEVPVEGNLLEVACHCSSLRSRTSMVVLNVNKALIYLWHGCKAQAHTKEVGRTAANKIKEHTLQTYKELLEFLPCRCPLEAGLHSSSKVTIHECDEGSEPLGFWDALGRRDRKAYDCMLQDPGSFNFAPRLFILSSSSGDFAATEFVYPARAPSVVSSMPFLQEDLYSAPQPALFLVDNHHEVYLWQGWWPIENKITGSARIRWASDRKSAMETVLQYCKGKNLKKPAPKSYLIHAGLEPLTFTNMFPSWEHREDIAEITEMDTEVSNQITLVEDVLAKLCKTIYPLADLLARPLPEGVDPLKLEIYLTDEDFEFALDMTRDEYNALPAWKQVNLKKAKGLF

SEQ ID NO: 856838 - protein, 1024 aa, Homo sapiens
SLQSQSCSLAAELTASVLMNSSDVSSLKHPSSLASPTAITPVASAICGKTRGTTPVSKPLEDIEARPDMQLESDLKLDRLETFLRRLNNKVGGMHETVLTVTGKSVKEVMKPDDDETFAKFYRSVDYNMPRSPVEMDEDFDVIFDPYAPKLTSSVAEHKRAVRPKRRVQASKNPLKMLAAREDLLQEYTEQRLNVAFMESKRMKVEKMSSNSNFSEVTLAGLASKENFSNVSLRSVNLTEQNSNNSAVPYKRLMLLQIKGRRHVQTRLVEPRASALNSGDCFLLLSPHCCFLWVGEFANVIEKAKASELATLIQTKRELGCRATYIQTIEEGINTHTHAAKDFWKLLGGQTSYQSAGDPKEDELYEAAIIETNCIYRLMDDKLVPDDDYWGKIPKCSLLQPKEVLVFDFGSEVYVWHGKEVTLAQRKIAFQLAKHLWNGTFDYENCDINPLDPGECNPLIPRKGQGRPDWAIFGRLTEHNETILFKEKFLDWTELKRSNEKNPGELAQHKEDPRTDVKAYDVTRMVSMPQTTAGTILDGVNVGRGYGLVEGHDRRQFEITSVSVDVWHILEFDYSRLPKQSIGQFHEGDAYVVKWKFMVSTAVGSRQKGEHSVRAAGKEKCVYFFWQGRHSTVSEKGTSALMTVELDEERGAQVQVLQGKEPPCFLQCFQGGMVVHSGRREEEEENVQSEWRLYCVRGEVPVEGNLLEVACHCSSLRSRTSMVVLNVNKALIYLWHGCKAQAHTKEVGRTAANKIKEQCPLEAGLHSSSKVTIHECDEGSEPLGFWDALGRRDRKAYDCMLQDPGSFNFAPRLFILSSSSGDFAATEFVYPARAPSVVSSMPFLQEDLYSAPQPALFLVDNHHEVYLWQGWWPIENKITGSARIRWASDRKSAMETVLQYCKGKNLKKPAPKSYLIHAGLEPLTFTNMFPSWEHREDIAEITEMDTEVSNQITLVEDVLAKLCKTIYPLADLLARPLPEGVDPLKLEIYLTDEDFEFALDMTRDEYNALPAWKQVNLKKAKGLF

SEQ ID NO: 856839 - protein, 679 aa, Homo sapiens
MLSCSSYPQAAGDPKEDELYEAAIIETNCIYRLMDDKLVPDDDYWGKIPKCSLLQPKEVLVFDFGSEVYVWHGKEVTLAQRKIAFQLAKHLWNGTFDYENCDINPLDPGECNPLIPRKGQGRPDWAIFGRLTEHNETILFKEKFLDWTELKRSNEKNPGELAQHKEDPRTDVKAYDVTRMVSMPQTTAGTILDGVNVGRGYGLVEGHDRRQFEITSVSVDVWHILEFDYSRLPKQSIGQFHEGDAYVVKWKFMVSTAVGSRQKGEHSVRAAGKEKCVYFFWQGRHSTVSEKGTSALMTVELDEERGAQVQVLQGKEPPCFLQCFQGGMVVHSGRREEEEENVQSEWRLYCVRGEVPVEGNLLEVACHCSSLRSRTSMVVLNVNKALIYLWHGCKAQAHTKEVGRTAANKIKEQCPLEAGLHSSSKVTIHECDEGSEPLGFWDALGRRDRKAYDCMLQDPGSFNFAPRLFILSSSSGDFAATEFVYPARAPSVVSSMPFLQEDLYSAPQPALFLVDNHHEVYLWQGWWPIENKITGSARIRWASDRKSAMETVLQYCKGKNLKKPAPKSYLIHAGLEPLTFTNMFPSWEHREDIAEITEMDTEVSNQITLVEDVLAKLCKTIYPLADLLARPLPEGVDPLKLEIYLTDEDFEFALDMTRDEYNALPAWKQVNLKKAKGLF

SEQ ID NO: 856840 - protein, 492 aa, Homo sapiens
SHHVPKAGLELLSSSDPPTSASQRFEITSVSVDVWHILEFDYSRLPKQSIGQFHEGDAYVVKWKFMVSTAVGSRQKGEHSVRAAGKEKCVYFFWQGRHSTVSEKGTSALMTVELDEERGAQVQVLQGKEPPCFLQCFQGGMVVHSGRREEEEENVQSEWRLYCVRGEVPVEGNLLEVACHCSSLRSRTSMVVLNVNKALIYLWHGCKAQAHTKEVGRTAANKIKEQCPLEAGLHSSSKVTIHECDEGSEPLGFWDALGRRDRKAYDCMLQDPGSFNFAPRLFILSSSSGDFAATEFVYPARAPSVVSSMPFLQEDLYSAPQPALFLVDNHHEVYLWQGWWPIENKITGSARIRWASDRKSAMETVLQYCKGKNLKKPAPKSYLIHAGLEPLTFTNMFPSWEHREDIAEITEMDTEVSNQITLVEDVLAKLCKTIYPLADLLARPLPEGVDPLKLEIYLTDEDFEFALDMTRDEYNALPAWKQVNLKKAKGLF

SEQ ID NO: 856841 - protein, 225 aa, Homo sapiens [sequence omitted]

SEQ ID NO: 856842 - protein, 148 aa, Homo sapiens
KKRFQGKSEKDRVSLGSTDIAICVTTGKNLKKPAPKSYLIHAGLEPLTFTNMFPSWEHREDIAEITEMDTEVSNQITLVEDVLAKLCKTIYPLADLLARPLPEGVDPLKLEIYLTDEDFEFALDMTRDEYNALPAWKQVNLKKAKGLF

SEQ ID NO: 856843 - protein, 1864 aa, Homo sapiens
MKRKERIARRLEGIENDTQPILLQSCTGLVTHRLLEEDTPRYMRASDPASPHIGRSNEEEETSDSSLEKQTRSKYCTETSGVHGDSPYGSGTMDTHSLESKAERIARYKAERRRQLAEKYGLTLDPEADSEYLSRYTKSRKEPDAVEKRGGKSDKQEESSRDASSLYPGTETMGLRTCAGESKDYALHAGDGSSDPEVLLNIENQRRGQELSATRQAHDLSPAAESSSTFSFSGRDSSFTEVPRSPKHAHSSSLQQAASRSPSFGDPQLSPEARPSTGKPKHEWFLQKDSEGDTPSLINWPSRVKVREKLVKEESARNSPELASESVTQRRHQPAPVHYVSFQSEHSAFDRVPSKAAGSTRQPIRGYVQPADTGHTAKLVTPETPENASECSWVASATQNVPKPPSLTVLEGDGRDSPVLHICESKAEEEEGEGEGEEKEEDVCFTEALEQSKKTLLALEGDGLVRSPEDPSRNEDFGKPAVSTVTLEHQKELENVAQPPQAPHQPTERTGRSEMVLYIQSEPVSQDAKPTGHNREASKKRKVRTRSLSDFTGPPQLQALKYKDPASRRELELPSSKTEGPYGEISMLDTKVSVAQLRSAFLASANACRRPELKSRVERSAEGPGLPTGVERERGSRKPRRYFSPGESRKTSERFRTQPITSAERKESDRCTSHSETPTVDDEEKVDERAKLSVAAKRLLFREMEKSFDEQNVPKRRSRNTAVEQRLRRLQDRSLTQPITTEEVVIAATEPIPASCSGGTHPVMARLPSPTVARSAVQPARLQASAHQKALAKDQTNEGKELAEQGEPDSSTLSLAEKLALFNKLSQPVSKAISTRNRIDTRQRRMNARYQTQPVTLGEVEQVQSGKLIPFSPAVNTSVSTVASTVAPMYAGDLRTKPPLDHNASATDYKFSSSIENSDSPVRSILKSQAWQPLVEGSENKGMLREYGETESKRALTGRDSGMEKYGSFEEAEASYPILNRAREGDSHKESKYAVPRRGSLERANPPITHLGDEPKEFSMAKMNAQGNLDLRDRLPFEEKVEVENVMKRKFSLRAAEFGEPTSEQTGTAAGKTIAQTTAPVSWKPQDSSEQPQEKLCKNPCAMFAAGEIKTPTGEGLLDSPSKTMSIKERLALLKKSGEEDWRNRLSRRQEGGKAPASSLHTQEAGRSLIKKRVTESRESQMTIEERKQLITVREEAWKTRGRGAANDSTQFTVAGRMVKKGLASPTAITPVASAICGKTRGTTPVSKPLEDIEARPDMQLESDLKLDRLETFLRRLNNKVGGMHETVLTVTGKSVKEVMKPDDDETFAKFYRSVDYNMPRSPVEMDEDFDVIFDPYAPKLTSSVAEHKRAVRPKRRVQASKNPLKMLAAREDLLQEYTEQRLNVAFMESKRMKVEKMSSNSNFSEVTLAGLASKENFSNVSLRSVNLTEQNSNNSAVPYKRLMLLQIKGRRHVQTRLVEPRASALNSGDCFLLLSPHCCFLWVGEFANVIEKAKASELATLIQTKRELGCRATYIQTIEEGINTHTHAAKDFWKLLGGQTSYQSAGDPKEDELYEAAIIETNCIYRLMDDKLVPDDDYWGKIPKCSLLQPKEVLVFDFGSEVYVWHGKEVTLAQRKIAFQLAKHLWNGTFDYENCDINPLDPGECNPLIPRKGQGRPDWAIFGRLTEHNETILFKEKFLDWTELKRSNEKNPGELAQHKEDPRTDVKAYDVTRMVSMPQTTAGTILDGVNVGRGYGLVEGHDRRQFEITSVSVDVWHILEFDYSRLPKQSIGQFHEGDAYVVKWKFMVSTAVGSRQKGEHSVRAAGKEKCVYFFWQGRHSTVSEKGTSALMTVELDEERGAQVQVLQGGPSSRSGSQKVERAK

SEQ ID NO: 856844 - protein, 1837 aa, Homo sapiens
MKRKERIARRLEGIENDTQPILLQSCTGLVTHRLLEEDTPRYMRASDPASPHIGRSNEEEETSDSSLEKQTRSKYCTETSGVHGDSPYGSGTMDTHSLESKAERIARYKAERRRQLAEKYGLTLDPEADSEYLSRYTKSRKEPDAVEKRGGKSDKQEESSRDASSLYPGTETMGLRTCAGESKDYALHAGDGSSDPEVLLNIENQRRGQELSATRQAHDLSPAAESSSTFSFSGRDSSFTEVPRSPKHAHSSSLQQAASRSPSFGDPQLSPEARPSTGKPKHEWFLQKDSEGDTPSLINWPSRVKVREKLVKEESARNSPELASESVTQRRHQPAPVHYVSFQSEHSAFDRVPSKAAGSTRQPIRGYVQPADTGHTAKLVTPETPENASECSWVASATQNVPKPPSLTVLEGDGRDSPVLHICESKAEEEEGEGEGEEKEEDVCFTEALEQSKKTLLALEGDGLVRSPEDPSRNEDFGKPAVSTVTLEHQKELENVAQPPQAPHQPTERTGRSEMVLYIQSEPVSQDAKPTGHNREASKKRKVRTRSLSDFTGPPQLQALKYKDPASRRELELPSSKTEGPYGEISMLDTKVSVAQLRSAFLASANACRRPELKSRVERSAEGPGLPTGVERERGSRKPRRYFSPGESRKTSERFRTQPITSAERKESDRCTSHSETPTVDDEEKVDERAKLSVAAKRLLFREMEKSFDEQNVPKRRSRNTAVEQRLRRLQDRSLTQPITTEEVVIAATEPIPASCSGGTHPVMARLPSPTVARSAVQPARLQASAHQKALAKDQTNEGKELAEQGEPDSSTLSLAEKLALFNKLSQPVSKAISTRNRIDTRQRRMNARYQTQPVTLGEVEQVQSGKLIPFSPAVNTSVSTVASTVAPMYAGDLRTKPPLDHNASATDYKFSSSIENSDSPVRSILKSQAWQPLVEGSENKGMLREYGETESKRALTGRDSGMEKYGSFEEAEASYPILNRAREGDSHKESKYAVPRRGSLERANPPITHLGDEPKEFSMAKMNAQGNLDLRDRLPFEEKVEVENVMKRKFSLRAAEFGEPTSEQTGTAAGKTIAQTTAPVSWKPQDSSEQPQEKLCKNPCAMFAAGEIKTPTGEGLLDSPSKTMSIKERLALLKKSGEEDWRNRLSRRQEGGKAPASSLHTQEAGRSLIKKRVTESRESQMTIEERKQLITVREEAWKTRGRGAANDSTQFTVAGRMVKKGLASPTAITPVASAICGKTRGTTPVSKPLEDIEARPDMQLESDLKLDRLETFLRRLNNKVGGMHETVLTVTGKSVKEVMKPDDDETFAKFYRSVDYNMPRSPVEMDEDFDVIFDPYAPKLTSSVAEHKRAVRPKRRVQASKNPLKMLAAREDLLQEYTEQRLNVAFMESKRMKVEKMSSNSNFSEVTLAGLASKENFSNVSLRSVNLTEQNSNNSAVPYKRLMLLQIKGRRHVQTRLVEPRASALNSGDCFLLLSPHCCFLWVGEFANVIEKAKASELATLIQTKRELGCRATYIQTIEEGINTHTHAAKDFWKLLGGQTSYQSAGDPKEDELYEAAIIETNCIYRLMDDKLVPDDDYWGKIPKCSLLQPKEVLVFDFGSEVYVWHGKEVTLAQRKIAFQLAKHLWNGTFDYENCDINPLDPGECNPLIPRKGQGRPDWAIFGRLTEHNETILFKEKFLDWTELKRSNEKNPGELAQHKEDPRTDVKAYDVTRMVSMPQTTAGTILDGVNVGRGYGLVEGHDRRQFEITSVSVDVWHILEFDYSRLPKQSIGQFHEGDAYVVKWKFMVSTAGLVSACGFFQLKEAGPAALREPASPMNPVMPSAASVQWGTAVMRL

SEQ ID NO: 856845 - protein, 1505 aa, Homo sapiens
MKRKERIARRLEGIENDTQPILLQSCTGLVTHRLLEEDTPRYMRASDPASPHIGRSNEEEETSDSSLEKQTRSKYCTETSGVHGDSPYGSGTMDTHSLESKAERIARYKAERRRQLAEKYGLTLDPEADSEYLSRYTKSRKEPDAVEKRGGKSDKQEESSRDASSLYPGTETMGLRTCAGESKDYALHAGDGSSDPEVLLNIENQRRGQELSATRQAHDLSPAAESSSTFSFSGRDSSFTEVPRSPKHAHSSSLQQAASRSPSFGDPQLSPEARPSTGKPKHEWFLQKDSEGDTPSLINWPSRVKVREKLVKEESARNSPELASESVTQRRHQPAPVHYVSFQSEHSAFDRVPSKAAGSTRQPIRGYVQPADTGHTAKLVTPETPENASECSWVASATQNVPKPPSLTVLEGDGRDSPVLHICESKAEEEEGEGEGEEKEEDVCFTEALEQSKKTLLALEGDGLVRSPEDPSRNEDFGKPAVSTVTLEHQKELENVAQPPQAPHQPTERTGRSEMVLYIQSEPVSQDAKPTGHNREASKKRKVRTRSLSDFTGPPQLQALKYKDPASRRELELPSSKTEGPYGEISMLDTKVSVAQLRSAFLASANACRRPELKSRVERSAEGPGLPTGVERERGSRKPRRYFSPGESRKTSERFRTQPITSAERKESDRCTSHSETPTVDDEEKVDERAKLSVAAKRLLFREMEKSFDEQNVPKRRSRNTAVEQRLRRLQDRSLTQPITTEEVVIAATEPIPASCSGGTHPVMARLPSPTVARSAVQPARLQASAHQKALAKDQTNEGKELAEQGEPDSSTLSLAEKLALFNKLSQPVSKAISTRNRIDTRQRRMNARYQTQPVTLGEVEQVQSGKLIPFSPAVNTSVSTVASTVAPMYAGDLRTKPPLDHNASATDYKFSSSIENSDSPVRSILKSQAWQPLVEGSENKGMLREYGETESKRALTGRDSGMEKYGSFEEAEASYPILNRAREGDSHKESKYAVPRRGSLERANPPITHLGDEPKEFSMAKMNAQGNLDLRDRLPFEEKVEVENVMKRKFSLRAAEFGEPTSEQTGTAAGKTIAQTTAPVSWKPQDSSEQPQEKLCKNPCAMFAAGEIKTPTGEGLLDSPSKTMSIKERLALLKKSGEEDWRNRLSRRQEGGKAPASSLHTQEAGRSLIKKRVTESRESQMTIEERKQLITVREEAWKTRGRGAANDSTQFTVAGRMVKKGLASPTAITPVASAICGKTRGTTPVSKPLEDIEARPDMQLESDLKLDRLETFLRRLNNKVGGMHETVLTVTGKSVKEVMKPDDDETFAKFYRSVDYNMPRSPVEMDEDFDVIFDPYAPKLTSSVAEHKRAVRPKRRVQASKNPLKMLAAREDLLQEYTEQRLNVAFMESKRMKVEKMSSNSNFSEVTLAGLASKENFSNVSLRSVNLTEQNSNNSAVPYKRLMLLQIKGRRHVQTRLVEPRASALNSGDCFLLLSPHCCFLWVGEFANVIEKAKPQTALIRRPP

SEQ ID NO: 856846 - protein, 71 aa, Homo sapiens
GPGHAKQFLIRRGLSDAVSLTVSACLDIEARPDMQLESDLKLDRLETFLRRLNNKGTYWKPEGFAFRISKS

SEQ ID NO: 856847 - protein, 80 aa, Homo sapiens
NRLSRRQEGGKAPASSLHTQEAGRSLIKKVTFPMLGKAFRLTSLLEVHQKDKRVPPNSYSVKHLCIFALRVHTESLSQSS

SEQ ID NO: 856848 - protein, 176 aa, Homo sapiens
PGANGFSPALGPRLFATGPCRPGESEPDICFSSGVSAADLSLCHSVFAVGSRQKGEHSVRAAGKEKCVYFFWQGRHSTVSEKGTSALMTVELDEERGAQVSPGELCTPGTERSILSWEPMALGLVPPNMILIMEDHVTQSTSVLVWLLQVSGCASHFFPPPTFCKMILEKMLYLQI

SEQ ID NO: 856849 - protein, 80 aa, Homo sapiens
NREASKKRKVRTRSLSDFTGPPQLQALKYKDPASRRELELPSSKTEGPYGEISMLDTKVSVAQLRSAFLASANACRRPEL

SEQ ID NO: 856850 - protein, 2214 aa, Homo sapiens; identical to SEQ ID NO: 856832

SEQ ID NO: 856851 - protein, 2214 aa, Homo sapiens; identical to SEQ ID NO: 856832

SEQ ID NO: 856852 - protein, 2214 aa, Homo sapiens; identical to SEQ ID NO: 856832

SEQ ID NO: 856853 - protein, 2417 aa, Homo sapiens
MKRKERIARRLEGIENDTQPILLQSCTGLVTHRLLEEDTPRYMRASDPASPHIGRSNEEEETSDSSLEKQTRSKYCTETSGVHGDSPYGSGTMDTHSLESKAERIARYKAERRRQLAEKYGLTLDPEADSEYLSRYTKSRKEPDAVEKRGGKSDKQEESSRDASSLYPGTETMGLRTCAGESKDYALHAGDGSSDPEVLLNIENQRRGQELSATRQAHDLSPAAESSSTFSFSGRDSSFTEVPRSPKHAHSSSLQQAASRSPSFGDPQLSPEARPSTGKPKHEWFLQKDSEGDTPSLINWPSRVKVREKLVKEESARNSPELASESVTQRRHQPAPVHYVSFQSEHSAFDRVPSKAAGSTRQPIRGYVQPADTGHTAKLVTPETPENASECSWVASATQNVPKPPSLTVLEGDGRDSPVLHICESKAEEEEGEGEGEEKEEDVCFTEALEQSKKTLLALEGDGLVRSPEDPSRNEDFGKPAVSTVTLEHQKELENVAQPPQAPHQPTERTGRSEMVLYIQSEPVSQDAKPTGHNREASKKRKVRTRSLSDFTGPPQLQALKYKDPASRRELELPSSKTEGPYGEISMLDTKVSVAQLRSAFLASANACRRPELKSRVERSAEGPGLPTGVERERGSRKPRRYFSPGESRKTSERFRTQPITSAERKESDRCTSHSETPTVDDEEKVDERAKLSVAAKRLLFREMEKSFDEQNVPKRRSRNTAVEQRLRRLQDRSLTQPITTEEVVIAATEPIPASCSGGTHPVMARLPSPTVARSAVQPARLQASAHQKALAKDQTNEGKELAEQGEPDSSTLSLAEKLALFNKLSQPVSKAISTRNRIDTRQRRMNARYQTQPVTLGEVEQVQSGKLIPFSPAVNTSVSTVASTVAPMYAGDLRTKPPLDHNASATDYKFSSSIENSDSPVRSILKSQAWQPLVEGSENKGMLREYGETESKRALTGRDSGMEKYGSFEEAEASYPILNRAREGDSHKESKYAVPRRGSLERANPPITHLGDEPKEFSMAKMNAQGNLDLRDRLPFEEKVEVENVMKRKFSLRAAEFGEPTSEQTGTAAGKTIAQTTAPVSWKPQDSSEQPQEKLCKNPCAMFAAGEIKTPTGEGLLDSPSKTMSIKERLALLKKSGEEDWRNRLSRRQEGGKAPASSLHTQEAGRSLIKKRVTESRESQMTIEERKQLITVREEAWKTRGRGAANDSTQFTVAGRMVKKGLASPTAITPVASAICGKTRGTTPVSKPLEDIEARPDMQLESDLKLDRLETFLRRLNNKVGGMHETVLTVTGKSVKEVMKPDDDETFAKFYRSVDYNMPRSPVEMDEDFDVIFDPYAPKLTSSVAEHKRAVRPKRRVQASKNPLKMLAAREDLLQEYTEQRLNVAFMESKRMKVEKMSSNSNFSEVTLAGLASKENFSNVSLRSVNLTEQNSNNSAVPYKRLMLLQIKGRRHVQTRLVEPRASALNSGDCFLLLSPHCCFLWVGEFANVIEKAKVGDLKNKNALANISFTHRRSVLPDVSHKASQKPGVAFKGEGIGRISFPECLSNKLSLHVEMGYFRTMTYTPVFRSWVPSYSCVKKEAAPLESPLSQVALKFCHRPVEVRLSWGKAQRIVFFKSITCDLLKMENYCSERIDTPWSFSYIFLRSLKIPSNQHPPTPVVTRLSLQAHCFSSLVLTCATLSSQGLFYPGNCVPLFFEASELATLIQTKRELGCRATYIQTIEEGINTHTHAAKDFWKLLGGQTSYQSAGDPKEDELYEAAIIETNCIYRLMDDKLVPDDDYWGKIPKCSLLQPKEVLVFDFGSEVYVWHGKEVTLAQRKIAFQLAKHLWNGTFDYENCDINPLDPGECNPLIPRKGQGRPDWAIFGRLTEHNETILFKEKFLDWTELKRSNEKNPGELAQHKEDPRTDVKAYDVTRMVSMPQTTAGTILDGVNVGRGYGLVEGHDRRQFEITSVSVDVWHILEFDYSRLPKQSIGQFHEGDAYVVKWKFMVSTAVGSRQKGEHSVRAAGKEKCVYFFWQGRHSTVSEKGTSALMTVELDEERGAQVQVLQGKEPPCFLQCFQGGMVVHSGRREEEEENVQSEWRLYCVRGEVPVEGNLLEVACHCSSLRSRTSMVVLNVNKALIYLWHGCKAQAHTKEVGRTAANKIKEQCPLEAGLHSSSKVTIHECDEGSEPLGFWDALGRRDRKAYDCMLQDPGSFNFAPRLFILSSSSGDFAATEFVYPARAPSVVSSMPFLQEDLYSAPQPALFLVDNHHEVYLWQGWWPIENKITGSARIRWASDRKSAMETVLQYCKGKNLKKPAPKSYLIHAGLEPLTFTNMFPSWEHREDIAEITEMDTEVSNQITLVEDVLAKLCKTIYPLADLLARPLPEGVDPLKLEIYLTDEDFEFALDMTRDEYNALPAWKQVNLKKAKGLF

SEQ ID NO: 856854 - protein, 2199 aa, Homo sapiens
MKRKERIARRLEGIENDTQPILLQSCTGLVTHRLLEEDTPRYMRASDPASPHIGRSNEEEETSDSSLEKQTRSKYCTETSGVHGDSPYGSGTMDTHSLESKAERIARYKAERRRQLAEKYGLTLDPEADSEYLSRYTKSRKEPDAVEKRGGKSDKQEESSRDASSLYPGTETMGLRTCAGESKDYALHAGDGSSDPEVLLNIENQRRGQELSATRQAHDLSPAAESSSTFSFSGRDSSFTEVPRSPKHAHSSSLQQAASRSPSFGDPQLSPEARPSTGKPKHEWFLQKDSEGDTPSLINWPSRVKVREKLVKEESARNSPELASESVTQRRHQPAPVHYVSFQSEHSAFDRVPSKAAGSTRQPIRGYVQPADTGHTAKLVTPETPENASECSWVASATQNVPKPPSLTVLEGDGRDSPVLHICESKAEEEEGEGEGEEKEEDVCFTEALEQSKKTLLALEGDGLVRSPEDPSRNEDFGKPAVSTVTLEHQKELENVAQPPQAPHQPTERTGRSEMVLYIQSEPVSQDAKPTGHNREASKKRKVRTRSLSDFTGPPQLQALKYKDPASRRELELPSSKTEGPYGEISMLDTKVSVAQLRSAFLASANACRRPELKSRVERSAEGPGLPTGVERERGSRKPRRYFSPGESRKTSERFRTQPITSAERKESDRCTSHSETPTVDDEEKVDERAKLSVAAKRLLFREMEKSFDEQNVPKRRSRNTAVEQRLRRLQDRSLTQPITTEEVVIAATEPIPASCSGGTHPVMARLPSPTVARSAVQPARLQASAHQKALAKDQTNEGKELAEQGEPDSSTLSLAEKLALFNKLSQPVSKAISTRNRIDTRQRRMNARYQTQPVTLGEVEQVQSGKLIPFSPAVNTSVSTVASTVAPMYAGDLRTKPPLDHNASATDYKFSSSIENSDSPVRSILKSQAWQPLVEGSENKGMLREYGETESKRALTGRDSGMEKYGSFEEAEASYPILNRAREGDSHKESKYAVPRRGSLERANPPITHLGDEPKEFSMAKMNAQGNLDLRDRLPFEEKVEVENVMKRKFSLRAAEFGEPTSEQTGTAAGKTIAQTTAPVSWKPQDSSEQPQEKLCKNPCAMFAAGEIKTPTGEGLLDSPSKTMSIKERLALLKKSGEEDWRNRLSRRQEGGKAPASSLHTQEAGRSLIKKRVTESRESQMTIEERKQLITVREEAWKTRGRGAANDSTQFTVAGRMVKKGLASPTAITPVASAICGKTRGTTPVSKPLEDIEARPDMQLESDLKLDRLETFLRRLNNKVGGMHETVLTVTGKSVKEVMKPDDDETFAKFYRSVDYNMPRSPVEMDEDFDVIFDPYAPKLTSSVAEHKRAVRPKRRVQASKNPLKMLAAREDLLQEYTEQRLNVAFMESKRMKVEKMSSNSNFSEVTLAGLASKENFSNVSLRSVNLTEQNSNNSAVPYKRLMLLQIKGRRHVQTRLVEPRASALNSGDCFLLLSPHCCFLWVGEFANVIEKAKASELATLIQTKRELGCRATYIQTIEEGINTHTHAAKDFWKLLGGQTSYQSAGDPKEDELYEAAIIETNCIYRLMDDKLVPDDDYWGKIPKCSLLQPKEVLVFDFGSEVYVWHGKEVTLAQRKIAFQLAKHLWNGTFDYENCDINPLDPGECNPLIPRKGQGRPDWAIFGRLTEHNETILFKEKFLDWTELKRSNEKNPGELAQHKEDPRTDVKAYDVTRMVSMPQTTAGTILDGVNVGRGYGLVEGHDRRQFEITSVSVDVWHILEFDYSRLPKQSIGQFHEGDAYVVKWKFMVSTAVGSRQKGEHSVRAAGKEKCVYFFWQGRHSTVSEKGTSALMTVELDEERGAQVQVLQGKEPPCFLQCFQGGMVVHSGRREEEEENVQRNLLEVACHCSSLRSRTSMVVLNVNKALIYLWHGCKAQAHTKEVGRTAANKIKEQCPLEAGLHSSSKVTIHECDEGSEPLGFWDALGRRDRKAYDCMLQDPGSFNFAPRLFILSSSSGDFAATEFVYPARAPSVVSSMPFLQEDLYSAPQPALFLVDNHHEVYLWQGWWPIENKITGSARIRWASDRKSAMETVLQYCKGKNLKKPAPKSYLIHAGLEPLTFTNMFPSWEHREDIAEITEMDTEVSNQITLVEDVLAKLCKTIYPLADLLARPLPEGVDPLKLEIYLTDEDFEFALDMTRDEYNALPAWKQVNLKKAKGLF

SEQ ID NO: 856855 - protein, 1097 aa, Homo sapiens
ALAVLIALEESAYSVSIVPGSGTTLGLGVSKFEQRSNLPASSLHTQEAGRSLIKKRVTESRESQMTIEERKQLITVREEAWKTRGRGAANDSTQFTVAGRMVKKGLASPTAITPVASAICGKTRGTTPVSKPLEDIEARPDMQLESDLKLDRLETFLRRLNNKVGGMHETVLTVTGKSVKEVMKPDDDETFAKFYRSVDYNMPRSPVEMDEDFDVIFDPYAPKLTSSVAEHKRAVRPKRRVQASKNPLKMLAAREDLLQEYTEQRLNVAFMESKRMKVEKMSSNSNFSEVTLAGLASKENFSNVSLRSVNLTEQNSNNSAVPYKRLMLLQIKGRRHVQTRLVEPRASALNSGDCFLLLSPHCCFLWVGEFANVIEKAKASELATLIQTKRELGCRATYIQTIEEGINTHTHAAKDFWKLLGGQTSYQSAGDPKEDELYEAAIIETNCIYRLMDDKLVPDDDYWGKIPKCSLLQPKEVLVFDFGSEVYVWHGKEVTLAQRKIAFQLAKHLWNGTFDYENCDINPLDPGECNPLIPRKGQGRPDWAIFGRLTEHNETILFKEKFLDWTELKRSNEKNPGELAQHKEDPRTDVKAYDVTRMVSMPQTTAGTILDGVNVGRGYGLVEGHDRRQFEITSVSVDVWHILEFDYSRLPKQSIGQFHEGDAYVVKWKFMVSTAVGSRQKGEHSVRAAGKEKCVYFFWQGRHSTVSEKGTSALMTVELDEERGAQVQVLQGKEPPCFLQCFQGGMVVHSGRREEEEENVQSEWRLYCVRGEVPVEGNLLEVACHCSSLRSRTSMVVLNVNKALIYLWHGCKAQAHTKEVGRTAANKIKEQCPLEAGLHSSSKVTIHECDEGSEPLGFWDALGRRDRKAYDCMLQDPGSFNFAPRLFILSSSSGDFAATEFVYPARAPSVVSSMPFLQEDLYSAPQPALFLVDNHHEVYLWQGWWPIENKITGSARIRWASDRKSAMETVLQYCKGKNLKKPAPKSYLIHAGLEPLTFTNMFPSWEHREDIAEITEMDTEVSNQITLVEDVLAKLCKTIYPLADLLARPLPEGVDPLKLEIYLTDEDFEFALDMTRDEYNALPAWKQVNLKKAKGLF

SEQ ID NO: 856856 - protein, 354 aa, Homo sapiens
MTDPGCTGRREEEDEHVHSEWRLYCVRGEVPVEGNLLEVACHCSSLRSRTSMVVLNVNKALIYLWHGCKAQAHTKEVGRTAANKIKEQCPLEAGLHSSSKVTIHECDEGSEPLGFWDALGRRDRKAYDCMLQDPGSFNFAPRLFILSSSSGDFAATEFVYPARAPSVVSSMPFLQEDLYSAPQPALFLVDNHHEVYLWQGWWPIENKITGSARIRWASDRKSAMETVLQYCKGKNLKKPAPKSYLIHAGLEPLTFTNMFPSWEHREDIAEITEMDTEVSNQITLVEDVLAKLCKTIYPLADLLARPLPEGVDPLKLEIYLTDEDFEFALDMTRDEYNALPAWKQVNLKKAKGLF

SEQ ID NO: 856857 - protein, 184 aa, Homo sapiens [sequence omitted]

SEQ ID NO: 856858 - protein, 2075 aa, Homo sapiens
MKRKERIARRLEGIENDTQPILLQSCTGLVTHRLLEEDTPRYMRASDPASPHIGRSNEEEETSDSSLEKQTRSKYCTETSGVHGDSPYGSGTMDTHSLESKAERIARYKAERRRQLAEKYGLTLDPEADSEYLSRYTKSRKEPDAVEKRGGKSDKQEESSRDASSLYPGTETMGLRTCAGESKDYALHAGDGSSDPEVLLNIENQRRGQELSATRQAHDLSPAAESSSTFSFSGRDSSFTEVPRSPKHAHSSSLQQAASRSPSFGDPQLSPEARPSTGKPKHEWFLQKDSEGDTPSLINWPSRVKVREKLVKEESARNSPELASESVTQRRHQPAPVHYVSFQSEHSAFDRVPSKAAGSTRQPIRGYVQPADTGHTAKLVTPETPENASECSWVASATQNVPKPPSLTVLEGDGRDSPVLHICESKAEEEEGEGEGEEKEEDVCFTEALEQSKKTLLALEGDGLVRSPEDPSRNEDFGKPAVSTVTLEHQKELENVAQPPQAPHQPTERTGRSEMVLYIQSEPVSQDAKPTGHNREASKKRKVRTRSLSDFTGPPQLQALKYKDPASRRELELPSSKTEGPYGEISMLDTKVSVAQLRSAFLASANACRRPELKSRVERSAEGPGLPTGVERERGSRKPRRYFSPGESRKTSERFRTQPITSAERKESDRCTSHSETPTVDDEEKVDERAKLSVAAKRLLFREMEKSFDEQNVPKRRSRNTAVEQRLRRLQDRSLTQPITTEEVVIAATEPIPASCSGGTHPVMARLPSPTVARSAVQPARLQASAHQKALAKDQTNEGKELAEQGEPDSSTLSLAEKLALFNKLSQPVSKAISTRNRIDTRQRRMNARYQTQPVTLGEVEQVQSGKLIPFSPAVNTSVSTVASTVAPMYAGDLRTKPPLDHNASATDYKFSSSIENSDSPVRSILKSQAWQPLVEGSENKGMLREYGETESKRALTGRDSGMEKYGSFEEAEASYPILNRAREGDSHKESKYAVPRRGSLERANPPITHLGDEPKEFSMAKMNAQGNLDLRDRLPFEEKVEVENVMKRKFSLRAAEFGEPTSEQTGTAAGKTIAQTTAPVSWKPQDSSEQPQEKLCKNPCAMFAAGEIKTPTGEGLLDSPSKTMSIKERLALLKKSGEEDWRNRLSRRQEGGKAPASSLHTQEAGRSLIKKRVTESRESQMTIEERKQLITVREEAWKTRGRGAANDSTQFTVAGRMVKKGLASPTAITPVASAICGKTRGTTPVSKPLEDIEARPDMQLESDLKLDRLETFLRRLNNKVGGMHETVLTVTGKSVKEVMKPDDDETFAKFYRSVDYNMPRSPVEMDEDFDVIFDPYAPKLTSSVAEHKRAVRPKRRVQASKNPLKMLAAREDLLQEYTEQRLNVAFMESKRMKVEKMSSNSNFSEVTLAGLASKENFSNVSLRSVNLTEQNSNNSAVPYKRLMLLQIKGRRHVQTRLVEPRASALNSGDCFLLLSPHCCFLWVGEFANVIEKAKASELATLIQTKRELGCRATYIQTIEEGINTHTHAAKDFWKLLGGQTSYQSAGDPKEDELYEAAIIETNCIYRLMDDKLVPDDDYWGKIPKCSLLQPKEVLVFDFGSEVYVWHGKEVTLAQRKIAFQLAKHLWNGTFDYENCDINPLDPGECNPLIPRKGQGRPDWAIFGRLTEHNETILFKEKFLDWTELKRSNEKNPGELAQHKEDPRTDVKAYDVTRMVSMPQTTAGTILDGVNVGRGYGLVEGHDRRQFEITSVSVDVWHILEFDYSRLPKQSIGQFHEGDAYVVKWKFMVSTAVGSRQKGEHSVRAAGKEKCVYFFWQGRHSTVSEKGTSALMTVELDEERGAQVQVLQGKEPPCFLQCFQGGMVVHSGRREEEEENVQSEWRLYCVRGEVPVEGNLLEVACHCSSLRSRTSMVVLNVNKALIYLWHGCKAQAHTKEVGRTAANKIKEQCPLEAGLHSSSKVTIHECDEGSEPLGFWDALGRRDRKAYDCMLQGNVASTVCDLVFLFVFGNKSLALLSRLEYSGMITAHCSFNLLGSSDQPASASQSAGLSHCAPFMFYLNSSVCLKSSVMSIMSS

SEQ ID NO: 856859 - protein, 409 aa, Homo sapiens
MKRKERIARRLEGIENDTQPILLQSCTGLVTHRLLEEDTPRYMRASDPASPHIGRSNEEEETSDSSLEKQTRSKYCTETSGVHGDSPYGSGTMDTHSLESKAERIARYKAERRRQLAEKYGLTLDPEADSEYLSRYTKSRKEPDAVEKRGGKSDKQEESSRDASSLYPGTETMGLRTCAGESKDYALHAGDGSSDPEVLLNIENQRRGQELSATRQAHDLSPAAESSSTFSFSGRDSSFTEVPRSPKHAHSSSLQQAASRSPSFGDPQLSPEARPRCTSHSETPTVDDEEKVDERAKLSVAAKRLLFREMEKSFDEQNVPKRRSRNTAVEQRLRRLQDRSLTQPITTEEVVIAATLQASAHQKALAKDQTNEGKELAEQGEPDSSTLSLAEKLALFNKLSQPVSKAILM

SEQ ID NO: 856860 - protein, 1210 aa, Homo sapiens
MKRKERIARRLEGIENDTQPILLQSCTGLVTHRLLEEDTPRYMRASDPASPHIGRSNEEEETSDSSLEKQTRSKYCTETSGVHGDSPYGSGTMDTHSLESKAERIARYKAERRRQLAEKYGLTLDPEADSEYLSRYTKSRKEPDAVEKRGGKSDKQEESSRDASSLYPGTETMGLRTCAGESKDYALHAGDGSSDPEVLLNIENQRRGQELSATRQAHDLSPAAESSSTFSFSGRDSSFTEVPRSPKHAHSSSLQQAASRSPSFGDPQLSPEARPSTGKPKHEWFLQKDSEGDTPSLINWPSRVKVREKLVKEESARNSPELASESVTQRRHQPAPVHYVSFQSEHSAFDRVPSKAAGSTRQPIRGYVQPADTGHTAKLVTPETPENASECSWVASATQNVPKPPSLTVLEGDGRDSPVLHICESKAEEEEGEGEGEEKEEDVCFTEALEQSKKTLLALEGDGLVRSPEDPSRNEDFGKPAVSTVTLEHQKELENVAQPPQAPHQPTERTGRSEMVLYIQSEPVSQDAKPTGHNREASKKRKVRTRSLSDFTGPPQLQALKYKDPASRRELELPSSKTEGPYGEISMLDTKVSVAQLRSAFLASANACRRPELKSRVERSAEGPGLPTGVERERGSRKPRRYFSPGESRKTSERFRTQPITSAERKESDRCTSHSETPTVDDEEKVDERAKLSVAAKRLLFREMEKSFDEQNVPKRRSRNTAVEQRLRRLQDRSLTQPITTEEVVIAATEPIPASCSGGTHPVMARLPSPTVARSAVQPARLQASAHQKALAKDQTNEGKELAEQGEPDSSTLSLAEKLALFNKLSQPVSKAISTRNRIDTRQRRMNARYQTQPVTLGEVEQVQSGKLIPFSPAVNTSVSTVASTVAPMYAGDLRTKPPLDHNASATDYKFSSSIENSDSPVRSILKSQAWQPLVEGSENKGMLREYGETESKRALTGRDSGMEKYGSFEEAEASYPILNRAREGDSHKESKYAVPRRGSLERANPPITHLGDEPKEFSMAKMNAQGNLDLRDRLPFEEKVEVENVMKRKFSLRAAEFGEPTSEQTGTAAGKTIAQTTAPVSWKPQDSSEQPQEKLCKNPCAMFAAGEIKTPTGEGLLDSPSKTMSIKERLALLKKSGEEDWRNRLSRRQEGGKAPASSLHTQEAGRSLIKKRVTEVVFSESRKTAADMYSRNQCLMKLGLRSKRQSTFC

SEQ ID NO: 856861 - protein, 93 aa, Homo sapiens
TYGMEPLTMRTVTSIPWILENAIRLSPGTPAAARGQLFKRADSLRSLCSHHSPLLSLFIGFSFHKRLYAVDCEYSQKEQFFNFYLTIAEIWMS

SEQ ID NO: 856862 - protein, 81 aa, Homo sapiens
WAPRCVLCAVECHSVCKYMSLLEICTSHPCDLLVGRSNEEEETSDSSLEKQTRSKYCTETSGVHGDSPYGSGTMDTHSLES

SEQ ID NO: 856863 - protein, 1696 aa, Homo sapiens
MAQFPTAMNGGPNMWAITSEERTKHDRQFDNLKPSGGYITGDQARNFFLQSGLPAPVLAEIWALSDLNKDGKMDQQEFSIAMKLIKLKLQGQQLPVVLPPIMKQPPMFSPLISARFGMGSMPNLSIPQPLPPAAPITSLSSATSGTNLPPLMMPTPLVPSVSTSSLPNGTASLIQPLPIPYSSSTLPHGSSYSLMMGGFGGASIQKAQSLIDLGSSSSTSSTASLSGNSPKTGTSEWAVPQPTRLKYRQKFNTLDKSMSGYLSGFQARNALLQSNLSQTQLATIWTLADVDGDGQLKAEEFILAMHLTDMAKAGQPLPLTLPPELVPPSFRGGKQIDSINGTLPSYQKMQEEEPQKKLPVTFEDKRKANYERGNMELEKRRQALMEQQQREAERKAQKEKEEWERKQRELQEQEWKKQLELEKRLEKQRELERQREEERRKDIERREAAKQELERQRRLEWERIRRQELLNQKNREQEEIVRLNSKKKNLHLELEALNGKHQQISGRLQDVRLKKQTQKTELEVLDKQCDLEIMEIKQLQQELQEYQNKLIYLVPEKQLLNERIKNMQFSNTPDSGVSLLHKKSLEKEELCQRLKEQLDALEKETASKLSEMDSFNNQLKCGNMDDSVLQCLLSLLSCLNNLFLLLKELRETYNTQQLALEQLYKIKRDKLKEIERKRLELMQKKKLEDEAARKAKQGKENLWKENLRKEEEEKQKRLQEEKTQEKIQEEERKAEEKQRKDKDTLKAEEKKRETASVLVNYRALYPFEARNHDEMSFNSGDIIQVDEKTVGEPGWLYGSFQGNFGWFPCNYVEKMPSSENEKAVSPKKALLPPTVSLSATSTSSEPLSSNQPASVTDYQNVSFSNLTVNTSWQKKSAFTRTVSPGSVSPIHGQGQVVENLKAQALCSWTAKKDNHLNFSKHDIITVLEQQENWWFGEVHGGRGWFPKSYVKIIPGSEVKREEPEALYAAVNKKPTSAAYSVGEEYIALYPYSSVEPGDLTFTEGEEILVTQKDGEWWTGSIGDRSGIFPSNYVKPKDQESFGSASKSGASNKKPEIAQVTSAYVASGSEQLSLAPGQLILILKKNTSGWWQGELQARGKKRQKGWFPASHVKLLGPSSERATPAFHPVCQVIAMYDYAANNEDELSFSKGQLINVMNKDDPDWWQGEINGVTGLFPSNYVKMTTDSDPSQQWCADLQTLDTMQPIERKRQGYIHELIQTEERYMADLQLVVEVFQKRMAESGFLTEGEMALIFVNWKELIMSNTKLLKALRVRKKTGGEKMPVQMIGDILAAELSHMQAYIRFCSCQLNGAALLQQKTDEDTDFKEFLKKLASDPRCKGMPLSSFLLKPMQRITRYPLLIRSILENTPESHADHSSLKLALERAEELCSQVNEGVREKENSDRLEWIQAHVQCEGLAEQLIFNSLTNCLGPRKLLHSGKLYKTKSNKELHGFLFNDFLLLTYMVKQFAVSSGSEKLFSSKSNAQFKMYKTPIFLNEVLVKLPTDPSSDEPVFHISHIDRVYTLRTDNINERTAWVQKIKAASEQYIDTEKKKREKAYQARSQKTSGIGRLMVHVIEATELKACKPNGKSNPYCEISMGSQSYTTRTIQDTLNPKWNFNCQFFIKDLYQDVLCLTLFDRDQFSPDDFLGRTEIPVAKIRTEQESKGPMTRRLLLHEVPTGEVWVRFDLQLFEQKTLL

SEQ ID NO: 856864 - protein, 248 aa, Homo sapiens
EFAAASTKIIPGSEVKREEPEALYAAVNKKPTSAAYSVGEEYIALYPYSSVEPGDLTFTEGEEILVTQKDGEWWTGSIGDRSGIFPSNYVKPKDQESFGSASKSGASNKKPEIAQVTSAYVASGSEQLSLAPGQLILILKKNTSGWWQGELQARGKKRQKGWFPASHVKLLGPSSERATPAFHPVCQVIAMYDYAANNEDELSFSKGQLINVMNKDDPDWWQGEINGVTGLFPSNYVKMTTDSDPSQQ

SEQ ID NO: 856865 - protein, 132 aa, Homo sapiens
MVGLKDRVCILGEEINETVSSSFVARSQKTSGIGRLMVHVIEATELKACKPNGKSNPYCEISMGSQSYTTRTIQDTLNPKWNFNCQFFIKDLYQDVLCLTLFDRDQFSPDGKCRSARGSKGFPSFLDPGVQI

SEQ ID NO: 856866 - protein, 210 aa, Homo sapiens
  misc_feature (17)..(17): Xaa can be any naturally occurring amino acid
  misc_feature (41)..(41): Xaa can be any naturally occurring amino acid
MSHICAQRNDSMFSKSXREHISGASPLSLCVRHFGELLEDXGSGRKELLNQKNREQEEIVRLNSKKKNLHLELEALNGKHQQISGRLQDVRLKKQTQKTELEVLDKQCDLEIMEIKQLQQELQEYQNKLIYLVPEKQLLNERIKNMQFSNTPDSGVSLLHKKSLEKEELCQDLPPSTTDVLSRPRDSSHAQRLNYRDLPPRPDEYRVTSS

SEQ ID NO: 856867 - protein, 1680 aa, Homo sapiens
MAQFPTAMNGGPNMWAITSEERTKHDRQFDNLKPSGGYITGDQARNFFLQSGLPAPVLAEIWALSDLNKDGKMDQQEFSIAMKLIKLKLQGQQLPVVLPPIMKQPPMFSPLISARFGMGSMPNLSIPQPLPPAAPITSLSSATSGTNLPPLMMPTPLVPSVSTSSLPNGTASLIQPLPIPYSSSTLPHGSSYSLMMGGFGGASIQKAQSLIDLGSSSSTSSTASLSGNSPKTGTSEWAVPQPTRLKYRQKFNTLDKSMSGYLSGFQARNALLQSNLSQTQLATIWTLADVDGDGQLKAEEFILAMHLTDMAKAGQPLPLTLPPELVPPSFRGGKQIDSINGTLPSYQKMQEEEPQKKLPVTFEDKRKANYERGNMELEKRRQALMEQQQREAERKAQKEKEEWERKQRELQEQEWKKQLELEKRLEKQRELERQREEERRKDIERREAAKQELERQRRLEWERIRRQELLNQKNREQEEIVRLNSKKKNLHLELEALNGKHQQISGRLQDVRLKKQTQKTELEVLDKQCDLEIMEIKQLQQELQEYQNKLIYLVPEKQLLNERIKNMQFSNTPDSGVSLLHKKSLEKEELCQRLKEQLDALEKETASKLSEMDSFNNQLKELRETYNTQQLALEQLYKIKRDKLKEIERKRLELMQKKKLEDEAARKAKQGKENLWKENLRKEEEEKQKRLQEEKTQEKIQEEERKAEEKQRKDKDTLKAEEKKRETASVLVNYRALYPFEARNHDEMSFNSGDIIQVDEKTVGEPGWLYGSFQGNFGWFPCNYVEKMPSSENEKAVSPKKALLPPTVSLSATSTSSEPLSSNQPASVTDYQNVSFSNLTVNTSWQKKSAFTRTVSPGSVSPIHGQGQVVENLKAQALCSWTAKKDNHLNFSKHDIITVLEQQENWWFGEVHGGRGWFPKSYVKIIPGSEVKREEPEALYAAVNKKPTSAAYSVGEEYIALYPYSSVEPGDLTFTEGEEILVTQKDGEWWTGSIGDRSGIFPSNYVKPKDQESFGSASKSGASNKKPEIAQVTSAYVASGSEQLSLAPGQLILILKKNTSGWWQGELQARGKKRQKGWFPASHVKLLGPSSERATPAFHPVCQVIAMYDYAANNEDELSFSKGQLINVMNKDDPDWWQGEINGVTGLFPSNYVKMTTDSDPSQQWCADLQTLDTMQPIERKRQGYIHELIQTEERYMADLQLVVEVFQKRMAESGFLTEGEMALIFVNWKELIMSNTKLLKALRVRKKTGGEKMPVQMIGDILAAELSHMQAYIRFCSCQLNGAALLQQKTDEDTDFKEFLKKLASDPRCKGMPLSSFLLKPMQRITRYPLLIRSILENTPESHADHSSLKLALERAEELCSQVNEGVREKENSDRLEWIQAHVQCEGLAEQLIFNSLTNCLGPRKLLHSGKLYKTKSNKELHGFLFNDFLLLTYMVKQFAVSSGSEKLFSSKSNAQFKMYKTPIFLNEVLVKLPTDPSSDEPVFHISHIDRVYTLRTDNINERTAWVQKIKAASEQYIDTEKKKREKAYQGFPHFVIYSYKARSQKTSGIGRLMVHVIEATELKACKPNGKSNPYCEISMGSQSYTTRTIQDTLNPKWNFNCQFFIKDLYQDVLCLTLFDRDQFSPDDFLGRTEIPVAKIRTEQESKGPMTRRLLLHEVPTGEVWVRFDLQLFEQKTLL

SEQ ID NO: 856868 - protein, 1670 aa, Homo sapiens
MAQFPTAMNGGPNMWAITSEERTKHDRQFDNLKPSGGYITGDQARNFFLQSGLPAPVLAEIWALSDLNKDGKMDQQEFSIAMKLIKLKLQGQQLPVVLPPIMKQPPMFSPLISARFGMGSMPNLSIPQPLPPAAPITSLSSATSGTNLPPLMMPTPLVPSVSTSSLPNGTASLIQPLPIPYSSSTLPHGSSYSLMMGGFGGASIQKAQSLIDLGSSSSTSSTASLSGNSPKTGTSEWAVPQPTRLKYRQKFNTLDKSMSGYLSGFQARNALLQSNLSQTQLATIWTLADVDGDGQLKAEEFILAMHLTDMAKAGQPLPLTLPPELVPPSFRGGKQIDSINGTLPSYQKMQEEEPQKKLPVTFEDKRKANYERGNMELEKRRQALMEQQQREAERKAQKEKEEWERKQRELQEQEWKKQLELEKRLEKQRELERQREEERRKDIERREAAKQELERQRRLEWERIRRQELLNQKNREQEEIVRLNSKKKNLHLELEALNGKHQQISGRLQDVRLKKQTQKTELEVLDKQCDLEIMEIKQLQQELQEYQNKLIYLVPEKQLLNERIKNMQFSNTPDSGVSLLHKKSLEKEELCQRLKEQLDALEKETASKLSEMDSFNNQLKELRETYNTQQLALEQLYKIKRDKLKEIERKRLELMQKKKLEDEAARKAKQGKENLWKENLRKEEEEKQKRLQEEKTQEKIQEEERKAEEKQRKDKDTLKAEEKKRETASVLVNYRALYPFEARNHDEMSFNSGDIIQVDEKTVGEPGWLYGSFQGNFGWFPCNYVEKMPSSENEKAVSPKKALLPPTVSLSATSTSSEPLSSNQPASVTDYQNVSFSNLTVNTSWQKKSAFTRTVSPGSVSPIHGQGQVVENLKAQALCSWTAKKDNHLNFSKHDIITVLEQQENWWFGEVHGGRGWFPKSYVKIIPGSEVKREEPEALYAAVNKKPTSAAYSVGEEYIALYPYSSVEPGDLTFTEGEEILVTQKDGEWWTGSIGDRSGIFPSNYVKPKDQESFGSASKSGASNKKPEIAQVTSAYVASGSEQLSLAPGQLILILKKNTSGWWQGELQARGKKRQKGWFPASHVKLLGPSSERATPAFHPVCQVIAMYDYAANNEDELSFSKGQLINVMNKDDPDWWQGEINGVTGLFPSNYVKMTTDSDPSQQWCADLQTLDTMQPIERKRQGYIHELIQTEERYMADLQLVVEVFQKRMAESGFLTEGEMALIFVNWKELIMSNTKLLKALRVRKKTGGEKMPVQMIGDILAAELSHMQAYIRFCSCQLNGAALLQQKTDEDTDFKEFLKKLASDPRCKGMPLSSFLLKPMQRITRYPLLIRSILENTPESHADHSSLKLALERAEELCSQVNEGVREKENSDRLEWIQAHVQCEGLAEQLIFNSLTNCLGPRKLLHSGKLYKTKSNKELHGFLFNDFLLLTYMVKQFAVSSGSEKLFSSKSNAQFKMYKTPIFLNEVLVKLPTDPSSDEPVFHISHIDRVYTLRTDNINERTAWVQKIKAASEQYIDTEKKKREKAYQARSQKTSGIGRLMVHVIEATELKACKPNGKSNPYCEISMGSQSYTTRTIQDTLNPKWNFNCQFFIKDLYQDVLCLTLFDRDQFSPDDFLGRTEIPVAKIRTEQESKGPMTRRLLLHEVPTGEVWVRFDLQLFEQAGAGE

SEQ ID NO: 856869 - protein, 882 aa, Homo sapiens [sequence omitted]

SEQ ID NO: 856870 - protein, 1164 aa, Homo sapiens [sequence omitted]

SEQ ID NO: 856871 - protein, 1513 aa, Homo sapiens
MAQFPTAMNGGPNMWAITSEERTKHDRQFDNLKPSGGYITGDQARNFFLQSGLPAPVLAEIWALSDLNKDGKMDQQEFSIAMKLIKLKLQGQQLPVVLPPIMKQPPMFSPLISARFGMGSMPNLSIPQPLPPAAPITSLSSATSGTNLPPLMMPTPLVPSVSTSSLPNGTASLIQPLPIPYSSSTLPHGSSYSLMMGGFGGASIQKAQSLIDLGSSSSTSSTASLSGNSPKTGTSEWAVPQPTRLKYRQKFNTLDKSMSGYLSGFQARNALLQSNLSQTQLATIWTLADVDGDGQLKAEEFILAMHLTDMAKAGQPLPLTLPPELVPPSFRGGKQIDSINGTLPSYQKMQEEEPQKKLPVTFEDKRKANYERGNMELEKRRQALMEQQQREAERKAQKEKEEWERKQRELQEQEWKKQLELEKRLEKQRELERQREEERRKDIERREAAKQELERQRRLEWERIRRQELLNQKNREQEEIVRLNSKKKNLHLELEALNGKHQQISGRLQDVRLKKQTQKTELEVLDKQCDLEIMEIKQLQQELQEYQNKLIYLVPEKQLLNERIKNMQFSNTPDSGVSLLHKKSLEKEELCQRLKEQLDALEKETASKLSEMDSFNNQLKELRETYNTQQLALEQLYKIKRDKLKEIERKRLELMQKKKLEDEAARKAKQGKENLWKENLRKEEEEKQKRLQEEKTQEKIQEEERKAEEKQRKDKDTLKAEEKKRETASVLVNYRALYPFEARNHDEMSFNSGDIIQVDEKTVGEPGWLYGSFQGNFGWFPCNYVEKMPSSENEKAVSPKKALLPPTVSLSATSTSSEPLSSNQPASVTDYQNVSFSNLTVNTSWQKKSAFTRTVSPGSVSPIHGQGQVVENLKAQALCSWTAKKDNHLNFSKHDIITVLEQQENWWFGEVHGGRGWFPKSYVKIIPGSEVKREEPEALYAAVNKKPTSAAYSVGEEYIALYPYSSVEPGDLTFTEGEEILVTQKDGEWWTGSIGDRSGIFPSNYVKPKDQESFGSASKSGASNKKPEIAQVTSAYVASGSEQLSLAPGQLILILKKNTSGWWQGELQARGKKRQKGWFPASHVKLLGPSSERATPAFHPVCQVIAMYDYAANNEDELSFSKGQLINVMNKDDPDWWQGEINGVTGLFPSNYVKMTTDSDPSQQWCADLQTLDTMQPIERKRQGYIHELIQTEERYMADLQLVVEVFQKRMAESGFLTEGEMALIFVNWKELIMSNTKLLKALRVRKKTGGEKMPVQMIGDILAAELSHMQAYIRFCSCQLNGAALLQQKTDEDTDFKEFLKKLASDPRCKGMPLSSFLLKPMQRITRYPLLIRSILENTPESHADHSSLKLALERAEELCSQVNEGVREKENSDRLEWIQAHVQCEGLAEQLIFNSLTNCLGPRKLLHSGKLYKTKSNKELHGFLFNDFLLLTYMVKQFAVSSGSEKLFSSKSNAQFKMYKTPIFLNEVLVKLPTDPSSDEPVFHISHIDRVYTLRTDNINERSVLTMCGLP

SEQ ID NO: 856872 - protein, 1028 aa, Homo sapiens
MAQFPTAMNGGPNMWAITSEERTKHDRQFDNLKPSGGYITGDQARNFFLQSGLPAPVLAEIWALSDLNKDGKMDQQEFSIAMKLIKLKLQGQQLPVVLPPIMKQPPMFSPLISARFGMGSMPNLSIPQPLPPAAPITSLSSATSGTNLPPLMMPTPLVPSVSTSSLPNGTASLIQPLPIPYSSSTLPHGSSYSLMMGGFGGASIQKAQSLIDLGSSSSTSSTASLSGNSPKTGTSEWAVPQPTRLKYRQKFNTLDKSMSGYLSGFQARNALLQSNLSQTQLATIWTLADVDGDGQLKAEEFILAMHLTDMAKAGQPLPLTLPPELVPPSFRGGKQIDSINGTLPSYQKMQEEEPQKKLPVTFEDKRKANYERGNMELEKRRQALMEQQQREAERKAQKEKEEWERKQRELQEQEWKKQLELEKRLEKQRELERQREEERRKDIERREAAKQELERQRRLEWERIRRQELLNQKNREQEEIVRLNSKKKNLHLELEALNGKHQQISGRLQDVRLKKQTQKTELEVLDKQCDLEIMEIKQLQQELQEYQNKLIYLVPEKQLLNERIKNMQFSNTPDSGVSLLHKKSLEKEELCQRLKEQLDALEKETASKLSEMDSFNNQLKELRETYNTQQLALEQLYKIKRDKLKEIERKRLELMQKKKLEDEAARKAKQGKENLWKENLRKEEEEKQKRLQEEKTQEKIQEEERKAEEKQRKDKDTLKAEEKKRETASVLVNYRALYPFEARNHDEMSFNSGDIIQVDEKTVGEPGWLYGSFQGNFGWFPCNYVEKMPSSENEKAVSPKKALLPPTVSLSATSTSSEPLSSNQPASVTDYQNVSFSNLTVNTSWQKKSAFTRTVSPGSVSPIHGQGQVVENLKAQALCSWTAKKDNHLNFSKHDIITVLEQQENWWFGEVHGGRGWFPKSYVKIIPGSEVKREEPEALYAAVNKKPTSAAYSVGEEYIALYPYSSVEPGDLTFTEGEEILVTQKDGEWWTGSIGDRSGIFPSNYVKPKDQESFGSASKSGATYAEVT

SEQ ID NO: 856873 - protein, 1669 aa, Homo sapiens
MAQFPTAMNGGPNMWAITSEERTKHDRQFDNLKPSGGYITGDQARNFFLQSGLPAPVLAEIWALSDLNKDGKMDQQEFSIAMKLIKLKLQGQQLPVVLPPIMKQPPMFSPLISARFGMGSMPNLSIPQPLPPAAPITSLSSATSGTNLPPLMMPTPLVPSVSTSSLPNGTASLIQPLPIPYSSSTLPHGSSYSLMMGGFGGASIQKAQSLIDLGSSSSTSSTASLSGNSPKTGTSEWAVPQPTRLKYRQKFNTLDKSMSGYLSGFQARNALLQSNLSQTQLATIWTLADVDGDGQLKAEEFILAMHLTDMAKAGQPLPLTLPPELVPPSFRGGKQIDSINGTLPSYQKMQEEEPQKKLPVTFEDKRKANYERGNMELEKRRQALMEQQQREAERKAQKEKEEWERKQRELQEQEWKKQLELEKRLEKQRELERQREEERRKDIERREAAKQELERQRRLEWERIRRQELLNQKNREQEEIVRLNSKKKNLHLELEALNGKHQQISGRLQDVRLKKQTQKTELEVLDKQCDLEIMEIKQLQQELQEYQNKLIYLVPEKQLLNERIKNMQFSNTPDSGVSLLHKKSLEKEELCQRLKEQLDALEKETASKLSEMDSFNNQLKELRETYNTQQLALEQLYKIKRDKLKEIERKRLELMQKKKLEDEAARKAKQGKENLWKENLRKEEEEKQKRLQEEKTQEKIQEEERKAEEKQRKDKDTLKAEEKKRETASVLVNYRALYPFEARNHDEMSFNSGDIIQVDEKTVGEPGWLYGSFQGNFGWFPCNYVEKMPSSENEKAVSPKKALLPPTVSLSATSTSSEPLSSNQPASVTDYQNVSFSNLTVNTSWQKKSAFTRTVSPGSVSPIHGQGQVVENLKAQALCSWTAKKDNHLNFSKHDIITVLEQQENWWFGEVHGGRGWFPKSYVKIIPGSEVKREEPEALYAAVNKKPTSAAYSVGEEYIALYPYSSVEPGDLTFTEGEEILVTQKDGEWWTGSIGDRSGIFPSNYVKPKDQESFGSASKSGASNKKPEIAQVTSAYVASGSEQLSLAPGQLILILKKNTSGWWQGELQARGKKRQKGWFPASHVKLLGPSSERATPAFHPVCQVIAMYDYAANNEDELSFSKGQLINVMNKDDPDWWQGEINGVTGLFPSNYVKMTTDSDPSQQWCADLQTLDTMQPIERKRQGYIHELIQTEERYMADLQLVVEVFQKRMAESGFLTEGEMALIFVNWKELIMSNTKLLKALRVRKKTGGEKMPVQMIGDILAAELSHMQAYIRFCSCQLNGAALLQQKTDEDTDFKEFLKKLASDPRCKGMPLSSFLLKPMQRITRYPLLIRSILENTPESHADHSSLKLALERAEELCSQVNEGVREKENSDRLEWIQAHVQCEGLAEQLIFNSLTNCLGPRKLLHSGKLYKTKSNKELHGFLFNDFLLLTYMVKQFAVSSGSEKLFSSKSNAQFKMYKTPIFLNEVLVKLPTDPSSDEPVFHISHIDRVYTLRTDNINERTAWVQKIKAASEQYIDTEKKKREKAYQARSQKTSGIGRLMVHVIEATELKACKPNGKSNPYCEISMGSQSYTTRTIQDTLNPKWNFNCQFFIKDLYQDVLCLTLFDRDQFSPDDFLGRTEIPVAKIRTEQESKGPMTRRLLLHEVPTGEVWVRFDLQLFEQKTLL

SEQ ID NO: 856874 - protein, 1248 aa, Homo sapiens
MAQFPTAMNGGPNMWAITSEERTKHDRQFDNLKPSGGYITGDQARNFFLQSGLPAPVLAEIWALSDLNKDGKMDQQEFSIAMKLIKLKLQGQQLPVVLPPIMKQPPMFSPLISARFGMGSMPNLSIPQPLPPAAPITSLSSATSGTNLPPLMMPTPLVPSVSTSSLPNGTASLIQPLPIPYSSSTLPHGSSYSLMMGGFGGASIQKAQSLIDLGSSSSTSSTASLSGNSPKTGTSEWAVPQPTRLKYRQKFNTLDKSMSGYLSGFQARNALLQSNLSQTQLATIWTLADVDGDGQLKAEEFILAMHLTDMAKAGQPLPLTLPPELVPPSFRGGKQIDSINGTLPSYQKMQEEEPQKKLPVTFEDKRKANYERGNMELEKRRQALMEQQQREAERKAQKEKEEWERKQRELQEQEWKKQLELEKRLEKQRELERQREEERRKDIERREAAKQELERQRRLEWERIRRQELLNQKNREQEEIVRLNSKKKNLHLELEALNGKHQQISGRLQDVRLKKQTQKTELEVLDKQCDLEIMEIKQLQQELQEYQNKLIYLVPEKQLLNERIKNMQFSNTPDSGVSLLHKKSLEKEELCQRLKEQLDALEKETASKLSEMDSFNNQLKCGNMDDSVLQCLLSLLSCLNNLFLLLKELRETYNTQQLALEQLYKIKRDKLKEIERKRLELMQKKKLEDEAARKAKQGKENLWKENLRKEEEEKQKRLQEEKTQEKIQEEERKAEEKQRKDKDTLKAEEKKRETASVLVNYRALYPFEARNHDEMSFNSGDIIQVDEKTVGEPGWLYGSFQGNFGWFPCNYVEKMPSSENEKAVSPKKALLPPTVSLSATSTSSEPLSSNQPASVTDYQNVSFSNLTVNTSWQKKSAFTRTVSPGSVSPIHGQGQVVENLKAQALCSWTAKKDNHLNFSKHDIITVLEQQENWWFGEVHGGRGWFPKSYVKIIPGSEVKREEPEALYAAVNKKPTSAAYSVGEEYIALYPYSSVEPGDLTFTEGEEILVTQKDGEWWTGSIGDRSGIFPSNYVKPKDQESFGSASKSGASNKKPEIAQVTSAYVASGSEQLSLAPGQLILILKKNTSGWWQGELQARGKKRQKGWFPASHVKLLGPSSERATPAFHPVCQVIAMYDYAANNEDELSFSKGQLINVMNKDDPDWWQGEINGVTGLFPSNYVKMTTDSDPSQQWCADLQTLDTMQPIERKRQGYIHELIQTEERYMADLQLVVEVRRLLLASSRGICCLS

SEQ ID NO: 856875 - protein, 106 aa, Homo sapiens
MIFKYSKICSEQAGKWSFLFNDFLLLTYMVKQFAVSSGSEKLFSSKSNAQFKMYKTPIFLNEVLVKLPTDPSSDEPVFHISHIDRVYTLRTDNINERSVLTMCGLP

SEQ ID NO: 856876 - protein, 1639 aa, Homo sapiens
MAQFPTAMNGGPNMWAITSEERTKHDRQFDNLKPSGGYITGDQARNFFLQSGLPAPVLAEIWALSDLNKDGKMDQQEFSIAMKLIKLKLQGQQLPVVLPPIMKQPPMFSPLISARFGMGSMPNLSIPQPLPPAAPITSLSSATSGTNLPPLMMPTPLVPSVSTSSLPNGTASLIQPLPIPYSSSTLPHGSSYSLMMGGFGGASIQKAQSLIDLGSSSSTSSTASLSGNSPKTGTSEWAVPQPTRLKYRQKFNTLDKSMSGYLSGFQARNALLQSNLSQTQLATIWTLADVDGDGQLKAEEFILAMHLTDMAKAGQPLPLTLPPELVPPSFRGGKQIDSINGTLPSYQKMQEEEPQKKLPVTFEDKRKANYERGNMELEKRRQALMEQQQREAERKAQKEKEEWERKQRELQEQEWKKQLELEKRLEKQRELERQREEERRKDIERREAAKQELERQRRLEWERIRRQELLNQKNREQEEIVRLNSKKKNLHLELEALNGKHQQISGRLQDVRLKKQTQKTELEVLDKQCDLEIMEIKQLQQELQEYQNKLIYLVPEKQLLNERIKNMQFSNTPDSGVSLLHKKSLEKEELCQRLKEQLDALEKETASKLSEMDSFNNQLKELRETYNTQQLALEQLYKIKRDKLKEIERKRLELMQKKKLEDEAARKAKQGKENLWKENLRKEEEEKQKRLQEEKTQEKIQEEERKAEEKQRKDKDTLKAEEKKRETASVLVNYRALYPFEARNHDEMSFNSGDIIQVDEKTVGEPGWLYGSFQGNFGWFPCNYVEKMPSSENEKAVSPKKALLPPTVSLSATSTSSEPLSSNQPASVTDYQNVSFSNLTVNTSWQKKSAFTRTVSPGSVSPIHGQGQVVENLKAQALCSWTAKKDNHLNFSKHDIITVLEQQENWWFGEVHGGRGWFPKSYVKIIPGSEVKREEPEALYAAVNKKPTSAAYSVGEEYIALYPYSSVEPGDLTFTEGEEILVTQKDGEWWTGSIGDRSGIFPSNYVKPKDQESFGSASKSGASNKKPEIAQVTSAYVASGSEQLSLAPGQLILILKKNTSGWWQGELQARGKKRQKGWFPASHVKLLGPSSERATPAFHPVCQVIAMYDYAANNEDELSFSKGQLINVMNKDDPDWWQGEINGVTGLFPSNYVKMTTDSDPSQQWCADLQTLDTMQPIERKRQGYIHELIQTEERYMADLQLVVEVFQKRMAESGFLTEGEMALIFVNWKELIMSNTKLLKALRVRKKTGGEKMPVQMIGDILAAELSHMQAYIRFCSCQLNGAALLQQKTDEDTDFKEFLKKLASDPRCKGMPLSSFLLKPMQRITRYPLLIRSILENTPESHADHSSLKLALERAEELCSQVNEGVREKENSDRLEWIQAHVQCEGLAEQLIFNSLTNCLGPRKLLHSGKLYKTKSNKELHGFLFNDFLLLTYMVKQFAVSSGSEKLFSSKSNAQFKMYKTPIFLNEVLVKLPTDPSSDEPVFHISHIDRVYTLRTDNINERTAWVQKIKAASEQYIDTEKKKREKAYQARSQKTSGIGRLMVHVIEATELKACKPNGKSNPYCEISMGSQSYTTRTIQDTLNPKWNFNCQFFIKDLYQDVLCLTLFDRDQFSPDGKCRSARGSKGFPSFLDPGVQI

SEQ ID NO: 856877 - protein, 1669 aa, Homo sapiens; identical to SEQ ID NO: 856873

SEQ ID NO: 856878 - protein, 1164 aa, Homo sapiens [sequence omitted]

SEQ ID NO: 856879 - protein, 1164 aa, Homo sapiens [sequence omitted]

SEQ ID NO: 856880 - protein, 1261 aa, Homo sapiens
MAQFPTAMNGGPNMWAITSEERTKHDRQFDNLKPSGGYITGDQARNFFLQSGLPAPVLAEIWALSDLNKDGKMDQQEFSIAMKLIKLKLQGQQLPVVLPPIMKQPPMFSPLISARFGMGSMPNLSIPQPLPPAAPITSLSSATSGTNLPPLMMPTPLVPSVSTSSLPNGTASLIQPLPIPYSSSTLPHGSSYSLMMGGFGGASIQKAQSLIDLGSSSSTSSTASLSGNSPKTGTSEWAVPQPTRLKYRQKFNTLDKSMSGYLSGFQARNALLQSNLSQTQLATIWTLADVDGDGQLKAEEFILAMHLTDMAKAGQPLPLTLPPELVPPSFRGGKQIDSINGTLPSYQKMQEEEPQKKLPVTFEDKRKANYERGNMELEKRRQALMEQQQREAERKAQKEKEEWERKQRELQEQEWKKQLELEKRLEKQRELERQREEERRKDIERREAAKQELERQRRLEWERIRRQELLNQKNREQEEIVRLNSKKKNLHLELEALNGKHQQISGRLQDVRLKKQTQKTELEVLDKQCDLEIMEIKQLQQELQEYQNKLIYLVPEKQLLNERIKNMQFSNTPDSGVSLLHKKSLEKEELCQRLKEQLDALEKETASKLSEMDSFNNQLKELRETYNTQQLALEQLYKIKRDKLKEIERKRLELMQKKKLEDEAARKAKQGKENLWKENLRKEEEEKQKRLQEEKTQEKIQEEERKAEEKQRKDKDTLKAEEKKRETASVLVNYRALYPFEARNHDEMSFNSGDIIQVDEKTVGEPGWLYGSFQGNFGWFPCNYVEKMPSSENEKAVSPKKALLPPTVSLSATSTSSEPLSSNQPASVTDYQNVSFSNLTVNTSWQKKSAFTRTVSPGSVSPIHGQGQVVENLKAQALCSWTAKKDNHLNFSKHDIITVLEQQENWWFGEVHGGRGWFPKSYVKIIPGSEVKREEPEALYAAVNKKPTSAAYSVGEEYIALYPYSSVEPGDLTFTEGEEILVTQKDGEWWTGSIGDRSGIFPSNYVKPKDQESFGSASKSGASNKKPEIAQVTSAYVASGSEQLSLAPGQLILILKKNTSGWWQGELQARGKKRQKGWFPASHVKLLGPSSERATPAFHPVCQVIAMYDYAANNEDELSFSKGQLINVMNKDDPDWWQGEINGVTGLFPSNYVKMTTDSDPSQQWCADLQTLDTMQPIERKRQGYIHELIQTEERYMADLQLVVEVFQKRMAESGFLTEGEMALIFVNWKELIMSNTKLLKALRVRKKTGGEKMPASLKIL

SEQ ID NO: 856881 - protein, 331 aa, Homo sapiens
MAQFPTAMNGGPNMWAITSEERTKHDRQFDNLKPSGGYITGDQARNFFLQSGLPAPVLAEIWALSDLNKDGKMDQQEFSIAMKLIKLKLQGQQLPVVLPPIMKQPPMFSPLISARFGMGSMPNLSIPQPLPPAAPITSLSSATSGTNLPPLMMPTPLVPSVSTSSLPNGTASLIQPLPIPYSSSTLPHGSSYSLMMGGFGGASIQKAQSLIDLGSSSSTSSTASLSGNSPKTGTSEWAVPQPTRLKYRQKFNTLDKSMSGYLSGFQARNALLQSNLSQTQLATIWTLADVDGDGQLKAEEFILAMHLTDMAKAGQPLPLTLPPELVPPSFR

SEQ ID NO: 856882 - protein, 109 aa, Homo sapiens
SGGALSVLRGERLRGKLQSTLCGALLSIFKPSEGPFISDPCRSLQKNALCVLWDESLEMMVLTLSWKLERTQQMGGVEGNRKVGLRGEAFQEACGCVKCAHCAWGEPKQ

SEQ ID NO: 856883 - protein, 169 aa, Homo sapiens
MAALLLRHVGRHCLRAHFSPQLCIRNAVPLGTTAKEEMERFWNKNIGSNRPLSPHITIYSWSLPMAMSICHRGTGIALSAGVSLFGMSALLLPGNFESYLELVKSLCLGPALIHTAKFALVFPLMYHTWNGIRHLMWDLGKGLKIPQLYQSGVVVLVLTVLSSMGLAAM

SEQ ID NO: 856884 - protein, 150 aa, Homo sapiens
MAALLLRHVGRHCLRAHFSPQLCIRNAVPLGTTAKEEMERFWNKNIGSNRPLSPHITIYSWSLPMAMSICHRGTGIALSADVGPRKRPEDSPAIPVWSGCPGSYCVVLYGAGSHVKKGGSQHHLPTHYYIHPSFCLSFLSPAWEKFSLFV

SEQ ID NO: 856885 - protein, 135 aa, Homo sapiens
MAALLLRHVGRHCLRAHFSPQLCIRNWSLPMAMSICHRGTGIALSAGVSLFGMSALLLPGNFESYLELVKSLCLGPALIHTAKFALVFPLMYHTWNGIRHLMWDLGKGLKIPQLYQSGVVVLVLTVLSSMGLAAM

SEQ ID NO: 856886 - protein, 169 aa, Homo sapiens; identical to SEQ ID NO: 856883

SEQ ID NO: 856887 - protein, 150 aa, Homo sapiens; identical to SEQ ID NO: 856884

SEQ ID NO: 856888 - protein, 169 aa, Homo sapiens; identical to SEQ ID NO: 856883

SEQ ID NO: 856889 - protein, 135 aa, Homo sapiens; identical to SEQ ID NO: 856885

SEQ ID NO: 856890 - protein, 110 aa, Homo sapiens
MTPPTPTPSRRASALGWRGRLASLPSRPEPKMAALLLRHVGRHCLRAHFSPQLCIRNAVPLGTTAKEEMERFWNKNIGSNRPLSPHITIYSWSLPMAMSICHPTACGLLA

SEQ ID NO: 856891 - protein, 132 aa, Homo sapiens
MERFWNKNIGSNRPLSPHITIYSWSLPMAMSICHRGTGIALSAGVSLFGMSALLLPGNFESYLELVKSLCLGPALIHTAKFALVFPLMYHTWNGIRHLMWDLGKGLKIPQLYQSGVVVLVLTVLSSMGLAAM

SEQ ID NO: 856892 - protein, 116 aa, Homo sapiens
MAALLLSWSLPMAMSICHRGTGIALSAGVSLFGMSALLLPGNFESYLELVKSLCLGPALIHTAKFALVFPLMYHTWNGIRHLMWDLGKGLKIPQLYQSGVVVLVLTVLSSMGLAAM

SEQ ID NO: 856893 - protein, 169 aa, Homo sapiens; identical to SEQ ID NO: 856883

SEQ ID NO: 856894 - protein, 116 aa, Homo sapiens
MAALLLRHVGRHCLRAHFSPQLCIRNWSLPMAMSICHRGTGIALSADVGPRKRPEDSPAIPVWSGCPGSYCVVLYGAGSHVKKGGSQHHLPTHYYIHPSFCLSFLSPAWEKFSLFV

SEQ ID NO: 856895 - protein, 127 aa, Homo sapiens
MAALLLRHVGRHCLRAHFSPQLCIRNAVPLGTTAKEEMERFWNKNIGSNRPLSPHITIYSWSLPMAMSICHRGTGIALSADCVVLYGAGSHVKKGGSQHHLPTHYYIHPSFCLSFLSPAWEKFSLFV

SEQ ID NO: 856896 - protein, 169 aa, Homo sapiens; identical to SEQ ID NO: 856883

SEQ ID NO: 856897 - protein, 935 aa, Homo sapiens
MTLAQLLTLLYDRKLPQGYRSIDLTVKLGSRVITDPSLSKTDSYKRLHPEKDHGDLLASCPEDEALTPGDECMDGILDESLLETCPIQSPLQVFAGMGGLALIAERLPMLYPEVIQQVSAPVVTSTTQEKPKDSDQFEWVTIEQSGELVYEAPETVAAEPPPIKSAVQTMSPIPAHSLAAFGLFLRLPGYAEVLLKERKHAQCLLRLVLGVTDDGEGSHILQSPSANVLPTLPFHVLRSLFSTTPLTTDDGVLLRRMALEIGALHLILVCLSALSHHSPRVPNSSVNQTEPQVSSSHNPTSTEEQQLYWAKGTGFGTGSTASGWDVEQALTKQRLEEEHVTCLLQVLASYINPVSSAVNGEAQSSHETRGQNSNALPSVLLELLSQSCLIPAMSSYLRNDSVLDMARHVPLYRALLELLRAIASCAAMVPLLLPLSTENGEEEEEQSECQTSVGTLLAKMKTCVDTYTNRLRAVITTRFNVCTKQRIPWQRPSLIAFTMLDPLSVSKTYFQLGALNSNSFSHRLQDVELRSKRENVKTGVKPDASDQEPEGLTLLVPDIQKTAEIVYAATTSLRQANQEKKLGEYSKKAAMKPKPLSVLKSLEEKYVAVMKKLQFDTFEMVSEDEDGKLGFKVNYHYMSQVKNANDANSAARARRLAQEAVTLSTSLPLSSSSSVFVRCDEERLDIMKVLITGPADTPYANGCFEFDVYFPQDYPSSPPLVNLETTGGHSVRFNPNLYNDGKVCLSILNTWHGRPEEKWNPQTSSFLQVLVSVQSLILVAEPYFNEPGYERSRGTPSGTQSSREYDGNIRQATVKWAMLEQIRNPSPCFKEVIHKHFYLKRVEIMAQCEEWIADIQQYSSDKRVGRTMSHHAAALKRHTAQLREELLKLPCPEGLDPDTDDAPEVCRATTGAEETLMHDQVKPSSSKELPSDFQL

SEQ ID NO: 856898 - protein, 162 aa, Homo sapiens [sequence omitted]

SEQ ID NO: 856899 - protein, 4334 aa, Homo sapiens
MVTGGGAAPPGTVTEPLPSVIVLSAGRKMAAAAAAASGPGCSSAAGAGAAGVSEWLVLRDGCMHCDADGLHSLSYHPALNAILAVTSRGTIKVIDGTSGATLQASALSAKPGGQVKCQYISAVDKVIFVDDYAVGCRKDLNGILLLDTALQTPVSKQDDVVQLELPVTEAQQLLSACLEKVDISSTEGYDLFITQLKDGLKNTSHETAANHKVAKWATVTFHLPHHVLKSIASAIVNELKKINQNVAALPVASSVMDRLSYLLPSARPELGVGPGRSVDRSLMYSEANRRETFTSWPHVGYRWAQPDPMAQAGFYHQPASSGDDRAMCFTCSVCLVCWEPTDEPWSEHERHSPNCPFVKGEHTQNVPLSVTLATSPAQFPCTDGTDRISCFGSGSCPHFLAAATKRGKICIWDVSKLMKVHLKFEINAYDPAIVQQLILSGDPSSGVDSRRPTLAWLEDSSSCSDIPKLEGDSDDLLEDSDSEEHSRSDSVTGHTSQKEAMEVSLDITALSILQQPEKLQWEIVANVLEDTVKDLEELGANPCLTNSKSEKTKEKHQEQHNIPFPCLLAGGLLTYKSPATSPISSNSHRSLDGLSRTQGESISEQGSTDNESCTNSELNSPLVRRTLPVLLLYSIKESDEKAGKIFSQMNNIMSKSLHDDGFTVPQIIEMELDSQEQLLLQDPPVTYIQQFADAAANLTSPDSEKWNSVFPKPGTLVQCLRLPKFAEEENLCIDSITPCADGIHLLVGLRTCPVESLSAINQVEALNNLNKLNSALCNRRKGELESNLAVVNGANISVIQHESPADVQTPLIIQPEQRNVSGGYLVLYKMNYATRIVTLEEEPIKIQHIKDPQDTITSLILLPPDILDNREDDCEEPIEDMQLTSKNGFEREKTSDISTLGHLVITTQGGYVKILDLSNFEILAKVEPPKKEGTEEQDTFVSVIYCSGTDRLCACTKGGELHFLQIGGTCDDIDEADILVDGSLSKGIEPSSEGSKPLSNPSSPGISGVDLLVDQPFTLEILTSLVELTRFETLTPRFSATVPPCWVEVQQEQQQRRHPQHLHQQHHGDAAQHTRTWKLQTDSNSWDEHVFELVLPKACMVGHVDFKFVLNSNITNIPQIQVTLLKNKAPGLGKVNALNIEVEQNGKPSLVDLNEEMQHMDVEESQCLRLCPFLEDHKEDILCGPVWLASGLDLSGHAGMLTLTSPKLVKGMAGGKYRSFLIHVKAVNERGTEEICNGGMRPVVRLPSLKHQSNKGYSLASLLAKVAAGKEKSSNVKNENTSGTRKSENLRGCDLLQEVSVTIRRFKKTSISKERVQRCAMLQFSEFHEKLLNTLCRKTDDGQITEHAQSLVLDTLCWLAGVHSNGPGSSKEGNENLLSKTRKFLSDIVRVCFFEAGRSIAHKCARFLALCISNGKCDPCQPAFGPVLLKALLDNMSFLPAATTGGSVYWYFVLLNYVKDEDLAGCSTACASLLTAVSRQLQDRLTPMEALLQTRYGLYSSPFDPVLFDLEMSGSSCKNVYNSSIGVQSDEIDLSDVLSGNGKVSSCTAAEGSFTSLTGLLEVEPLHFTCVSTSDGTRIERDDASTFTVSSFGVTPAVGGLSSGTVGEASTALSSAAQVALQSLSHAMASAEQQLQVLQEKQQQLLKLQQQKAKLEAKLHQTTAAAAAAASAVGPVHNSVPSNPVAAPGFFIHPSDVIPPTPKTTPLFMTPPLTPPNEAVSVVINAELAQLFPGSVIDPPAVNLAAHNKNSNKSRMNPLGSGLALAISHASHFLQPPPHQSIIIERMHSGARRFVTLDFGRPILLTDVLIPTCGDLASLSIDIWTLGEEVDGRRLVVATDISTHSLILHDLIPPPVCRFMKITVIGRYGSTNARAKIPLGFYYGHTYILPWESELKLMHDPLKGEGESANQPEIDQHLAMMVALQEDIQCRYNLACHRLETLLQSIDLPPLNSANNAQYFLRKPDKAVEEDSRVFSAYQDCIQLQLQLNLAHNAVQRLKVALGASRKMLSETSNPEDLIQTSSTEQLRTIIRYLLDTLLSLLHASNGHSVPAVLQSTFHAQACEELFKHLCISGTPKIRLHTGLLLVQLCGGERWWGQFLSNVLQELYNSEQLLIFPQDRVFMLLSCIGQRSLSNSGVLESLLNLLDNLLSPLQPQLPMHRRTEGVLDIPMISWVVMLVSRLLDYVATVEDEAAAAKKPLNGNQWSFINNNLHTQSLNRSSKGSSSLDRLYSRKIRKQLVHHKQQLNLLKAKQKALVEQMEKEKIQSNKGSSYKLLVEQAKLKQATSKHFKDLIRLRRTAEWSRSNLDTEVTTAKESPEIEPLPFTLAHERCISVVQKLVLFLLSMDFTCHADLLLFVCKVLARIANATRPTIHLCEIVNEPQLERLLLLLVGTDFNRGDISWGGAWAQYSLTCMLQDILAGELLAPVAAEAMEEGTVGDDVGATAGDSDDSLQQSSVQLLETIDEPLTHDITGAPPLSSLEKDKEIDLELLQDLMEVDIDPLDIDLEKDPLAAKVFKPISSTWYDYWGADYGTYNYNPYIGGLGIPVAKPPANTEKNGSQTVSVSVSQALDARLEVGLEQQAELMLKMMSTLEADSILQALTNTSPTLSQSPTGTDDSLLGGLQAANQTSQLIIQLSSVPMLNVCFNKLFSMLQVHHVQLESLLQLWLTLSLNSSSTGNKENGADIFLYNANRIPVISLNQASITSFLTVLAWYPNTLLRTWCLVLHSLTLMTNMQLNSGSSSAIGTQESTAHLLVSDPNLIHVLVKFLSGTSPHGTNQHSPQVGPTATQAMQEFLTRLQVHLSSTCPQIFSEFLLKLIHILSTERGAFQTGQGPLDAQVKLLEFTLEQNFEVVSVSTISAVIESVTFLVHHYITCSDKVMSRSGSDSSVGARACFGGLFANLIRPGDAKAVCGEMTRDQLMFDLLKLVNILVQLPLSGNREYSARVSVTTNTTDSVSDEEKVSGGKDGNGSSTSVQGSPAYVADLVLANQQIMSQILSALGLCNSSAMAMIIGASGLHLTKHENFHGGLDAISVGDGLFTILTTLSKKASTVHMMLQPILTYMACGYMGRQGSLATCQLSEPLLWFILRVLDTSDALKAFHDMGGVQLICNNMVTSTRAIVNTARSMVSTIMKFLDSGPNKAVDSTLKTRILASEPDNAEGIHNFAPLGTITSSSPTAQPAEVLLQATPPHRRARSAAWSYIFLPEEAWCDLTIHLPAAVLLKEIHIQPHLASLATCPSSVSVEVSADGVNMLPLSTPVVTSGLTYIKIQLVKAEVASAVCLRLHRPRDASTLGLSQIKLLGLTAFGTTSSATVNNPFLPSEDQVSKTSIGWLRLLHHCLTHISDLEGMMASAAAPTANLLQTCAALLMSPYCGMHSPNIEVVLVKIGLQSTRIGLKLIDILLRNCAASGSDPTDLNSPLLFGRLNGLSSDSTIDILYQLGTTQDPGTKDRIQALLKWVSDSARVAAMKRSGRMNYMCPNSSTVEYGLLMPSPSHLHCVAAILWHSYELLVEYDLPALLDQELFELLFNWSMSLPCNMVLKKAVDSLLCSMCHVHPNYFSLLMGWMGITPPPVQCHHRLSMTDDSKKQDLSSSLTDDSKNAQAPLALTESHLATLASSSQSPEAIKQLLDSGLPSLLVRSLASFCFSHISSSESIAQSIDISQDKLRRHHVPQQCNKMPITADLVAPILRFLTEVGNSHIMKDWLGGSEVNPLWTALLFLLCHSGSTSGSHNLGAQQTSARSASLSSAATTGLTTQQRTAIENATVAFFLQCISCHPNNQKLMAQVLCELFQTSPQRGNLPTSGNISGFIRRLFLQLMLEDEKVTMFLQSPCPLYKGRINATSHVIQHPMYGAGHKFRTLHLPVSTTLSDVLDRVSDTPSITAKLISEQKDDKEKKNHEEKEKVKAENGFQDNYSVVVASGLKSQSKRAVSATPPRPPSRRGRTIPDKIGSTSGAEAANKIITVPVFHLFHKLLAGQPLPAEMTLAQLLTLLYDRKLPQGYRSIDLTVKLGSRVITDPSLSKTDSYKRLHPEKDHGDLLASCPEDEALTPGDECMDGILDESLLETCPIQSPLQVFAGMGGLALIAERLPMLYPEVIQQVSAPVVTSTTQEKPKDSDQFEWVTIEQSGELVYEAPETVAAEPPPIKSAVQTMSPIPAHSLAAFGLFLRLPGYAEVLLKERKHAQCLLRLVLGVTDDGEGSHILQSPSANVLPTLPFHVLRSLFSTTPLTTDDGVLLRRMALEIGALHLILVCLSALSHHSPRVPNSSVNQTEPQVSSSHNPTSTEEQQLYWAKGTGFGTGSTASGWDVEQALTKQRLEEEHVTAFCRFLPVT

SEQ ID NO: 856900 - protein, 4353 aa, Homo sapiens
MVTGGGAAPPGTVTEPLPSVIVLSAGRKMAAAAAAASGPGCSSAAGAGAAGVSEWLVLRDGCMHCDADGLHSLSYHPALNAILAVTSRGTIKVIDGTSGATLQASALSAKPGGQVKCQYISAVDKVIFVDDYAVGCRKDLNGILLLDTALQTPVSKQDDVVQLELPVTEAQQLLSACLEKVDISSTEGYDLFITQLKDGLKNTSHETAANHKVAKWATVTFHLPHHVLKSIASAIVNELKKINQNVAALPVASSVMDRLSYLLPSARPELGVGPGRSVDRSLMYSEANRRETFTSWPHVGYRWAQPDPMAQAGFYHQPASSGDDRAMCFTCSVCLVCWEPTDEPWSEHERHSPNCPFVKGEHTQNVPLSVTLATSPAQFPCTDGTDRISCFGSGSCPHFLAAATKRGKICIWDVSKLMKVHLKFEINAYDPAIVQQLILSGDPSSGVDSRRPTLAWLEDSSSCSDIPKLEGDSDDLLEDSDSEEHSRSDSVTGHTSQKEAMEVSLDITALSILQQPEKLQWEIVANVLEDTVKDLEELGANPCLTNSKSEKTKEKHQEQHNIPFPCLLAGGLLTYKSPATSPISSNSHRSLDGLSRTQGESISEQGSTDNESCTNSELNSPLVRRTLPVLLLYSIKESDEKAGKIFSQMNNIMSKSLHDDGFTVPQIIEMELDSQEQLLLQDPPVTYIQQFADAAANLTSPDSEKWNSVFPKPGTLVQCLRLPKFAEEENLCIDSITPCADGIHLLVGLRTCPVESLSAINQVEALNNLNKLNSALCNRRKGELESNLAVVNGANISVIQHESPADVQTPLIIQPEQRNVSGGYLVLYKMNYATRIVTLEEEPIKIQHIKDPQDTITSLILLPPDILDNREDDCEEPIEDMQLTSKNGFEREKTSDISTLGHLVITTQGGYVKILDLSNFEILAKVEPPKKEGTEEQDTFVSVIYCSGTDRLCACTKESHPVNRLGCSYAILAHCNFCLPGSSDSPALASWVAGTTGGELHFLQIGGTCDDIDEADILVDGSLSKGIEPSSEGSKPLSNPSSPGISGVDLLVDQPFTLEILTSLVELTRFETLTPRFSATVPPCWVEVQQEQQQRRHPQHLHQQHHGDAAQHTRTWKLQTDSNSWDEHVFELVLPKACMVGHVDFKFVLNSNITNIPQIQVTLLKNKAPGLGKVNALNIEVEQNGKPSLVDLNEEMQHMDVEESQCLRLCPFLEDHKEDILCGPVWLASGLDLSGHAGMLTLTSPKLVKGMAGGKYRSFLIHVKAVNERGTEEICNGGMRPVVRLPSLKHQSNKGYSLASLLAKVAAGKKCNDVPCYSFQNFMRSFLILFAEKQMMARSQNMAQSLVLDTLCWLAGVHSNGPGSSKEGNENLLSKTRKFLSDIVRVCFFEAGRSIAHKCARFLALCISNGKCDPCQPAFGPVLLKALLDNMSFLPAATTGGSVYWYFVLLNYVKDEDLAGCSTACASLLTAVSRQLQDRLTPMEALLQTRYGLYSSPFDPVLFDLEMSGSSCKNVYNSSIGVQSDEIDLSDVLSGNGKVSSCTAAEGSFTSLTGLLEVEPLHFTCVSTSDGTRIERDDASTFTVSSFGVTPAVGGLSSGTVGEASTALSSAAQVALQSLSHAMASAEQQLQVLQEKQQQLLKLQQQKAKLEAKLHQTTAAAAAAASAVGPVHNSVPSNPVAAPGFFIHPSDVIPPTPKTTPLFMTPPLTPPNEAVSVVINAELAQLFPGSVIDPPAVNLAAHNKNSNKSRMVNYVLNRCWLRHLKYLEIYSYFEKAKFLIPTRCIKLFSFIKYYRTYIKRRNLLICYYGVVVFIDYSNINIKLDFFFFALLYNPLGSGLALAISHASHFLQPPPHQSIIIERMHSGARRFVTLDFGRPILLTDVLIPTCGDLASLSIDIWTLGEEVDGRRLVVATDISTHSLILHDLIPPPVCRFMKITVIGRYGSTNARAKIPLGFYYGHTYILPWESELKLMHDPLKGEGESANQPEIDQHLAMMVALQEDIQCRYNLACHRLETLLQSIDLPPLNSANNAQYFLRKPDKAVEEDSRVFSAYQDCIQLQLQLNLAHNAVQRLKVALGASRKMLSETSNPEDLIQTSSTEQLRTIIRYLLDTLLSLLHASNGHSVPAVLQSTFHAQACEELFKHLCISGTPKIRLHTGLLLVQLCGGERWWGQFLSNVLQELYNSEQLLIFPQDRVFMLLSCIGQRSLSNSGVLESLLNLLDNLLSPLQPQLPMHRRTEGVLDIPMISWVVMLVSRLLDYVATVEDEAAAAKKPLNGKDRERFLTGNQWSFINNNLHTQSLNRSSKGSSSLDRLYSRKIRKQLVHHKQQLNLLKAKQKALVEQMEKEKIQSNKGSSYKLLVEQAKLKQATSKHFKDLIRLRRTAEWSRSNLDTEVTTAKESPEIEPLPFTLAHERCISVVQKLVLFLLSMDFTCHADLLLFVCKVLARIANATRPTIHLCEIVNEPQLERLLLLLVGTDFNRGDISWGGAWAQYSLTCMLQDILAGELLAPVAAEAMEEGTVGDDVGATAGDSDDSLQQSSVQLLETIDEPLTHDITGAPPLSSLEKDKEIDLELLQDLMEVDIDPLDIDLEKDPLAAKVFKPISSTWYDYWGADYGTYNYNPYIGGLGIPVAKPPANTEKNGSQTVSVSVSQALDARLEVGLEQQAELMLKMMSTLEADSILQALTNTSPTLSQSPTGTDDSLLGGLQAANQTSQLIIQLSSVPMLNVCFNKLFSMLQVHHVQLESLLQLWLTLSLNSSSTGNKENGADIFLYNANRIPVISLNQASITSFLTVLAWYPNTLLRTWCLVLHSLTLMTNMQLNSGSSSAIGTQESTAHLLVSDPNLIHVLVKFLSGTSPHGTNQHSPQVGPTATQAMQEFLTRLQVHLSSTCPQIFSEFLLKLIHILSTERGAFQTGQGPLDAQVKLLEFTLEQNFEVVSVSTISAVIESVTFLVHHYITCSDKVMSRSGSDSSVGARACFGGLFANLIRPGDAKAVCGEMTRDQLMFDLLKLVNILVQLPLSGNREYSARVSVTTNTTDSVSDEEKVSGGKDGNGSSTSVQGSPAYVADLVLANQQIMSQILSALGLCNSSAMAMIIGASGLHLTKHENFHGGLDAISVGDGLFTILTTLSKKASTVHMMLQPILTYMACGYMGRQGSLATCQLSEPLLWFILRVLDTSDALKAFHDMGGVQLICNNMVTSTRAIVNTARSMVSTIMKFLDSGPNKAVDSTLKTRILASEPDNAEGIHNFAPLGTITSSSPTAQPAEVLLQATPPHRRARSAAWSYIFLPEEAWCDLTIHLPAAVLLKEIHIQPHLASLATCPSSVSVEVSADGVNMLPLSTPVVTSGLTYIKIQLVKAEVASAVCLRLHRPRDASTLGLSQIKLLGLTAFGTTSSATVNNPFLPSEDQVSKTSIGWLRLLHHCLTHISDLEGMMASAAAPTANLLQTCAALLMSPYCGMHSPNIEVVLVKIGLQSTRIGLKLIDILLRNCAASGSDPTDLNSPLLFGRLNGLSSDSTIDILYQLGTTQDPGTKDRIQALLKWVSDSARVAAMKRSGRMNYMCPNSSTVEYGLLMPSPSHLHCVAAILWHSYELLVEYDLPALLDQELFELLFNWSMSLPCNMVLKKAVDSLLCSMCHVHPNYFSLLMGWMGITPPPVQCHHRLSMTDDSKKQDLSSSLTDDSKNAQAPLALTESHLATLASSSQSPEAIKQLLDSGLPSLLVRSLASFCFSHISSSESIAQSIDISQDKLRRHHVPQQCNKMPITADLVAPILRFLTEVGNSHIMKDWLGGSEVNPLWTALLFLLCHSGSTSGSHNLGAQQTSARSASLSSAATTGLTTQQRTAIENATVAFFLQCISCHPNNQKLMAQVLCELFQTSPQRGNLPTSGNISGFIRRLFLQLMLEDEKVTMFLQSPCPLYKGRINATSHVIQHPMYGAGHKFRTLHLPVSTTLSDVLDRVSDTPSITAKLISEQKDDKEKKNHEEKEKVKAENGFQDNYSVVVASGLKSQSKRAVSATPPRPPSRRGRTIPDKIGSTSGAEAANKIITVPVFHLFHKLLAGQPLPAEMTLAQLLTLLYDRKLPQGYRSIDLTVKLGSRVITDPSLSKTDSYKRLHPEKDHGDLLASCPEDEALTPGDECMDGILDESLLETCPIQSPLQVFAGMGGLALIAERLPMLYPEVIQQVSAPVVTSTTQEKPKDSDQFEWVTIEQSGELVYEAPETVAAEPPPIKSAVQTMSPIPAHSLAAFGLFLRLPGYAEVLLKERKHAQCLLRLVLGVTDDGEGSHILQSPSANVLPTLPFHVLRSLFSTTPLTTDDGVLLRRMALEIGALHLILVCLYCFEPPFPTSSKL

SEQ ID NO: 856901 - protein, 3742 aa, Homo sapiens
QITFPLSPALNIEVEQNGKPSLVDLNEEMQHMDVEESQCLRLCPFLEDHKEDILCGPVWLASGLDLSGHAGMLTLTSPKLVKGMAGGKYRSFLIHVKAVNERGTEEICNGGMRPVVRLPSLKHQSNKGYSLASLLAKVAAGKEKSSNVKNENTSGTRKSENLRGCDLLQEVSVTIRRFKKTSISKERVQRCAMLQFSEFHEKLLNTLCRKTDDGQITEHAQSLVLDTLCWLAGVHSNGPGSSKEGNENLLSKTRKFLSDIVRVCFFEAGRSIAHKCARFLALCISNGKCDPCQPAFGPVLLKALLDNMSFLPAATTGGSVYWYFVLLNYVKDEDLAGCSTACASLLTAVSRQLQDRLTPMEALLQTRYGLYSSPFDPVLFDLEMSGSSCKNVYNSSIGVQSDEIDLSDVLSGNGKVSSCTAAEGSFTSLTGLLEVEPLHFTCVSTSDGTRIERDDASTFTVSSFGVTPAVGGLSSGTVGEASTALSSAAQVALQSLSHAMASAEQQLQVLQEKQQQLLKLQQQKAKLEAKLHQTTAAAAAAASAVGPVHNSVPSNPVAAPGFFIHPSDVIPPTPKTTPLFMTPPLTPPNEAVSVVINAELAQLFPGSVIDPPAVNLAAHNKNSNKSRMNPLGSGLALAISHASHFLQPPPHQSIIIERMHSGARRFVTLDFGRPILLTDVLIPTCGDLASLSIDIWTLGEEVDGRRLVVATDISTHSLILHDLIPPPVCRFMKITVIGRYGSTNARAKIPLGFYYGHTYILPWESELKLMHDPLKGEGESANQPEIDQHLAMMVALQEDIQCRYNLACHRLETLLQSIDLPPLNSANNAQYFLRKPDKAVEEDSRVFSAYQDCIQLQLQLNLAHNAVQRLKVALGASRKMLSETSNPEDLIQTSSTEQLRTIIRYLLDTLLSLLHASNGHSVPAVLQSTFHAQACEELFKHLCISGTPKIRLHTGLLLVQLCGGERWWGQFLSNVLQELYNSEQLLIFPQDRVFMLLSCIGQRSLSNSGVLESLLNLLDNLLSPLQPQLPMHRRTEGVLDIPMISWVVMLVSRLLDYVATVEDEAAAAKKPLNGKDRERFLTGNQWSFINNNLHTQSLNRSSKGSSSLDRLYSRKIRKQLVHHKQQLNLLKAKQKALVEQMEKEKIQSNKGSSYKLLVEQAKLKQATSKHFKDLIRLRRTAEWSRSNLDTEVTTAKESPEIEPLPFTLAHERCISVVQKLVLFLLSMDFTCHADLLLFVCKVLARIANATRPTIHLCEIVNEPQLERLLLLLVGTDFNRGDISWGGAWAQYSLTCMLQDILAGELLAPVAAEAMEEGTVGDDVGATAGDSDDSLQQSSVQLLETIDEPLTHDITGAPPLSSLEKDKEIDLELLQDLMEVDIDPLDIDLEKDPLAAKVFKPISSTWYDYWGADYGTYNYNPYIGGLGIPVAKPPANTEKNGSQTVSVSVSQALDARLEVGLEQQAELMLKMMSTLEADSILQALTNTSPTLSQSPTGTDDSLLGGLQAANQTSQLIIQLSSVPMLNVCFNKLFSMLQVHHVQLESLLQLWLTLSLNSSSTGNKENGADIFLYNANRIPVISLNQASITSFLTVLAWYPNTLLRTWCLVLHSLTLMTNMQLNSGSSSAIGTQESTAHLLVSDPNLIHVLVKFLSGTSPHGTNQHSPQVGPTATQAMQEFLTRLQVHLSSTCPQIFSEFLLKLIHILSTERGAFQTGQGPLDAQVKLLEFTLEQNFEVVSVSTISAVIESVTFLVHHYITCSDKVMSRSGSDSSVGARACFGGLFANLIRPGDAKAVCGEMTRDQLMFDLLKLVNILVQLPLSGNREYSARVSVTTNTTDSVSDEEKVSGGKDGNGSSTSVQGSPAYVADLVLANQQIMSQILSALGLCNSSAMAMIIGASGLHLTKHENFHGGLDAISVGDGLFTILTTLSKKASTVHMMLQPILTYMACGYMGRQGSLATCQLSEPLLWFILRVLDTSDALKAFHDMGGVQLICNNMVTSTRAIVNTARSMVSTIMKFLDSGPNKAVDSTLKTRILASEPDNAEGIHNFAPLGTITSSSPTAQPAEVLLQATPPHRRARSAAWSYIFLPEEAWCDLTIHLPAAVLLKEIHIQPHLASLATCPSSVSVEVSADGVNMLPLSTPVVTSGLTYIKIQLVKAEVASAVCLRLHRPRDASTLGLSQIKLLGLTAFGTTSSATVNNPFLPSEDQVSKTSIGWLRLLHHCLTHISDLEGMMASAAAPTANLLQTCAALLMSPYCGMHSPNIEVVLVKIGLQSTRIGLKLIDILLRNCAASGSDPTDLNSPLLFGRLNGLSSDSTIDILYQLGTTQDPGTKDRIQALLKWVSDSARVAAMKRSGRMNYMCPNSSTVEYGLLMPSPSHLHCVAAILWHSYELLVEYDLPALLDQELFELLFNWSMSLPCNMVLKKAVDSLLCSMCHVHPNYFSLLMGWMGITPPPVQCHHRLSMTDDSKKQDLSSSLTDDSKNAQAPLALTESHLATLASSSQSPEAIKQLLDSGLPSLLVRSLASFCFSHISSSESIAQSIDISQDKLRRHHVPQQCNKMPITADLVAPILRFLTEVGNSHIMKDWLGGSEVNPLWTALLFLLCHSGSTSGSHNLGAQQTSARSASLSSAATTGLTTQQRTAIENATVAFFLQCISCHPNNQKLMAQVLCELFQTSPQRGNLPTSGNISGFIRRLFLQLMLEDEKVTMFLQSPCPLYKGRINATSHVIQHPMYGAGHKFRTLHLPVSTTLSDVLDRVSDTPSITAKLISEQKDDKEKKNHEEKEKVKAENGFQDNYSVVVASGLKSQSKRAVSATPPRPPSRRGRTIPDKIGSTSGAEAANKIITVPVFHLFHKLLAGQPLPAEMTLAQLLTLLYDRKLPQGYRSIDLTVKLGSRVITDPSLSKTDSYKRLHPEKDHGDLLASCPEDEALTPGDECMDGILDESLLETCPIQSPLQVFAGMGGLALIAERLPMLYPEVIQQVSAPVVTSTTQEKPKDSDQFEWVTIEQSGELVYEAPETVAAEPPPIKSAVQTMSPIPAHSLAAFGLFLRLPGYAEVLLKERKHAQCLLRLVLGVTDDGEGSHILQSPSANVLPTLPFHVLRSLFSTTPLTTDDGVLLRRMALEIGALHLILVCLSALSHHSPRVPNSSVNQTEPQVSSSHNPTSTEEQQLYWAKGTGFGTGSTASGWDVEQALTKQRLEEEHVTCLLQVLASYINPVSSAVNGEAQSSHETRGQNSNALPSVLLELLSQSCLIPAMSSYLRNDSVLDMARHVPLYRALLELLRAIASCAAMVPLLLPLSTENGEEEEEQSECQTSVGTLLAKMKTCVDTYTNRLRSKRENVKTGVKPDASDQEPEGLTLLVPDIQKTAEIVYAATTSLRQANQEKKLGEYSKKAAMKPKPLSVLKSLEEKYVAVMKKLQFDTFEMVSEDEDGKLGFKVNYHYMSQVKNANDANSAARARRLAQEAVTLSTSLPLSSSSSVFVRCDEERLDIMKVLITGPADTPYANGCFEFDVYFPQDYPSSPPLVNLETTGGHSVRFNPNLYNDGKVCLSILNTWHGRPEEKWNPQTSSFLQVLVSVQSLILVAEPYFNEPGYERSRGTPSGTQSSREYDGNIRQATVKWAMLEQIRNPSPCFKEVIHKHFYLKRVEIMAQCEEWIADIQQYSSDKRVGRTMSHHAAALKRHTAQLREELLKLPCPEGLDPDTDDAPEVCRATTGAEETLMHDQVKPSSSKELPSDFQL

SEQ ID NO: 856902 - protein, 2602 aa, Homo sapiens
MEKEKIQSNKGSSYKLLVEQAKLKQATSKHFKDLIRLRRTAEWSRSNLDTEVTTAKESPEIEPLPFTLAHERCISVVQKLVLFLLSMDFTCHADLLLFVCKVLARIANATRPTIHLCEIVNEPQLERLLLLLVGTDFNRGDISWGGAWAQYSLTCMLQDILAGELLAPVAAEAMEEGTVGDDVGATAGDSDDSLQQSSVQLLETIDEPLTHDITGAPPLSSLEKDKEIDLELLQDLMEVDIDPLDIDLEKDPLAAKVFKPISSTWYDYWGADYGTYNYNPYIGGLGIPVAKPPANTEKNGSQTVSVSVSQALDARLEVGLEQQAELMLKMMSTLEADSILQALTNTSPTLSQSPTGTDDSLLGGLQAANQTSQLIIQLSSVPMLNVCFNKLFSMLQVHHVQLESLLQLWLTLSLNSSSTGNKENGADIFLYNANRIPVISLNQASITSFLTVLAWYPNTLLRTWCLVLHSLTLMTNMQLNSGSSSAIGTQESTAHLLVSDPNLIHVLVKFLSGTSPHGTNQHSPQVGPTATQAMQEFLTRLQVHLSSTCPQIFSEFLLKLIHILSTERGAFQTGQGPLDAQVKLLEFTLEQNFEVVSVSTISAVIESVTFLVHHYITCSDKVMSRSGSDSSVGARACFGGLFANLIRPGDAKAVCGEMTRDQLMFDLLKLVNILVQLPLSGNREYSARVSVTTNTTDSVSDEEKVSGGKDGNGSSTSVQGSPAYVADLVLANQQIMSQILSALGLCNSSAMAMIIGASGLHLTKHENFHGGLDAISVGDGLFTILTTLSKKASTVHMMLQPILTYMACGYMGRQGSLATCQLSEPLLWFILRVLDTSDALKAFHDMGGVQLICNNMVTSTRAIVNTARSMVSTIMKFLDSGPNKAVDSTLKTRILASEPDNAEGIHNFAPLGTITSSSPTAQPAEVLLQATPPHRRARSAAWSYIFLPEEAWCDLTIHLPAAVLLKEIHIQPHLASLATCPSSVSVEVSADGVNMLPLSTPVVTSGLTYIKIQLVKAEVASAVCLRLHRPRDASTLGLSQIKLLGLTAFGTTSSATVNNPFLPSEDQVSKTSIGWLRLLHHCLTHISDLEGMMASAAAPTANLLQTCAALLMSPYCGMHSPNIEVVLVKIGLQSTRIGLKLIDILLRNCAASGSDPTDLNSPLLFGRLNGLSSDSTIDILYQLGTTQDPGTKDRIQALLKWVSDSARVAAMKRSGRMNYMCPNSSTVEYGLLMPSPSHLHCVAAILWHSYELLVEYDLPALLDQELFELLFNWSMSLPCNMVLKKAVDSLLCSMCHVHPNYFSLLMGWMGITPPPVQCHHRLSMTDDSKKQDLSSSLTDDSKNAQAPLALTESHLATLASSSQSPEAIKQLLDSGLPSLLVRSLASFCFSHISSSESIAQSIDISQDKLRRHHVPQQCNKMPITADLVAPILRFLTEVGNSHIMKDWLGGSEVNPLWTALLFLLCHSGSTSGSHNLGAQQTSARSASLSSAATTGLTTQQRTAIENATVAFFLQCISCHPNNQKLMAQVLCELFQTSPQRGNLPTSGNISGFIRRLFLQLMLEDEKVTMFLQSPCPLYKGRINATSHVIQHPMYGAGHKFRTLHLPVSTTLSDVLDRVSDTPSITAKLISEQKDDKEKKNHEEKEKVKAENGFQDNYSVVVASGLKSQSKRAVSATPPRPPSRRGRTIPDKIGSTSGAEAANKIITVPVFHLFHKLLAGQPLPAEMTLAQLLTLLYDRKLPQGYRSIDLTVKLGSRVITDPSLSKTDSYKRLHPEKDHGDLLASCPEDEALTPGDECMDGILDESLLETCPIQSPLQVFAGMGGLALIAERLPMLYPEVIQQVSAPVVTSTTQEKPKDSDQFEWVTIEQSGELVYEAPETVAAEPPPIKSAVQTMSPIPAHSLAAFGLFLRLPGYAEVLLKERKHAQCLLRLVLGVTDDGEGSHILQSPSANVLPTLPFHVLRSLFSTTPLTTDDGVLLRRMALEIGALHLILVCLSALSHHSPRVPNSSVNQTEPQVSSSHNPTSTEEQQLYWAKGTGFGTGSTASGWDVEQALTKQRLEEEHVTCLLQVLASYINPVSSAVNGEAQSSHETRGQNSNALPSVLLELLSQSCLIPAMSSYLRNDSVLDMARHVPLYRALLELLRAIASCAAMVPLLLPLSTENGEEEEEQSECQTSVGTLLAKMKTCVDTYTNRLRSKRENVKTGVKPDASDQEPEGLTLLVPDIQKTAEIVYAATTSLRQANQEKKLGEYSKKAAMKPKPLSVLKSLEEKYVAVMKKLQFDTFEMVSEDEDGKLGFKVNYHYMSQVKNANDANSAARARRLAQEAVTLSTSLPLSSSSSVFVRCDEERLDIMKVLITGPADTPYANGCFEFDVYFPQDYPSSPPLVNLETTGGHSVRFNPNLYNDGKVCLSILNTWHGRPEEKWNPQTSSFLQVLVSVQSLILVAEPYFNEPGYERSRGTPSGTQSSREYDGNIRQATVKWAMLEQIRNPSPCFKEVIHKHFYLKRVEIMAQCEEWIADIQQYSSDKRVGRTMSHHAAALKRHTAQLREELLKLPCPEGLDPDTDDAPEVCRATTGAEETLMHDQVKPSSSKELPSDFQL

SEQ ID NO: 856903 - protein, 2349 aa, Homo sapiens
VIHDGGLLNMTVLARFTADYGTYNYNPYIGGLGIPVAKPPANTEKNGSQTVSVSVSQALDARLEVGLEQQAELMLKMMSTLEADSILQALTNTSPTLSQSPTGTDDSLLGGLQAANQTSQLIIQLSSVPMLNVCFNKLFSMLQVHHVQLESLLQLWLTLSLNSSSTGNKENGADIFLYNANRIPVISLNQASITSFLTVLAWYPNTLLRTWCLVLHSLTLMTNMQLNSGSSSAIGTQESTAHLLVSDPNLIHVLVKFLSGTSPHGTNQHSPQVGPTATQAMQEFLTRLQVHLSSTCPQIFSEFLLKLIHILSTERGAFQTGQGPLDAQVKLLEFTLEQNFEVVSVSTISAVIESVTFLVHHYITCSDKVMSRSGSDSSVGARACFGGLFANLIRPGDAKAVCGEMTRDQLMFDLLKLVNILVQLPLSGNREYSARVSVTTNTTDSVSDEEKVSGGKDGNGSSTSVQGSPAYVADLVLANQQIMSQILSALGLCNSSAMAMIIGASGLHLTKHENFHGGLDAISVGDGLFTILTTLSKKASTVHMMLQPILTYMACGYMGRQGSLATCQLSEPLLWFILRVLDTSDALKAFHDMGGVQLICNNMVTSTRAIVNTARSMVSTIMKFLDSGPNKAVDSTLKTRILASEPDNAEGIHNFAPLGTITSSSPTAQPAEVLLQATPPHRRARSAAWSYIFLPEEAWCDLTIHLPAAVLLKEIHIQPHLASLATCPSSVSVEVSADGVNMLPLSTPVVTSGLTYIKIQLVKAEVASAVCLRLHRPRDASTLGLSQIKLLGLTAFGTTSSATVNNPFLPSEDQVSKTSIGWLRLLHHCLTHISDLEGMMASAAAPTANLLQTCAALLMSPYCGMHSPNIEVVLVKIGLQSTRIGLKLIDILLRNCAASGSDPTDLNSPLLFGRLNGLSSDSTIDILYQLGTTQDPGTKDRIQALLKWVSDSARVAAMKRSGRMNYMCPNSSTVEYGLLMPSPSHLHCVAAILWHSYELLVEYDLPALLDQELFELLFNWSMSLPCNMVLKKAVDSLLCSMCHVHPNYFSLLMGWMGITPPPVQCHHRLSMTDDSKKQDLSSSLTDDSKNAQAPLALTESHLATLASSSQSPEAIKQLLDSGLPSLLVRSLASFCFSHISSSESIAQSIDISQDKLRRHHVPQQCNKMPITADLVAPILRFLTEVGNSHIMKDWLGGSEVNPLWTALLFLLCHSGSTSGSHNLGAQQTSARSASLSSAATTGLTTQQRTAIENATVAFFLQCISCHPNNQKLMAQVLCELFQTSPQRGNLPTSGNISGFIRRLFLQLMLEDEKVTMFLQSPCPLYKGRINATSHVIQHPMYGAGHKFRTLHLPVSTTLSDVLDRVSDTPSITAKLISEQKDDKEKKNHEEKEKVKAENGFQDNYSVVVASGLKSQSKRAVSATPPRPPSRRGRTIPDKIGSTSGAEAANKIITVPVFHLFHKLLAGQPLPAEMTLAQLLTLLYDRKLPQGYRSIDLTVKLGSRVITDPSLSKTDSYKRLHPEKDHGDLLASCPEDEALTPGDECMDGILDESLLETCPIQSPLQVFAGMGGLALIAERLPMLYPEVIQQVSAPVVTSTTQEKPKDSDQFEWVTIEQSGELVYEAPETVAAEPPPIKSAVQTMSPIPAHSLAAFGLFLRLPGYAEVLLKERKHAQCLLRLVLGVTDDGEGSHILQSPSANVLPTLPFHVLRSLFSTTPLTTDDGVLLRRMALEIGALHLILVCLSALSHHSPRVPNSSVNQTEPQVSSSHNPTSTEEQQLYWAKGTGFGTGSTASGWDVEQALTKQRLEEEHVTCLLQVLASYINPVSSAVNGEAQSSHETRGQNSNALPSVLLELLSQSCLIPAMSSYLRNDSVLDMARHVPLYRALLELLRAIASCAAMVPLLLPLSTENGEEEEEQSECQTSVGTLLAKMKTCVDTYTNRLRSKRENVKTGVKPDASDQEPEGLTLLVPDIQKTAEIVYAATTSLRQANQEKKLGEYSKKAAMKPKPLSVLKSLEEKYVAVMKKLQFDTFEMVSEDEDGKLGFKVNYHYMSQVKNANDANSAARARRLAQEAVTLSTSLPLSSSSSVFVRCDEERLDIMKVLITGPADTPYANGCFEFDVYFPQDYPSSPPLVNLETTGGHSVRFNPNLYNDGKVCLSILNTWHGRPEEKWNPQTSSFLQVLVSVQSLILVAEPYFNEPGYERSRGTPSGTQSSREYDGNIRQATVKWAMLEQIRNPSPCFKEVIHKHFYLKRVEIMAQCEEWIADIQQYSSDKRVGRTMSHHAAALKRHTAQLREELLKLPCPEGLDPDTDDAPEVCRATTGAEETLMHDQVKPSSSKELPSDFQL

SEQ ID NO: 856904 - protein, 345 aa, Homo sapiens [sequence omitted]

SEQ ID NO: 856905 - protein, 117 aa, Homo sapiens
VICNDSLNPPPLHVIHKHFYLKRVEIMAQCEEWIADIQQYSSDKRVGRTMSHHAAALKRHTAQLREELLKLPCPEGLDPDTDDAPEVCRATTGAEETLMHDQVKPSSSKELPSDFQL

SEQ ID NO: 856906 - protein, 112 aa, Homo sapiens
MHAGGTVGVIHKHFYLKRVEIMAQCEEWIADIQQYSSDKRVGRTMSHHAAALKRHTAQLREELLKLPCPEGLDPDTDDAPEVCRATTGAEETLMHDQVKPSSSKELPSDFQL

SEQ ID NO: 856907 - protein, 116 aa, Homo sapiens
RAPPQRFPNTFAGQNPNFGTLKNPIMAQCEEWIADIQQYSSDKRVGRTMSHHAAALKRHTAQLREELLKLPCPEGLDPDTDDAPEVCRATTGAEETLMHDQVKPSSSKELPSDFQL

SEQ ID NO: 856908 - protein, 76 aa, Homo sapiens
VELYVGIFVISVDSVLKRHTAQLREELLKLPCPEGLDPDTDDAPEVCRATTGAEETLMHDQVKPSSSKELPSDFQL

SEQ ID NO: 856909 - protein, 3519 aa, Homo sapiens
MVTGGGAAPPGTVTEPLPSVIVLSAGRKMAAAAAAASGPGCSSAAGAGAAGVSEWLVLRDGCMHCDADGLHSLSYHPALNAILAVTSRGTIKVIDGTSGATLQASALSAKPGGQVKCQYISAVDKVIFVDDYAVGCRKDLNGILLLDTALQTPVSKQDDVVQLELPVTEAQQLLSACLEKVDISSTEGYDLFITQLKDGLKNTSHETAANHKVAKWATVTFHLPHHVLKSIASAIVNELKKINQNVAALPVASSVMDRLSYLLPSARPELGVGPGRSVDRSLMYSEANRRETFTSWPHVGYRWAQPDPMAQAGFYHQPASSGDDRAMCFTCSVCLVCWEPTDEPWSEHERHSPNCPFVKGEHTQNVPLSVTLATSPAQFPCTDGTDRISCFGSGSCPHFLAAATKRGKICIWDVSKLMKVHLKFEINAYDPAIVQQLILSGDPSSGVDSRRPTLAWLEDSSSCSDIPKLEGDSDDLLEDSDSEEHSRSDSVTGHTSQKEAMEVSLDITALSILQQPEKLQWEIVANVLEDTVKDLEELGANPCLTNSKSEKTKEKHQEQHNIPFPCLLAGGLLTYKSPATSPISSNSHRSLDGLSRTQGESISEQGSTDNESCTNSELNSPLVRRTLPVLLLYSIKESDEKAGKIFSQMNNIMSKSLHDDGFTVPQIIEMELDSQEQLLLQDPPVTYIQQFADAAANLTSPDSEKWNSVFPKPGTLVQCLRLPKFAEEENLCIDSITPCADGIHLLVGLRTCPVESLSAINQVEALNNLNKLNSALCNRRKGELESNLAVVNGANISVIQHESPADVQTPLIIQPEQRNVSGGYLVLYKMNYATRIVTLEEEPIKIQHIKDPQDTITSLILLPPDILDNREDDCEEPIEDMQLTSKNGFEREKTSDISTLGHLVITTQGGYVKILDLSNFEILAKVEPPKKEGTEEQDTFVSVIYCSGTDRLCACTKESHPVNRLGCSYAILAHCNFCLPGSSDSPALASWVAGTTGGELHFLQIGGTCDDIDEADILVDGSLSKGIEPSSEGSKPLSNPSSPGISGVDLLVDQPFTLEILTSLVELTRFETLTPRFSATVPPCWVEVQQEQQQRRHPQHLHQQHHGDAAQHTRTWKLQTDSNSWDEHVFELVLPKACMVGHVDFKFVLNSNITNIPQIQVTLLKNKAPGLGKVNALNIEVEQNGKPSLVDLNEEMQHMDVEESQCLRLCPFLEDHKEDILCGPVWLASGLDLSGHAGMLTLTSPKLVKGMAGGKYRSFLIHVKAVNERGTEEICNGGMRPVVRLPSLKHQSNKGYSLASLLAKVAAGKKCNDVPCYSFQNFMRSFLILFAEKQMMARSQNMAQSLVLDTLCWLAGVHSNGPGSSKEGNENLLSKTRKFLSDIVRVCFFEAGRSIAHKCARFLALCISNGKCDPCQPAFGPVLLKALLDNMSFLPAATTGGSVYWYFVLLNYVKDEDLAGCSTACASLLTAVSRQLQDRLTPMEALLQTRYGLYSSPFDPVLFDLEMSGSSCKNVYNSSIGVQSDEIDLSDVLSGNGKVSSCTAAEGSFTSLTGLLEVEPLHFTCVSTSDGTRIERDDASTFTVSSFGVTPAVGGLSSGTVGEASTALSSAAQVALQSLSHAMASAEQQLQVLQEKQQQLLKLQQQKAKLEAKLHQTTAAAAAAASAVGPVHNSVPSNPVAAPGFFIHPSDVIPPTPKTTPLFMTPPLTPPNEAVSVVINAELAQLFPGSVIDPPAVNLAAHNKNSNKSRMNPLGSGLALAISHASHFLQPPPHQSIIIERMHSGARRFVTLDFGRPILLTDVLIPTCGDLASLSIDIWTLGEEVDGRRLVVATDISTHSLILHDLIPPPVCRFMKITVIGRYGSTNARAKIPLGFYYGHTYILPWESELKLMHDPLKGEGESANQPEIDQHLAMMVALQEDIQCRYNLACHRLETLLQSIDLPPLNSANNAQYFLRKPDKAVEEDSRVFSAYQDCIQLQLQLNLAHNAVQRLKVALGASRKMLSETSNPEDLIQTSSTEQLRTIIRYLLDTLLSLLHASNGHSVPAVLQSTFHAQACEELFKHLCISGTPKIRLHTGLLLVQLCGGERWWGQFLSNVLQELYNSEQLLIFPQDRVFMLLSCIGQRSLSNSGVLESLLNLLDNLLSPLQPQLPMHRRTEGVLDIPMISWVVMLVSRLLDYVATVEDEAAAAKKPLNGKDRERFLTGNQWSFINNNLHTQSLNRSSKGSSSLDRLYSRKIRKQLVHHKQQLNLLKAKQKALVEQMEKEKIQSNKGSSYKLLVEQAKLKQATSKHFKDLIRLRRTAEWSRSNLDTEVTTAKESPEIEPLPFTLAHERCISVVQKLVLFLLSMDFTCHADLLLFVCKVLARIANATRPTIHLCEIVNEPQLERLLLLLVGTDFNRGDISWGGAWAQYSLTCMLQDILAGELLAPVAAEAMEEGTVGDDVGATAGDSDDSLQQSSVQLLETIDEPLTHDITGAPPLSSLEKDKEIDLELLQDLMEVDIDPLDIDLEKDPLAAKVFKPISSTWYDYWGADYGTYNYNPYIGGLGIPVAKPPANTEKNGSQTVSVSVSQALDARLEVGLEQQAELMLKMMSTLEADSILQALTNTSPTLSQSPTGTDDSLLGGLQAANQTSQLIIQLSSVPMLNVCFNKLFSMLQVHHVQLESLLQLWLTLSLNSSSTGNKENGADIFLYNANRIPVISLNQASITSFLTVLAWYPNTLLRTWCLVLHSLTLMTNMQLNSGSSSAIGTQESTAHLLVSDPNLIHVLVKFLSGTSPHGTNQHSPQVGPTATQAMQEFLTRLQVHLSSTCPQIFSEFLLKLIHILSTERGAFQTGQGPLDAQVKLLEFTLEQNFEVVSVSTISAVIESVTFLVHHYITCSDKVMSRSGSDSSVGARACFGGLFANLIRPGDAKAVCGEMTRDQLMFDLLKLVNILVQLPLSGNREYSARVSVTTNTTDSVSDEEKVSGGKDGNGSSTSVQGSPAYVADLVLANQQIMSQILSALGLCNSSAMAMIIGASGLHLTKHENFHGGLDAISVGDGLFTILTTLSKKASTVHMMLQPILTYMACGYMGRQGSLATCQLSEPLLWFILRVLDTSDALKAFHDMGGVQLICNNMVTSTRAIVNTARSMVSTIMKFLDSGPNKAVDSTLKTRILASEPDNAEGIHNFAPLGTITSSSPTAQPAEVLLQATPPHRRARSAAWSYIFLPEEAWCDLTIHLPAAVLLKEIHIQPHLASLATCPSSVSVEVSADGVNMLPLSTPVVTSGLTYIKIQLVKAEVASAVCLRLHRPRDASTLGLSQIKLLGLTAFGTTSSATVNNPFLPSEDQVSKTSIGWLRLLHHCLTHISDLEGMMASAAAPTANLLQTCAALLMSPYCGMHSPNIEVVLVKIGLQSTRIGLKLIDILLRNCAASGSDPTDLNSPLLFGRLNGLSSDSTIDILYQLGTTQDPGTKDRIQALLKWVSDSARVAAMKRSGRMNYMCPNSSTVEYGLLMPSPSHLHCVAAILWHSYELLVEY

SEQ ID NO: 856910 - protein, 3919 aa, Homo sapiens
MVTGGGAAPPGTVTEPLPSVIVLSAGRKMAAAAAAASGPGCSSAAGAGAAGVSEWLVLRDGCMHCDADGLHSLSYHPALNAILAVTSRGTIKVIDGTSGATLQASALSAKPGGQVKCQYISAVDKVIFVDDYAVGCRKDLNGILLLDTALQTPVSKQDDVVQLELPVTEAQQLLSACLEKVDISSTEGYDLFITQLKDGLKNTSHETAANHKVAKWATVTFHLPHHVLKSIASAIVNELKKINQNVAALPVASSVMDRLSYLLPSARPELGVGPGRSVDRSLMYSEANRRETFTSWPHVGYRWAQPDPMAQAGFYHQPASSGDDRAMCFTCSVCLVCWEPTDEPWSEHERHSPNCPFVKGEHTQNVPLSVTLATSPAQFPCTDGTDRISCFGSGSCPHFLAAATKRGKICIWDVSKLMKVHLKFEINAYDPAIVQQLILSGDPSSGVDSRRPTLAWLEDSSSCSDIPKLEGDSDDLLEDSDSEEHSRSDSVTGHTSQKEAMEVSLDITALSILQQPEKLQWEIVANVLEDTVKDLEELGANPCLTNSKSEKTKEKHQEQHNIPFPCLLAGGLLTYKSPATSPISSNSHRSLDGLSRTQGESISEQGSTDNESCTNSELNSPLVRRTLPVLLLYSIKESDEKAGKIFSQMNNIMSKSLHDDGFTVPQIIEMELDSQEQLLLQDPPVTYIQQFADAAANLTSPDSEKWNSVFPKPGTLVQCLRLPKFAEEENLCIDSITPCADGIHLLVGLRTCPVESLSAINQVEALNNLNKLNSALCNRRKGELESNLAVVNGANISVIQHESPADVQTPLIIQPEQRNVSGGYLVLYKMNYATRIVTLEEEPIKIQHIKDPQDTITSLILLPPDILDNREDDCEEPIEDMQLTSKNGFEREKTSDISTLGHLVITTQGGYVKILDLSNFEILAKVEPPKKEGTEEQDTFVSVIYCSGTDRLCACTKESHPVNRLGCSYAILAHCNFCLPGSSDSPALASWVAGTTGGELHFLQIGGTCDDIDEADILVDGSLSKGIEPSSEGSKPLSNPSSPGISGVDLLVDQPFTLEILTSLVELTRFETLTPRFSATVPPCWVEVQQEQQQRRHPQHLHQQHHGDAAQHTRTWKLQTDSNSWDEHVFELVLPKACMVGHVDFKFVLNSNITNIPQIQVTLLKNKAPGLGKVNALNIEVEQNGKPSLVDLNEEMQHMDVEESQCLRLCPFLEDHKEDILCGPVWLASGLDLSGHAGMLTLTSPKLVKGMAGGKYRSFLIHVKAVNERGTEEICNGGMRPVVRLPSLKHQSNKGYSLASLLAKVAAGKKCNDVPCYSFQNFMRSFLILFAEKQMMARSQNMAQSLVLDTLCWLAGVHSNGPGSSKEGNENLLSKTRKFLSDIVRVCFFEAGRSIAHKCARFLALCISNGKCDPCQPAFGPVLLKALLDNMSFLPAATTGGSVYWYFVLLNYVKDEDLAGCSTACASLLTAVSRQLQDRLTPMEALLQTRYGLYSSPFDPVLFDLEMSGSSCKNVYNSSIGVQSDEIDLSDVLSGNGKVSSCTAAEGSFTSLTGLLEVEPLHFTCVSTSDGTRIERDDASTFTVSSFGVTPAVGGLSSGTVGEASTALSSAAQVALQSLSHAMASAEQQLQVLQEKQQQLLKLQQQKAKLEAKLHQTTAAAAAAASAVGPVHNSVPSNPVAAPGFFIHPSDVIPPTPKTTPLFMTPPLTPPNEAVSVVINAELAQLFPGSVIDPPAVNLAAHNKNSNKSRMNPLGSGLALAISHASHFLQPPPHQSIIIERMHSGARRFVTLDFGRPILLTDVLIPTCGDLASLSIDIWTLGEEVDGRRLVVATDISTHSLILHDLIPPPVCRFMKITVIGRYGSTNARAKIPLGFYYGHTYILPWESELKLMHDPLKGEGESANQPEIDQHLAMMVALQEDIQCRYNLACHRLETLLQSIDLPPLNSANNAQYFLRKPDKAVEEDSRVFSAYQDCIQLQLQLNLAHNAVQRLKVALGASRKMLSETSNPEDLIQTSSTEQLRTIIRYLLDTLLSLLHASNGHSVPAVLQSTFHAQACEELFKHLCISGTPKIRLHTGLLLVQLCGGERWWGQFLSNVLQELYNSEQLLIFPQDRVFMLLSCIGQRSLSNSGVLESLLNLLDNLLSPLQPQLPMHRRTEGVLDIPMISWVVMLVSRLLDYVATVEDEAAAAKKPLNGKDRERFLTGNQWSFINNNLHTQSLNRSSKGSSSLDRLYSRKIRKQLVHHKQQLNLLKAKQKALVEQMEKEKIQSNKGSSYKLLVEQAKLKQATSKHFKDLIRLRRTAEWSRSNLDTEVTTAKESPEIEPLPFTLAHERCISVVQKLVLFLLSMDFTCHADLLLFVCKVLARIANATRPTIHLCEIVNEPQLERLLLLLVGTDFNRGDISWGGAWAQYSLTCMLQDILAGELLAPVAAEAMEEGTVGDDVGATAGDSDDSLQQSSVQLLETIDEPLTHDITGAPPLSSLEKDKEIDLELLQDLMEVDIDPLDIDLEKDPLAAKVFKPISSTWYDYWGADYGTYNYNPYIGGLGIPVAKPPANTEKNGSQTVSVSVSQALDARLEVGLEQQAELMLKMMSTLEADSILQALTNTSPTLSQSPTGTDDSLLGGLQAANQTSQLIIQLSSVPMLNVCFNKLFSMLQVHHVQLESLLQLWLTLSLNSSSTGNKENGADIFLYNANRIPVISLNQASITSFLTVLAWYPNTLLRTWCLVLHSLTLMTNMQLNSGSSSAIGTQESTAHLLVSDPNLIHVLVKFLSGTSPHGTNQHSPQVGPTATQAMQEFLTRLQVHLSSTCPQIFSEFLLKLIHILSTERGAFQTGQGPLDAQVKLLEFTLEQNFEVVSVSTISAVIESVTFLVHHYITCSDKVMSRSGSDSSVGARACFGGLFANLIRPGDAKAVCGEMTRDQLMFDLLKLVNILVQLPLSGNREYSARVSVTTNTTDSVSDEEKVSGGKDGNGSSTSVQGSPAYVADLVLANQQIMSQILSALGLCNSSAMAMIIGASGLHLTKHENFHGGLDAISVGDGLFTILTTLSKKASTVHMMLQPILTYMACGYMGRQGSLATCQLSEPLLWFILRVLDTSDALKAFHDMGGVQLICNNMVTSTRAIVNTARSMVSTIMKFLDSGPNKAVDSTLKTRILASEPDNAEGIHNFAPLGTITSSSPTAQPAEVLLQATPPHRRARSAAWSYIFLPEEAWCDLTIHLPAAVLLKEIHIQPHLASLATCPSSVSVEVSADGVNMLPLSTPVVTSGLTYIKIQLVKAEVASAVCLRLHRPRDASTLGLSQIKLLGLTAFGTTSSATVNNPFLPSEDQVSKTSIGWLRLLHHCLTHISDLEGMMASAAAPTANLLQTCAALLMSPYCGMHSPNIEVVLVKIGLQSTRIGLKLIDILLRNCAASGSDPTDLNSPLLFGRLNGLSSDSTIDILYQLGTTQDPGTKDRIQALLKWVSDSARVAAMKRSGRMNYMCPNSSTVEYGLLMPSPSHLHCVAAILWHSYELLVEYDLPALLDQELFELLFNWSMSLPCNMVLKKAVDSLLCSMCHVHPNYFSLLMGWMGITPPPVQCHHRLSMTDDSKKQDLSSSLTDDSKNAQAPLALTESHLATLASSSQSPEAIKQLLDSGLPSLLVRSLASFCFSHISSSESIAQSIDISQDKLRRHHVPQQCNKMPITADLVAPILRFLTEVGNSHIMKDWLGGSEVNPLWTALLFLLCHSGSTSGSHNLGAQQTSARSASLSSAATTGLTTQQRTAIENATVAFFLQCISCHPNNQKLMAQVLCELFQTSPQRGNLPTSGNISGFIRRLFLQLMLEDEKVTMFLQSPCPLYKGRINATSHVIQHPMYGAGHKFRTLHLPVSTTLSDVLDRVSGKSDLSISFCLTLCLMYMEVYCFYNFIFCIHFATIDD

SEQ ID NO: 856911 - protein, 2665 aa, Homo sapiens
MVTGGGAAPPGTVTEPLPSVIVLSAGRKMAAAAAAASGPGCSSAAGAGAAGVSEWLVLRDGCMHCDADGLHSLSYHPALNAILAVTSRGTIKVIDGTSGATLQASALSAKPGGQVKCQYISAVDKVIFVDDYAVGCRKDLNGILLLDTALQTPVSKQDDVVQLELPVTEAQQLLSACLEKVDISSTEGYDLFITQLKDGLKNTSHETAANHKVAKWATVTFHLPHHVLKSIASAIVNELKKINQNVAALPVASSVMDRLSYLLPSARPELGVGPGRSVDRSLMYSEANRRETFTSWPHVGYRWAQPDPMAQAGFYHQPASSGDDRAMCFTCSVCLVCWEPTDEPWSEHERHSPNCPFVKGEHTQNVPLSVTLATSPAQFPCTDGTDRISCFGSGSCPHFLAAATKRGKICIWDVSKLMKVHLKFEINAYDPAIVQQLILSGDPSSGVDSRRPTLAWLEDSSSCSDIPKLEGDSDDLLEDSDSEEHSRSDSVTGHTSQKEAMEVSLDITALSILQQPEKLQWEIVANVLEDTVKDLEELGANPCLTNSKSEKTKEKHQEQHNIPFPCLLAGGLLTYKSPATSPISSNSHRSLDGLSRTQGESISEQGSTDNESCTNSELNSPLVRRTLPVLLLYSIKESDEKAGKIFSQMNNIMSKSLHDDGFTVPQIIEMELDSQEQLLLQDPPVTYIQQFADAAANLTSPDSEKWNSVFPKPGTLVQCLRLPKFAEEENLCIDSITPCADGIHLLVGLRTCPVESLSAINQVEALNNLNKLNSALCNRRKGELESNLAVVNGANISVIQHESPADVQTPLIIQPEQRNVSGGYLVLYKMNYATRIVTLEEEPIKIQHIKDPQDTITSLILLPPDILDNREDDCEEPIEDMQLTSKNGFEREKTSDISTLGHLVITTQGGYVKILDLSNFEILAKVEPPKKEGTEEQDTFVSVIYCSGTDRLCACTKESHPVNRLGCSYAILAHCNFCLPGSSDSPALASWVAGTTGGELHFLQIGGTCDDIDEADILVDGSLSKGIEPSSEGSKPLSNPSSPGISGVDLLVDQPFTLEILTSLVELTRFETLTPRFSATVPPCWVEVQQEQQQRRHPQHLHQQHHGDAAQHTRTWKLQTDSNSWDEHVFELVLPKACMVGHVDFKFVLNSNITNIPQIQVTLLKNKAPGLGKVNALNIEVEQNGKPSLVDLNEEMQHMDVEESQCLRLCPFLEDHKEDILCGPVWLASGLDLSGHAGMLTLTSPKLVKGMAGGKYRSFLIHVKAVNERGTEEICNGGMRPVVRLPSLKHQSNKGYSLASLLAKVAAGKKCNDVPCYSFQNFMRSFLILFAEKQMMARSQNMAQSLVLDTLCWLAGVHSNGPGSSKEGNENLLSKTRKFLSDIVRVCFFEAGRSIAHKCARFLALCISNGKCDPCQPAFGPVLLKALLDNMSFLPAATTGGSVYWYFVLLNYVKDEDLAGCSTACASLLTAVSRQLQDRLTPMEALLQTRYGLYSSPFDPVLFDLEMSGSSCKNVYNSSIGVQSDEIDLSDVLSGNGKVSSCTAAEGSFTSLTGLLEVEPLHFTCVSTSDGTRIERDDASTFTVSSFGVTPAVGGLSSGTVGEASTALSSAAQVALQSLSHAMASAEQQLQVLQEKQQQLLKLQQQKAKLEAKLHQTTAAAAAAASAVGPVHNSVPSNPVAAPGFFIHPSDVIPPTPKTTPLFMTPPLTPPNEAVSVVINAELAQLFPGSVIDPPAVNLAAHNKNSNKSRMNPLGSGLALAISHASHFLQPPPHQSIIIERMHSGARRFVTLDFGRPILLTDVLIPTCGDLASLSIDIWTLGEEVDGRRLVVATDISTHSLILHDLIPPPVCRFMKITVIGRYGSTNARAKIPLGFYYGHTYILPWESELKLMHDPLKGEGESANQPEIDQHLAMMVALQEDIQCRYNLACHRLETLLQSIDLPPLNSANNAQYFLRKPDKAVEEDSRVFSAYQDCIQLQLQLNLAHNAVQRLKVALGASRKMLSETSNPEDLIQTSSTEQLRTIIRYLLDTLLSLLHASNGHSVPAVLQSTFHAQACEELFKHLCISGTPKIRLHTGLLLVQLCGGERWWGQFLSNVLQELYNSEQLLIFPQDRVFMLLSCIGQRSLSNSGVLESLLNLLDNLLSPLQPQLPMHRRTEGVLDIPMISWVVMLVSRLLDYVATVEDEAAAAKKPLNGKDRERFLTGNQWSFINNNLHTQSLNRSSKGSSSLDRLYSRKIRKQLVHHKQQLNLLKAKQKALVEQMEKEKIQSNKGSSYKLLVEQAKLKQATSKHFKDLIRLRRTAEWSRSNLDTEVTTAKESPEIEPLPFTLAHERCISVVQKLVLFLLSMDFTCHADLLLFVCKVLARIANATRPTIHLCEIVNEPQLERLLLLLVGTDFNRGDISWGGAWAQYSLTCMLQDILAGELLAPVAAEAMEEGTVGDDVGATAGDSDDSLQQSSVQLLETIDEPLTHDITGAPPLSSLEKDKEIDLELLQDLMEVDIDPLDIDLEKDPLAAKVFKPISSTWYDYWGADYGTYNYNPYIGGLGIPVAKPPANTEKNGSQTVSVSVSQALDARLEVGLEQQAELMLKMMSTLEADSILQALTNTSPTLSQSPTGTDDSLLGGLQAANQTSQLIIQLSSVPMLNVCFNKLFSMLQVHHVQV

SEQ ID NO: 856912 - protein, 2293 aa, Homo sapiens
MVTGGGAAPPGTVTEPLPSVIVLSAGRKMAAAAAAASGPGCSSAAGAGAAGVSEWLVLRDGCMHCDADGLHSLSYHPALNAILAVTSRGTIKVIDGTSGATLQASALSAKPGGQVKCQYISAVDKVIFVDDYAVGCRKDLNGILLLDTALQTPVSKQDDVVQLELPVTEAQQLLSACLEKVDISSTEGYDLFITQLKDGLKNTSHETAANHKVAKWATVTFHLPHHVLKSIASAIVNELKKINQNVAALPVASSVMDRLSYLLPSARPELGVGPGRSVDRSLMYSEANRRETFTSWPHVGYRWAQPDPMAQAGFYHQPASSGDDRAMCFTCSVCLVCWEPTDEPWSEHERHSPNCPFVKGEHTQNVPLSVTLATSPAQFPCTDGTDRISCFGSGSCPHFLAAATKRGKICIWDVSKLMKVHLKFEINAYDPAIVQQLILSGDPSSGVDSRRPTLAWLEDSSSCSDIPKLEGDSDDLLEDSDSEEHSRSDSVTGHTSQKEAMEVSLDITALSILQQPEKLQWEIVANVLEDTVKDLEELGANPCLTNSKSEKTKEKHQEQHNIPFPCLLAGGLLTYKSPATSPISSNSHRSLDGLSRTQGESISEQGSTDNESCTNSELNSPLVRRTLPVLLLYSIKESDEKAGKIFSQMNNIMSKSLHDDGFTVPQIIEMELDSQEQLLLQDPPVTYIQQFADAAANLTSPDSEKWNSVFPKPGTLVQCLRLPKFAEEENLCIDSITPCADGIHLLVGLRTCPVESLSAINQVEALNNLNKLNSALCNRRKGELESNLAVVNGANISVIQHESPADVQTPLIIQPEQRNVSGGYLVLYKMNYATRIVTLEEEPIKIQHIKDPQDTITSLILLPPDILDNREDDCEEPIEDMQLTSKNGFEREKTSDISTLGHLVITTQGGYVKILDLSNFEILAKVEPPKKEGTEEQDTFVSVIYCSGTDRLCACTKESHPVNRLGCSYAILAHCNFCLPGSSDSPALASWVAGTTGGELHFLQIGGTCDDIDEADILVDGSLSKGIEPSSEGSKPLSNPSSPGISGVDLLVDQPFTLEILTSLVELTRFETLTPRFSATVPPCWVEVQQEQQQRRHPQHLHQQHHGDAAQHTRTWKLQTDSNSWDEHVFELVLPKACMVGHVDFKFVLNSNITNIPQIQVTLLKNKAPGLGKVNALNIEVEQNGKPSLVDLNEEMQHMDVEESQCLRLCPFLEDHKEDILCGPVWLASGLDLSGHAGMLTLTSPKLVKGMAGGKYRSFLIHVKAVNERGTEEICNGGMRPVVRLPSLKHQSNKGYSLASLLAKVAAGKKCNDVPCYSFQNFMRSFLILFAEKQMMARSQNMAQSLVLDTLCWLAGVHSNGPGSSKEGNENLLSKTRKFLSDIVRVCFFEAGRSIAHKCARFLALCISNGKCDPCQPAFGPVLLKALLDNMSFLPAATTGGSVYWYFVLLNYVKDEDLAGCSTACASLLTAVSRQLQDRLTPMEALLQTRYGLYSSPFDPVLFDLEMSGSSCKNVYNSSIGVQSDEIDLSDVLSGNGKVSSCTAAEGSFTSLTGLLEVEPLHFTCVSTSDGTRIERDDASTFTVSSFGVTPAVGGLSSGTVGEASTALSSAAQVALQSLSHAMASAEQQLQVLQEKQQQLLKLQQQKAKLEAKLHQTTAAAAAAASAVGPVHNSVPSNPVAAPGFFIHPSDVIPPTPKTTPLFMTPPLTPPNEAVSVVINAELAQLFPGSVIDPPAVNLAAHNKNSNKSRMNPLGSGLALAISHASHFLQPPPHQSIIIERMHSGARRFVTLDFGRPILLTDVLIPTCGDLASLSIDIWTLGEEVDGRRLVVATDISTHSLILHDLIPPPVCRFMKITVIGRYGSTNARAKIPLGFYYGHTYILPWESELKLMHDPLKGEGESANQPEIDQHLAMMVALQEDIQCRYNLACHRLETLLQSIDLPPLNSANNAQYFLRKPDKAVEEDSRVFSAYQDCIQLQLQLNLAHNAVQRLKVALGASRKMLSETSNPEDLIQTSSTEQLRTIIRYLLDTLLSLLHASNGHSVPAVLQSTFHAQACEELFKHLCISGTPKIRLHTGLLLVQLCGGERWWGQFLSNVLQELYNSEQLLIFPQDRVFMLLSCIGQRSLSNSGVLESLLNLLDNLLSPLQPQLPMHRRTEGVLDIPMISWVVMLVSRLLDYVATVEDEAAAAKKPLNGKDRERFLTGNQWSFINNNLHTQSLNRSSKGSSSLDRLYSRKIRKQLVHHKQQLNLLKAKQKALVEQMEKEKIQSNKGSSYKLLVEQAKLKQATSKV

SEQ ID NO: 856913 - protein, 162 aa, Homo sapiens [sequence omitted]

SEQ ID NO: 856914 - protein, 4334 aa, Homo sapiens; identical to SEQ ID NO: 856899

SEQ ID NO: 856915 - protein, 4338 aa, Homo sapiens
MVTGGGAAPPGTVTEPLPSVIVLSAGRKMAAAAAAASGPGCSSAAGAGAAGVSEWLVLRDGCMHCDADGLHSLSYHPALNAILAVTSRGTIKVIDGTSGATLQASALSAKPGGQVKCQYISAVDKVIFVDDYAVGCRKDLNGILLLDTALQTPVSKQDDVVQLELPVTEAQQLLSACLEKVDISSTEGYDLFITQLKDGLKNTSHETAANHKVAKWATVTFHLPHHVLKSIASAIVNELKKINQNVAALPVASSVMDRLSYLLPSARPELGVGPGRSVDRSLMYSEANRRETFTSWPHVGYRWAQPDPMAQAGFYHQPASSGDDRAMCFTCSVCLVCWEPTDEPWSEHERHSPNCPFVKGEHTQNVPLSVTLATSPAQFPCTDGTDRISCFGSGSCPHFLAAATKRGKICIWDVSKLMKVHLKFEINAYDPAIVQQLILSGDPSSGVDSRRPTLAWLEDSSSCSDIPKLEGDSDDLLEDSDSEEHSRSDSVTGHTSQKEAMEVSLDITALSILQQPEKLQWEIVANVLEDTVKDLEELGANPCLTNSKSEKTKEKHQEQHNIPFPCLLAGGLLTYKSPATSPISSNSHRSLDGLSRTQGESISEQGSTDNESCTNSELNSPLVRRTLPVLLLYSIKESDEKAGKIFSQMNNIMSKSLHDDGFTVPQIIEMELDSQEQLLLQDPPVTYIQQFADAAANLTSPDSEKWNSVFPKPGTLVQCLRLPKFAEEENLCIDSITPCADGIHLLVGLRTCPVESLSAINQVEALNNLNKLNSALCNRRKGELESNLAVVNGANISVIQHESPADVQTPLIIQPEQRNVSGGYLVLYKMNYATRIVTLEEEPIKIQHIKDPQDTITSLILLPPDILDNREDDCEEPIEDMQLTSKNGFEREKTSDISTLGHLVITTQGGYVKILDLSNFEILAKVEPPKKEGTEEQDTFVSVIYCSGTDRLCACTKESHPVNRLGCSYAILAHCNFCLPGSSDSPALASWVAGTTGGELHFLQIGGTCDDIDEADILVDGSLSKGIEPSSEGSKPLSNPSSPGISGVDLLVDQPFTLEILTSLVELTRFETLTPRFSATVPPCWVEVQQEQQQRRHPQHLHQQHHGDAAQHTRTWKLQTDSNSWDEHVFELVLPKACMVGHVDFKFVLNSNITNIPQIQVTLLKNKAPGLGKVNALNIEVEQNGKPSLVDLNEEMQHMDVEESQCLRLCPFLEDHKEDILCGPVWLASGLDLSGHAGMLTLTSPKLVKGMAGGKYRSFLIHVKAVNERGTEEICNGGMRPVVRLPSLKHQSNKGYSLASLLAKVAAGKKCNDVPCYSFQNFMRSFLILFAEKQMMARSQNMAQSLVLDTLCWLAGVHSNGPGSSKEGNENLLSKTRKFLSDIVRVCFFEAGRSIAHKCARFLALCISNGKCDPCQPAFGPVLLKALLDNMSFLPAATTGGSVYWYFVLLNYVKDEDLAGCSTACASLLTAVSRQLQDRLTPMEALLQTRYGLYSSPFDPVLFDLEMSGSSCKNVYNSSIGVQSDEIDLSDVLSGNGKVSSCTAAEGSFTSLTGLLEVEPLHFTCVSTSDGTRIERDDASTFTVSSFGVTPAVGGLSSGTVGEASTALSSAAQVALQSLSHAMASAEQQLQVLQEKQQQLLKLQQQKAKLEAKLHQTTAAAAAAASAVGPVHNSVPSNPVAAPGFFIHPSDVIPPTPKTTPLFMTPPLTPPNEAVSVVINAELAQLFPGSVIDPPAVNLAAHNKNSNKSRMNPLGSGLALAISHASHFLQPPPHQSIIIERMHSGARRFVTLDFGRPILLTDVLIPTCGDLASLSIDIWTLGEEVDGRRLVVATDISTHSLILHDLIPPPVCRFMKITVIGRYGSTNARAKIPLGFYYGHTYILPWESELKLMHDPLKGEGESANQPEIDQHLAMMVALQEDIQCRYNLACHRLETLLQSIDLPPLNSANNAQYFLRKPDKAVEEDSRVFSAYQDCIQLQLQLNLAHNAVQRLKVALGASRKMLSETSNPEDLIQTSSTEQLRTIIRYLLDTLLSLLHASNGHSVPAVLQSTFHAQACEELFKHLCISGTPKIRLHTGLLLVQLCGGERWWGQFLSNVLQELYNSEQLLIFPQDRVFMLLSCIGQRSLSNSGVLESLLNLLDNLLSPLQPQLPMHRRTEGVLDIPMISWVVMLVSRLLDYVATVEDEAAAAKKPLNGKDRERFLTGNQWSFINNNLHTQSLNRSSKGSSSLDRLYSRKIRKQLVHHKQQLNLLKAKQKALVEQMEKEKIQSNKGSSYKLLVEQAKLKQATSKHFKDLIRLRRTAEWSRSNLDTEVTTAKESPEIEPLPFTLAHERCISVVQKLVLFLLSMDFTCHADLLLFVCKVLARIANATRPTIHLCEIVNEPQLERLLLLLVGTDFNRGDISWGGAWAQYSLTCMLQDILAGELLAPVAAEAMEEGTVGDDVGATAGDSDDSLQQSSVQLLETIDEPLTHDITGAPPLSSLEKDKEIDLELLQDLMEVDIDPLDIDLEKDPLAAKVFKPISSTWYDYWGADYGTYNYNPYIGGLGIPVAKPPANTEKNGSQTVSVSVSQALDARLEVGLEQQAELMLKMMSTLEADSILQALTNTSPTLSQSPTGTDDSLLGGLQAANQTSQLIIQLSSVPMLNVCFNKLFSMLQVHHVQLESLLQLWLTLSLNSSSTGNKENGADIFLYNANRIPVISLNQASITSFLTVLAWYPNTLLRTWCLVLHSLTLMTNMQLNSGSSSAIGTQESTAHLLVSDPNLIHVLVKFLSGTSPHGTNQHSPQVGPTATQAMQEFLTRLQVHLSSTCPQIFSEFLLKLIHILSTERGAFQTGQGPLDAQVKLLEFTLEQNFEVVSVSTISAVIESVTFLVHHYITCSDKVMSRSGSDSSVGARACFGGLFANLIRPGDAKAVCGEMTRDQLMFDLLKLVNILVQLPLSGNREYSARVSVTTNTTDSVSDEEKVSGGKDGNGSSTSVQGSPAYVADLVLANQQIMSQILSALGLCNSSAMAMIIGASGLHLTKHENFHGGLDAISVGDGLFTILTTLSKKASTVHMMLQPILTYMACGYMGRQGSLATCQLSEPLLWFILRVLDTSDALKAFHDMGGVQLICNNMVTSTRAIVNTARSMVSTIMKFLDSGPNKAVDSTLKTRILASEPDNAEGIHNFAPLGTITSSSPTAQPAEVLLQATPPHRRARSAAWSYIFLPEEAWCDLTIHLPAAVLLKEIHIQPHLASLATCPSSVSVEVSADGVNMLPLSTPVVTSGLTYIKIQLVKAEVASAVCLRLHRPRDASTLGLSQIKLLGLTAFGTTSSATVNNPFLPSEDQVSKTSIGWLRLLHHCLTHISDLEGMMASAAAPTANLLQTCAALLMSPYCGMHSPNIEVVLVKIGLQSTRIGLKLIDILLRNCAASGSDPTDLNSPLLFGRLNGLSSDSTIDILYQLGTTQDPGTKDRIQALLKWVSDSARVAAMKRSGRMNYMCPNSSTVEYGLLMPSPSHLHCVAAILWHSYELLVEYDLPALLDQELFELLFNWSMSLPCNMVLKKAVDSLLCSMCHVHPNYFSLLMGWMGITPPPVQCHHRLSMTDDSKKQDLSSSLTDDSKNAQAPLALTESHLATLASSSQSPEAIKQLLDSGLPSLLVRSLASFCFSHISSSESIAQSIDISQDKLRRHHVPQQCNKMPITADLVAPILRFLTEVGNSHIMKDWLGGSEVNPLWTALLFLLCHSGSTSGSHNLGAQQTSARSASLSSAATTGLTTQQRTAIENATVAFFLQCISCHPNNQKLMAQVLCELFQTSPQRGNLPTSGNISGFIRRLFLQLMLEDEKVTMFLQSPCPLYKGRINATSHVIQHPMYGAGHKFRTLHLPVSTTLSDVLDRVSDTPSITAKLISEQKDDKEKKNHEEKEKVKAENGFQDNYSVVVASGLKSQSKRAVSATPPRPPSRRGRTIPDKIGSTSGAEAANKIITVPVFHLFHKLLAGQPLPAEMTLAQLLTLLYDRKLPQGYRSIDLTVKLGSRVITDPSLSKTDSYKRLHPEKDHGDLLASCPEDEALTPGDECMDGILDESLLETCPIQSPLQVFAGMGGLALIAERLPMLYPEVIQQVSAPVVTSTTQEKPKDSDQFEWVTIEQSGELVYEAPETVAAEPPPIKSAVQTMSPIPAHSLAAFGLFLRLPGYAEVLLKERKHAQCLLRLVLGVTDDGEGSHILQSPSANVLPTLPFHVLRSLFSTTPLTTDDGVLLRRMALEIGALHLILVCLSALSHHSPRVPNSSVNQTEPQVSSSHNPTSTEEQQLYWAKGTGFGTGSTASGWDVEQALTKQRLEEEHVTAFCRFLPVT

SEQ ID NO: 856916 - protein, 3631 aa, Homo sapiens
MRPVVRLPSLKHQSNKGYSLASLLAKVAAGKEKSSNVKNENTSGTRKSENLRGCDLLQEVSVTIRRFKKTSISKERVQRCAMLQFSEFHEKLLNTLCRKTDDGQITEHAQSLVLDTLCWLAGVHSNGPGSSKEGNENLLSKTRKFLSDIVRVCFFEAGRSIAHKCARFLALCISNGKCDPCQPAFGPVLLKALLDNMSFLPAATTGGSVYWYFVLLNYVKDEDLAGCSTACASLLTAVSRQLQDRLTPMEALLQTRYGLYSSPFDPVLFDLEMSGSSCKNVYNSSIGVQSDEIDLSDVLSGNGKVSSCTAAEGSFTSLTGLLEVEPLHFTCVSTSDGTRIERDDASTFTVSSFGVTPAVGGLSSGTVGEASTALSSAAQVALQSLSHAMASAEQQLQVLQEKQQQLLKLQQQKAKLEAKLHQTTAAAAAAASAVGPVHNSVPSNPVAAPGFFIHPSDVIPPTPKTTPLFMTPPLTPPNEAVSVVINAELAQLFPGSVIDPPAVNLAAHNKNSNKSRMNPLGSGLALAISHASHFLQPPPHQSIIIERMHSGARRFVTLDFGRPILLTDVLIPTCGDLASLSIDIWTLGEEVDGRRLVVATDISTHSLILHDLIPPPVCRFMKITVIGRYGSTNARAKIPLGFYYGHTYILPWESELKLMHDPLKGEGESANQPEIDQHLAMMVALQEDIQCRYNLACHRLETLLQSIDLPPLNSANNAQYFLRKPDKAVEEDSRVFSAYQDCIQLQLQLNLAHNAVQRLKVALGASRKMLSETSNPEDLIQTSSTEQLRTIIRYLLDTLLSLLHASNGHSVPAVLQSTFHAQACEELFKHLCISGTPKIRLHTGLLLVQLCGGERWWGQFLSNVLQELYNSEQLLIFPQDRVFMLLSCIGQRSLSNSGVLESLLNLLDNLLSPLQPQLPMHRRTEGVLDIPMISWVVMLVSRLLDYVATVEDEAAAAKKPLNGKDRERFLTGNQWSFINNNLHTQSLNRSSKGSSSLDRLYSRKIRKQLVHHKQQLNLLKAKQKALVEQMEKEKIQSNKGSSYKLLVEQAKLKQATSKHFKDLIRLRRTAEWSRSNLDTEVTTAKESPEIEPLPFTLAHERCISVVQKLVLFLLSMDFTCHADLLLFVCKVLARIANATRPTIHLCEIVNEPQLERLLLLLVGTDFNRGDISWGGAWAQYSLTCMLQDILAGELLAPVAAEAMEEGTVGDDVGATAGDSDDSLQQSSVQLLETIDEPLTHDITGAPPLSSLEKDKEIDLELLQDLMEVDIDPLDIDLEKDPLAAKVFKPISSTWYDYWGADYGTYNYNPYIGGLGIPVAKPPANTEKNGSQTVSVSVSQALDARLEVGLEQQAELMLKMMSTLEADSILQALTNTSPTLSQSPTGTDDSLLGGLQAANQTSQLIIQLSSVPMLNVCFNKLFSMLQVHHVQLESLLQLWLTLSLNSSSTGNKENGADIFLYNANRIPVISLNQASITSFLTVLAWYPNTLLRTWCLVLHSLTLMTNMQLNSGSSSAIGTQESTAHLLVSDPNLIHVLVKFLSGTSPHGTNQHSPQVGPTATQAMQEFLTRLQVHLSSTCPQIFSEFLLKLIHILSTERGAFQTGQGPLDAQVKLLEFTLEQNFEVVSVSTISAVIESVTFLVHHYITCSDKVMSRSGSDSSVGARACFGGLFANLIRPGDAKAVCGEMTRDQLMFDLLKLVNILVQLPLSGNREYSARVSVTTNTTDSVSDEEKVSGGKDGNGSSTSVQGSPAYVADLVLANQQIMSQILSALGLCNSSAMAMIIGASGLHLTKHENFHGGLDAISVGDGLFTILTTLSKKASTVHMMLQPILTYMACGYMGRQGSLATCQLSEPLLWFILRVLDTSDALKAFHDMGGVQLICNNMVTSTRAIVNTARSMVSTIMKFLDSGPNKAVDSTLKTRILASEPDNAEGIHNFAPLGTITSSSPTAQPAEVLLQATPPHRRARSAAWSYIFLPEEAWCDLTIHLPAAVLLKEIHIQPHLASLATCPSSVSVEVSADGVNMLPLSTPVVTSGLTYIKIQLVKAEVASAVCLRLHRPRDASTLGLSQIKLLGLTAFGTTSSATVNNPFLPSEDQVSKTSIGWLRLLHHCLTHISDLEGMMASAAAPTANLLQTCAALLMSPYCGMHSPNIEVVLVKIGLQSTRIGLKLIDILLRNCAASGSDPTDLNSPLLFGRLNGLSSDSTIDILYQLGTTQDPGTKDRIQALLKWVSDSARVAAMKRSGRMNYMCPNSSTVEYGLLMPSPSHLHCVAAILWHSYELLVEYDLPALLDQELFELLFNWSMSLPCNMVLKKAVDSLLCSMCHVHPNYFSLLMGWMGITPPPVQCHHRLSMTDDSKKQDLSSSLTDDSKNAQAPLALTESHLATLASSSQSPEAIKQLLDSGLPSLLVRSLASFCFSHISSSESIAQSIDISQDKLRRHHVPQQCNKMPITADLVAPILRFLTEVGNSHIMKDWLGGSEVNPLWTALLFLLCHSGSTSGSHNLGAQQTSARSASLSSAATTGLTTQQRTAIENATVAFFLQCISCHPNNQKLMAQVLCELFQTSPQRGNLPTSGNISGFIRRLFLQLMLEDEKVTMFLQSPCPLYKGRINATSHVIQHPMYGAGHKFRTLHLPVSTTLSDVLDRVSDTPSITAKLISEQKDDKEKKNHEEKEKVKAENGFQDNYSVVVASGLKSQSKRAVSATPPRPPSRRGRTIPDKIGSTSGAEAANKIITVPVFHLFHKLLAGQPLPAEMTLAQLLTLLYDRKLPQGYRSIDLTVKLGSRVITDPSLSKTDSYKRLHPEKDHGDLLASCPEDEALTPGDECMDGILDESLLETCPIQSPLQVFAGMGGLALIAERLPMLYPEVIQQVSAPVVTSTTQEKPKDSDQFEWVTIEQSGELVYEAPETVAAEPPPIKSAVQTMSPIPAHSLAAFGLFLRLPGYAEVLLKERKHAQCLLRLVLGVTDDGEGSHILQSPSANVLPTLPFHVLRSLFSTTPLTTDDGVLLRRMALEIGALHLILVCLSALSHHSPRVPNSSVNQTEPQVSSSHNPTSTEEQQLYWAKGTGFGTGSTASGWDVEQALTKQRLEEEHVTCLLQVLASYINPVSSAVNGEAQSSHETRGQNSNALPSVLLELLSQSCLIPAMSSYLRNDSVLDMARHVPLYRALLELLRAIASCAAMVPLLLPLSTENGEEEEEQSECQTSVGTLLAKMKTCVDTYTNRLRSKRENVKTGVKPDASDQEPEGLTLLVPDIQKTAEIVYAATTSLRQANQEKKLGEYSKKAAMKPKPLSVLKSLEEKYVAVMKKLQFDTFEMVSEDEDGKLGFKVNYHYMSQVKNANDANSAARARRLAQEAVTLSTSLPLSSSSSVFVRCDEERLDIMKVLITGPADTPYANGCFEFDVYFPQDYPSSPPLVNLETTGGHSVRFNPNLYNDGKVCLSILNTWHGRPEEKWNPQTSSFLQVLVSVQSLILVAEPYFNEPGYERSRGTPSGTQSSREYDGNIRQATVKWAMLEQIRNPSPCFKEVIHKHFYLKRVEIMAQCEEWIADIQQYSSDKRVGRTMSHHAAALKRHTAQLREELLKLPCPEGLDPDTDDAPEVCRATTGAEETLMHDQVKPSSSKELPSDFQL

SEQ ID NO: 856917 - protein, 2472 aa, Homo sapiens
EDPCTVDRRGDISWGGAWAQYSLTCMLQDILAGELLAPVAAEAMEEGTVGDDVGATAGDSDDSLQQSSVQLLETIDEPLTHDITGAPPLSSLEKDKEIDLELLQDLMEVDIDPLDIDLEKDPLAAKVFKPISSTWYDYWGADYGTYNYNPYIGGLGIPVAKPPANTEKNGSQTVSVSVSQALDARLEVGLEQQAELMLKMMSTLEADSILQALTNTSPTLSQSPTGTDDSLLGGLQAANQTSQLIIQLSSVPMLNVCFNKLFSMLQVHHVQLESLLQLWLTLSLNSSSTGNKENGADIFLYNANRIPVISLNQASITSFLTVLAWYPNTLLRTWCLVLHSLTLMTNMQLNSGSSSAIGTQESTAHLLVSDPNLIHVLVKFLSGTSPHGTNQHSPQVGPTATQAMQEFLTRLQVHLSSTCPQIFSEFLLKLIHILSTERGAFQTGQGPLDAQVKLLEFTLEQNFEVVSVSTISAVIESVTFLVHHYITCSDKVMSRSGSDSSVGARACFGGLFANLIRPGDAKAVCGEMTRDQLMFDLLKLVNILVQLPLSGNREYSARVSVTTNTTDSVSDEEKVSGGKDGNGSSTSVQGSPAYVADLVLANQQIMSQILSALGLCNSSAMAMIIGASGLHLTKHENFHGGLDAISVGDGLFTILTTLSKKASTVHMMLQPILTYMACGYMGRQGSLATCQLSEPLLWFILRVLDTSDALKAFHDMGGVQLICNNMVTSTRAIVNTARSMVSTIMKFLDSGPNKAVDSTLKTRILASEPDNAEGIHNFAPLGTITSSSPTAQPAEVLLQATPPHRRARSAAWSYIFLPEEAWCDLTIHLPAAVLLKEIHIQPHLASLATCPSSVSVEVSADGVNMLPLSTPVVTSGLTYIKIQLVKAEVASAVCLRLHRPRDASTLGLSQIKLLGLTAFGTTSSATVNNPFLPSEDQVSKTSIGWLRLLHHCLTHISDLEGMMASAAAPTANLLQTCAALLMSPYCGMHSPNIEVVLVKIGLQSTRIGLKLIDILLRNCAASGSDPTDLNSPLLFGRLNGLSSDSTIDILYQLGTTQDPGTKDRIQALLKWVSDSARVAAMKRSGRMNYMCPNSSTVEYGLLMPSPSHLHCVAAILWHSYELLVEYDLPALLDQELFELLFNWSMSLPCNMVLKKAVDSLLCSMCHVHPNYFSLLMGWMGITPPPVQCHHRLSMTDDSKKQDLSSSLTDDSKNAQAPLALTESHLATLASSSQSPEAIKQLLDSGLPSLLVRSLASFCFSHISSSESIAQSIDISQDKLRRHHVPQQCNKMPITADLVAPILRFLTEVGNSHIMKDWLGGSEVNPLWTALLFLLCHSGSTSGSHNLGAQQTSARSASLSSAATTGLTTQQRTAIENATVAFFLQCISCHPNNQKLMAQVLCELFQTSPQRGNLPTSGNISGFIRRLFLQLMLEDEKVTMFLQSPCPLYKGRINATSHVIQHPMYGAGHKFRTLHLPVSTTLSDVLDRVSDTPSITAKLISEQKDDKEKKNHEEKEKVKAENGFQDNYSVVVASGLKSQSKRAVSATPPRPPSRRGRTIPDKIGSTSGAEAANKIITVPVFHLFHKLLAGQPLPAEMTLAQLLTLLYDRKLPQGYRSIDLTVKLGSRVITDPSLSKTDSYKRLHPEKDHGDLLASCPEDEALTPGDECMDGILDESLLETCPIQSPLQVFAGMGGLALIAERLPMLYPEVIQQVSAPVVTSTTQEKPKDSDQFEWVTIEQSGELVYEAPETVAAEPPPIKSAVQTMSPIPAHSLAAFGLFLRLPGYAEVLLKERKHAQCLLRLVLGVTDDGEGSHILQSPSANVLPTLPFHVLRSLFSTTPLTTDDGVLLRRMALEIGALHLILVCLSALSHHSPRVPNSSVNQTEPQVSSSHNPTSTEEQQLYWAKGTGFGTGSTASGWDVEQALTKQRLEEEHVTCLLQVLASYINPVSSAVNGEAQSSHETRGQNSNALPSVLLELLSQSCLIPAMSSYLRNDSVLDMARHVPLYRALLELLRAIASCAAMVPLLLPLSTENGEEEEEQSECQTSVGTLLAKMKTCVDTYTNRLRSKRENVKTGVKPDASDQEPEGLTLLVPDIQKTAEIVYAATTSLRQANQEKKLGEYSKKAAMKPKPLSVLKSLEEKYVAVMKKLQFDTFEMVSEDEDGKLGFKVNYHYMSQVKNANDANSAARARRLAQEAVTLSTSLPLSSSSSVFVRCDEERLDIMKVLITGPADTPYANGCFEFDVYFPQDYPSSPPLVNLETTGGHSVRFNPNLYNDGKVCLSILNTWHGRPEEKWNPQTSSFLQVLVSVQSLILVAEPYFNEPGYERSRGTPSGTQSSREYDGNIRQATVKWAMLEQIRNPSPCFKEVIHKHFYLKRVEIMAQCEEWIADIQQYSSDKRVGRTMSHHAAALKRHTAQLREELLKLPCPEGLDPDTDDAPEVCRATTGAEETLMHDQVKPSSSKELPSDFQL

SEQ ID NO: 856918 - protein, 473 aa, Homo sapiens
MARHVPLYRALLELLRAIASCAAMVPLLLPLSTENGEEEEEQSECQTSVGTLLAKMKTCVDTYTNRLRSKRENVKTGVKPDASDQEPEGLTLLVPDIQKTAEIVYAATTSLRQANQEKKLGEYSKKAAMKPKPLSVLKSLEEKYVAVMKKLQFDTFEMVSEDEDGKLGFKVNYHYMSQVKNANDANSAARARRLAQEAVTLSTSLPLSSSSSVFVRCDEERLDIMKVLITGPADTPYANGCFEFDVYFPQDYPSSPPLVNLETTGGHSVRFNPNLYNDGKVCLSILNTWHGRPEEKWNPQTSSFLQVLVSVQSLILVAEPYFNEPGYERSRGTPSGTQSSREYDGNIRQATVKWAMLEQIRNPSPCFKEVIHKHFYLKRVEIMAQCEEWIADIQQYSSDKRVGRTMSHHAAALKRHTAQLREELLKLPCPEGLDPDTDDAPEVCRATTGAEETLMHDQVKPSSSKELPSDFQL

SEQ ID NO: 856919 - protein, 118 aa, Homo sapiens
MLEQIRNPSPCFKEVIHKHFYLKRVEIMAQCEEWIADIQQYSSDKRVGRTMSHHAAALKRHTAQLREELLKLPCPEGLDPDTDDAPEVCRATTGAEETLMHDQVKPSSSKELPSDFQL

SEQ ID NO: 856920 - protein, 4338 aa, Homo sapiens; identical to SEQ ID NO: 856915

SEQ ID NO: 856921 - protein, 4338 aa, Homo sapiens; identical to SEQ ID NO: 856915

SEQ ID NO: 856922 - protein, 4338 aa, Homo sapiens; identical to SEQ ID NO: 856915

SEQ ID NO: 856923 - protein, 3021 aa, Homo sapiens
MVTGGGAAPPGTVTEPLPSVIVLSAGRKMAAAAAAASGPGCSSAAGAGAAGVSEWLVLRDGCMHCDADGLHSLSYHPALNAILAVTSRGTIKVIDGTSGATLQASALSAKPGGQVKCQYISAVDKVIFVDDYAVGCRKDLNGILLLDTALQTPVSKQDDVVQLELPVTEAQQLLSACLEKVDISSTEGYDLFITQLKDGLKNTSHETAANHKVAKWATVTFHLPHHVLKSIASAIVNELKKINQNVAALPVASSVMDRLSYLLPSARPELGVGPGRSVDRSLMYSEANRRETFTSWPHVGYRWAQPDPMAQAGFYHQPASSGDDRAMCFTCSVCLVCWEPTDEPWSEHERHSPNCPFVKGEHTQNVPLSVTLATSPAQFPCTDGTDRISCFGSGSCPHFLAAATKRGKICIWDVSKLMKVHLKFEINAYDPAIVQQLILSGDPSSGVDSRRPTLAWLEDSSSCSDIPKLEGDSDDLLEDSDSEEHSRSDSVTGHTSQKEAMEVSLDITALSILQQPEKLQWEIVANVLEDTVKDLEELGANPCLTNSKSEKTKEKHQEQHNIPFPCLLAGGLLTYKSPATSPISSNSHRSLDGLSRTQGESISEQGSTDNESCTNSELNSPLVRRTLPVLLLYSIKESDEKAGKIFSQMNNIMSKSLHDDGFTVPQIIEMELDSQEQLLLQDPPVTYIQQFADAAANLTSPDSEKWNSVFPKPGTLVQCLRLPKFAEEENLCIDSITPCADGIHLLVGLRTCPVESLSAINQVEALNNLNKLNSALCNRRKGELESNLAVVNGANISVIQHESPADVQTPLIIQPEQRNVSGGYLVLYKMNYATRIVTLEEEPIKIQHIKDPQDTITSLILLPPDILDNREDDCEEPIEDMQLTSKNGFEREKTSDISTLGHLVITTQGGYVKILDLSNFEILAKVEPPKKEGTEEQDTFVSVIYCSGTDRLCACTKESHPVNRLGCSYAILAHCNFCLPGSSDSPALASWVAGTTGGELHFLQIGGTCDDIDEADILVDGSLSKGIEPSSEGSKPLSNPSSPGISGVDLLVDQPFTLEILTSLVELTRFETLTPRFSATVPPCWVEVQQEQQQRRHPQHLHQQHHGDAAQHTRTWKLQTDSNSWDEHVFELVLPKACMVGHVDFKFVLNSNITNIPQIQVTLLKNKAPGLGKVNALNIEVEQNGKPSLVDLNEEMQHMDVEESQCLRLCPFLEDHKEDILCGPVWLASGLDLSGHAGMLTLTSPKLVKGMAGGKYRSFLIHVKAVNERGTEEICNGGMRPVVRLPSLKHQSNKGYSLASLLAKVAAGKKCNDVPCYSFQNFMRSFLILFAEKQMMARSQNMAQSLVLDTLCWLAGVHSNGPGSSKEGNENLLSKTRKFLSDIVRVCFFEAGRSIAHKCARFLALCISNGKCDPCQPAFGPVLLKALLDNMSFLPAATTGGSVYWYFVLLNYVKDEDLAGCSTACASLLTAVSRQLQDRLTPMEALLQTRYGLYSSPFDPVLFDLEMSGSSCKNVYNSSIGVQSDEIDLSDVLSGNGKVSSCTAAEGSFTSLTGLLEVEPLHFTCVSTSDGTRIERDDASTFTVSSFGVTPAVGGLSSGTVGEASTALSSAAQVALQSLSHAMASAEQQLQVLQEKQQQLLKLQQQKAKLEAKLHQTTAAAAAAASAVGPVHNSVPSNPVAAPGFFIHPSDVIPPTPKTTPLFMTPPLTPPNEAVSVVINAELAQLFPGSVIDPPAVNLAAHNKNSNKSRMNPLGSGLALAISHASHFLQPPPHQSIIIERMHSGARRFVTLDFGRPILLTDVLIPTCGDLASLSIDIWTLGEEVDGRRLVVATDISTHSLILHDLIPPPVCRFMKITVIGRYGSTNARAKIPLGFYYGHTYILPWESELKLMHDPLKGEGESANQPEIDQHLAMMVALQEDIQCRYNLACHRLETLLQSIDLPPLNSANNAQYFLRKPDKAVEEDSRVFSAYQDCIQLQLQLNLAHNAVQRLKVALGASRKMLSETSNPEDLIQTSSTEQLRTIIRYLLDTLLSLLHASNGHSVPAVLQSTFHAQACEELFKHLCISGTPKIRLHTGLLLVQLCGGERWWGQFLSNVLQELYNSEQLLIFPQDRVFMLLSCIGQRSLSNSGVLESLLNLLDNLLSPLQPQLPMHRRTEGVLDIPMISWVVMLVSRLLDYVATVEDEAAAAKKPLNGKDRERFLTGNQWSFINNNLHTQSLNRSSKGSSSLDRLYSRKIRKQLVHHKQQLNLLKAKQKALVEQMEKEKIQSNKGSSYKLLVEQAKLKQATSKHFKDLIRLRRTAEWSRSNLDTEVTTAKESPEIEPLPFTLAHERCISVVQKLVLFLLSMDFTCHADLLLFVCKVLARIANATRPTIHLCEIVNEPQLERLLLLLVGTDFNRGDISWGGAWAQYSLTCMLQDILAGELLAPVAAEAMEEGTVGDDVGATAGDSDDSLQQSSVQLLETIDEPLTHDITGAPPLSSLEKDKEIDLELLQDLMEVDIDPLDIDLEKDPLAAKVFKPISSTWYDYWGADYGTYNYNPYIGGLGIPVAKPPANTEKNGSQTVSVSVSQALDARLEVGLEQQAELMLKMMSTLEADSILQALTNTSPTLSQSPTGTDDSLLGGLQAANQTSQLIIQLSSVPMLNVCFNKLFSMLQVHHVQLESLLQLWLTLSLNSSSTGNKENGADIFLYNANRIPVISLNQASITSFLTVLAWYPNTLLRTWCLVLHSLTLMTNMQLNSGSSSAIGTQESTAHLLVSDPNLIHVLVKFLSGTSPHGTNQHSPQVGPTATQAMQEFLTRLQVHLSSTCPQIFSEFLLKLIHILSTERGAFQTGQGPLDAQVKLLEFTLEQNFEVVSVSTISAVIESVTFLVHHYITCSDKVMSRSGSDSSVGARACFGGLFANLIRPGDAKAVCGEMTRDQLMFDLLKLVNILVQLPLSGNREYSARVSVTTNTTDSVSDEEKVSGGKDGNGSSTSVQGSPAYVADLVLANQQIMSQILSALGLCNSSAMAMIIGMY

SEQ ID NO: 856924 - protein, 2368 aa, Homo sapiens
MVTGGGAAPPGTVTEPLPSVIVLSAGRKMAAAAAAASGPGCSSAAGAGAAGVSEWLVLRDGCMHCDADGLHSLSYHPALNAILAVTSRGTIKVIDGTSGATLQASALSAKPGGQVKCQYISAVDKVIFVDDYAVGCRKDLNGILLLDTALQTPVSKQDDVVQLELPVTEAQQLLSACLEKVDISSTEGYDLFITQLKDGLKNTSHETAANHKVAKWATVTFHLPHHVLKSIASAIVNELKKINQNVAALPVASSVMDRLSYLLPSARPELGVGPGRSVDRSLMYSEANRRETFTSWPHVGYRWAQPDPMAQAGFYHQPASSGDDRAMCFTCSVCLVCWEPTDEPWSEHERHSPNCPFVKGEHTQNVPLSVTLATSPAQFPCTDGTDRISCFGSGSCPHFLAAATKRGKICIWDVSKLMKVHLKFEINAYDPAIVQQLILSGDPSSGVDSRRPTLAWLEDSSSCSDIPKLEGDSDDLLEDSDSEEHSRSDSVTGHTSQKEAMEVSLDITALSILQQPEKLQWEIVANVLEDTVKDLEELGANPCLTNSKSEKTKEKHQEQHNIPFPCLLAGGLLTYKSPATSPISSNSHRSLDGLSRTQGESISEQGSTDNESCTNSELNSPLVRRTLPVLLLYSIKESDEKAGKIFSQMNNIMSKSLHDDGFTVPQIIEMELDSQEQLLLQDPPVTYIQQFADAAANLTSPDSEKWNSVFPKPGTLVQCLRLPKFAEEENLCIDSITPCADGIHLLVGLRTCPVESLSAINQVEALNNLNKLNSALCNRRKGELESNLAVVNGANISVIQHESPADVQTPLIIQPEQRNVSGGYLVLYKMNYATRIVTLEEEPIKIQHIKDPQDTITSLILLPPDILDNREDDCEEPIEDMQLTSKNGFEREKTSDISTLGHLVITTQGGYVKILDLSNFEILAKVEPPKKEGTEEQDTFVSVIYCSGTDRLCACTKESHPVNRLGCSYAILAHCNFCLPGSSDSPALASWVAGTTGGELHFLQIGGTCDDIDEADILVDGSLSKGIEPSSEGSKPLSNPSSPGISGVDLLVDQPFTLEILTSLVELTRFETLTPRFSATVPPCWVEVQQEQQQRRHPQHLHQQHHGDAAQHTRTWKLQTDSNSWDEHVFELVLPKACMVGHVDFKFVLNSNITNIPQIQVTLLKNKAPGLGKVNALNIEVEQNGKPSLVDLNEEMQHMDVEESQCLRLCPFLEDHKEDILCGPVWLASGLDLSGHAGMLTLTSPKLVKGMAGGKYRSFLIHVKAVNERGTEEICNGGMRPVVRLPSLKHQSNKGYSLASLLAKVAAGKKCNDVPCYSFQNFMRSFLILFAEKQMMARSQNMAQSLVLDTLCWLAGVHSNGPGSSKEGNENLLSKTRKFLSDIVRVCFFEAGRSIAHKCARFLALCISNGKCDPCQPAFGPVLLKALLDNMSFLPAATTGGSVYWYFVLLNYVKDEDLAGCSTACASLLTAVSRQLQDRLTPMEALLQTRYGLYSSPFDPVLFDLEMSGSSCKNVYNSSIGVQSDEIDLSDVLSGNGKVSSCTAAEGSFTSLTGLLEVEPLHFTCVSTSDGTRIERDDASTFTVSSFGVTPAVGGLSSGTVGEASTALSSAAQVALQSLSHAMASAEQQLQVLQEKQQQLLKLQQQKAKLEAKLHQTTAAAAAAASAVGPVHNSVPSNPVAAPGFFIHPSDVIPPTPKTTPLFMTPPLTPPNEAVSVVINAELAQLFPGSVIDPPAVNLAAHNKNSNKSRMNPLGSGLALAISHASHFLQPPPHQSIIIERMHSGARRFVTLDFGRPILLTDVLIPTCGDLASLSIDIWTLGEEVDGRRLVVATDISTHSLILHDLIPPPVCRFMKITVIGRYGSTNARAKIPLGFYYGHTYILPWESELKLMHDPLKGEGESANQPEIDQHLAMMVALQEDIQCRYNLACHRLETLLQSIDLPPLNSANNAQYFLRKPDKAVEEDSRVFSAYQDCIQLQLQLNLAHNAVQRLKVALGASRKMLSETSNPEDLIQTSSTEQLRTIIRYLLDTLLSLLHASNGHSVPAVLQSTFHAQACEELFKHLCISGTPKIRLHTGLLLVQLCGGERWWGQFLSNVLQELYNSEQLLIFPQDRVFMLLSCIGQRSLSNSGVLESLLNLLDNLLSPLQPQLPMHRRTEGVLDIPMISWVVMLVSRLLDYVATVEDEAAAAKKPLNGKDRERFLTGNQWSFINNNLHTQSLNRSSKGSSSLDRLYSRKIRKQLVHHKQQLNLLKAKQKALVEQMEKEKIQSNKGSSYKLLVEQAKLKQATSKHFKDLIRLRRTAEWSRSNLDTEVTTAKESPEIEPLPFTLAHERCISVVQKLVLFLLSMDFTCHADLLLFVCKVCKL

SEQ ID NO: 856925 - protein, 990 aa, Homo sapiens
MVTGGGAAPPGTVTEPLPSVIVLSAGRKMAAAAAAASGPGCSSAAGAGAAGVSEWLVLRDGCMHCDADGLHSLSYHPALNAILAVTSRGTIKVIDGTSGATLQASALSAKPGGQVKCQYISAVDKVIFVDDYAVGCRKDLNGILLLDTALQTPVSKQDDVVQLELPVTEAQQLLSACLEKVDISSTEGYDLFITQLKDGLKNTSHETAANHKVAKWATVTFHLPHHVLKSIASAIVNELKKINQNVAALPVASSVMDRLSYLLPSARPELGVGPGRSVDRSLMYSEANRRETFTSWPHVGYRWAQPDPMAQAGFYHQPASSGDDRAMCFTCSVCLVCWEPTDEPWSEHERHSPNCPFVKGEHTQNVPLSVTLATSPAQFPCTDGTDRISCFGSGSCPHFLAAATKRGKICIWDVSKLMKVHLKFEINAYDPAIVQQLILSGDPSSGVDSRRPTLAWLEDSSSCSDIPKLEGDSDDLLEDSDSEEHSRSDSVTGHTSQKEAMEVSLDITALSILQQPEKLQWEIVANVLEDTVKDLEELGANPCLTNSKSEKTKEKHQEQHNIPFPCLLAGGLLTYKSPATSPISSNSHRSLDGLSRTQGESISEQGSTDNESCTNSELNSPLVRRTLPVLLLYSIKESDEKAGKIFSQMNNIMSKSLHDDGFTVPQIIEMELDSQEQLLLQDPPVTYIQQFADAAANLTSPDSEKWNSVFPKPGTLVQCLRLPKFAEEENLCIDSITPCADGIHLLVGLRTCPVESLSAINQVEALNNLNKLNSALCNRRKGELESNLAVVNGANISVIQHESPADVQTPLIIQPEQRNVSGGYLVLYKMNYATRIVTLEEEPIKIQHIKDPQDTITSLILLPPDILDNREDDCEEPIEDMQLTSKNGFEREKTSDISTLGHLVITTQGGYVKILDLSNFEILAKVEPPKKEGTEEQDTFVSVIYCSGTDRLCACTKESHPVNRLGCSYAILAHCNFCLPGSSDSPALAS

SEQ ID NO: 856926 - protein, 66 aa, Homo sapiens
LVQASGEGCLPQASRSACPSALGRELADIPICLGDTITWGIRVLMPSWCCAWGLEGLVLRGVKRFT

SEQ ID NO: 856927 - protein, 288 aa, Homo sapiens
MHVAKVHPKGGEMVGAIRNAAFLAKPSIPQVPNYRLSMTIPDWLQAIQNYMKTLQYNHTGTQFFEIRKMRPLSGLMETAKEMTRESLPIKCLEAVILGIYLTNGQPSIERFPISFKTYFSGNYFHHVVLGIYCNGRYGSLGMSRRAELMDKPLTFRTLSDLIFDFEDSYKKYLHTVKKVKIGLYVPHEPHSFQPIEWKQLVLNVSKMLRADIRKELEKYARDMRMKILKPASAHSPTQVRSRGKSLSPRRRQASPPRRLGRREKSPALPEKKVADLSTLNEVGYQIRI

SEQ ID NO: 856928 - protein, 304 aa, Homo sapiens
MHVAKVHPKGGEMVGAIRNAAFLAKPSIPQVPNYRLSMTIPDWLQAIQNYMKTLQYPSNQGLSTPSQGTGMVIASLVANLSPAGHQKLSKLMETAKEMTRESLPIKCLEAVILGIYLTNGQPSIERFPISFKTYFSGNYFHHVVLGIYCNGRYGSLGMSRRAELMDKPLTFRTLSDLIFDFEDSYKKYLHTVKKVKIGLYVPHEPHSFQPIEWKQLVLNVSKMLRADIRKELEKYARDMRMKILKPASAHSPTQVRSRGKSLSPRRRQASPPRRLGRREKSPALPEKKVADLSTLNEVGYQIRI

SEQ ID NO: 856929 - protein, 213 aa, Homo sapiens
METAKEMTRESLPIKCLEAVILGIYLTNGQPSIERFPISFKTYFSGNYFHHVVLGIYCNGRYGSLGMSRRAELMDKPLTFRTLSDLIFDFEDSYKKYLHTVKKVKIGLYVPHEPHSFQPIEWKQLVLNVSKMLRADIRKELEKYARDMRMKILKPASAHSPTQVRSRGKSLSPRRRQASPPRRLGRREKSPALPEKKVADLSTLNEVGYQIRI

SEQ ID NO: 856930 - protein, 158 aa, Homo sapiens
MAGFLDNFRWPECECIDWSERRNAVASVVAGILFFTGWWIMIDAAVVYPKPEQLNHAFHTCGVFSTLAFFMINAVSNAQVRGDSYESGCLGRTGARVWLFIGFMLMFGSLIASMWILFGAYVTQNTDVYPGLAVFFQNALIFFSTLIYKFGRTEELWT

SEQ ID NO: 856931 - protein, 142 aa, Homo sapiens
  misc_feature (10)..(10): Xaa can be any naturally occurring amino acid
  misc_feature (12)..(12): Xaa can be any naturally occurring amino acid
  misc_feature (14)..(14): Xaa can be any naturally occurring amino acid
ARWRPDPGPXKXKXILGPGLGWSAVVQPQLTAPSNAGAQAILLPPLPKQLGPQMYPPLLAGHHPAAQQKKLFCLRFPERSKGASGLGPCFGSKRLENIFLLLFRKRDNGHRVPDVILWTRKKQAPASTDSNENVPTEIRMTC

SEQ ID NO: 856932 - protein, 158 aa, Homo sapiens; identical to SEQ ID NO: 856930

SEQ ID NO: 856933 - protein, 158 aa, Homo sapiens; identical to SEQ ID NO: 856930

SEQ ID NO: 856934 - protein, 158 aa, Homo sapiens; identical to SEQ ID NO: 856930

SEQ ID NO: 856935 - protein, 126 aa, Homo sapiens
SGSVHGSNVSPFGITPLLSREDFLCTEYEAVVERCAFVKIPSCLMISFFAVFSSKCWSAVVQPQLTAPSNAGAQAILLPPLSKQLGPQMEFCSSLGEKVKLPLKKKKDHSQYLISEDVQKNIASYI

SEQ ID NO: 856936 - protein, 114 aa, Homo sapiens
ILVHKGACAQCAGSYICIHVPCLGWSAVVQPQLTAPSNAGAQAILLPPLPKQLGPQMYPPLLAGHHPAAQQKKLFCLRFPERSKDQEETGSCQHRQQRKCSHGDQDDLLKLSGG

SEQ ID NO: 856937 - protein, 135 aa, Homo sapiens
MAGFLDNFRWPECECIDWSERRNAVASVVAGILFFTGWWIMIDAAVVYPKPEQLNHAFHTCGVFSTLAFFMINAVSNAQVRGDSYESGCLGRTGARVWLFIGFMLMFGSLIASMWILFGAYVTQMLAIGGKGASY

SEQ ID NO: 856938 - protein, 158 aa, Homo sapiens; identical to SEQ ID NO: 856930

SEQ ID NO: 856939 - protein, 158 aa, Homo sapiens; identical to SEQ ID NO: 856930

SEQ ID NO: 856940 - protein, 126 aa, Homo sapiens
MAGFLDNFRWPECECIDWSERRNAVASVVAGILFFTGWWIMIDAAVVYPKPEQLNHAFHTCGVFSTLAFFMINAVSNAQVRGDSYESGCLGRTGARVWLFIGFMLMFGSLIASMWILFGAYVTQTL

SEQ ID NO: 856941 - protein, 334 aa, Homo sapiens
MKAKVASLEESEGNKQDLKALKEAVKEIQTSAKSREWDMEALRSTLQTMESDIYTEVRELVSLKQEQQAFKEAADTERLALQALTEKLLRSEESVSRLPEEIRRLEEELRQLKSDSHGPKEDGGFRHSEAFEALQQKSQGLDSRLQHVEDGVLSMQVASARQTESLESLLSKSQEHEQRLAALQGRLEGLGSSEADQDGLASTVRSLGETQLVLYGDVEELKRSVGELPSTVESLQKVQEQVHTLLSQDQAQAARLPPQDFLDRLSSLDNLKASVSQVEADLKMLRTAVDSLVAYSVKIETNENNLESAKGLLDDLRNDLDRLFVKVEKIHEKV

SEQ ID NO: 856942 - protein, 334 aa, Homo sapiens; identical to SEQ ID NO: 856941

SEQ ID NO: 856943 - protein, 180 aa, Homo sapiens
MQVASARQTESLESLLSKSQEHEQRLAALQGRLEGLGSSEADQDGLASTVRSLGETQLVLYGDVEELKRSVGELPSTVESLQKVQEQVHTLLSQDQAQAARLPPQDFLDRLSSLDNLKASVSQVEADLKMLRTAVDSLVAYSVKIETNENNLESAKGLLDDLRNDLDRLFVKVEKIHEKV

SEQ ID NO: 856944 - protein, 303 aa, Homo sapiens
MKAKVASLEESEGNKQDLKALKEAVKEIQTSAKSREWDMEALRSTLQTMESDIYTEVRELVSLKQEQQAFKEAADTERLALQALTEKLLRSEESVSRLPEEIRRLEEELRQLKSDSHGPKEDGGFRHSEAFEALQQSLLSKSQEHEQRLAALQGRLEGLGSSEADQDGLASTVRSLGETQLVLYGDVEELKRSVGELPSTVESLQKVQEQVHTLLSQDQAQAARLPPQDFLDRLSSLDNLKASVSQVEADLKMLRTAVDSLVAYSVKIETNENNLESAKGLLDDLRNDLDRLFVKVEKIHEKV

SEQ ID NO: 856945 - protein, 334 aa, Homo sapiens; identical to SEQ ID NO: 856941

SEQ ID NO: 856946 - protein, 235 aa, Homo sapiens
TLLLECLKGFRVSEASVLLRPVGIGFRHSEAFEALQQKSQGLDSRLQHVEDGVLSMQVASARQTESLESLLSKSQEHEQRLAALQGRLEGLGSSEADQDGLASTVRSLGETQLVLYGDVEELKRSVGELPSTVESLQKVQEQVHTLLSQDQAQAARLPPQDFLDRLSSLDNLKASVSQVEADLKMLRTAVDSLVAYSVKIETNENNLESAKGLLDDLRNDLDRLFVKVEKIHEKV

SEQ ID NO: 856947 - protein, 334 aa, Homo sapiens; identical to SEQ ID NO: 856941

SEQ ID NO: 856948 - protein, 334 aa, Homo sapiens; identical to SEQ ID NO: 856941

SEQ ID NO: 856949 - protein, 196 aa, Homo sapiens
  misc_feature (1)..(1): Xaa can be any naturally occurring amino acid
XKKSRNTYLNSSGESTLSSQPKMVPLSLYGTSAFCQLIRNRKVHTSMHNDLIAHMEFKQQLMLSPTVKDLVLQLITICYDELRRFEVLGIPNTVESLQKVQEQVHTLLSQDQAQAARLPPQDFLDRLSSLDNLKASVSQVEADLKMLRTAVDSLVAYSVKIETNENNLESAKGLLDDLRNDLDRLFVKVEKIHEKV

SEQ ID NO: 856950 - protein, 334 aa, Homo sapiens; identical to SEQ ID NO: 856941

SEQ ID NO: 856951 - protein, 142 aa, Homo sapiens
MRRGEAPGSFFERNPLLEGCLPHGVRVVSLPDASCDIRGNYAKHPGGSECEALHPAESRVPSVPTAGPCSLSGGHQGMHRFRLPERGVLGFFQKIREESCLQWNRGSPWGMQAKSFYFNMMSMKRFAVWAALSARSVHTAFV

SEQ ID NO: 856952 - protein, 334 aa, Homo sapiens; identical to SEQ ID NO: 856941

SEQ ID NO: 856953 - protein, 334 aa, Homo sapiens; identical to SEQ ID NO: 856941

SEQ ID NO: 856954 - protein, 334 aa, Homo sapiens; identical to SEQ ID NO: 856941

SEQ ID NO: 856955 - protein, 269 aa, Homo sapiens
THRTRNSFRPFREYFSTFTNNLSRWSEESVSRLPEEIRRLEEELRQLKSDSHGPKEDGGFRHSEAFEALQQKSQGLDSRLQHVEDGVLSMQVASARQTESLESLLSKSQEHEQRLAALQGRLEGLGSSEADQDGLASTVRSLGETQLVLYGDVEELKRSVGELPSTVESLQKVQEQVHTLLSQDQAQAARLPPQDFLDRLSSLDNLKASVSQVEADLKMLRTAVDSLVAYSVKIETNENNLESAKGLLDDLRNDLDRLFVKVEKIHEKV

SEQ ID NO: 856956 - protein, 202 aa, Homo sapiens
GPPGRRAWQALPARLARPPLPGGGVGAAAAEAGPLLPPPRPGLLPRPRVLSPPPRPRRPARAGSAGRSTFSSTSPWWRRPLSRAGASTTSWRRSSRSGAATTDFSRQREELGQGLQGVEQKVQSLQATFGTFESILRSSQHKQDLTEKAVKQGESEVSRISEVLQKLQNEILKDLSDGIHVVKDARERDLHVPGKNTVEGAA

SEQ ID NO: 856957 - protein, 334 aa, Homo sapiens; identical to SEQ ID NO: 856941

SEQ ID NO: 856958 - protein, 334 aa, Homo sapiens; identical to SEQ ID NO: 856941

SEQ ID NO: 856959 - protein, 334 aa, Homo sapiens; identical to SEQ ID NO: 856941

SEQ ID NO: 856960 - protein, 54 aa, Homo sapiens
AKHLGVQPGPPGSSVEEPLAGPASLMSLSISATSAPLSFYRTRSLPTHFLLGKP

SEQ ID NO: 856961 - protein, 251 aa, Homo sapiens
NLKALRFWQLWRMRENMARGPCNAPRWASLMVLVAIGTAVTAAVNPGVVVRISQKGLDYASQQGTAALQKELKRIKIPDYSDSFKIKHLGKGHYSFYSMDIREFQLPSSQISMVPNVGLKFSISNANIKISGKWKAQKRFLKMSGNFDLSIEGMSISADLKLGSNPTSGKPTITCSSCSSHINSVHVHISKSKVGWLIQLFHKKIESALRNKMNSQVGGAQSPISKQRRRALSNHTPPPSTDTLLSLQTPW

SEQ ID NO: 856962 - protein, 285 aa, Homo sapiens
MENVCEKVTNSVSSKLQPYFQTLPVMTKIDSVAGINYGLVAPPATTAETLDVQMKGEFYSENHHNPPPFAPPVMEFPAAHDRMVYLGLSDYFFNTAGLVYQEAGVLKMTLRDDMIPKESKFRLTTKFFGTFLPEVAKKFPNMKIQIHVSASTPPHLSVQPTGLTFYPAVDVQAFAVLPNSSLASLFLIGMHTTGSMEVSAESNRLVGELKLDRLLLELKHSNIGPFPELLQDIMNYIVPILVLPRVNEKLQKGFPLPTPARVQLYNVVLQPHQNFLLFGADVVYK

SEQ ID NO: 856963 - protein, 452 aa, Homo sapiens
NLKALRFWQLWRMRENMARGPCNAPRWASLMVLVAIGTAVTAAVNPGVVVRISQKGLDYASQQGTAALQKELKRIKIPDYSDSFKIKHLGKGHYSFYSMDIREFQLPSSQISMVPNVGLKFSISNANIKISGKWKAQKRFLKMSGNFDLSIEGMSISADLKLGSNPTSGKPTITCSSCSSHINSVHVHISKSKVGWLIQLFHKKIESALRNKMNSQVCEKVTNSVSSKLQPYFQTLPVMTKIDSVAGINYGLVAPPATTAETLDVQMKGEFYSENHHNPPPFAPPVMEFPAAHDRMVYLGLSDYFFNTAGLVYQEAGVLKMTLRDDMIPKESKFRLTTKFFGTFLPEVAKKFPNMKIQIHVSASTPPHLSVQPTGLTFYPAVDVQAFAVLPNSSLASLFLIGMHTTGSMEVSAESNRLVGELKLDRLLLELKHSNIGPFPVSLRPLVASSSF

SEQ ID NO: 856964 - protein, 248 aa, Homo sapiens
MENVCEKVTNSVSSKLQPYFQTLPVMTKIDSVAGINYGLVAPPATTAETLDVQMKGEFYSENHHNPPPFAPPVMEFPAAHDRMVYLGLSDYFFNTAGLVYQEAGVLKMTLRDDMIPKESKFRLTTKFFGTFLPEVAKKFPNMKIQIHVSASTPPHLSVQPTGLTFYPAVDVQAFAVLPNSSLASLFLIGMELLQDIMNYIVPILVLPRVNEKLQKGFPLPTPARVQLYNVVLQPHQNFLLFGADVVYK

SEQ ID NO: 856965 - protein, 339 aa, Homo sapiens
NLKALRFWQLWRMRENMARGPCNAPRWASLMVLVAIGTAVTAAVNPGVVVRISQKGLDYASQQGTAALQKELKRIKIPDYSDSFKIKHLGKGHYSFYSMDIREFQLPSSQISMVPNVGLKFSISNANIKISGKWKAQKRFLKMSGNFDLSIEGMSISADLKLGSNPTSGKPTITCSSCSSHINSVHVHISKSKVGWLIQLFHKKIESALRNKMNSQVCEKVTNSVSSKLQPYFQTLPVMTKIDSVAGINYGLVAPPATTAETLDVQMKGEFYSENHHNPPPFAPPVMEFPAAHDRMVYLGLSDYFFNTAGLVYQEAGVLKMTLRDDMIPKASRFKRPSW

SEQ ID NO: 856966 - protein, 83 aa, Homo sapiens
AQEEGLSGRDREPGRKPREAPTSSVKEEELAKKSGEKPVGDRKKAEGLGHRTLEGVFLEGNGQPHQELPSSQEMQGLKRLLDY

SEQ ID NO: 856967 - protein, 498 aa, Homo sapiens
NLKALRFWQLWRMRENMARGPCNAPRWASLMVLVAIGTAVTAAVNPGVVVRISQKGLDYASQQGTAALQKELKRIKIPDYSDSFKIKHLGKGHYSFYSMDIREFQLPSSQISMVPNVGLKFSISNANIKISGKWKAQKRFLKMSGNFDLSIEGMSISADLKLGSNPTSGKPTITCSSCSSHINSVHVHISKSKVGWLIQLFHKKIESALRNKMNSQVCEKVTNSVSSKLQPYFQTLPVMTKIDSVAGINYGLVAPPATTAETLDVQMKGEFYSENHHNPPPFAPPVMEFPAAHDRMVYLGLSDYFFNTAGLVYQEAGVLKMTLRDDMIPKESKFRLTTKFFGTFLPEVAKKFPNMKIQIHVSASTPPHLSVQPTGLTFYPAVDVQAFAVLPNSSLASLFLIGMHTTGSMEVSAESNRLVGELKLDRLLLELKHSNIGPFPELLQDIMNYIVPILVLPRVNEKLQKGFPLPTPARVQLYNVVLQPHQNFLLFGADVVYK

SEQ ID NO: 856968 - protein, 212 aa, Homo sapiens
MEFPAAHDRMVYLGLSDYFFNTAGLVYQEAGVLKMTLRDDMIPKESKFRLTTKFFGTFLPEVAKKFPNMKIQIHVSASTPPHLSVQPTGLTFYPAVDVQAFAVLPNSSLASLFLIGMHTTGSMEVSAESNRLVGELKLDRLLLELKHSNIGPFPELLQDIMNYIVPILVLPRVNEKLQKGFPLPTPARVQLYNVVLQPHQNFLLFGADVVYK

SEQ ID NO: 856969 - protein, 429 aa, Homo sapiens
NLKALRFWQLWRMRENMARGPCNAPRWASLMVLVAIGTAVTAAVNPGVVVRISQKGLDYASQQGTAALQKELKRIKIPDYSDSFKIKHLGKGHYSFYSMDIREFQLPSSQISMVPNVGLKFSISNANIKISGKWKAQKRFLKMSGNFDLSIEGMSISADLKLGSNPTSGKPTITCSSCSSHINSVHVHISKSKVGWLIQLFHKKIESALRNKMNSQVCEKVTNSVSSKLQPYFQTLPVMTKIDSVAGINYGLVAPPATTAETLDVQMKGEFYSENHHNPPPFAPPVMEFPAAHDRMVYLGLSDYFFNTAGLVYQEAGVLKMTLRDDMIPKESKFRLTTKFFGTFLPEVAKKFPNMKIQIHVSASTPPHLSVQPTGLTFYPAVDVQAFAVLPNSSLASLFLIGMVSSSWVGQMRSPRQSQQHCLWSQETM

SEQ ID NO: 856970 - protein, 111 aa, Homo sapiens
HAGARSGLGVDGQQVGGTDSGAAFLSGMYAHASPYLGPGMLVQGGCLPRLSGPPSSPALLFLFSWSSPSVSVTEKLQKGFPLPTPARVQLYNVVLQPHQNFLLFGADVVYK

SEQ ID NO: 856971 - protein, 98 aa, Homo sapiens
VKVWQLSTEFTEQGPREAEDLDCLELSLKYLFAVRWSPVRPLVFAAASGKGDVQLFDLQKSSQKPTVLIKQTQDESPVYCLEFNSQQTQLLVCRALCF

SEQ ID NO: 856972 - protein, 536 aa, Homo sapiens
MATRAQPGPLSQAGSAGVAALATVGVASGPGPGRPGPLQDETLGVASVPSQWRAVQGIRGETKSCQTASIATASASAQARNHVDAQVQTEAPVPVSVQPPSQYDIPRLAAFLRRVEAMVIRELNKNWQSHAFDGFEVNWTEQQQMVSCLYTLGYPPAQAQGLHVTSISWNSTGSVVACAYGRLDHGDWSTLKSFVCAWNLDRRDLRPQQPSAVVEVPSAVLCLAFHPTQPSHVAGGLYSGEVLVWDLSRLEDPLLWRTGLTDDTHTDPVSQVVWLPEPGHSHRFQVLSVATDGKVLLWQGIGVGQLQLTEGFALVMQQLPRSTKLKKHPRGETEVGATAVAFSSFDPRLFILGTEGGFPLKCSLAAGEAALTRMPSSVPLRAPAQFTFSPHGGPIYSVSCSPFHRNLFLSAGTDGHVHLYSMLQAPPLTSLQLSLKYLFAVRWSPVRPLVFAAASGKGDVQLFDLQKSSQKPTVLIKQTQDESPVYCLEFNSQQTQLLAAGDAQGTVKVWQLSTEFTEQGPREAEDLDCLAAEVAA

SEQ ID NO: 856973 - protein, 532 aa, Homo sapiens
NYRLGTRLVVSAGVAALATVGVASGPGPGRPGPLQDETLGVASVPSQWRAVQGIRGETKSCQTASIATASASAQARNHVDAQVQTEAPVPVSVQPPSQYDIPRLAAFLRRVEAMVIRELNKNWQSHAFDGFEVNWTEQQQMVSCLYTLGYPPAQAQGLHVTSISWNSTGSVVACAYGRLDHGDWSTLKSFVCAWNLDRRDLRPQQPSAVVEVPSAVLCLAFHPTQPSHVAGGLYSGEVLVWDLSRLEDPLLWRTGLTDDTHTDPVSQVVWLPEPGHSHRFQVLSVATDGKVLLWQGIGVGQLQLTEGFALVMQQLPRSTKLKKHPRGETEVGATAVAFSSFDPRLFILGTEGGFPLKCSLAAGEAALTRMPSSVPLRAPAQFTFSPHGGPIYSVSCSPFHRNLFLSAGTDGHVHLYSMLQAPPLTSLQLSLKYLFAVRWSPVRPLVFAAASGKGDVQLFDLQKSSQKPTVLIKQTQDESPVYCLEFNSQQTQLLAAGDAQGTVKVWQLSTEFTEQGPREAEDLDCLAAEVAA

SEQ ID NO: 856974 - protein, 539 aa, Homo sapiens
TRGSGRVGPDAWVDPRVSAGVAALATVGVASGPGPGRPGPLQDETLGVASVPSQWRAVQGIRGETKSCQTASIATASASAQARNHVDAQVQTEAPVPVSVQPPSQYDIPRLAAFLRRVEAMVIRELNKNWQSHAFDGFEVNWTEQQQMVSCLYTLGYPPAQAQGLHVTSISWNSTGSVVACAYGRLDHGDWSTLKSFVCAWNLDRRDLRPQQPSAVVEVPSAVLCLAFHPTQPSHVAGGLYSGEVLVWDLSRLEDPLLWRTGLTDDTHTDPVSQVVWLPEPGHSHRFQVLSVATDGKVLLWQGIGVGQLQLTEGFALVMQQLPRSTKLKKHPRGETEVGATAVAFSSFDPRLFILGTEGGFPLKCSLAAGEAALTRMPSSVPLRAPAQFTFSPHGGPIYSVSCSPFHRNLFLSAGTDGHVHLYSMLQAPPLTSLQLSLKYLFAVRWSPVRPLVFAAASGKGDVQLFDLQKSSQKPTVLIKQTQDESPVYCLEFNSQQTQLLAAGDAQGTVKVWQLSTEFTEQGPREAEDLDCLAAEVAA

SEQ ID NO: 856975 - protein, 439 aa, Homo sapiens
MATRAQPGPLSQAGSAGVAALATVGVASGPGPGRPGPLQDETLGVASVPSQWRAVQGIRGETKSCQTASIATASASAQARNHVDAQVQTEAPVPVSVQPPSQYDIPRLAAFLRRVEAMVIRELNKNWQSHAFDGFEVNWTEQQQMVSCLYTLGYPPAQAQGLHVTSISWNSTGSVVACAYGRLDHGDWSTLKSFVCAWNLDRRDLRPQQPSAVVEVPSAVLCLAFHPTQPSHVAGGLYSGEVLVWDLSRLEDPLLWRTGLTDDTHTDPVSQVVWLPEPGHSHRFQVLSVATDGKVLLWQGIGVGQLQLTEGFALVMQQLPRSTKLKKHPRGETEVGATAVAFSSFDPRLFILGTEGGFPLKCSLAAGEAALTRMPSSVPLRPEVNFPTGHLLWVSSTISEADDGFPFLGPDSGPSWGGRAVAPEGFTHLPGGPWGENTL

SEQ ID NO: 856976 - protein, 265 aa, Homo sapiens
MTPTQTLCPSHRFQVLSVATDGKVLLWQGIGVGQLQLTEGFALVMQQLPRSTKLKKHPRGETEVGATAVAFSSFDPRLFILGTEGGFPLKCSLAAGEAALTRMPSSVPLRAPAQFTFSPHGGPIYSVSCSPFHRNLFLSAGTDGHVHLYSMLQAPPLTSLQLSLKYLFAVRWSPVRPLVFAAASGKGDVQLFDLQKSSQKPTVLIKQTQDESPVYCLEFNSQQTQLLAAGDAQGTVKVWQLSTEFTEQGPREAEDLDCLAAEVAA

SEQ ID NO: 856977 - protein, 295 aa, Homo sapiens
MATRAQPGPLSQAGSAGVAALATVGVASGPGPGRPGPLQDETLGVASVPSQWRAVQGIRGETKSCQTASIATASASAQARNHVDAQVQTEAPVPVSVQPPSQYDIPRLAAFLRRVEAMVIRELNKNWQSHAFDGFEVNWTEQQQMVSCLYTLGYPPAQAQGLHVTSISWNSTGSVVACAYGRLDHGDWSTLKSFVCAWNLDRRDLRPQQPSAVVEVPSAVLCLAFHPTQPSHVAGGLYSGEVLVWDLSRLEDPLLWRTGLTDDTHTDPVSQGVVAELGQHVPVLVWPSGRPSAGS

SEQ ID NO: 856978 - protein, 509 aa, Homo sapiens
AGSQDEEVAEIQARVVGRRRQQEQRERWTDLRDTEKSCQTASIATASASAQARNHVDAQVQTEAPVPVSVQPPSQYDIPRLAAFLRRVEAMVIRELNKNWQSHAFDGFEVNWTEQQQMVSCLYTLGYPPAQAQGLHVTSISWNSTGSVVACAYGRLDHGDWSTLKSFVCAWNLDRRDLRPQQPSAVVEVPSAVLCLAFHPTQPSHVAGGLYSGEVLVWDLSRLEDPLLWRTGLTDDTHTDPVSQVVWLPEPGHSHRFQVLSVATDGKVLLWQGIGVGQLQLTEGFALVMQQLPRSTKLKKHPRGETEVGATAVAFSSFDPRLFILGTEGGFPLKCSLAAGEAALTRMPSSVPLRAPAQFTFSPHGGPIYSVSCSPFHRNLFLSAGTDGHVHLYSMLQAPPLTSLQLSLKYLFAVRWSPVRPLVFAAASGKGDVQLFDLQKSSQKPTVLIKQTQDESPVYCLEFNSQQTQLLAAGDAQGTVKVWQLSTEFTEQGPREAEDLDCLAAEVAA

SEQ ID NO: 856979 - protein, 540 aa, Homo sapiens
VKRWCLRRWLTCRGVADAVPWCAVWLCHVACMHVTDDLCVLCAVLCPSADVKCAKSMCAFLLCGGLKSCQTASIATASASAQARNHVDAQVQTEAPVPVSVQPPSQYDIPRLAAFLRRVEAMVIRELNKNWQSHAFDGFEVNWTEQQQMVSCLYTLGYPPAQAQGLHVTSISWNSTGSVVACAYGRLDHGDWSTLKSFVCAWNLDRRDLRPQQPSAVVEVPSAVLCLAFHPTQPSHVAGGLYSGEVLVWDLSRLEDPLLWRTGLTDDTHTDPVSQVVWLPEPGHSHRFQVLSVATDGKVLLWQGIGVGQLQLTEGFALVMQQLPRSTKLKKHPRGETEVGATAVAFSSFDPRLFILGTEGGFPLKCSLAAGEAALTRMPSSVPLRAPAQFTFSPHGGPIYSVSCSPFHRNLFLSAGTDGHVHLYSMLQAPPLTSLQLSLKYLFAVRWSPVRPLVFAAASGKGDVQLFDLQKSSQKPTVLIKQTQDESPVYCLEFNSQQTQLLAAGDAQGTVKVWQLSTEFTEQGPREAEDLDCLAAEVAA

SEQ ID NO: 856980 - protein, 315 aa, Homo sapiens
MGTGARLSPSCVPGTWTGETCVPSNRRPWWRSPALSCVWPSTPRSPPTSQVVWLPEPGHSHRFQVLSVATDGKVLLWQGIGVGQLQLTEGFALVMQQLPRSTKLKKHPRGETEVGATAVAFSSFDPRLFILGTEGGFPLKCSLAAGEAALTRMPSSVPLRAPAQFTFSPHGGPIYSVSCSPFHRNLFLSAGTDGHVHLYSMLQAPPLTSLQLSLKYLFAVRWSPVRPLVFAAASGKGDVQLFDLQKSSQKPTVLIKQTQDESPVYCLEFNSQQTQLLAAGDAQGTVKVWQLSTEFTEQGPREAEDLDCLAAEVAA

SEQ ID NO: 856981 - protein, 221 aa, Homo sapiens [sequence omitted]

SEQ ID NO: 856982 - protein, 419 aa, Homo sapiens
WGPFSRECHTLGVLEWSVGHFNTQSSVLVVTRTQRVCPGLVGREVGWVIGAPPRGTAGSSLSLHRLDHGDWSTLKSFVCAWNLDRRDLRPQQPSAVVEVPSAVLCLAFHPTQPSHVAGGLYSGEVLVWDLSRLEDPLLWRTGLTDDTHTDPVSQVVWLPEPGHSHRFQVLSVATDGKVLLWQGIGVGQLQLTEGFALVMQQLPRSTKLKKHPRGETEVGATAVAFSSFDPRLFILGTEGGFPLKCSLAAGEAALTRMPSSVPLRAPAQFTFSPHGGPIYSVSCSPFHRNLFLSAGTDGHVHLYSMLQAPPLTSLQLSLKYLFAVRWSPVRPLVFAAASGKGDVQLFDLQKSSQKPTVLIKQTQDESPVYCLEFNSQQTQLLAAGDAQGTVKVWQLSTEFTEQGPREAEDLDCLAAEVAA

SEQ ID NO: 856983 - protein, 346 aa, Homo sapiens
MTSSQVALPPGPGPGPVGGLGRVFGQEAQAGGGAEPLPRSTVPAGGLYSGEVLVWDLSRLEDPLLWRTGLTDDTHTDPVSQVVWLPEPGHSHRFQVLSVATDGKVLLWQGIGVGQLQLTEGFALVMQQLPRSTKLKKHPRGETEVGATAVAFSSFDPRLFILGTEGGFPLKCSLAAGEAALTRMPSSVPLRAPAQFTFSPHGGPIYSVSCSPFHRNLFLSAGTDGHVHLYSMLQAPPLTSLQLSLKYLFAVRWSPVRPLVFAAASGKGDVQLFDLQKSSQKPTVLIKQTQDESPVYCLEFNSQQTQLLAAGDAQGTVKVWQLSTEFTEQGPREAEDLDCLAAEVAA

SEQ ID NO: 856984 - protein, 138 aa, Homo sapiens
APCIPSRNLFLSAGTDGHVHLYSMLQAPPLTSLQLSLKYLFAVRWSPVRPLVFAAASGKGDVQLFDLQKSSQKPTVLIKQTQDESPVYCLEFNSQQTQLLAAGDAQGTVKVWQLSTEFTEQGPREAEDLDCLAAEVAA

SEQ ID NO: 856985 - protein, 174 aa, Homo sapiens
GWNSGEESGRGPGSGPGLGAVERPEEAGALGKPSVVGGRQRWRELPGAGQGCPAKLPGVQQGSWGLGLSLCGDDFQPSGSAAWPWPWPCRWAGAGVWPGSQAGGGAEPLPRSTVPAGGLYSGEVLVWDLSRLEDPLLWRTGLTDDTHTDPVSQGQGRGCRAGWALRQSWGEGAH

SEQ ID NO: 856986 - protein, 536 aa, Homo sapiens; identical to SEQ ID NO: 856972

SEQ ID NO: 856987 - protein, 536 aa, Homo sapiens; identical to SEQ ID NO: 856972

SEQ ID NO: 856988 - protein, 460 aa, Homo sapiens
MATRAQPGPLSQAGSAGVAALATVGVASGPGPGRPGPLQDETLGVASVPSQWRAVQGIRGETKSCQTASIATASASAQARNHVDAQVQTEAPVPVSVQPPSQYDIPRLAAFLRRVEAMVIRELNKNWQSHAFDGFEVNWTEQQQMVSCLYTLGYPPAQAQGLHVTSISWNSTGSVVACAYGRLDHGDWSTLKSFVCAWNLDRRDLRPQQPSAVVEVPSAVLCLAFHPTQPSHVAGGLYSGEVLVWDLSRLEDPLLWRTGLTDDTHTDPVSQVVWLPEPGHSHRFQVLSVATDGKVLLWQGIGVGQLQLTEGFALVMQQLPRSTKLKKHPRGETEVGATAVAFSSFDPRLFILGTEGGFPLKCSLAAGEAALTRMPSSVPLRAPAQFTFSPHGGPIYSVSCSPFHRNLFLSAGTDGHVHLYSMLQAPPLTSLQLSLKYLFAVRWSPREAEDLDCLAAEVAA

SEQ ID NO: 856989 - protein, 495 aa, Homo sapiens
MATRAQPGPLSQAGSAGVAALATVGVASGPGPGRPGPLQDETLGVASVPSQWRAVQGIRGETKSCQTASIATASASAQARNHVDAQVQTEAPVPVSVQPPSQYDIPRLAAFLRRVEAMVIRELNKNWQSHAFDGFEVNWTEQQQMVSCLYTLGYPPAQAQGLHVTSISWNSTGSVVACAYGRLDHGDWSTLKSFVCAWNLDRRDLRPQQPSAVVEVPSAVLCLAFHPTQPSHVAGGLYSGEVLVWDLSRLEDPLLWRTGLTDDTHTDPVSQVVWLPEPGHSHRFQVLSVATDGKVLLWQGIGVGQLQLTEGFALVMQQLPRSTKLKKSIPAGETEDGAATAENYSSFDPEEQNNTGRTGKGRNTRINMYPGTSLEEARPYQTDAQDQRPNAETPEQVINLFYRPKERYPIYSLHELVPHIINRRYSYYIGSGTGDNQQGEVGPNLSVTKCIGRGPHTQLEYPAEKITRKRSNRTGAAAWVPPKWAATGHTDRRRI

SEQ ID NO: 856990 - protein, 519 aa, Homo sapiens
LSARYEAGWWSGPGPGRPGPLQDETLGVASVPSQWRAVQGIRGETKSCQTASIATASASAQARNHVDAQVQTEAPVPVSVQPPSQYDIPRLAAFLRRVEAMVIRELNKNWQSHAFDGFEVNWTEQQQMVSCLYTLGYPPAQAQGLHVTSISWNSTGSVVACAYGRLDHGDWSTLKSFVCAWNLDRRDLRPQQPSAVVEVPSAVLCLAFHPTQPSHVAGGLYSGEVLVWDLSRLEDPLLWRTGLTDDTHTDPVSQVVWLPEPGHSHRFQVLSVATDGKVLLWQGIGVGQLQLTEGFALVMQQLPRSTKLKKHPRGETEVGATAVAFSSFDPRLFILGTEGGFPLKCSLAAGEAALTRMPSSVPLRAPAQFTFSPHGGPIYSVSCSPFHRNLFLSAGTDGHVHLYSMLQAPPLTSLQLSLKYLFAVRWSPVRPLVFAAASGKGDVQLFDLQKSSQKPTVLIKQTQDESPVYCLEFNSQQTQLLAAGDAQGTVKVWQLSTEFTEQGPREAEDLDCLAAEVAA

SEQ ID NO: 856991 - protein, 707 aa, Homo sapiens
MATRAQPGPLSQAGSAGVAALATVGVASGPGPGRPGPLQDETLGVASVPSQWRAVQGIRGETKSCQTASIATASASAQARNHVDAQVQTEAPVPVSVQPPSQYDIPRLAAFLRRVEAMVIRELNKNWQSHAFDGFEVNWTEQQQMVSCLYTLGYPPAQAQGLHVTSISWNSTGSVVACAYGRLDHGDWSTLKSFVCAWNLDRRDLRPQQPSAVVEVPSAVLCLAFHPTQPSHVAGELPAVSASSPLRTQLPALQRATGSFPWALWPGDRKAGPDPLSLEPRWRSAVSPEGWNSGEESGRGPGSGPGLGAVERPEEAGALGKPSVVGGRQRWRELPGAGQGCPAKLPGVQQGSWGLGLSLCGDDFQPSGSAAWPWPWPCRWAGAGVWPGSQAGGGAEPLPRSTVPAGGLYSGEVLVWDLSRLEDPLLWRTGLTDDTHTDPVSQVVWLPEPGHSHRFQVLSVATDGKVLLWQGIGVGQLQLTEGFALVMQQLPRSTKLKKHPRGETEVGATAVAFSSFDPRLFILGTEGGFPLKCSLAAGEAALTRMPSSVPLRAPAQFTFSPHGGPIYSVSCSPFHRNLFLSAGTDGHVHLYSMLQAPPLTSLQLSLKYLFAVRWSPVRPLVFAAASGKGDVQLFDLQKSSQKPTVLIKQTQDESPVYCLEFNSQQTQLLAAGDAQGTVKVWQLSTEFTEQGPREAEDLDCLAAEVAA

SEQ ID NO: 856992 - protein, 584 aa, Homo sapiens
MATRAQPGPLSQAGSAGVAALATVGVASGPGPGRPGPLQDETLGVASVPSQWRAVQGIRGETKSCQTASIATASASAQARNHVDAQVQTEAPVPVSVQPPSQYDIPRLAAFLRRVEAMVIRELNKNWQSHAFDGFEVNWTEQQQMVSCLYTLGYPPAQAQGLHVTSISWNSTGSVVACAYGRLDHGDWSTLKSFVCAWNLDRRDLRPQQPSAVVEVPSAVLCLAFHPTQPSHVAGELLLCPPPLLSGLSFPPCRGPQGAFHGPFGPETGRRALTLSVWSPGEGGLYSGEVLVWDLSRLEDPLLWRTGLTDDTHTDPVSQVVWLPEPGHSHRFQVLSVATDGKVLLWQGIGVGQLQLTEGFALVMQQLPRSTKLKKHPRGETEVGATAVAFSSFDPRLFILGTEGGFPLKCSLAAGEAALTRMPSSVPLRAPAQFTFSPHGGPIYSVSCSPFHRNLFLSAGTDGHVHLYSMLQAPPLTSLQLSLKYLFAVRWSPVRPLVFAAASGKGDVQLFDLQKSSQKPTVLIKQTQDESPVYCLEFNSQQTQLLAAGDAQGTVKVWQLSTEFTEQGPREAEDLDCLAAEVAA

SEQ ID NO: 856993 - protein, 527 aa, Homo sapiens
MATRAQPGPLSQAGSAGVAALATVGVASGPGPGRPGPLQDETLGVASVPSQWRAVQGIRGETKSCQTASIATASASAQARNHVDAQVQTEAPVPVSVQPPSQYDIPRLAAFLRRVEAMVIRELNKNWQSHAFDGFEVSCLYTLGYPPAQAQGLHVTSISWNSTGSVVACAYGRLDHGDWSTLKSFVCAWNLDRRDLRPQQPSAVVEVPSAVLCLAFHPTQPSHVAGGLYSGEVLVWDLSRLEDPLLWRTGLTDDTHTDPVSQVVWLPEPGHSHRFQVLSVATDGKVLLWQGIGVGQLQLTEGFALVMQQLPRSTKLKKHPRGETEVGATAVAFSSFDPRLFILGTEGGFPLKCSLAAGEAALTRMPSSVPLRAPAQFTFSPHGGPIYSVSCSPFHRNLFLSAGTDGHVHLYSMLQAPPLTSLQLSLKYLFAVRWSPVRPLVFAAASGKGDVQLFDLQKSSQKPTVLIKQTQDESPVYCLEFNSQQTQLLAAGDAQGTVKVWQLSTEFTEQGPREAEDLDCLAAEVAA

SEQ ID NO: 856994 - protein, 287 aa, Homo sapiens
MGTGARLSPSCVPGTWTGETCVPSNRRPWWRSPALSCVWPSTPRSPPTSQGIGVGQLQLTEGFALVMQQLPRSTKLKKHPRGETEVGATAVAFSSFDPRLFILGTEGGFPLKCSLAAGEAALTRMPSSVPLRAPAQFTFSPHGGPIYSVSCSPFHRNLFLSAGTDGHVHLYSMLQAPPLTSLQLSLKYLFAVRWSPVRPLVFAAASGKGDVQLFDLQKSSQKPTVLIKQTQDESPVYCLEFNSQQTQLLAAGDAQGTVKVWQLSTEFTEQGPREAEDLDCLAAEVAA

SEQ ID NO: 856995 - protein, 271 aa, Homo sapiens
MATRAQPGPLSQAGSAGVAALATVGVASGPGPGRPGPLQDETLGVASVPSQWRAVQGIRGETHPRGETEVGATAVAFSSFDPRLFILGTEGGFPLKCSLAAGEAALTRMPSSVPLRAPAQFTFSPHGGPIYSVSCSPFHRNLFLSAGTDGHVHLYSMLQAPPLTSLQLSLKYLFAVRWSPVRPLVFAAASGKGDVQLFDLQKSSQKPTVLIKQTQDESPVYCLEFNSQQTQLLAAGDAQGTVKVWQLSTEFTEQGPREAEDLDCLAAEVAA

SEQ ID NO: 856996 - protein, 191 aa, Homo sapiens
ASGHTAPAGVEGREHGIAVLECKVPNSRIPTAWFREDQRQLSPWQLAPELTQGRAAPFHRNLFLSAGTDGHVHLYSMLQAPPLTSLQLSLKYLFAVRWSPVRPLVFAAASGKGDVQLFDLQKSSQKPTVLIKQTQDESPVYCLEFNSQQTQLLAAGDAQGTVKVWQLSTEFTEQGPREAEDLDCLAAEVAA

SEQ ID NO: 856997 - protein, 325 aa, Homo sapiens
MPELAVQKVVVHPLVLLSVVDHFNRIGKVGNQKRVVGVLLGSWQKKVLDVSNSFAVPFDEDDKDDSVWFLDHDYLENMYGMFKKVNARERIVGWYHTGPKLHKNDIAINELMKRYCPNSVLVIIDVKPKDLGLPTEAYISVEEVHDDGTPTSKTFEHVTSEIGAEEAEEVGVEHLLRDIKDTTVGTLSQRITNQVHGLKGLNSKLLDIRSYLEKVATGKLPINHQIIYQLQDVFNLLPDVSLQEFVKAFYLKTNDQMVVVYLASLIRSVVALHNLINNKIANRDAEKTTEGQEKEESKKDRKEDKEKDKDKEKSDVKKEEKKEKK

SEQ ID NO: 856998 - protein, 325 aa, Homo sapiens; identical to SEQ ID NO: 856997

SEQ ID NO: 856999 - protein, 306 aa, Homo sapiens
MPELAVQKVVVHPLVLLSVVDHFNRIGKVGNQKRVVGVLLGSWQKKVLDVSNSFAVPFDEDDKDDSVWFLDHDYLENMYGMFKKVNARERIVGWYHTGPKLHKNDIAINELMKRYCPNSVLVIIDVKPKDLGLPTEAYISVEEVHDDGTPTSKTFEHVTSEIGAEEAEEVGVEHLLRDIKDTTVGTLSQRITNQVHGLKGLNSKLLDIRSYLDVFNLLPDVSLQEFVKAFYLKTNDQMVVVYLASLIRSVVALHNLINNKIANRDAEKTTEGQEKEESKKDRKEDKEKDKDKEKSDVKKEEKKEKK

SEQ ID NO: 857000 - protein, 315 aa, Homo sapiens
GGVLEDPSDGDHFNRIGKVGNQKRVVGVLLGSWQKKVLDVSNSFAVPFDEDDKDDSVWFLDHDYLENMYGMFKKVNARERIVGWYHTGPKLHKNDIAINELMKRYCPNSVLVIIDVKPKDLGLPTEAYISVEEVHDDGTPTSKTFEHVTSEIGAEEAEEVGVEHLLRDIKDTTVGTLSQRITNQVHGLKGLNSKLLDIRSYLEKVATGKLPINHQIIYQLQDVFNLLPDVSLQEFVKAFYLKTNDQMVVVYLASLIRSVVALHNLINNKIANRDAEKTTEGQEKEESKKDRKEDKEKDKDKEKSDVKKEEKKEKK

SEQ ID NO: 857001 - protein, 229 aa, Homo sapiens
MPELAVQKVVVHPLVLLSVVDHFNRIGKVGNQKRVVGVLLGSWQKKVLDVSNSFAVPFDEDDKDDSVWFLDHDYLENMYGMFKKVNARERIVGWYHTGPKLHKNDIAINELMKRYCPNSVLVIIDVKPKDLGLPTEAYISVEEVHDDGTPTSKTFEHVTSEIGAEEAEEVGVEHLLRDIKDTTVGTLSQRITNQVHGLKGLNSKLLDIRSYLEKVATGKLPINHQGGDW

SEQ ID NO: 857002 - protein, 325 aa, Homo sapiens; identical to SEQ ID NO: 856997

SEQ ID NO: 857003 - protein, 325 aa, Homo sapiens; identical to SEQ ID NO: 856997

SEQ ID NO: 857004 - protein, 177 aa, Homo sapiens
MPELAVQKVVVHPLVLLSVVDHFNRIGKVGNQKRVVGVLLGSWQKKVLDVSNSFAVPFDEDDKDDSVWFLDHDYLENMYGMFKKVNARERIVGWYHTGPKLHKNDIAINELMKRYCPNSVLVIIDVKPKDLGLPTEAYISVEEVHDDGTPTSKTFEHVTSEIGAEEAEEVGVEHLLR

SEQ ID NO: 857005 - protein, 499 aa, Homo sapiens
PSSSTFLLAEMAAAAARVVLSSAARRRLWGFSESLLIRGAAGRSLYFGENRLRSTQAATQVVLNVPETRVTCLESGLRVASEDSGLSTCTVGLWIDAGSRYENEKNNGTAHFLEHMAFKGTKKRSQLDLELEIENMGAHLNAYTSREQTVYYAKAFSKDLPRAVEILADIIQNSTLGEAEIERERGVILREMQEVETNLQEVVFDYLHATAYQNTALGRTILGPTENIKSISRKDLVDYITTHYKGPRIVLAAAGGVSHDELLDLAKFHFGDSLCTHKGEIPALPPCKFTGSEIRVRDDKMPLAHLAIAVEAVGWAHPDTICLMVANTLIGNWDRSFGGGMNLSSKLAQLTCHGNLCHSFQSFNTSYTDTGLWGLYMVCESSTVADMLHVVQKEWMRLCTSVTESEVARARNLLKTNMLLQLDGSTPICEDIGRQMLCYNRRIPIPELEARIDAVNAETIREVCTKYIYNRSPAIAAVGPIKQLPDFKQIRSNMCWLRD

SEQ ID NO: 857006 - protein, 230 aa, Homo sapiens
PSSSTFLLAEMAAAAARVVLSSAARRRLWGFSESLLIRGAAGRSLYFGENRLRSTQAATQVVLNVPETRVTCLESGLRVASEDSGLSTCTVGLWIDAGSRYENEKNNGTAHFLEHMAFKGTKKRSQLDLELEIENMGAHLNAYTSREQTVYYAKAFSKDLPRAVEILADIIQNSTLGEAEIERERGVILREMQEVETNLQEVVFDYLHATAYQNTALGRTILGPTENINL

SEQ ID NO: 857007 - protein, 499 aa, Homo sapiens; identical to SEQ ID NO: 857005

SEQ ID NO: 857008 - protein, 499 aa, Homo sapiens; identical to SEQ ID NO: 857005

SEQ ID NO: 857009 - protein, 499 aa, Homo sapiens; identical to SEQ ID NO: 857005

SEQ ID NO: 857010 - protein, 455 aa, Homo sapiens
PSSSTFLLAEMAAAAARVVLSSAARRRLWGFSESLLIRGAAGRSLYFGENRLRSTQAATQVVLNVPETRVTCLESGLRVASEDSGLSTCTVGLWIDAGSRYENEKNNGTAHFLEHMAFKGTKKRSQLDLELEIENMGAHLNAYTSREQTVYYAKAFSKDLPRAVEILADIIQNSTLGEAEIERERGVILREMQEVETNLQEVVFDYLHATAYQNTALGRTILGPTENIKSISRKDLVDYITTHYKGPRIVLAAAGGVSHDELLDLAKFHFGDSLCTHKGEIPALPPCKFTGSEIRVRDDKMPLAHLAIAVEAVGWAHPDTICLMVANTLIGNWDRSFGGGMNLSSKLAQLTCHGNLCHSFQSFNTSYTDTGLWGLYMVCESSTVADMLHVVQKEWMRLCTSVTESEVARARNLLKTNMLLQLDGKNKDIGSVFIWLICIPIVNFSFSLNRFNSNL

SEQ ID NO: 857011 - protein, 464 aa, Homo sapiens
PSSSTFLLAEMAAAAARVVLSSAARRRLWGFSESLLIRGAAGRSLYFGENRLRSTQAATQVVLNVPETRVTCLESGLRVASEDSGLSTCTVGLWIDAGSRYENEKNNGTAHFLEHMAFKGTKKRSQLDLELEIENMGAHLNAYTSREQTVYYAKAFSKDLPRAVEILADIIQNSTLGEAEIERERGVILREMQEVETNLQEVVFDYLHATAYQNTALGRTILGPTENIKSISRKDLVDYITTHYKGPRIVLAAAGGVSHDELLDLAKFHFGDSLCTHKGEIPALPPCKFTGSEIRVRDDKMPLAHLAIAVEAVGWAHPDTICLMVANTLIGNWDRSFGGGMNLSSKLAQLTCHGNLCHSFQSFNTSYTDTGLWGLYMVCESSTVADMLHVVQKEWMRLCTSVTESEVARARNLLKTNMLLQLDGSTPICEDIGRQMLCYNRRIPIPELEARIDVSSPELLLGHV

SEQ ID NO: 857012 - protein, 455 aa, Homo sapiens; identical to SEQ ID NO: 857010

SEQ ID NO: 857013 - protein, 308 aa, Homo sapiens
PSSSTFLLAEMAAAAARVVLSSAARRRLWGFSESLLIRGAAGRSLYFGENRLRSTQAATQVVLNVPETRVTCLESGLRVASEDSGLSTCTVGLWIDAGSRYENEKNNGTAHFLEHMAFKGTKKRSQLDLELEIENMGAHLNAYTSREQTVYYAKAFSKDLPRAVEILADIIQNSTLGEAEIERERGVILREMQEVETNLQEVVFDYLHATAYQNTALGRTILGPTENIKSISRKDLVDYITTHYKGPRIVLAAAGGVSHDELLDLAKFHFGDSLCTPLLTESRLDKYQGPPPSNMETSPPKKELRLVC

SEQ ID NO: 857014 - protein, 117 aa, Homo sapiens
TLLGSPVGQKEWMRLCTSVTESEVARARNLLKTNMLLQLDGSTPICEDIGRQMLCYNRRIPIPELEARIDAVNAETIREVCTKYIYNRSPAIAAVGKPGFFSSMQKVGQVLLINSSF

SEQ ID NO: 857015 - protein, 500 aa, Homo sapiens
PSSSTFLLAEMAAAAARVVLSSAARRRLWGFSESLLIRGAAGRSLYFGENRLRSTQAATQVVLNVPETRVTCLESGLRVASEDSGLSTCTVGLWIDAGSRYENEKNNGTAHFLEHMAFKGTKKRSQLDLELEIENMGAHLNAYTSREQTVYYAKAFSKDLPRAVEILADIIQNSTLGEAEIERERGVILREMQEVETNLQEVVFDYLHATAYQNTALGRTILGPTENIKSISRKDLVDYITTHYKGPRIVLAAAGGVSHDELLDLAKFHFGDSLCTHKGEIPALPPCKFTGSEIRVRDDKMPLAHLAIAVEAVGWAHPDTICLMVANTLIGNWDRSFGGGMNLSSKLAQLTCHGNLCHSFQSFNTSYTDTGLWGLYMVCESSTVADMLHVVQKEWMRLCTSVTESEVARARNLLKTNMLLQLDGSTPICEDIGRQMLCYNRRIPIPELEARIDAVNAETIREVCTKYIYNRSPAIAAVGKPGFFSSMQKVGQVLLINSSF

SEQ ID NO: 857016 - protein, 236 aa, Homo sapiens
PSSSTFLLAEMAAAAARVVLSSAARRRLWGFSESLLIRGAAGRSLYFGENRLRSTQAATQVVLNVPETRVTCLESGLRVASEDSGLSTCTVGLWIDAGSRYENEKNNGTAHFLEHMAFKGTKKRSQLDLELEIENMGAHLNAYTSREQTVYYAKAFSKDLPRAVEILADIIQNSTLGEAEIERERGVILREMQEVETNLQEVVFDYLHATAYRGLRDIYPPLRGKIVLLLLRCFHE

SEQ ID NO: 857017 - protein, 499 aa, Homo sapiens; identical to SEQ ID NO: 857005

SEQ ID NO: 857018 - protein, 500 aa, Homo sapiens; identical to SEQ ID NO: 857015

SEQ ID NO: 857019 - protein, 455 aa, Homo sapiens; identical to SEQ ID NO: 857010

SEQ ID NO: 857020 - protein, 260 aa, Homo sapiens
PSSSTFLLAEMAAAAARVVLSSAARRRLWGFSESLLIRGAAGRSLYFGENRLRSTQAATQVVLNVPETRVTCLESGLRVASEDSGLSTCTVGLWIDAGSRYENEKNNGTAHFLEHMAFKGTKKRSQLDLELEIENMGAHLNAYTSREQTVYYAKAFSKDLPRAVEILADIIQNSTLGEAEIERERGVILREMQEVETNLQEVVFDYLHATAYQNTALGRTILGPTENIKSISRKDLVDYITTHYKGPRIVLAAAGDSCEG

SEQ ID NO: 857021 - protein, 242 aa, Homo sapiens
  misc_feature (3)..(3): Xaa can be any naturally occurring amino acid
ARXLRAECPVMLTCKFIRDSAPQGEYRLPPAIHRSEIRVRDDKMPLAHLAIAVEAVGWAHPDTICLMVANTLIGNWDRSFGGGMNLSSKLAQLTCHGNLCHSFQSFNTSYTDTGLWGLYMVCESSTVADMLHVVQKEWMRLCTSVTESEVARARNLLKTNMLLQLDGSTPICEDIGRQMLCYNRRIPIPELEARIDAVNAETIREVCTKYIYNRSPAIAAVGPIKQLPDFKQIRSNMCWLRD

SEQ ID NO: 857022 - protein, 378 aa, Homo sapiens
PSSSTFLLAEMAAAAARVVLSSAARRRLWGFSESLLIRGAAGRSLYFGENRLRSTQAATQVVLNVPETRVTCLESGLRVASEDSGLSTCTVGLLALMLEVDTTHEKAICSRPAAARRGVVIRGAGASESGGIQRRVYLTPESAAADRTTLLSVRDEHTDLTEAYHQACSTPNVVPATGSLQHHEVHKCRTTQRHLSSYALSRRETPRAFIESIASNAWNLLGIQHSLAKLLIPEHPCTHAYPSDTRPTSLCDAHNWNYQHSRQTPTGYRENPHAVRNSADTIGRHMRKINAGLALPTDPTAHYNPSQQKGDQNDGTTTTLPTQHYLHSYTVQLAPTCTSHHKTKIPQPNQSTQTPTTHNQHDHNPHIKQLGHPLHTSH

SEQ ID NO: 857023 - protein, 522 aa, Homo sapiens
MSSRPLESPPPYRPDEFKPNHYAPSNDIYGGEMHVRPMLSQPAYSFYPEDEILHFYKWTSPPGVIRILSMLIIVMCIAIFACVASTLAWDRGYGTSLLGGSVGYPYGGSGFGSYGSGYGYGYGYGYGYGGYTDPRAAKGFMLAMAAFCFIAALVIFVTSVIRSEMSRTRRYYLSVIIVSAILGIMVFIATIVYIMGVNPTAQSSGSLYGSQIYALCNQFYTPAATGLYVDQYLYHYCVVDPQEAIAIVLGFMIIVAFALIIFFAVKTRRKMDRYDKSNILWDKEHIYDEQPPNVEEWVKNVSAGTQDVPSPPSDYVERVDSPMAYSSNGKVNDKRFYPESSYKSTPVPEVVQELPLTSPVDDFRQPRYSSGGNFETPSKRAPAKGRAGRSKRTEQDHYETDYTTGGESCDELEEDWIREYPPITSDQQRQLYKRNFDTGLQEYKSLQSELDEINKELSRLDKELDDYREESEEYMAAADEYNRLKQVKGSADYKSKKNHCKQLKSKLSHIKKMVGDYDRQKT

SEQ ID NO: 857024 - protein, 522 aa, Homo sapiens; identical to SEQ ID NO: 857023

SEQ ID NO: 857025 - protein, 522 aa, Homo sapiens; identical to SEQ ID NO: 857023

SEQ ID NO: 857026 - protein, 779 aa, Homo sapiens
RRPRAAGPGMEKRAAAGLEGAPGARAQLAVVCLVNIFLTGRLSSAVPALAACSGKLEQHTERRGVIYSPAWPLNYPPGTNCSWYIQGDRGDMITISFRNFDVEESHQCSLDWLLLGPAAPPRQEAFRLCGSAIPPAFISARDHVWIFFHSDASSSGQAQGFRLSYIRGKLGQASCQADEFRCDNGKCLPGPWQCNTVDECGDGSDEGNCSAPASEPPGSLCPGGTFPCSGARSTRCLPVERRCDGLQDCGDGSDEAGCPDLACGRRLGSFYGSFASPDLFGAARGPSDLHCTWLVDTQDSRRVLLQLELRLGYDDYVQVYEGLGERGDRLLQTLSYRSNHRPVSLEAAQGRLTVAYHARARSAGHGFNATYQVKGYCLPWEQPCGSSSDSDGGSLGDQGCFSEPQRCDGWWHCASGRDEQGCPACPPDQYPCEGGSGLCYTPADRCNNQKSCPDGADEKNCFSCQPGTFHCGTNLCIFETWRCDGQEDCQDGSDEHGCLAAVPRKVITAALIGSLVCGLLLVIALGCAFKLYSLRTQEYRAFETQMTRLEAEFVRREAPPSYGQLIAQGLIPPVEDFPVYSASQASVLQNLRTAMRRQMRRHASRRGPSRRRLGRLWNRLFHRPRAPRGQIPLLTAARPSQTVLGDGFLQPAPGAAPDPPAPLMDTGSTRAAGDRPPSAPGRAPEVGPSGPPLPSGLRDPECRPVDKDRKVCREPLADGPAPADAPREPCSAQDPHPQVSTASSTLGPHSPEPLGVCRNPPPPCSPMLEASDDEALLVC

SEQ ID NO: 857027 - protein, 67 aa, Homo sapiens
APAGPVTPRPMWPRAPYGPAPPPHKDASGAAACTRAAAATPAGARHFTLQIPNLFLKIMFKTYGKNK

SEQ ID NO: 857028 - protein, 779 aa, Homo sapiens; identical to SEQ ID NO: 857026

SEQ ID NO: 857029 - protein, 566 aa, Homo sapiens
SPRRARDAAARCGRARPTGLHRHRTKTPREPPPAPGPQQPRQAGCPDLACGRRLGSFYGSFASPDLFGAARGPSDLHCTWLVDTQDSRRVLLQLELRLGYDDYVQVYEGLGERGDRLLQTLSYRSNHRPVSLEAAQGRLTVAYHARARSAGHGFNATYQVKGYCLPWEQPCGSSSDSDGGSLGDQGCFSEPQRCDGWWHCASGRDEQGCPACPPDQYPCEGGSGLCYTPADRCNNQKSCPDGADEKNCFSCQPGTFHCGTNLCIFETWRCDGQEDCQDGSDEHGCLAAVPRKVITAALIGSLVCGLLLVIALGCAFKLYSLRTQEYRAFETQMTRLEAEFVRREAPPSYGQLIAQGLIPPVEDFPVYSASQASVLQNLRTAMRRQMRRHASRRGPSRRRLGRLWNRLFHRPRAPRGQIPLLTAARPSQTVLGDGFLQPAPGAAPDPPAPLMDTGSTRAAGDRPPSAPGRAPEVGPSGPPLPSGLRDPECRPVDKDRKVCREPLADGPAPADAPREPCSAQDPHPQVSTASSTLGPHSPEPLGVCRNPPPPCSPMLEASDDEALLVC

SEQ ID NO: 857030 - protein, 243 aa, Homo sapiens
RRPRAAGPGMEKRAAAGLEGAPGARAQLAVVCLVNIFLTGRLSSAVPALAACSGKLEQHTERRGVIYSPAWPLNYPPGTNCSWYIQGDRGDMITISPHRPCWAMASSSLLQGLPPTPQHRSWTQAAPGRPETGPPVPPAVHRRWDLQGHPCPRACETQSAGPWTRTERSAGSHWQTAQLLQMHLGSPAQPRTRTPRSPLPAAPWAPTRQSHWGSAGTPRPPAPQCWRPAMMRPCWSVDRWARW

SEQ ID NO: 857031 - protein, 96 aa, Homo sapiens
RRPRAAGPGMEKRAAAGLEGAPGARAQLAVVCLVNIFLTGRLSSAVPALAACSGKLEQHTERRGVIYSPAWPLNYPPGTNCSWYIQGDRGDMITIR

SEQ ID NO: 857032 - protein, 70 aa, Homo sapiens
RRPRAAGPGMEKRAAAGLEGAPGARAQLAVVCLVNIFLTGRLSSAVPALEVSKHFLSFLHSFSPFWVSGP

SEQ ID NO: 857033 - protein, 127 aa, Homo sapiens
PLALELHWPLQGHCGGDQAPLRTATSPPGTNCSWYIQGDRGDMITISFRNFDVEESHQCSLDWLLLGPAAPPRQEAFRLCGSAIPPAFISARDHVWIFFHSDASSSGQAQGFRLSYIRGDGGCRAGR

SEQ ID NO: 857034 - protein, 762 aa, Homo sapiens
MGPASHGPHLYTPSPPNKRLARRLLGQLFWLLPACSGKLEQHTERRGVIYSPAWPLNYPPGTNCSWYIQGDRGDMITISFRNFDVEESHQCSLDWLLLGPAAPPRQEAFRLCGSAIPPAFISARDHVWIFFHSDASSSGQAQGFRLSYIRGKLGQASCQADEFRCDNGKCLPGPWQCNTVDECGDGSDEGNCSAPASEPPGSLCPGGTFPCSGARSTRCLPVERRCDGLQDCGDGSDEAGCPDLACGRRLGSFYGSFASPDLFGAARGPSDLHCTWLVDTQDSRRVLLQLELRLGYDDYVQVYEGLGERGDRLLQTLSYRSNHRPVSLEAAQGRLTVAYHARARSAGHGFNATYQVKGYCLPWEQPCGSSSDSDGGSLGDQGCFSEPQRCDGWWHCASGRDEQGCPACPPDQYPCEGGSGLCYTPADRCNNQKSCPDGADEKNCFSCQPGTFHCGTNLCIFETWRCDGQEDCQDGSDEHGCLAAVPRKVITAALIGSLVCGLLLVIALGCAFKLYSLRTQEYRAFETQMTRLEAEFVRREAPPSYGQLIAQGLIPPVEDFPVYSASQASVLQNLRTAMRRQMRRHASRRGPSRRRLGRLWNRLFHRPRAPRGQIPLLTAARPSQTVLGDGFLQPAPGAAPDPPAPLMDTGSTRAAGDRPPSAPGRAPEVGPSGPPLPSGLRDPECRPVDKDRKVCREPLADGPAPADAPREPCSAQDPHPQVSTASSTLGPHSPEPLGVCRNPPPPCSPMLEASDDEALLVC

SEQ ID NO: 857035 - protein, 592 aa, Homo sapiens
RRPRAAGPGMEKRAAAGLEGAPGARAQLAVVCLVNIFLTGRLSSAVPALAACSGKLEQHTERRGVIYSPAWPLNYPPGTNCSWYIQGDRGDMITISFRNFDVEESHQCSLDWLLLGPAAPPRQEAFRLCGSAIPPAFISARDHVWIFFHSDASSSGQAQGFRLSYIRGKLGQASCQADEFRCDNGKCLPGPWQCNTVDECGDGSDEGNCSAPASEPPGSLCPGGTFPCSGARSTRCLPVERRCDGLQDCGDGSDEAGCPDLACGRRLGSFYGSFASPDLFGAARGPSDLHCTWLVDTQDSRRVLLQLELRLGYDDYVQVYEGLGERGDRLLQTLSYRSNHRPVSLEAAQGRLTVAYHARARSAGHGFNATYQVKGYCLPWEQPCGSSSDSDGGSLGDQGCFSEPQRCDGWWHCASGRDEQGCPACPPDQYPCEGGSGLCYTPADRCNNQKSCPDGADEKNCFSCQPGTFHCGTNLCIFETWRCDGQEDCQDGSDEHGCLAAVPRKVITAALIGSLVCGLLLVIALGCAFKLYSLRTQEYRTRTPRSPLPAAPWAPTRQSHWGSAGTPRPPAPQCWRPAMMRPCWSVDRWARW

SEQ ID NO: 857036 - protein, 168 aa, Homo sapiens
AAPAGGRARHGEARGRGAGGRAGRPGAAGRRLSGEHLSHRETQQCGSCLRPLMDTGSTRAAGDRPPSAPGRAPEVGPSGPPLPSGLRDPECRPVDKDRKVCREPLADGPAPADAPREPCSAQDPHPQVSTASSTLGPHSPEPLGVCRNPPPPCSPMLEASDDEALLVC

SEQ ID NO: 857037 - protein, 416 aa, Homo sapiens
MSGHRSTRKRCGDSHPESPVGFGHMSTTGCVLNKLFQLPTPPLSRHQLKRLEEHRYQSAGRSLLEPLMQGYWEWLVRRVPSWIAPNLITIIGLSINICTTILLVFYCPTATEQAPLWAYIACACGLFIYQSLDAIDGKQARRTNSSSPLGELFDHGCDSLSTVFVVLGTCIAVQLGTNPDWMFFCCFAGTFMFYCAHWQTYVSGTLRFGIIDVTEVQIFIIIMHLLAVIGGPPFWQSMIPVLNIQMKIFPALCTVAGTIFSCTNYFRVIFTGGVGKNGSTIAGTSVLSPFLHIGSVITLAAMIYKKSAVQLFEKHPCLYILTFGFVSAKITNKLVVAHMTKSEMHLHDTAFIGPALLFLDQYFNSFIDEYIVLWIALVFSFFDLIRYCVSVCNQIASHLHIHVFRIKVSTAHSNHH

SEQ ID NO: 857038 - protein, 416 aa, Homo sapiens; identical to SEQ ID NO: 857037

SEQ ID NO: 857039 - protein, 416 aa, Homo sapiens; identical to SEQ ID NO: 857037

SEQ ID NO: 857040 - protein, 416 aa, Homo sapiens; identical to SEQ ID NO: 857037

SEQ ID NO: 857041 - protein, 194 aa, Homo sapiens
MHLLAVIGGPPFWQSMIPVLNIQMKIFPALCTVAGTIFSCTNYFRVIFTGGVGKNGSTIAGTSVLSPFLHIGSVITLAAMIYKKSAVQLFEKHPCLYILTFGFVSAKITNKLVVAHMTKSEMHLHDTAFIGPALLFLDQYFNSFIDEYIVLWIALVFSFFDLIRYCVSVCNQIASHLHIHVFRIKVSTAHSNHH

SEQ ID NO: 857042 - protein, 416 aa, Homo sapiens; identical to SEQ ID NO: 857037

SEQ ID NO: 857043 - protein, 117 aa, Homo sapiens [sequence omitted]

SEQ ID NO: 857044 - protein, 416 aa, Homo sapiens; identical to SEQ ID NO: 857037

SEQ ID NO: 857045 - protein, 286 aa, Homo sapiens [sequence omitted]

SEQ ID NO: 857046 - protein, 392 aa, Homo sapiens [sequence omitted]

SEQ ID NO: 857047 - protein, 155 aa, Homo sapiens
MRHSLNLHRYTGVGKNGSTIAGTSVLSPFLHIGSVITLAAMIYKKSAVQLFEKHPCLYILTFGFVSAKITNKLVVAHMTKSEMHLHDTAFIGPALLFLDQYFNSFIDEYIVLWIALVFSFFDLIRYCVSVCNQIASHLHIHVFRIKVSTAHSNHH

SEQ ID NO: 857048 - protein, 210 aa, Homo sapiens [sequence omitted]

SEQ ID NO: 857049 - protein, 873 aa, Homo sapiens
MEQWRQCGRWLIDCKVLPPNHRVVWPSAVVFDLAQALRDGVLLCQLLHNLSPGSIDLKDINFRPQMSQFLCLKNIRTFLKVCHDKFGLRNSELFDPFDLFDVRDFGKVISAVSRLSLHSIAQNKGIRPFPSEETTENDDDVYRSLEELADEHDLGEDIYDCVPCEDGGDDIYEDIIKVEVQQPMIRYMQKMGMTEDDKRNCCLLEIQETEAKYYRTLEDIEKNYMSPLRLVLSPADMAAVFINLEDLIKVHHSFLRAIDVSVMVGGSTLAKVFLDFKERLLIYGEYCSHMEHAQNTLNQLLASREDFRQKVEECTLKVQDGKFKLQDLLVVPMQRVLKYHLLLKELLSHSAERPERQQLKEALEAMQDLAMYINEVKRDKETLRKISEFQSSIENLQVKLEEFGRPKIDGELKVRSIVNHTKQDRYLFLFDKVVIVCKRKGYSYELKEIIELLFHKMTDDPMNNKDVKKWSYGFYLIHLQGKQGFQFFCKTEDMKRKWMEQFEMAMSNIKPDKANANHHSFQMYTFDKTTNCKACKMFLRGTFYQGYMCTKCGVGAHKECLEVIPPCKFTSPADLDASGAGPGPKMVAVQNYHGNPAPPGKPVLTFQTGDVLELLRGDPESPWWEGRLVQTRKSGYFPSSSVKPCPVDGRPPISRPPSREIDYTAYPWFAGNMERQQTDNLLKSHASGTYLIRERPAEAERFAISIKFNDEVKHIKVVEKDNWIHITEAKKFDSLLELVEYYQCHSLKESFKQLDTTLKYPYKSRERSASRASSRSPASCASYNFSFLSPQGLSFASQGPSAPFWSVFTPRVIGTAVARYNFAARDMRELSLREGDVVRIYSRIGGDQGWWKGETNGRIGWFPSTYVEEEGIQ

SEQ ID NO: 857050 - protein, 349 aa, Homo sapiens
MEQWRQCGRWLIDCKVLPPNHRVVWPSAVVFDLAQALRDGVLLCQLLHNLSPGSIDLKDINFRPQMSQFLCLKNIRTFLKVCHDKFGLRNSELFDPFDLFDVRDFGKVISAVSRLSLHSIAQNKGIRPFPSEETTENDDDVYRSLEELADEHDLGEDIYDCVPCEDGGDDIYEDIIKVEVQQPMIRYMQKMGMTEDDKRNCCLLEIQETEAKYYRTLEDIEKNYMSPLRLVLSPADMAAVFINLEGKRRVSLGESTLGPPCRGTPSTLRPAAQQARRMAGRKPAAPVFTVVRKVLCFGFGVFVLFVFCLACLFFKGKKVCNYFIQISRYISVNNKRFYNSKKMMYILVC

SEQ ID NO: 857051 - protein, 844 aa, Homo sapiens
MEQWRQCGRWLIDCKVLPPNHRVVWPSAVVFDLAQALRDGVLLCQLLHNLSPGSIDLKDINFRPQMSQFLCLKNIRTFLKVCHDKFGLRNSELFDPFDLFDVRDFGKVISAVSRLSLHSIAQNKGIRPFPSEETTENDDDVYRSLEELADEHDLGEDIYDCVPCEDGGDDIYEDIIKVEVQQPMIRYMQKMGMTEDDKRNCCLLEIQETEAKYYRTLEDIEKNYMSPLRLVLSPADMAAVFINLEDLIKVHHSFLRAIDVSVMVGGSTLAKVFLDFKERLLIYGEYCSHMEHAQNTLNQLLASREDFRQKVEECTLKVQDGKFKLQDLLVVPMQRVLKYHLLLKELLSHSAERPERQQLKEALEAMQDLAMYINEVKRDKETLRKISEFQSSIENLQVKLEEFGRPKIDGELKVRSIVNHTKQDRYLFLFDKVVIVCKRKGYSYELKEIIELLFHKMTDDPMNNKDVKKWSYGFYLIHLQGKQGFQFFCKTEDMKRKWMEQFEMAMSNIKPDKANANHHSFQMYTFDKTTNCKACKMFLRGTFYQGYMCTKCGVGAHKECLEVIPPCKFTSPADLDASGAGPGPKMVAVQNYHGNPAPPGKPVLTFQTGDVLELLRGDPESPWWEGRLVQTRKSGYFPSSSVKPCPVDGRPPISRPPSREIDYTAYPWFAGNMERQQTDNLLKSHASGTYLIRERPAEAERFAISIKFNDEVKHIKVVEKDNWIHITEAKKFDSLLELVEYYQCHSLKESFKQLDTTLKYPYKSRERSASRASSRSPVFTPRVIGTAVARYNFAARDMRELSLREGDVVRIYSRIGGDQGWWKGETNGRIGWFPSTYVEEEGIQ

SEQ ID NO: 857052 - protein, 131 aa, Homo sapiens
CSLWAHLPHCARAREERALWSPSAATLAPKTSLTPPLPSLPGAHPDPTRQAPLLGGAFGMMKFQPCCPVSGTVSCPLSERPFLESWEGVCLAALPDQYIFCKNPEMGREENRDFPSLDPCQVPLQEAPLLS

SEQ ID NO: 857053 - protein, 634 aa, Homo sapiens
MEQWRQCGRWLIDCKVLPPNHRVVWPSAVVFDLAQALRDGVLLCQLLHNLSPGSIDLKDINFRPQMSQFLCLKNIRTFLKVCHDKFGLRNSELFDPFDLFDVRDFGKVISAVSRLSLHSIAQNKGIRPFPSEETTENDDDVYRSLEELADEHDLGEDIYDCVPCEDGGDDIYEDIIKVEVQQPMIRYMQKMGMTEDDKRNCCLLEIQETEAKYYRTLEDIEKNYMSPLRLVLSPADMAAVFINLEDLIKVHHSFLRAIDVSVMVGGSTLAKVFLDFKERLLIYGEYCSHMEHAQNTLNQLLASREDFRQKVEECTLKVQDGKFKLQDLLVVPMQRVLKYHLLLKELLSHSAERPERQQLKEALEAMQDLAMYINEVKRDKETLRKISEFQSSIENLQVKLEEFGRPKIDGELKVRSIVNHTKQDRYLFLFDKVVIVCKRKGYSYELKEIIELLFHKMTDDPMNNKDVKKWSYGFYLIHLQGKQGFQFFCKTEDMKRKWMEQFEMAMSNIKPDKANANHHSFQMYTFDKTTNCKACKMFLRGTFYQGYMCTKCGVGAHKECLEVIPPCKFTYSCTSGRLRKPGPGPKDWWPCRNYNGQPDPPRKLWLTFRREKCELLRGNRFRGEGPGKTEPGYP

SEQ ID NO: 857054 - protein, 124 aa, Homo sapiens
DLDVLCPQTQRARGPGIGGQCVPPEPFCLTSFLSGYRAGFWAPGERPSLAQGPPGSLVGLLLQLCDAAQSPSTVFTPRVIGTAVARYNFAARDMRELSLREGDVVRIYSRIGGDQGWWKGETNG

SEQ ID NO: 857055 - protein, 46 aa, Homo sapiens
MHGPQSKSSLPSSLCSVLLLQIWTPPERDQVSLLDLGPLLSPMSAI

SEQ ID NO: 857056 - protein, 131 aa, Homo sapiens; identical to SEQ ID NO: 857052

SEQ ID NO: 857057 - protein, 167 aa, Homo sapiens
CSLWAHLPHCARAREERALWSPSAATLAPKTSLTPPLPSLPGAHPDPTRQAPLLGGAFGMMKFQPCCPVSGTVSCPLSERPFLESWEGVCLAALPDQYIFCKNPVFTVVRKVLCFGFGVFVLFVFCLACLFFKGKKVCNYFIQISRYISVNNKRFYNSKKMMYILVC

SEQ ID NO: 857058 - protein, 510 aa, Homo sapiens
MAHTCSPSYSGGCGKRIIWPERQQLKEALEAMQDLAMYINEVKRDKETLRKISEFQSSIENLQVKLEEFGRPKIDGELKVRSIVNHTKQDRYLFLFDKVVIVCKRKGYSYELKEIIELLFHKMTDDPMNNKDVKKWSYGFYLIHLQGKQGFQFFCKTEDMKRKWMEQFEMAMSNIKPDKANANHHSFQMYTFDKTTNCKACKMFLRGTFYQGYMCTKCGVGAHKECLEVIPPCKFTSPADLDASGAGPGPKMVAVQNYHGNPAPPGKPVLTFQTGDVLELLRGDPESPWWEGRLVQTRKSGYFPSSSVKPCPVDGRPPISRPPSREIDYTAYPWFAGNMERQQTDNLLKSHASGTYLIRERPAEAERFAISIKFNDEVKHIKVVEKDNWIHITEAKKFDSLLELVEYYQCHSLKESFKQLDTTLKYPYKSRERSASRASSRSPVFTPRVIGTAVARYNFAARDMRELSLREGDVVRIYSRIGGDQGWWKGETNGRIGWFPSTYVEEEGIQ

SEQ ID NO: 857059 - protein, 91 aa, Homo sapiens
RAGLDGHGGPRVLPCRPDLRLRGVACLLNAQALGVLQLCDEKAGGGGGYTLGCGAGLPASTSIQAWLLTPQPWDGGFRHLSEPISSLRKQE

SEQ ID NO: 857060 - protein, 49 aa, Homo sapiens
MVAVQNYHGNPAPPGKPVLTFQTGDVLELLRGDPESPWWEVGPGAREGR

SEQ ID NO: 857061 - protein, 105 aa, Homo sapiens
LGCREEAGGVMGMGSGRGREGPSTKAWEMRGGGGRAGEAKSQPWREHPGASVSGYTQHFATCGPAGAEDGGEEASSPCVYCRQKGLVFWFWGFCFVCVLFGLFVF

SEQ ID NO: 857062 - protein, 1374 aa, Homo sapiens
MMQGNTCHRMSFHPGRGCPRGRGGHGARPSAPSFRPQNLRLLHPQQPPVQYQYEPPSAPSTTFSNSPAPNFLPPRPDFVPFPPPMPPSAQGPLPPCPIRPPFPNHQMRHPFPVPPCFPPMPPPMPCPNNPPVPGAPPGQGTFPFMMPPPSMPHPPPPPVMPQQVNYQYPPGYSHHNFPPPSFNSFQNNPSSFLPSANNSSSPHFRHLPPYPLPKAPSERRSPERLKHYDDHRHRDHSHGRGERHRSLDRRERGRSPDRRRQDSRYRSDYDRGRTPSRHRSYERSRERERERHRHRDNRRSPSLERSYKKEYKRSGRSYGLSVVPEPAGCTPELPGEIIKNTDSWAPPLEIVNHRSPSREKKRARWEEEKDRWSDNQSSGKDKNYTSIKEKEPEETMPDKNEEEEEELLKPVWIRCTHSENYYSSDPMDQVGDSTVVGTSRLRDLYDKFEEELGSRQEKAKAARPPWEPPKTKLDEDLESSSESECESDEDSTCSSSSDSEVFDVIAEIKRKKAHPDRLHDELWYNDPGQMNDGPLCKCSAKARRTGIRHSIYPGEEAIKPCRPMTNNAGRLFHYRITVSPPTNFLTDRPTVIEYDDHEYIFEGFSMFAHAPLTNIPLCKVIRFNIDYTIHFIEEMMPENFCVKGLELFSLFLFRDILELYDWNLKGPLFEDSPPCCPRFHFMPRFVRFLPDGGKEVLSMHQILLYLLRCSKALVPEEEIANMLQWEELEWQKYAEECKGMIVTNPGTKPSSVRIDQLDREQFNPDVITFPIIVHFGIRPAQLSYAGDPQYQKLWKSYVKLRHLLANSPKVKQTDKQKLAQREEALQKIRQKNTMRREVTVELSSQGFWKTGIRSDVCQHAMMLPVLTHHIRYHQCLMHLDKLIGYTFQDRCLLQLAMTHPSHHLNFGMNPDHARNSLSNCGIRQPKYGDRKVHHMHMRKKGINTLINIMSRLGQDDPTPSRINHNERLEFLGDAVVEFLTSVHLYYLFPSLEEGGLATYRTAIVQNQHLAMLAKKLELDRFMLYAHGPDLCRESDLRHAMANCFEALIGAVYLEGSLEEAKQLFGRLLFNDPDLREVWLNYPLHPLQLQEPNTDRQLIETSPVLQKLTEFEEAIGVIFTHVRLLARAFTLRTVGFNHLTLGHNQRMEFLGDSIMQLVATEYLFIHFPDHHEGHLTLLRSSLVNNRTQAKVAEELGMQEYAITNDKTKRPVALRTKTLADLLESFIAALYIDKDLEYVHTFMNVCFFPRLKEFILNQDWNDPKSQLQQCCLTLRTEGKEPDIPLYKTLQTVGPSHARTYTVAVYFKGERIGCGKGPSIQQAEMGAAMDALEKYNFPQMAHQKRFIERKYRQELKEMRWEREHQEREPDETEDIKK

SEQ ID NO: 857063 - protein, 211 aa, Homo sapiens
MHVYVRYLPDGGKEVLSMHQILLYLLRCSKALVPEEEIANMLQWEELEWQKYAEECKGMIVTNPGTKPSSVRIDQLDREQFNPDVITFPIIVHFGIRPAQYQKLWKSYVKLRHLLANSPKVKQTDKQKLAQREEALQKIRQKNTMRREVTVELSSQGFWKTGIRSDVCQHAMMLPVLTHHIRYHQCLMHLDKLIGYTFQDRCLLQVRIILL

SEQ ID NO: 857064 - protein, 1374 aa, Homo sapiens; identical to SEQ ID NO: 857062

SEQ ID NO: 857065 - protein, 1374 aa, Homo sapiens; identical to SEQ ID NO: 857062

SEQ ID NO: 857066 - protein, 863 aa, Homo sapiens
TLEDPEASTELWYNDPGQMNDGPLCKCSAKARRTGIRHSIYPGEEAIKPCRPMTNNAGRLFHYRITVSPPTNFLTDRPTVIEYDDHEYIFEGFSMFAHAPLTNIPLCKVIRFNIDYTIHFIEEMMPENFCVKGLELFSLFLFRDILELYDWNLKGPLFEDSPPCCPRFHFMPRFVRFLPDGGKEVLSMHQILLYLLRCSKALVPEEEIANMLQWEELEWQKYAEECKGMIVTNPGTKPSSVRIDQLDREQFNPDVITFPIIVHFGIRPAQLSYAGDPQYQKLWKSYVKLRHLLANSPKVKQTDKQKLAQREEALQKIRQKNTMRREVTVELSSQGFWKTGIRSDVCQHAMMLPVLTHHIRYHQCLMHLDKLIGYTFQDRCLLQLAMTHPSHHLNFGMNPDHARNSLSNCGIRQPKYGDRKVHHMHMRKKGINTLINIMSRLGQDDPTPSRINHNERLEFLGDAVVEFLTSVHLYYLFPSLEEGGLATYRTAIVQNQHLAMLAKKLELDRFMLYAHGPDLCRESDLRHAMANCFEALIGAVYLEGSLEEAKQLFGRLLFNDPDLREVWLNYPLHPLQLQEPNTDRQLIETSPVLQKLTEFEEAIGVIFTHVRLLARAFTLRTVGFNHLTLGHNQRMEFLGDSIMQLVATEYLFIHFPDHHEGHLTLLRSSLVNNRTQAKVAEELGMQEYAITNDKTKRPVALRTKTLADLLESFIAALYIDKDLEYVHTFMNVCFFPRLKEFILNQDWNDPKSQLQQCCLTLRTEGKEPDIPLYKTLQTVGPSHARTYTVAVYFKGERIGCGKGPSIQQAEMGAAMDALEKYNFPQMAHQKRFIERKYRQELKEMRWEREHQEREPDETEDIKK

SEQ ID NO: 857067 - protein, 1180 aa, Homo sapiens
RERERTSLEHNFPPPSFNSFQNNPSSFLPSANNSSSPHFRHLPPYPLPKAPSERRSPERLKHYDDHRHRDHSHGRGERHRSLDRRERGRSPDRRRQDSRYRSDYDRGRTPSRHRSYERSSRSPSREKKRARWEEEKDRWSDNQSSGKDKNYTSIKEKEPEETMPDKNEEEEEELLKPVWIRCTHSENYYSSDPMDQVGDSTVVGTSRLRDLYDKFEEELGSRQEKAKAARPPWEPPKTKLDEDLESSSESECESDEDSTCSSSSDSEVFDVIAEIKRKKAHPDRLHDELWYNDPGQMNDGPLCKCSAKARRTGIRHSIYPGEEAIKPCRPMTNNAGRLFHYRITVSPPTNFLTDRPTVIEYDDHEYIFEGFSMFAHAPLTNIPLCKVIRFNIDYTIHFIEEMMPENFCVKGLELFSLFLFRDILELYDWNLKGPLFEDSPPCCPRFHFMPRFVRFLPDGGKEVLSMHQILLYLLRCSKALVPEEEIANMLQWEELEWQKYAEECKGMIVTNPGTKPSSVRIDQLDREQFNPDVITFPIIVHFGIRPAQLSYAGDPQYQKLWKSYVKLRHLLANSPKVKQTDKQKLAQREEALQKIRQKNTMRREVTVELSSQGFWKTGIRSDVCQHAMMLPVLTHHIRYHQCLMHLDKLIGYTFQDRCLLQLAMTHPSHHLNFGMNPDHARNSLSNCGIRQPKYGDRKVHHMHMRKKGINTLINIMSRLGQDDPTPSRINHNERLEFLGDAVVEFLTSVHLYYLFPSLEEGGLATYRTAIVQNQHLAMLAKKLELDRFMLYAHGPDLCRESDLRHAMANCFEALIGAVYLEGSLEEAKQLFGRLLFNDPDLREVWLNYPLHPLQLQEPNTDRQLIETSPVLQKLTEFEEAIGVIFTHVRLLARAFTLRTVGFNHLTLDGVSSCCQAGLKLLGSSDPPASASQSTGIRGMSHCSRPEGHNQRMEFLGDSIMQLVATEYLFIHFPDHHEGHLTLLRSSLVNNRTQAKVAEELGMQEYAITNDKTKRPVALRTKTLADLLESFIAALYIDKDLEYVHTFMNVCFFPRLKEFILNQDWNDPKSQLQQCCLTLRTEGKEPDIPLYKTLQTVGPSHARTYTVAVYFKGERIGCGKGPSIQQAEMGAAMDALEKYNFPQMAHQKRFIERKYRQELKEMRWEREHQEREPDETEDIKK

SEQ ID NO: 857068 - protein, 229 aa, Homo sapiens
MEFLGDSIMQLVATEYLFIHFPDHHEGHLTLLRSSLVNNRTQAKVAEELGMQEYAITNDKTKRPVALRTKTLADLLESFIAALYIDKDLEYVHTFMNVCFFPRLKEFILNQDWNDPKSQLQQCCLTLRTEGKEPDIPLYKTLQTVGPSHARTYTVAVYFKGERIGCGKGPSIQQAEMGAAMDALEKYNFPQMAHQKRFIERKYRQELKEMRWEREHQEREPDETEDIKK

SEQ ID NO: 857069 - protein, 1169 aa, Homo sapiens
RERERTSLEHNFPPPSFNSFQNNPSSFLPSANNSSSPHFRHLPPYPLPKAPSERRSPERLKHYDDHRHRDHSHGRGERHRSLDRRERGRSPDRRRQDSRYRSDYDRGRTPSRHRSYERSSRSPSREKKRARWEEEKDRWSDNQSSGKDKNYTSIKEKEPEETMPDKNEEEEEELLKPVWIRCTHSENYYSSDPMDQVGDSTVVGTSRLRDLYDKFEEELGSRQEKAKAARPPWEPPKTKLDEDLESSSESECESDEDSTCSSSSDSEVFDVIAEIKRKKAHPDRLHDELWYNDPGQMNDGPLCKCSAKARRTGIRHSIYPGEEAIKPCRPMTNNAGRLFHYRITVSPPTNFLTDRPTVIEYDDHEYIFEGFSMFAHAPLTNIPLCKVIRFNIDYTIHFIEEMMPENFCVKGLELFSLFLFRDILELYDWNLKGPLFEDSPPCCPRFHFMPRFVRFLPDGGKEVLSMHQILLYLLRCSKALVPEEEIANMLQWEELEWQKYAEECKGMIVTNPGTKPSSVRIDQLDREQFNPDVITFPIIVHFGIRPAQLSYAGDPQYQKLWKSYVKLRHLLANSPKVKQTDKQKLAQREEALQKIRQKNTMRREVTVELSSQGFWKTGIRSDVCQHAMMLPVLTHHIRYHQCLMHLDKLIGYTFQDRCLLQLAMTHPSHHLNFGMNPDHARNSLSNCGIRQPKYGDRKVHHMHMRKKGINTLINIMSRLGQDDPTPSRINHNERLEFLGDAVVEFLTSVHLYYLFPSLEEGGLATYRTAIVQNQHLAMLAKKLELDRFMLYAHGPDLCRESDLRHAMANCFEALIGAVYLEGSLEEAKQLFGRLLFNDPDLREVWLNYPLHPLQLQEPNTDRQLIETSPVLQKLTEFEEAIGVIFTHVRLLARAFTLRTVGFNHLTLGHNQRMEFLGDSIMQLVATEYLFIHFPDHHEGHLTLLRSSLVNNRTQAKVAEELGMQEYAITNDKTKRPVALRTKTLADLLESFIAALYIDKDLEYVHTFMNVCFFPRLKEFILNQDWNDPKSQLQQCCLTLRTEGKEPDIPLYKTLQTVGPSHARTYTVAVYFKGERIGCGKGPSIQQAEMGAAMDALEKYNFPQMAHQKRFIERKYRQELKEMRWEREHQEREPDETEDEQSFSQQHLLFPDCIMITILIWCEMVSTLWL

SEQ ID NO: 857070 - protein, 1025 aa, Homo sapiens
RERERTSLEHNFPPPSFNSFQNNPSSFLPSANNSSSPHFRHLPPYPLPKAPSERRSPERLKHYDDHRHRDHSHGRGERHRSLDRRERGRSPDRRRQDSRYRSDYDRGRTPSRHRSYERSSRSPSREKKRARWEEEKDRWSDNQSSGKDKNYTSIKEKEPEETMPDKNEEEEEELLKPVWIRCTHSENYYSSDPMDQVGDSTVVGTSRLRDLYDKFEEELGSRQEKAKAARPPWEPPKTKLDEDLESSSESECESDEDSTCSSSSDSEVFDVIAEIKRKKAHPDRLHDELWYNDPGQMNDGPLCKCSAKARRTGIRHSIYPGEEAIKPCRPMTNNAGRLFHYRITVSPPTNFLTDRPTVIEYDDHEYIFEGFSMFAHAPLTNIPLCKVIRFNIDYTIHFIEEMMPENFCVKGLELFSLFLFRDILELYDWNLKGPLFEDSPPCCPRFHFMPRFVRFLPDGGKEVLSMHQILLYLLRCSKALVPEEEIANMLQWEELEWQKYAEECKGMIVTNPGTKPSSVRIDQLDREQFNPDVITFPIIVHFGIRPAQLSYAGDPQYQKLWKSYVKLRHLLANSPKVKQTDKQKLAQREEALQKIRQKNTMRREVTVELSSQGFWKTGIRSDVCQHAMMLPVLTHHIRYHQCLMHLDKLIGYTFQDRCLLQLAMTHPSHHLNFGMNPDHARNSLSNCGIRQPKYGDRKVHHMHMRKKGINTLINIMSRLGQDDPTPSRINHNERLEFLGDAVVEFLTSVHLYYLFPSLEEGGLATYRTAIVQNQHLAMLAKKLELDRFMLYAHGPDLCRESDLRHAMANCFEALIGAVYLEGSLEEAKQLFGRLLFNDPDLREVWLNYPLHPLQLQEPNTDRQLIETSPVLQKLTEFEEAIGVIFTHVRLLARAFTLRTVGFNHLTLDGVSSCCQAGLKLLGSSDPPASASQSTGIRGMSHCSRPEGHNQRMEFLGDSIMQLVATEYLFIHFPDHHEGHLTDSADSGPIPCPNLHCGCLFQGRKNRLWERTKYSASGNGSSNGCA

SEQ ID NO: 857071 - protein, 153 aa, Homo sapiens
AQITEQVRYSTACMPVLYSMNVCFFPRLKEFILNQDWNDPKSQLQQCCLTLRTEGKEPDIPLYKTLQTVGPSHARTYTVAVYFKGERIGCGKGPSIQQAEMGAAMDALEKYNFPQMAHQKRFIERKYRQELKEMRWEREHQEREPDETEDIKK

SEQ ID NO: 857072 - protein, 1141 aa, Homo sapiens
RERERTSLEHNFPPPSFNSFQNNPSSFLPSANNSSSPHFRHLPPYPLPKAPSERRSPERLKHYDDHRHRDHSHGRGERHRSLDRRERGRSPDRRRQDSRYRSDYDRGRTPSRHRSYERSSRSPSREKKRARWEEEKDRWSDNQSSGKDKNYTSIKEKEPEETMPDKNEEEEEELLKPVWIRCTHSENYYSSDPMDQVGDSTVVGTSRLRDLYDKFEEELGSRQEKAKAARPPWEPPKTKLDEDLESSSESECESDEDSTCSSSSDSEVFDVIAEIKRKKAHPDRLHDELWYNDPGQMNDGPLCKCSAKARRTGIRHSIYPGEEAIKPCRPMTNNAGRLFHYRITVSPPTNFLTDRPTVIEYDDHEYIFEGFSMFAHAPLTNIPLCKVIRFNIDYTIHFIEEMMPENFCVKGLELFSLFLFRDILELYDWNLKGPLFEDSPPCCPRFHFMPRFVRFLPDGGKEVLSMHQILLYLLRCSKALVPEEEIANMLQWEELEWQKYAEECKGMIVTNPGTKPSSVRIDQLDREQFNPDVITFPIIVHFGIRPAQLSYAGDPQYQKLWKSYVKLRHLLANSPKVKQTDKQKLAQREEALQKIRQKNTMRREVTVELSSQGFWKTGIRSDVCQHAMMLPVLTHHIRYHQCLMHLDKLIGYTFQDRCLLQLAMTHPSHHLNFGMNPDHARNSLSNCGIRQPKYGDRKVHHMHMRKKGINTLINIMSRLGQDDPTPSRINHNERLEFLGDAVVEFLTSVHLYYLFPSLEEGGLATYRTAIVQNQHLAMLAKKLELDRFMLYAHGPDLCRESDLRHAMANCFEALIGAVYLEGSLEEAKQLFGRLLFNDPDLREVWLNYPLHPLQLQEPNTDRQLIETSPVLQKLTEFEEAIGVIFTHVRLLARAFTLRTVGFNHLTLGHNQRMEFLGDSIMQLVATEYLFIHFPDHHEGHLTLLRSSLVNNRTQAKVAEELGMQEYAITNDKTKRPVALRTKTLADLLESFIAALYIDKDLEYVHTFMNVCFFPRLKEFILNQDWNDPKSQLQQCCLTLRTEGKEPDIPLYKTLQTVGPSHARTYTVAVYFKGERIGCGKGPSIQQAEMGAAMDALEKYNFPQMAHQKRFIERKYRQELKEMRWEREHQEREPDETEDIKK

SEQ ID NO: 857073 - protein, 1026 aa, Homo sapiens
GDLRTSGVVVPLQCREASLPDGAMDSSATHPSSINYTSIKEKEPEETMPDKNEEEEEELLKPVWIRCTHSENYYSSDPMDQVGDSTVVGTSRLRDLYDKFEEELGSRQEKAKAARPPWEPPKTKLDEDLESSSESECESDEDSTCSSSSDSEVFDVIAEIKRKKAHPDRLHDELWYNDPGQMNDGPLCKCSAKARRTGIRHSIYPGEEAIKPCRPMTNNAGRLFHYRITVSPPTNFLTDRPTVIEYDDHEYIFEGFSMFAHAPLTNIPLCKVIRFNIDYTIHFIEEMMPENFCVKGLELFSLFLFRDILELYDWNLKGPLFEDSPPCCPRFHFMPRFVRFLPDGGKEVLSMHQILLYLLRCSKALVPEEEIANMLQWEELEWQKYAEECKGMIVTNPGTKPSSVRIDQLDREQFNPDVITFPIIVHFGIRPAQLSYAGDPQYQKLWKSYVKLRHLLANSPKVKQTDKQKLAQREEALQKIRQKNTMRREVTVELSSQGFWKTGIRSDVCQHAMMLPVLTHHIRYHQCLMHLDKLIGYTFQDRCLLQLAMTHPSHHLNFGMNPDHARNSLSNCGIRQPKYGDRKVHHMHMRKKGINTLINIMSRLGQDDPTPSRINHNERLEFLGDAVVEFLTSVHLYYLFPSLEEGGLATYRTAIVQNQHLAMLAKKLELDRFMLYAHGPDLCRESDLRHAMANCFEALIGAVYLEGSLEEAKQLFGRLLFNDPDLREVWLNYPLHPLQLQEPNTDRQLIETSPVLQKLTEFEEAIGVIFTHVRLLARAFTLRTVGFNHLTLGHNQRMEFLGDSIMQLVATEYLFIHFPDHHEGHLTLLRSSLVNNRTQAKVAEELGMQEYAITNDKTKRPVALRTKTLADLLESFIAALYIDKDLEYVHTFMNVCFFPRLKEFILNQDWNDPKSQLQQCCLTLRTEGKEPDIPLYKTLQTVGPSHARTYTVAVYFKGERIGCGKGPSIQQAEMGAAMDALEKYNFPQMAHQKRFIERKYRQELKEMRWEREHQEREPDETEDIKK

SEQ ID NO: 857074 - protein, 1141 aa, Homo sapiens; identical to SEQ ID NO: 857072

SEQ ID NO: 857075 - protein, 1133 aa, Homo sapiens
RERERTSLEHNFPPPSFNSFQNNPSSFLPSANNSSSPHFRHLPPYPLPKAPSERRSPERLKHYDDHRHRDHSHGRGERHRSLDRRERGRSPDRRRQDSRYRSDYDRGRTPSRHRSYERSSRSPSREKKRARWEEEKDRWSDNQSSGKDKNYTSIKEKEPEETMPDKNEEEEEELLKPVWIRCTHSENYYSSDPMDQVGDSTVVGTSRLRDLYDKFEEELGSRQEKAKAARPPWEPPKTKLDEDLESSSESECESDEDSTCSSSSDSEVFDVIAEIKRKKAHPDRLHDELWYNDPGQMNDGPLCKCSAKARRTGIRHSIYPGEEAIKPCRPMTNNAGRLFHYRITVSPPTNFLTDRPTVIEYDDHEYIFEGFSMFAHAPLTNIPLCKVIRFNIDYTIHFIEEMMPENFCVKGLELFSLFLFRDILELYDWNLKGPLFEDSPPCCPRFHFMPRFVRFLPDGGKEVLSMHQILLYLLRCSKALVPEEEIANMLQWEELEWQKYAEECKGMIVTNPGTKPSSVRIDQLDREQFNPDVITFPIIVHFGIRPAQYQKLWKSYVKLRHLLANSPKVKQTDKQKLAQREEALQKIRQKNTMRREVTVELSSQGFWKTGIRSDVCQHAMMLPVLTHHIRYHQCLMHLDKLIGYTFQDRCLLQLAMTHPSHHLNFGMNPDHARNSLSNCGIRQPKYGDRKVHHMHMRKKGINTLINIMSRLGQDDPTPSRINHNERLEFLGDAVVEFLTSVHLYYLFPSLEEGGLATYRTAIVQNQHLAMLAKKLELDRFMLYAHGPDLCRESDLRHAMANCFEALIGAVYLEGSLEEAKQLFGRLLFNDPDLREVWLNYPLHPLQLQEPNTDRQLIETSPVLQKLTEFEEAIGVIFTHVRLLARAFTLRTVGFNHLTLGHNQRMEFLGDSIMQLVATEYLFIHFPDHHEGHLTLLRSSLVNNRTQAKVAEELGMQEYAITNDKTKRPVALRTKTLADLLESFIAALYIDKDLEYVHTFMNVCFFPRLKEFILNQDWNDPKSQLQQCCLTLRTEGKEPDIPLYKTLQTVGPSHARTYTVAVYFKGERIGCGKGPSIQQAEMGAAMDALEKYNFPQMAHQKRFIERKYRQELKEMRWEREHQEREPDETEDIKK

SEQ ID NO: 857076 - protein, 514 aa, Homo sapiens
MMLPVLTHHIRYHQCLMHLDKLIGYTFQDRCLLQLAMTHPSHHLNFGMNPDHARNSLSNCGIRQPKYGDRKVHHMHMRKKGINTLINIMSRLGQDDPTPSRINHNERLEFLGDAVVEFLTSVHLYYLFPSLEEGGLATYRTAIVQNQHLAMLAKKLELDRFMLYAHGPDLCRESDLRHAMANCFEALIGAVYLEGSLEEAKQLFGRLLFNDPDLREVWLNYPLHPLQLQEPNTDRQLIETSPVLQKLTEFEEAIGVIFTHVRLLARAFTLRTVGFNHLTLGHNQRMEFLGDSIMQLVATEYLFIHFPDHHEGHLTLLRSSLVNNRTQAKVAEELGMQEYAITNDKTKRPVALRTKTLADLLESFIAALYIDKDLEYVHTFMNVCFFPRLKEFILNQDWNDPKSQLQQCCLTLRTEGKEPDIPLYKTLQTVGPSHARTYTVAVYFKGERIGCGKGPSIQQAEMGAAMDALEKYNFPQMAHQKRFIERKYRQELKEMRWEREHQEREPDETEDIKK

SEQ ID NO: 857077 - protein, 1141 aa, Homo sapiens; identical to SEQ ID NO: 857072

SEQ ID NO: 857078 - protein, 299 aa, Homo sapiens
RLVEAGVNWPRQLQEPNTDRQLIETSPVLQKLTEFEEAIGVIFTHVRLLARAFTLRTVGFNHLTLGHNQRMEFLGDSIMQLVATEYLFIHFPDHHEGHLTLLRSSLVNNRTQAKVAEELGMQEYAITNDKTKRPVALRTKTLADLLESFIAALYIDKDLEYVHTFMNVCFFPRLKEFILNQDWNDPKSQLQQCCLTLRTEGKEPDIPLYKTLQTVGPSHARTYTVAVYFKGERIGCGKGPSIQQAEMGAAMDALEKYNFPQMAHQKRFIERKYRQELKEMRWEREHQEREPDETEDIKK

SEQ ID NO: 857079 - protein, 211 aa, Homo sapiens [sequence omitted]

SEQ ID NO: 857080 - protein, 134 aa, Homo sapiens
MNVCFFPRLKEFILNQDWNDPKSQLQQCCLTLRTEGKEPDIPLYKTLQTVGPSHARTYTVAVYFKGERIGCGKGPSIQQAEMGAAMDALEKYNFPQMAHQKRFIERKYRQELKEMRWEREHQEREPDETEDIKK

SEQ ID NO: 857081 - protein, 334 aa, Homo sapiens
MMQGNTCHRMSFHPGRGCPRGRGGHGARPSAPSFRPQNLRLLHPQQPPVQYQYEPPSAPSTTFSNSPAPNFLPPRPDFVPFPPPMPPSAQGPLPPCPIRPPFPNHQMRHPFPVPPCFPPMPPPMPCPNNPPVPGAPPGQGTFPFMMPPPSMPHPPPPPVMPQQVNYQYPPGYSHHNFPPPSFNSFQNNPSSFLPSANNSSSPHFRHLPPYPLPKAPSERRSPERLKHYDDHRHRDHSHGRGERHRSLDRRERGRSPDRRRQDSRYRSDYDRGRTPSRHRSYERSRERERERHRHRDNRRSPSLERSYKKEYKRSGSRSPVGRRRELMGKTAGIL

SEQ ID NO: 857082 - protein, 910 aa, Homo sapiens
MASSAQSGGSSGGPAVPTVQRGIIKMVLSGCAIIVRGQPRGGPPPERQINLSNIRAGNLARRAAATQPDAKDTPDEPWAFPAREFLRKKLIGKEVCFTIENKTPQGREYGMIYLGKDTNGENIAESLVAEGLATRREGMRANNPEQNRLSECEEQAKAAKKGMWSEGNGSHTIRDLKYTIENPRHFVDSHHQKPVNAIIEHVRDGSVVRALLLPDYYLVTVMLSGIKCPTFRREADGSETPEPFAAEAKFFTESRLLQRDVQIILESCHNQNILGTILHPNGNITELLLKEGFARCVDWSIAVYTRGAEKLRAAERFAKERRLRIWRDYVAPTANLDQKDKQFVAKVMQVLNADAIVVKLNSGDYKTIHLSSIRPPRLEGENTQDKNKKLRPLYDIPYMFEAREFLRKKLIGKKVNVTVDYIRPASPATETVPAFSERTCATVTIGGINIAEALVSKGLATVIRYRQDDDQRSSHYDELLAAEARAIKNGKGLHSKKEVPIHRVADISGDTQKAKQFLPFLQRAGRSEAVVEYVFSGSRLKLYLPKETCLITFLLAGIECPRGARNLPGLVQEGEPFSEEATLFTKELVLQREVEVEVESMDKAGNFIGWLHIDGANLSVLLVEHALSKVHFTAERSSYYKSLLSAEEAAKQKKEKVWAHYEEQPVEEVMPVLEEKERSASYKPVFVTEITDDLHFYVQDVETGTQLEKLMENMRNDIASHPPVEGSYAPRRGEFCIAKFVDGEWYRARVEKVESPAKIHVFYIDYGNREVLPSTRLGTLSPAFSTRVLPAQATEYAFAFIQVPQDDDARTDAVDSVVRDIQNTQCLLNVEHLSAGCPHVTLQFADSKGDVGLGLVKEGLVMVEVRKEKQFQKVITEYLNAQESAKSARLNLWRYGDFRADDADEFGYSR

SEQ ID NO: 857083 - protein, 111 aa, Homo sapiens
MASSAQSGGSSGGPAVPTVQRGIIKMVLSGCAIIVRGQPRGGPPPERQINLSNIRAGNLARRAAATQPDAKDTPDEPWAFPAREFLRKKLIGKEVCFTIENKTPQGLAGVT

SEQ ID NO: 857084 - protein, 155 aa, Homo sapiens
RLRGEENVWRRRRSRLFRSVSRCCSCERPASPSRPPSAAGSQPAPRLDSLSPTPTPTLTPPVRPAAPLVAFASPHMASSAQSGGSSGGPAVPTVQRGIIKMVLSGCAIIVRGQPRGGPPPERQINLSNIRAGNLARRAAATQPDAKDTPDEVGVS

SEQ ID NO: 857085 - protein, 910 aa, Homo sapiens; identical to SEQ ID NO: 857082

SEQ ID NO: 857086 - protein, 876 aa, Homo sapiens
DRLLHQIVLCLAVLCVDTWVTLASLPQGFCPRALSCPQRSDVPWAFPAREFLRKKLIGKEVCFTIENKTPQGREYGMIYLGKDTNGENIAESLVAEGLATRREGMRANNPEQNRLSECEEQAKAAKKGMWSEGNGSHTIRDLKYTIENPRHFVDSHHQKPVNAIIEHVRDGSVVRALLLPDYYLVTVMLSGIKCPTFRREADGSETPEPFAAEAKFFTESRLLQRDVQIILESCHNQNILGTILHPNGNITELLLKEGFARCVDWSIAVYTRGAEKLRAAERFAKERRLRIWRDYVAPTANLDQKDKQFVAKVMQVLNADAIVVKLNSGDYKTIHLSSIRPPRLEGENTQDKNKKLRPLYDIPYMFEAREFLRKKLIGKKVNVTVDYIRPASPATETVPAFSERTCATVTIGGINIAEALVSKGLATVIRYRQDDDQRSSHYDELLAAEARAIKNGKGLHSKKEVPIHRVADISGDTQKAKQFLPFLQRAGRSEAVVEYVFSGSRLKLYLPKETCLITFLLAGIECPRGARNLPGLVQEGEPFSEEATLFTKELVLQREVEVEVESMDKAGNFIGWLHIDGANLSVLLVEHALSKVHFTAERSSYYKSLLSAEEAAKQKKEKVWAHYEEQPVEEVMPVLEEKERSASYKPVFVTEITDDLHFYVQDVETGTQLEKLMENMRNDIASHPPVEGSYAPRRGEFCIAKFVDGEWYRARVEKVESPAKIHVFYIDYGNREVLPSTRLGTLSPAFSTRVLPAQATEYAFAFIQVPQDDDARTDAVDSVVRDIQNTQCLLNVEHLSAGCPHVTLQFADSKGDVGLGLVKEGLVMVEVRKEKQFQKVITEYLNAQESAKSARLNLWRYGDFRADDADEFGYSR

SEQ ID NO: 857087 - protein, 910 aa, Homo sapiens; identical to SEQ ID NO: 857082

SEQ ID NO: 857088 - protein, 638 aa, Homo sapiens
MASSAQSGGSSGGPAVPTVQRGIIKMVLSGCAIIVRGQPRGGPPPERQINLSNIRAGNLARRAAATQPDAKDTPDEPWAFPAREFLRKKLIGKEVCFTIENKTPQGREYGMIYLGKDTNGENIAESLVAEGLATRREGMRANNPEQNRLSECEEQAKAAKKGMWSEGNGSHTIRDLKYTIENPRHFVDSHHQKPVNAIIEHVRDGSVVRALLLPDYYLVTVMLSGIKCPTFRREADGSETPEPFAAEAKFFTESRLLQRDVQIILESCHNQNILGTILHPNGNITELLLKEGFARCVDWSIAVYTRGAEKLRAAERFAKERRLRIWRDYVAPTANLDQKDKQFVAKVMQVLNADAIVVKLNSGDYKTIHLSSIRPPRLEGENTQDKNKKLRPLYDIPYMFEAREFLRKKLIGKKVNVTVDYIRPASPATETVPAFSERTCATVTIGGINIAEALVSKGLATVIRYRQDDDQRSSHYDELLAAEARAIKNGKGLHSKKEVPIHRVADISGDTQKAKQFLPFLQRAGRSEAVVEYVFSGSRLKLYLPKETCLITFLLAGIECPRGARNLPGLVQEGEPFSEEATLFTKELVLQREVEVEVESMDKAGNFIGWLHIDGANLSVLLVEHALSKVHFTAERSS

SEQ ID NO: 857089 - protein, 645 aa, Homo sapiens
MGKTLQNILGTILHPNGNITELLLKEGFARCVDWSIAVYTRGAEKLRAAERFAKERRLRIWRDYVAPTANLDQKDKQFVAKVMQVLNADAIVVKLNSGDYKTIHLSSIRPPRLEGENTQDKNKKLRPLYDIPYMFEAREFLRKKLIGKKVNVTVDYIRPASPATETVPAFSERTCATVTIGGINIAEALVSKGLATVIRYRQDDDQRSSHYDELLAAEARAIKNGKGLHSKKEVPIHRVADISGDTQKAKQFLPFLQRAGRSEAVVEYVFSGSRLKLYLPKETCLITFLLAGIECPRGARNLPGLVQEGEPFSEEATLFTKELVLQREVEVEVESMDKAGNFIGWLHIDGANLSVLLVEHALSKVHFTAERSSYYKSLLSAEEAAKQKKEKVWAHYEEQPVEEVMPVLEEKERSASYKPVFVTEITDDLHFYVQDVETGTQLEKLMENMRNDIASHPPVEGSYAPRRGEFCIAKFVDGEWYRARVEKVESPAKIHVFYIDYGNREVLPSTRLGTLSPAFSTRVLPAQATEYAFAFIQVPQDDDARTDAVDSVVRDIQNTQCLLNVEHLSAGCPHVTLQFADSKGDVGLGLVKEGLVMVEVRKEKQFQKVITEYLNAQESAKSARLNLWRYGDFRADDADEFGYSR

SEQ ID NO: 857090 - protein, 563 aa, Homo sapiens
MQVLNADAIVVKLNSGDYKTIHLSSIRPPRLEGENTQDKNKKLRPLYDIPYMFEAREFLRKKLIGKKVNVTVDYIRPASPATETVPAFSERTCATVTIGGINIAEALVSKGLATVIRYRQDDDQRSSHYDELLAAEARAIKNGKGLHSKKEVPIHRVADISGDTQKAKQFLPFLQRAGRSEAVVEYVFSGSRLKLYLPKETCLITFLLAGIECPRGARNLPGLVQEGEPFSEEATLFTKELVLQREVEVEVESMDKAGNFIGWLHIDGANLSVLLVEHALSKVHFTAERSSYYKSLLSAEEAAKQKKEKVWAHYEEQPVEEVMPVLEEKERSASYKPVFVTEITDDLHFYVQDVETGTQLEKLMENMRNDIASHPPVEGSYAPRRGEFCIAKFVDGEWYRARVEKVESPAKIHVFYIDYGNREVLPSTRLGTLSPAFSTRVLPAQATEYAFAFIQVPQDDDARTDAVDSVVRDIQNTQCLLNVEHLSAGCPHVTLQFADSKGDVGLGLVKEGLVMVEVRKEKQFQKVITEYLNAQESAKSARLNLWRYGDFRADDADEFGYSR

SEQ ID NO: 857091 - protein, 589 aa, Homo sapiens
YRGSPVRRFSFPQLLDQKDKQFVAKVMQVLNADAIVVKLNSGDYKTIHLSSIRPPRLEGENTQDKNKKLRPLYDIPYMFEAREFLRKKLIGKKVNVTVDYIRPASPATETVPAFSERTCATVTIGGINIAEALVSKGLATVIRYRQDDDQRSSHYDELLAAEARAIKNGKGLHSKKEVPIHRVADISGDTQKAKQFLPFLQRAGRSEAVVEYVFSGSRLKLYLPKETCLITFLLAGIECPRGARNLPGLVQEGEPFSEEATLFTKELVLQREVEVEVESMDKAGNFIGWLHIDGANLSVLLVEHALSKVHFTAERSSYYKSLLSAEEAAKQKKEKVWAHYEEQPVEEVMPVLEEKERSASYKPVFVTEITDDLHFYVQDVETGTQLEKLMENMRNDIASHPPVEGSYAPRRGEFCIAKFVDGEWYRARVEKVESPAKIHVFYIDYGNREVLPSTRLGTLSPAFSTRVLPAQATEYAFAFIQVPQDDDARTDAVDSVVRDIQNTQCLLNVEHLSAGCPHVTLQFADSKGDVGLGLVKEGLVMVEVRKEKQFQKVITEYLNAQESAKSARLNLWRYGDFRADDADEFGYSR

SEQ ID NO: 857092 - protein, 914 aa, Homo sapiens
MASSAQSGGSSGGPAVPTVQRGIIKMVLSGCAIIVRGQPRGGPPPERQINLSNIRAGNLARRAAATQPDAKDTPDEPWAFPAREFLRKKLIGKEVCFTIENKTPQGREYGMIYLGKDTNGENIAESLVAEGLATRREGMRANNPEQNRLSECEEQAKAAKKGMWSEGNGSHTIRDLKYTIENPRHFVDSHHQKPVNAIIEHVRDGSVVRALLLPDYYLVTVMLSGIKCPTFRREADGSETPEPFAAEAKFFTESRLLQRDVQIILESCHNQNILGTILHPNGNITELLLKEGFARCVDWSIAVYTRGAEKLRAAERFAKERRLRIWRDYVAPTANLDQKDKQFVAKVMQVLNADAIVVKLNSGDYKTIHLSSIRPPRLEGENTQDKNKKLRPLYDIPYMFEAREFLRKKLIGKKVNVTVDYIRPASPATETVPAFSERTCATVTIGGINIAEALVSKGLATVIRYRQDDDQRSSHYDELLAAEARAIKNGKGLHSKKEVPIHRVADISGDTQKAKQFLPFLQRAGRSEAVVEYVFSGSRLKLYLPKETCLITFLLAGIECPRGARNLPGLVQEGEPFSEEATLFTKELVLQREVEVEVESMDKAGNFIGWLHIDGANLSVLLVEHALSKVHFTAERSSYYKSLLSAEEAAKQKKEKVWAHYEEQPVEEVMPVLEEKERSASYKPVFVTEITDDLHFYVQDVETGTQLEKLMENMRNDIASHPPVEGSYAPRRGEFCIAKFVDGEWYRARVEKVESPAKIHVFYIDYGNREVLPSTRLGTLSPAFSTRVLPAQATEYAFAFIQVPQDDDARTDAVDSVVRDIQNTQCLLNVEHLSAGCPHVTLQFADSKGDVGLGLVKEGLVMVEVRKEKQFQKVITEYLNAQESAKSARLNLWRYGDFRADDADCPRPSSLSNC

SEQ ID NO: 857093 - protein, 874 aa, Homo sapiens
MAALQTTHETKQNIKPLEGSQYSLQKFGPPGTWEQRAVPLPFFSLNSGQAQPSHWHREETRTGDVHSLSRSGHCVSQTVSLGGWNERPRYDKKEAPEFAPWAGAYTRGRSGPLLYLPGKGMPSPLRRQLNEGVQSLAGGWVNLTWMRKGIVWPMAPQSWLPSIRAAWLQEAPATEVVASVASLGGSQGCPAWKTISVGHGFIWEGHRHIFHCDAVHDGGEGVQVVGICRVSREQMIPWVGAELQCTAPLWTAGGAVRAAFAGHPWLGPAPAPVAEVTLLLVEGAEQGLEALDVTGWHCAGSPPGSPVGVEQGASLQGLEASFTFLSLRFSLSVPPAAGPRTPTSSYTPYTPTAGTGLDSARGSPAPCPQGAWGLGAQGELRPLVAWWFEALEVDRQVVFPIIEAGFLVEVGGCLIQLHGVGKGLFLIRYRQDDDQRSSHYDELLAAEARAIKNGKGLHSKKEVPIHRVADISGDTQKAKQFLPFLQRAGRSEAVVEYVFSGSRLKLYLPKETCLITFLLAGIECPRGARNLPGLVQEGEPFSEEATLFTKELVLQREVEVEVESMDKAGNFIGWLHIDGANLSVLLVEHALSKVHFTAERSSYYKSLLSAEEAAKQKKEKVWAHYEEQPVEEVMPVLEEKERSASYKPVFVTEITDDLHFYVQDVETGTQLEKLMENMRNDIASHPPVEGSYAPRRGEFCIAKFVDGEWYRARVEKVESPAKIHVFYIDYGNREVLPSTRLGTLSPAFSTRVLPAQATEYAFAFIQVPQDDDARTDAVDSVVRDIQNTQCLLNVEHLSAGCPHVTLQFADSKGDVGLGLVKEGLVMVEVRKEKQFQKVITEYLNAQESAKSARLNLWRYGDFRADDADEFGYSR

SEQ ID NO: 857094 - protein, 449 aa, Homo sapiens
GRVGRPTRPQRSSHYDELLAAEARAIKNGKGLHSKKEVPIHRVADISGDTQKAKQFLPFLQRAGRSEAVVEYVFSGSRLKLYLPKETCLITFLLAGIECPRGARNLPGLVQEGEPFSEEATLFTKELVLQREVEVEVESMDKAGNFIGWLHIDGANLSVLLVEHALSKVHFTAERSSYYKSLLSAEEAAKQKKEKVWAHYEEQPVEEVMPVLEEKERSASYKPVFVTEITDDLHFYVQDVETGTQLEKLMENMRNDIASHPPVEGSYAPRRGEFCIAKFVDGEWYRARVEKVESPAKIHVFYIDYGNREVLPSTRLGTLSPAFSTRVLPAQATEYAFAFIQVPQDDDARTDAVDSVVRDIQNTQCLLNVEHLSAGCPHVTLQFADSKGDVGLGLVKEGLVMVEVRKEKQFQKVITEYLNAQESAKSARLNLWRYGDFRADDADEFGYSR

SEQ ID NO: 857095 - protein, 420 aa, Homo sapiens
KETLGFITFQLLFSSFLHQDTQKAKQFLPFLQRAGRSEAVVEYVFSGSRLKLYLPKETCLITFLLAGIECPRGARNLPGLVQEGEPFSEEATLFTKELVLQREVEVEVESMDKAGNFIGWLHIDGANLSVLLVEHALSKVHFTAERSSYYKSLLSAEEAAKQKKEKVWAHYEEQPVEEVMPVLEEKERSASYKPVFVTEITDDLHFYVQDVETGTQLEKLMENMRNDIASHPPVEGSYAPRRGEFCIAKFVDGEWYRARVEKVESPAKIHVFYIDYGNREVLPSTRLGTLSPAFSTRVLPAQATEYAFAFIQVPQDDDARTDAVDSVVRDIQNTQCLLNVEHLSAGCPHVTLQFADSKGDVGLGLVKEGLVMVEVRKEKQFQKVITEYLNAQESAKSARLNLWRYGDFRADDADEFGYSR

SEQ ID NO: 857096 - protein, 402 aa, Homo sapiens
MDTQKAKQFLPFLQRAGRSEAVVEYVFSGSRLKLYLPKETCLITFLLAGIECPRGARNLPGLVQEGEPFSEEATLFTKELVLQREVEVEVESMDKAGNFIGWLHIDGANLSVLLVEHALSKVHFTAERSSYYKSLLSAEEAAKQKKEKVWAHYEEQPVEEVMPVLEEKERSASYKPVFVTEITDDLHFYVQDVETGTQLEKLMENMRNDIASHPPVEGSYAPRRGEFCIAKFVDGEWYRARVEKVESPAKIHVFYIDYGNREVLPSTRLGTLSPAFSTRVLPAQATEYAFAFIQVPQDDDARTDAVDSVVRDIQNTQCLLNVEHLSAGCPHVTLQFADSKGDVGLGLVKEGLVMVEVRKEKQFQKVITEYLNAQESAKSARLNLWRYGDFRADDADEFGYSR

SEQ ID NO: 857097 - protein, 790 aa, Homo sapiens
MASSAQSGGSSGGPAVPTVQRGIIKMVLSGCAIIVRGQPRGGPPPERQINLSNIRAGNLARRAAATQPDAKDTPDEPWAFPAREFLRKKLIGKEVCFTIENKTPQGREYGMIYLGKDTNGENIAESLVAEGLATRREGMRANNPEQNRLSECEEQAKAAKKGMWSEGNGSHTIRDLKYTIENPRHFVDSHHQKPVNAIIEHVRDGSVVRALLLPDYYLVTVMLSGIKCPTFRREADGSETPEPFAAEAKFFTESRLLQRDVQIILESCHNQNILGTILHPNGNITELLLKEGFARCVDWSIAVYTRGAEKLRAAERFAKERRLRIWRDYVAPTANLDQKDKQFVAKVMQVLNADAIVVKLNSGDYKTIHLSSIRPPRLEGENTQDKNKKLRPLYDIPYMFEAREFLRKKLIGKKVNVTVDYIRPASPATETVPAFSERTCATVTIGGINIAEALVSKGLATVIRYRQDDDQRSSHYDELLAAEARAIKNGKGLHSKKEVPIHRVADISGDTQKAKQFLPFLQRAGRSEAVVEYVFSGSRLKLYLPKETCLITFLLAGIECPRGARNLPGLVQEGEPFSEEATLFTKELVLQREVEVEVESMDKAGNFIGWLHIDGANLSVLLVEHALSKVHFTAERSSYYKSLLSAEEAAKQKKEKVWAHYEEQPVEEVMPVLEEKERSASYKPVFVTEITDDLHFYVQDVETGTQLEKLMENMRNDIASHPPVEGSYAPRRGEFCIAKFVDGEWYRARVEKVESPAKIHVFYIDYGNVSVGDQSVGGAIKHSSPRVKSI

SEQ ID NO: 857098 - protein, 794 aa, Homo sapiens
MASSAQSGGSSGGPAVPTVQRGIIKMVLSGCAIIVRGQPRGGPPPERQINLSNIRAGNLARRAAATQPDAKDTPDEPWAFPAREFLRKKLIGKEVCFTIENKTPQGREYGMIYLGKDTNGENIAESLVAEGLATRREGMRANNPEQNRLSECEEQAKAAKKGMWSEGNGSHTIRDLKYTIENPRHFVDSHHQKPVNAIIEHVRDGSVVRALLLPDYYLVTVMLSGIKCPTFRREADGSETPEPFAAEAKFFTESRLLQRDVQIILESCHNQNILGTILHPNGNITELLLKEGFARCVDWSIAVYTRGAEKLRAAERFAKERRLRIWRDYVAPTANLDQKDKQFVAKVMQVLNADAIVVKLNSGDYKTIHLSSIRPPRLEGENTQDKNKKLRPLYDIPYMFEAREFLRKKLIGKKVNVTVDYIRPASPATETVPAFSERTCATVTIGGINIAEALVSKGLATVIRYRQDDDQRSSHYDELLAAEARAIKNGKGLHSKKEVPIHRVADISGDTQKAKQFLPFLQRAGRSEAVVEYVFSGSRLKLYLPKETCLITFLLAGIECPRGARNLPGLVQEGEPFSEEATLFTKELVLQREVEVEVESMDKAGNFIGWLHIDGANLSVLLVEHALSKVHFTAERSSYYKSLLSAEEAAKQKKEKVWAHYEEQPVEEVMPVLEEKERSASYKPVFVTEITDDLHFYVQDVETGTQLEKLMENMRNDIASHPPVEGSYAPRRGEFCIAKFVDGEWRGGRLLPSRARRLQRKPSPSSSGILQKENKFPKYGLPAEQGSPTRNFYR

SEQ ID NO: 857099 - protein, 335 aa, Homo sapiens
EDPPEAHCNTKELVLQREVEVEVESMDKAGNFIGWLHIDGANLSVLLVEHALSKVHFTAERSSYYKSLLSAEEAAKQKKEKVWAHYEEQPVEEVMPVLEEKERSASYKPVFVTEITDDLHFYVQDVETGTQLEKLMENMRNDIASHPPVEGSYAPRRGEFCIAKFVDGEWYRARVEKVESPAKIHVFYIDYGNREVLPSTRLGTLSPAFSTRVLPAQATEYAFAFIQVPQDDDARTDAVDSVVRDIQNTQCLLNVEHLSAGCPHVTLQFADSKGDVGLGLVKEGLVMVEVRKEKQFQKVITEYLNAQESAKSARLNLWRYGDFRADDADEFGYSR

SEQ ID NO: 857100 - protein, 668 aa, Homo sapiens
MASSAQSGGSSGGPAVPTVQRGIIKMVLSGCAIIVRGQPRGGPPPERQINLSNIRAGNLARRAAATQPDAKDTPDEPWAFPAREFLRKKLIGKEVCFTIENKTPQGREYGMIYLGKDTNGENIAESLVAEGLATRREGMRANNPEQNRLSECEEQAKAAKKGMWSEGNGSHTIRDLKYTIENPRHFVDSHHQKPVNAIIEHVRDGSVVRALLLPDYYLVTVMLSGIKCPTFRREADGSETPEPFAAEAKFFTESRLLQRDVQIILESCHNQNILGTILHPNGNITELLLKEGFARCVDWSIAVYTRGAEKLRAAERFAKERRLRIWRDYVAPTANLDQKDKQFVAKVMQVLNADAIVVKLNSGDYKTIHLSSIRPPRLEGENTQDKNKKLRPLYDIPYMFEAREFLRKKLIGKKVNVTVDYIRPASPATETVPAFSERTCATVTIGGINIAEALVSKGLATVIRYRQDDDQRSSHYDELLAAEARAIKNGKGLHSKKEVPIHRVADISGDTQKAKQFLPFLQRAGRSEAVVEYVFSGSRLKLYLPKETCLITFLLAGIECPRGARNLPGLVQEGEPFSEEATLFTKELVLQREVEVEVESMDKAGNFIGWLHIDGANLSVLLVEHALSKVHFTAERSSYYKSLLSAEEAAKQKKEKVWAHYEEHPFCI

SEQ ID NO: 857101 - protein, 670 aa, Homo sapiens
MASSAQSGGSSGGPAVPTVQRGIIKMVLSGCAIIVRGQPRGGPPPERQINLSNIRAGNLARRAAATQPDAKDTPDEPWAFPAREFLRKKLIGKEVCFTIENKTPQGREYGMIYLGKDTNGENIAESLVAEGLATRREGMRANNPEQNRLSECEEQAKAAKKGMWSEGNGSHTIRDLKYTIENPRHFVDSHHQKPVNAIIEHVRDGSVVRALLLPDYYLVTVMLSGIKCPTFRREADGSETPEPFAAEAKFFTESRLLQRDVQIILESCHNQNILGTILHPNGNITELLLKEGFARCVDWSIAVYTRGAEKLRAAERFAKERRLRIWRDYVAPTANLDQKDKQFVAKVMQVLNADAIVVKLNSGDYKTIHLSSIRPPRLEGENTQDKNKKLRPLYDIPYMFEAREFLRKKLIGKKVNVTVDYIRPASPATETVPAFSERTCATVTIGGINIAEALVSKGLATVIRYRQDDDQRSSHYDELLAAEARAIKNGKGLHSKKEVPIHRVADISGDTQKAKQFLPFLQRAGRSEAVVEYVFSGSRLKLYLPKETCLITFLLAGIECPRGARNLPGLVQEGEPFSEEATLFTKELVLQREVEVEVESMDKAGNFIGWLHIDGALAQRWASARVGPAHRVGPGEATVRHKLHVSEASVRQDLGLSTLLGDRPESGQGR

SEQ ID NO: 857102 - protein, 215 aa, Homo sapiens
TVLFLAFIGTQLEKLMENMRNDIASHPPVEGSYAPRRGEFCIAKFVDGEWYRARVEKVESPAKIHVFYIDYGNREVLPSTRLGTLSPAFSTRVLPAQATEYAFAFIQVPQDDDARTDAVDSVVRDIQNTQCLLNVEHLSAGCPHVTLQFADSKGDVGLGLVKEGLVMVEVRKEKQFQKVITEYLNAQESAKSARLNLWRYGDFRADDADEFGYSR

SEQ ID NO: 857103 - protein, 547 aa, Homo sapiens
MASSAQSGGSSGGPAVPTVQRGIIKMVLSGCAIIVRGQPRGGPPPERQINLSNIRAGNLARRAAATQPDAKDTPDEPWAFPAREFLRKKLIGKEVCFTIENKTPQGREYGMIYLGKDTNGENIAESLVAEGLATRREGMRANNPEQNRLSECEEQAKAAKKGMWSEGNGSHTIRDLKYTIENPRHFVDSHHQKPVNAIIEHVRDGSVVRALLLPDYYLVTVMLSGIKCPTFRREADGSETPEPFAAEAKFFTESRLLQRDVQIILESCHNQNILGTILHPNGNITELLLKEGFARCVDWSIAVYTRGAEKLRAAERFAKERRLRIWRDYVAPTANLDQKDKQFVAKVMQVLNADAIVVKLNSGDYKTIHLSSIRPPRLEGENTQDKNKKLRPLYDIPYMFEAREFLRKKLIGKKVNVTVDYIRPASPATETVPAFSERTCATVTIGGINIAEALVSKGLATVIRYRQDDDQRSSHYDELLAAEARAIKNGKGLHSKKEVPIHRVADISGVSRVPESSCVAQRLKSVSAYLLKDFSLCIFSSSLLFRH

SEQ ID NO: 857104 - protein, 71 aa, Homo sapiens
CWDYRHEPPCLANLTRVLWGENYRPLLARLSWESMDRSWGPSGCSLACSDLSVSLLQDDARTDAVDSVVRD

SEQ ID NO: 857105 - protein, 289 aa, Homo sapiens
MPGPEPQAGPVTTGILVLVCSPSQQLENPLACGNVVREPMSQTEGHWEEMEKRLESSYTAIVFMGTTRCASTRPRVSSPSTAGPAGHVLSRLHPLGSLCTLQSGTKSWDEQGGPELAFPEAWPQRAVLLREQGGSEYVTCWPLLPLQREVLPSTRLGTLSPAFSTRVLPAQATEYAFAFIQVPQDDDARTDAVDSVVRDIQNTQCLLNVEHLSAGCPHVTLQFADSKGDVGLGLVKEGLVMVEVRKEKQFQKVITEYLNAQESAKSARLNLWRYGDFRADDADEFGYSR

SEQ ID NO: 857106 - protein, 72 aa, Homo sapiens
HNLHYGDTASGPFIFSFFPLRRSSQGAPSLSEVSLVVGLLLSGRSTSATFVLEILLAGQPPHNLMQRIPLMR

SEQ ID NO: 857107 - protein, 854 aa, Homo sapiens
LINTPSTRPSGKEEKAKAGPPWAFPAREFLRKKLIGKEVCFTIENKTPQGREYGMIYLGKDTNGENIAESLVAEGLATRREGMRANNPEQNRLSECEEQAKAAKKGMWSEGNGSHTIRDLKYTIENPRHFVDSHHQKPVNAIIEHVRDGSVVRALLLPDYYLVTVMLSGIKCPTFRREADGSETPEPFAAEAKFFTESRLLQRDVQIILESCHNQNILGTILHPNGNITELLLKEGFARCVDWSIAVYTRGAEKLRAAERFAKERRLRIWRDYVAPTANLDQKDKQFVAKVMQVLNADAIVVKLNSGDYKTIHLSSIRPPRLEGENTQDKNKKLRPLYDIPYMFEAREFLRKKLIGKKVNVTVDYIRPASPATETVPAFSERTCATVTIGGINIAEALVSKGLATVIRYRQDDDQRSSHYDELLAAEARAIKNGKGLHSKKEVPIHRVADISGDTQKAKQFLPFLQRAGRSEAVVEYVFSGSRLKLYLPKETCLITFLLAGIECPRGARNLPGLVQEGEPFSEEATLFTKELVLQREVEVEVESMDKAGNFIGWLHIDGANLSVLLVEHALSKVHFTAERSSYYKSLLSAEEAAKQKKEKVWAHYEEQPVEEVMPVLEEKERSASYKPVFVTEITDDLHFYVQDVETGTQLEKLMENMRNDIASHPPVEGSYAPRRGEFCIAKFVDGEWYRARVEKVESPAKIHVFYIDYGNREVLPSTRLGTLSPAFSTRVLPAQATEYAFAFIQVPQDDDARTDAVDSVVRDIQNTQCLLNVEHLSAGCPHVTLQFADSKGDVGLGLVKEGLVMVEVRKEKQFQKVITEYLNAQESAKSARLNLWRYGDFRADDADEFGYSR

SEQ ID NO: 857108 - protein, 869 aa, Homo sapiens
MEATEGWLGLRHSAQSLPQAAVLRVSVELVRGDSRPWAFPAREFLRKKLIGKEVCFTIENKTPQGREYGMIYLGKDTNGENIAESLVAEGLATRREGMRANNPEQNRLSECEEQAKAAKKGMWSEGNGSHTIRDLKYTIENPRHFVDSHHQKPVNAIIEHVRDGSVVRALLLPDYYLVTVMLSGIKCPTFRREADGSETPEPFAAEAKFFTESRLLQRDVQIILESCHNQNILGTILHPNGNITELLLKEGFARCVDWSIAVYTRGAEKLRAAERFAKERRLRIWRDYVAPTANLDQKDKQFVAKVMQVLNADAIVVKLNSGDYKTIHLSSIRPPRLEGENTQDKNKKLRPLYDIPYMFEAREFLRKKLIGKKVNVTVDYIRPASPATETVPAFSERTCATVTIGGINIAEALVSKGLATVIRYRQDDDQRSSHYDELLAAEARAIKNGKGLHSKKEVPIHRVADISGDTQKAKQFLPFLQRAGRSEAVVEYVFSGSRLKLYLPKETCLITFLLAGIECPRGARNLPGLVQEGEPFSEEATLFTKELVLQREVEVEVESMDKAGNFIGWLHIDGANLSVLLVEHALSKVHFTAERSSYYKSLLSAEEAAKQKKEKVWAHYEEQPVEEVMPVLEEKERSASYKPVFVTEITDDLHFYVQDVETGTQLEKLMENMRNDIASHPPVEGSYAPRRGEFCIAKFVDGEWYRARVEKVESPAKIHVFYIDYGNREVLPSTRLGTLSPAFSTRVLPAQATEYAFAFIQVPQDDDARTDAVDSVVRDIQNTQCLLNVEHLSAGCPHVTLQFADSKGDVGLGLVKEGLVMVEVRKEKQFQKVITEYLNAQESAKSARLNLWRYGDFRADDADEFGYSR

SEQ ID NO: 857109 - protein, 910 aa, Homo sapiens; identical to SEQ ID NO: 857082

SEQ ID NO: 857110 - protein, 821 aa, Homo sapiens
ALCSPIDDAGPRLPSHSSGRTPHVPRYGRSHHHRNHERRGRNPAARHRRETANNPEQNRLSECEEQAKAAKKGMWSEGNGSHTIRDLKYTIENPRHFVDSHHQKPVNAIIEHVRDGSVVRALLLPDYYLVTVMLSGIKCPTFRREADGSETPEPFAAEAKFFTESRLLQRDVQIILESCHNQNILGTILHPNGNITELLLKEGFARCVDWSIAVYTRGAEKLRAAERFAKERRLRIWRDYVAPTANLDQKDKQFVAKVMQVLNADAIVVKLNSGDYKTIHLSSIRPPRLEGENTQDKNKKLRPLYDIPYMFEAREFLRKKLIGKKVNVTVDYIRPASPATETVPAFSERTCATVTIGGINIAEALVSKGLATVIRYRQDDDQRSSHYDELLAAEARAIKNGKGLHSKKEVPIHRVADISGDTQKAKQFLPFLQRAGRSEAVVEYVFSGSRLKLYLPKETCLITFLLAGIECPRGARNLPGLVQEGEPFSEEATLFTKELVLQREVEVEVESMDKAGNFIGWLHIDGANLSVLLVEHALSKVHFTAERSSYYKSLLSAEEAAKQKKEKVWAHYEEQPVEEVMPVLEEKERSASYKPVFVTEITDDLHFYVQDVETGTQLEKLMENMRNDIASHPPVEGSYAPRRGEFCIAKFVDGEWYRARVEKVESPAKIHVFYIDYGNREVLPSTRLGTLSPAFSTRVLPAQATEYAFAFIQVPQDDDARTDAVDSVVRDIQNTQCLLNVEHLSAGCPHVTLQFADSKGDVGLGLVKEGLVMVEVRKEKQFQKVITEYLNAQESAKSARLNLWRYGDFRADDADEFGYSR

SEQ ID NO: 857111 - protein, 847 aa, Homo sapiens
MASSAQSGGSSGGPAVPTVQRGIIKMVLSGCAIIVRGQPRGGPPPERQINLSNIRAGNLARRAAATQPDAKDTPDEPWAFPAREFLRKKLIGKEVCFTIENKTPQGREYGMIYLGKDTNGENIAESLVAEGLATRREGMRANNPEQNRLSECEEQAKAAKKGMWSEGNGSHTIRDLKYTIENPRHFVDSHHQKPVNAIIEHVRDGSVVRALLLPDYYLVTVMLSGIKCPTFRREADGSETPEPFAAEAKFFTESRLLQRDVQIILESCHNQNILGTILHPNGNITELLLKEGFARCVDWSIAVYTRGAEKLRAAERFAKERRLRIWRDYVAPTANLDQKDKQFVAKVMQVLNADAIVVKLNSGDYKTIHLSSIRPPRLEGENTQDKNKKLRPLYDIPYMFEAREFLRKKLIGKKVNVTVDYIRPASPATETVPAFSERTCATVTIGGINIAEALVSKGLATVIRYRQDDDQRSSHYDELLAAEARAIKNGKGLHSKKEVPIHRVADISGDTQKAKQFLPFLQRAGRSEAVVEYVFSGSRLKLYLPKETCLITFLLAGIECPRGARNLPGLVQEGEPFSEEATLFTKELVLQREVWAHYEEQPVEEVMPVLEEKERSASYKPVFVTEITDDLHFYVQDVETGTQLEKLMENMRNDIASHPPVEGSYAPRRGEFCIAKFVDGEWYRARVEKVESPAKIHVFYIDYGNREVLPSTRLGTLSPAFSTRVLPAQATEYAFAFIQVPQDDDARTDAVDSVVRDIQNTQCLLNVEHLSAGCPHVTLQFADSKGDVGLGLVKEGLVMVEVRKEKQFQKVITEYLNAQESAKSARLNLWRYGDFRADDADEFGYSR

SEQ ID NO: 857112 - protein, 883 aa, Homo sapiens
MASSAQSGGSSGGPAVPTVQRGIIKMVLSGCAIIVRGQPRGGPPPERQINLSNIRAGNLARRAAATQPDAKDTPDEPWAFPAREFLRKKLIGKEVCFTIENKTPQGREYGMIYLGKDTNGENIAESLVAEGLATRREGMRANNPEQNRLSECEEQAKAAKKGMWSEGNGSHTIRDLKYTIENPRHFVDSHHQKPVNAIIEHVRDGSVVRALLLPDYYLVTVMLSGIKCPTFRREADGSETPEPFAAEAKFFTESRLLQRDVQIILESCHNQNILGTILHPNGNITELLLKEGFARCVDWSIAVYTRGAEKLRAAERFAKERRLRIWRDYVAPTANLDQKDKQFVAKVMQVLNADAIVVKLNSGDYKTIHLSSIRPPRLEGENTQDKNKKLRPLYDIPYMFEAREFLRKKLIGKKVNVTVDYIRPASPATETVPAFSERTCATVTIGGINIAEALVSKGLATVIRYRQDDDQRSSHYDELLAAEARAIKNGKGLHSKKEVPIHRVADISGDTQKAKQFLPFLQRAGRSEAVVEYVFSGSRLKLYLPKETCLITFLLAGIECPRGARNLPGLVQEGEPFSEEATLFTKELVLQREVEVEVESMDKAGNFIGWLHIDGANLSVLLVEHALSKVHFTAERSSYYKSLLSAEEAAKQKKEKVWAHYEEQPVEEVMPVLEEKERSASYKPVFVTEITDDLHFYVQDVETGTQLEKLMENMRNDIASHPPVEGSYAPRRGEFCIAKFVDGEWYRARVEKVESPAKIHVFYIDYGNREVLPSTRLGTLSPAFSTRVLPAQATEYAFAFIQVPQDDDARTDAVDSVVRDIQNTQCLLNVEHLSAGGLGEGRAGHGGGAQGETVPESDHRIPECPRVSQERQAEPVALWRLSS

SEQ ID NO: 857113 - protein, 910 aa, Homo sapiens; identical to SEQ ID NO: 857082

SEQ ID NO: 857114 - protein, 563 aa, Homo sapiens; identical to SEQ ID NO: 857090

SEQ ID NO: 857115 - protein, 543 aa, Homo sapiens
RALEKERKNGNATGILLDKNKKLRPLYDIPYMFEAREFLRKKLIGKKVNVTVDYIRPASPATETVPAFSERTCATVTIGGINIAEALVSKGLATVIRYRQDDDQRSSHYDELLAAEARAIKNGKGLHSKKEVPIHRVADISGDTQKAKQFLPFLQRAGRSEAVVEYVFSGSRLKLYLPKETCLITFLLAGIECPRGARNLPGLVQEGEPFSEEATLFTKELVLQREVEVEVESMDKAGNFIGWLHIDGANLSVLLVEHALSKVHFTAERSSYYKSLLSAEEAAKQKKEKVWAHYEEQPVEEVMPVLEEKERSASYKPVFVTEITDDLHFYVQDVETGTQLEKLMENMRNDIASHPPVEGSYAPRRGEFCIAKFVDGEWYRARVEKVESPAKIHVFYIDYGNREVLPSTRLGTLSPAFSTRVLPAQATEYAFAFIQVPQDDDARTDAVDSVVRDIQNTQCLLNVEHLSAGCPHVTLQFADSKGDVGLGLVKEGLVMVEVRKEKQFQKVITEYLNAQESAKSARLNLWRYGDFRADDADEFGYSR

SEQ ID NO: 857116 - protein, 906 aa, Homo sapiens
MASSAQSGGSSGGPAVPTVQRGIIKMVLSGCAIIVRGQPRGGPPPERQINLSNIRAGNLARRAAATQPDAKDTPDEPWAFPAREFLRKKLIGKEVCFTIENKTPQGREYGMIYLGKDTNGENIAESLVAEGLATRREGMRANNPEQNRLSECEEQAKAAKKGMWSEGNGSHTIRDLKYTIENPRHFVDSHHQKPVNAIIEHVRDGSVVRALLLPDYYLVTVMLSGIKCPTFRREADGSETPEPFAAEAKFFTESRLLQRDVQIILESCHNQNILGTILHPNGNITELLLKEGFARCVDWSIAVYTRGAEKLRAAERFAKERRLRIWRDYVAPTANLDQKDKQFVAKVMQVLNADAIVVKLNSGDYKTIHLSSIRPPRLEGENTQDKNKKLRPLYDIPYMFEAREFLRKKLIGKKVNVTVDYIRPASPATETVPAFSERTCATVTIGGINIAEALVSKGLATVIRYRQDDDQRSSHYDELLAAEARAIKNGKGLHSKKEVPIHRVADISGDTQKAKQFLPFLQRAGRSEAVVEYVFSGSRLKLYLPKETCLITFLLAGIECPRGARNLPGLVQEGEPFSEEATLFTKELVLQREVEVEVESMDKAGNFIGWLHIDGANLSVLLVEHALSKVHFTAERSSYYKSLLSAEEAAKQKKEKVWAHYEEQPVEEVMPVLEEKERSASYKPVFVTEITDDLHFYVQDVETGTQLEKLMENMRNDIASHPPVEGSYAPRRGEFCIAKFVDGEWYRARVEKVESPAKIHVFYIDYGNREVLPSTRLGTLSPAFSTRVLPAQATEYAFAFIQVPQDDDARTDAVDSVVRDIQNTQCLLNVEHLSAGCPHVTLQFADSKGDVGLGLVKEGLVMVEVRKKKHQRLCPSGGSNPNTQAGRQLAPASIPDCPRPSSLSNC

SEQ ID NO: 857117 - protein, 406 aa, Homo sapiens
MHQKKDTQKAKQFLPFLQRAGRSEAVVEYVFSGSRLKLYLPKETCLITFLLAGIECPRGARNLPGLVQEGEPFSEEATLFTKELVLQREVEVEVESMDKAGNFIGWLHIDGANLSVLLVEHALSKVHFTAERSSYYKSLLSAEEAAKQKKEKVWAHYEEQPVEEVMPVLEEKERSASYKPVFVTEITDDLHFYVQDVETGTQLEKLMENMRNDIASHPPVEGSYAPRRGEFCIAKFVDGEWYRARVEKVESPAKIHVFYIDYGNREVLPSTRLGTLSPAFSTRVLPAQATEYAFAFIQVPQDDDARTDAVDSVVRDIQNTQCLLNVEHLSAGCPHVTLQFADSKGDVGLGLVKEGLVMVEVRKEKQFQKVITEYLNAQESAKSARLNLWRYGDFRADDADEFGYSR

SEQ ID NO: 857118 - protein, 830 aa, Homo sapiens
MASSAQSGGSSGGPAVPTVQRGIIKMVLSGCAIIVRGQPRGGPPPERQINLSNIRAGNLARRAAATQPDAKDTPDEPWAFPAREFLRKKLIGKEVCFTIENKTPQGREYGMIYLGKDTNGENIAESLVAEGLATRREGMRANNPEQNRLSECEEQAKAAKKGMWSEGNGSHTIRDLKYTIENPRHFVDSHHQKPVNAIIEHVRDGSVVRALLLPDYYLVTVMLSGIKCPTFRREADGSETPEPFAAEAKFFTESRLLQRDVQIILESCHNQNILGTILHPNGNITELLLKEGFARCVDWSIAVYTRGAEKLRAAERFAKERRLRIWRDYVAPTANLDQKDKQFVAKVMQVLNADAIVVKLNSGDYKTIHLSSIRPPRLEGENTQDKNKKLRPLYDIPYMFEAREFLRKKLIGKKVNVTVDYIRPASPATETVPAFSERTCATVTIGGINIAEALVSKGLATVIRYRQDDDQRSSHYDELLAAEARAIKNGKGLHSKKEVPIHRVADISGDTQKAKQFLPFLQRAGRSEAVVEYVFSGSRLKLYLPKETCLITFLLAGIECPRGARNLPGLVQEGEPFSEEATLFTKELVLQREVEVEVESMDKAGNFIGWLHIDGANLSVLLVEHALSKVHFTAERSSYYKSLLSAEEAAKQKKEKVWAHYEEQPVEEVMPVLEEKERSASYKPVFVTEITDDLHFYVQDVETGTQLEKLMENMRNDIASHPPVEGSYAPRRGEFCIAKFVDGEWYRPSRESRVSCQNRVSCYPWNNGTERYCASPRQGTYELAQTRGWKSATEEAPLIRAQTEVRTNREESREQKPGRTREPRRGPEPV

SEQ ID NO: 857119 - protein, 280 aa, Homo sapiens
DAWVDPRVRYKSLLSAEEAAKQKKEKVWAHYEEQPVEEVMPVLEEKERSASYKPVFVTEITDDLHFYVQDVETGTQLEKLMENMRNDIASHPPVEGSYAPRRGEFCIAKFVDGEWYRARVEKVESPAKIHVFYIDYGNREVLPSTRLGTLSPAFSTRVLPAQATEYAFAFIQVPQDDDARTDAVDSVVRDIQNTQCLLNVEHLSAGCPHVTLQFADSKGDVGLGLVKEGLVMVEVRKEKQFQKVITEYLNAQESAKSARLNLWRYGDFRADDADEFGYSR

SEQ ID NO: 857120 - protein, 708 aa, Homo sapiens
MASSAQSGGSSGGPAVPTVQRGIIKMVLSGCAIIVRGQPRGGPPPERQINLSNIRAGNLARRAAATQPDAKDTPDEPWAFPAREFLRKKLIGKEVCFTIENKTPQGREYGMIYLGKDTNGENIAESLVAEGLATRREGMRANNPEQNRLSECEEQAKAAKKGMWSEGNGSHTIRDLKYTIENPRHFVDSHHQKPVNAIIEHVRDGSVVRALLLPDYYLVTVMLSGIKCPTFRREADGSETPEPFAAEAKFFTESRLLQRDVQIILESCHNQNILGTILHPNGNITELLLKEGFARCVDWSIAVYTRGAEKLRAAERFAKERRLRIWRDYVAPTANLDQKDKQFVAKVMQVLNADAIVVKLNSGDYKTIHLSSIRPPRLEGENTQDKNKKLRPLYDIPYMFEAREFLRKKLIGKKVNVTVDYIRPASPATETVPAFSERTCATVTIGGINIAEALVSKGLATVIRYRQDDDQRSSHYDELLAAEARAIKNGKGLHSKKEVPIHRVADISGDTQKAKQFLPFLQRAGRSEAVVEYVFSGSRLKLYLPKETCLITFLLAGIECPRGARNLPGLVQEGEPFSEEATLFTKELVLQREVEVEVESMDKAGNFIGWLHIDGANLSVLLVEHALSKVHFTAERSSYYKSLLSAEEAAKQKKEKVIRQVSFGIIEFETRTTEDVFHHSFRTTLPAEEKAGTALLSGYPQIYLTDYR

SEQ ID NO: 857121 - protein, 471 aa, Homo sapiens
MASSAQSGGSSGGPAVPTVQRGIIKMVLSGCAIIVRGQPRGGPPPERQINLSNIRAGNLARRAAATQPDAKDTPDEPWAFPAREFLRKKLIGKEVCFTIENKTPQGREYGMIYLGKDTNGENIAESLVAEGLATRREGMRANNPEQNRLSECEEQAKAAKKGMWSEGNGSHTIRDLKYTIENPRHFVDSHHQKPVNAIIEHVRDGSVVRALLLPDYYLVTVMLSGIKCPTFRREADGSETPEPFAAEAKFFTESRLLQRDVQIILESCHNQNILGTILHPNGNITELLLKEGFARCVDWSIAVYTRGAEKLRAAERFAKERRLRIWRDYVAPTANLDQKDKQFVAKVMQVLNADAIVVKLNSGDYKTIHLSSIRPPRLEGENTQDKNKKLRPLYDIPYMFEAREFLRKKLIGKKVNVTVDYIRPASPATETVPAFSERTCATVTIGGMRPPESQQIQRDSQIILFFYLMIG

SEQ ID NO: 857122 - protein, 187 aa, Homo sapiens
MASSAQSGGSSGGPAVPTVQRGIIKMVLSGCAIIVRGQPRGGPPPERQINLSNIRAGNLARRAAATQPDAKDTPDEPWAFPAREFLRKKLIGKEVCFTIENKTPQGREYGMIYLGKDTNGENIAEHSGYHPSSKWQHHRAPPEGRFRTLCGLVDCSLHPGRRKAEGGREVCQRAQAENMERLCGSHS

SEQ ID NO: 857123 - protein, 32 aa, Homo sapiens
METFELMMQTNLATAAKEGIGFGPQPRSRQSL

SEQ ID NO: 857124 - protein, 514 aa, Homo sapiens
MVWEVKTNQMPNAVQKLLLVMDKRASGMNDSLELLQCNENLPSSPGYNSCDEHMELDDLPELQAVQSDPTQSGMYQLSSDVSHQEYPRSSWNQNTSDIPETTYRENEVDWLTELANIATSPQSPLMQCSFYNRSSPVHIIATSKSLHSYARPPPVSSSSKSEPAFPHHHWKEETPVRHERANSESESGIFCMSSLSDDDDLGWCNSWPSTVWHCFLKGTRLCFHKGSNKEWQDVEDFARAEGCDNEEDLQMGIHKGYGSDGLKLLSHEESVSFGESVLKLTFDPGTVEDGLLTVECKLDHPFYVKNKGWSSFYPSLTVVQHGIPCCEVHIGDVCLPPGHPDAINFDDSGVFDTFKSYDFTPMDSSAVYVLSSMARQRRASLSCGGPGGQDFARSGFSKNCGSPGSSQLSSNSLYAKAVKNHSSGTVSATSPNKCKRPMNAFMLFAKKYRVEYTQMYPGKDNRAISVILGDRWKKMKNEERRMYTLEAKALAEEQKRLNPDCWKRKRTNSVCFNK

SEQ ID NO: 857125 - protein, 514 aa, Homo sapiens
MVWEVKTNQMPNAVQKLLLVMDKRASGMNDSLELLQCNENLPSSPGYNSCDEHMELDDLPELQAVQSDPTQSGMYQLSSDVSHQEYPRSSWNQNTSDIPETTYRENEVDWLTELANIATSPQSPLMQCSFYNRSSPVHIIATSKSLHSYARPPPVSSSSKSEPAFPHHHWKEETPVRHERANSESESGIFCMSSLSDDDDLGWCNSWPSTVWHCFLKGTRLCFHKGSNKEWQDVEDFARAEGCDNEEDLQMGIHKGYGSDGLKLLSHEESVSFGESVLKLTFDPGTVEDGLLTVECKLDHPFYVKNKGWSSFYPSLTVVQHGIPCCEVHIGDVCLPPGHPDAINFDDSGVFDTFKSYDFTPMDSSAVYVLSSMARQRRASLSCGGPGGQDFARSGFSKNCGSPGSSQLSSNSLYAKAVKNHSSGTVSATSPNKCKRPMNAFMLFAKKYRVEYTQMYPGKDNRAISVILGDRWKKMKNEERRMYTLEAKALAEEQKRLNPDCWKRKRTNSGSQQH

SEQ ID NO: 857126 - protein, 516 aa, Homo sapiens
GGRRSLKDLVMATGLSEHHNMVWEVKTNQMPNAVQKLLLVMDKRASGMNDSLELLQCNENLPSSPGYNSCDEHMELDDLPELQAVQSDPTQSGMYQLSSDVSHQEYPRSSWNQNTSDIPETTYRENEVDWLTELANIATSPQSPLMQCSFYNRSSPVHIIATSKTAFPHHHWKEETPVRHERANSESESGIFCMSSLSDDDDLGWCNSWPSTVWHCFLKGTRLCFHKGSNKEWQDVEDFARAEGCDNEEDLQMGIHKGYGSDGLKLLSHEESVSFGESVLKLTFDPGTVEDGLLTVECKLDHPFYVKNKGWSSFYPSLTVVQHGIPCCEVHIGDVCLPPGHPDAINFDDSGVFDTFKSYDFTPMDSSAVYVLSSMARQRRASLSCGGPGGQDFARSGFSKNCGSPGSSQLSSNSLYAKAVKNHSSGTVSATSPNKCKRPMNAFMLFAKKYRVEYTQMYPGKDNRAISVILGDRWKKMKNEERRMYTLEAKALAEEQKRLNPDCWKRKRTNSGSQQH

SEQ ID NO: 857127 - protein, 441 aa, Homo sapiens [sequence omitted]

SEQ ID NO: 857128 - protein, 510 aa, Homo sapiens
GGRRSLKDLVMATGLSEHHNMVWEVKTNQMPNAVQKLLLVMDKRASGMNDSLELLQCNENLPSSPGYNSCDEHMELDDLPELQAVQSDPTQSGMYQLSSDVSHQEYPRSSWNQNTSDIPETTYRENEVDWLTELANIATSPQSPLMQCSFYNRSSPVHIIATSKSLHSYARPPPVSSSSKSEPAFPHHHWKEETPVRHERANSESESGIFCMSSLSDDDDLGWCNSWPSTVWHCFLKGTRLCFHKGSNKEWQDVEDFARAEGCDNEEDLQMGIHKGYGSDGLKLLSHEESVSFGESVLKLTFDPGTVEDGLLTVECKLDHPFYVKNKGWSSFYPSLTVVQHGIPCCEVHIGDVCLPPGHPDAINFDDSGVFDTFKSYDFTPMDSSAVYVLSSMARQRRASLSCGGPGGQDFARSGFSKNCGSPGSSQLSSNSLYAKAVKNHSSGTVSATSPNKCKRPMNAFMLFAKKYRVEYTQMYPGKDNRRSLAVSPKLESSGTISAHCNLRLPGSKP

SEQ ID NO: 857129 - protein, 525 aa, Homo sapiens
GGRRSLKDLVMATGLSEHHNMVWEVKTNQMPNAVQKLLLVMDKRASGMNDSLELLQCNENLPSSPGYNSCDEHMELDDLPELQAVQSDPTQSGMYQLSSDVSHQEYPRSSWNQNTSDIPETTYRENEVDWLTELANIATSPQSPLMQCSFYNRSSPVHIIATSKSLHSYARPPPVSSSSKSEPAFPHHHWKEETPVRHERANSESESGIFCMSSLSDDDDLGWCNSWPSTVWHCFLKGTRLCFHKGSNKEWQDVEDFARAEGCDNEEDLQMGIHKGYGSDGLKLLSHEESVSFGESVLKLTFDPGTVEDGLLTVECKLDHPFYVKNKGWSSFYPSLTVVQHGIPCCEVHIGDVCLPPGHPDAINFDDSGVFDTFKSYDFTPMDSSAVYVLSSMARQRRASLSCGGPGGQDFARSGFSKNCGSPGSSQLSSNSLYAKAVKNHSSGTVSATSPNKCKRPMNAFMLFAKKYRVEYTQMYPGKDNRWKKMKNEERRMYTLEAKALAEEQKRLNPDCWKRKRTNSGSQQH

SEQ ID NO: 857130 - protein, 201 aa, Homo sapiens
  misc_feature (5)..(5): Xaa can be any naturally occurring amino acid
  misc_feature (18)..(18): Xaa can be any naturally occurring amino acid
  misc_feature (21)..(21): Xaa can be any naturally occurring amino acid
  misc_feature (38)..(38): Xaa can be any naturally occurring amino acid
PRKKXAPFSRKFGNFHHXLDXNDSQPTERHKFSHWDLXCPPLCYDFTPMDSSAVYVLSSMARQRRASLSCGGPGGQDFARSGFSKNCGSPGSSQLSSNSLYAKAVKNHSSGTVSATSPNKCKRPMNAFMLFAKKYRVEYTQMYPGKDNRAISVILGDRWKKMKNEERRMYTLEAKALAEEQKRLNPDCWKRKRTNSVCFNK

SEQ ID NO: 857131 - protein, 142 aa, Homo sapiens
MARQRRASLSCGGPGGQDFARSGFSKNCGSPGSSQLSSNSLYAKAVKNHSSGTVSATSPNKCKRPMNAFMLFAKKYRVEYTQMYPGKDNRAISVILGDRWKKMKNEERRMYTLEAKALAEEQKRLNPDCWKRKRTNSVCFNK

SEQ ID NO: 857132 - protein, 514 aa, Homo sapiens; identical to SEQ ID NO: 857124

SEQ ID NO: 857133 - protein, 514 aa, Homo sapiens; identical to SEQ ID NO: 857124

SEQ ID NO: 857134 - protein, 199 aa, Homo sapiens
MVWEVKTNQMPNAVQKLLLVMDKRASGMNDSLELLQCNENLPSSPGYNSCDEHMELDDLPELQAVQSDPTQSGMYQLSSDVSHQEYPRSSWNQNTSDIPETTYRENEVDWLTELANIATSPQSPLMQCSFYNRSSPVHIIATSKSLHSYARPPPVSSSSKSEPAFPHHHWKEETPVRHERVSLFMRLNFYKVCTTVEVH

SEQ ID NO: 857135 - protein, 514 aa, Homo sapiens; identical to SEQ ID NO: 857124

SEQ ID NO: 857136 - protein, 534 aa, Homo sapiens
GGRRSLKDLVMATGLSEHHNMVWEVKTNQMPNAVQKLLLVMDKRASGMNDSLELLQCNENLPSSPGYNSCDEHMELDDLPELQAVQSDPTQSGMYQLSSDVSHQEYPRSSWNQNTSDIPETTYRENEVDWLTELANIATSPQSPLMQCSFYNRSSPVHIIATSKSLHSYARPPPVSSSSKSEPAFPHHHWKEETPVRHERANSESESGIFCMSSLSDDDDLGWCNSWPSTVWHCFLKGTRLCFHKGSNKEWQDVEDFARAEGCDNEEDLQMGIHKGYGSDGLKLLSHEESVSFGESVLKLTFDPGTVEDGLLTVECKLDHPFYVKNKGWSSFYPSLTVVQHGIPCCEVHIGDVCLPPGHPDAINFDDSGVFDTFKSYDFTPMDSSAVYVLSSMARQRRASLSCGGPGGQDFARSGFSKNCGSPGSSQLSSNSLYAKAVKNHSSGTVSATSPNKCKRPMNAFMLFAKKYRVEYTQMYPGKDNRAISVILGDRWKKMKNEERRMYTLEAKALAEEQKRLNPDCWKRKRTNSGSQQH

SEQ ID NO: 857137 - protein, 514 aa, Homo sapiens; identical to SEQ ID NO: 857125

SEQ ID NO: 857138 - protein, 276 aa, Homo sapiens
GGRRSLKDLVMATGLSEHHNMVWEVKTNQMPNAVQKLLLVMDKRASGMNDSLELLQCNENLPSSPGYNSCDEHMELDDLPELQAVQSDPTQSGMYQLSSDVSHQEYPRSSWNQNTSDIPETTYRENEVDWLTELANIATSPQSPLMQCSFYNRSSPVHIIATSKSLHSYARPPPVSSSSKSEPAFPHHHWKEETPVRHERANSESESGIFCMSSLSDDDDLGWCNSWPSTVWHCFLKGTRLCFHKGSNKEWQDVEDFARAEGCDNEEDLQMGIHKL

SEQ ID NO: 857139 - protein, 302 aa, Homo sapiens
MDQAITVGAPVIGLNDSGGARIQEGVESLAGYADIFLRNVTASGVIPQISLIMGPCAGGAVYSPALTDFTFMVKDTSYLFITGPDVVKSVTNEDVTQEELGGAKTHTTMSGVAHRAFENDVDALCNLRDFFNYLPLSSQDPAPVRECHDPSDRLVPELDTIVPLESTKAYNMVDIIHSVVDEREFFEIMPNYAKNIIVGFARMNGRTVGIVGNQPKVASGCLDINSSVKGARFVRFCDAFNIPLITFVDVPGFLPGKFLTEWGLGELPFPVRCPLYLEIFLQNSPRTCDFSMYSGCPEDRAV

SEQ ID NO: 857140 - protein, 163 aa, Homo sapiens
AVVSTQSGYYGRGVGDAPAQQKWRRHYGWRRSGQGSAFWRAVSAPRSAAFAARPPLLTNAKKKKKKKKSFVGGPGAPGRRFLKTPFCGGGGAPIVVLGTHVWPKGVFPGENPGAREQWCGVGSLPNKKKARGEPPGGVLWTTPQIAQGRGGPDRRRSTHKGTL

SEQ ID NO: 857141 - protein, 562 aa, Homo sapiens
APYPRFSTCVLRCAGRGRAGTAKMAAALRVAAVGARLSVLASGLRAAVRSLCSQATSVNERIENKRRTALLGGGQRRIDAQHKRGKLTARERISLLLDPGSFVESDMFVEHRCADFGMAADKNKFPGDSVVTGRGRINGRLVYVFSQDFTVFGGSLSGAHAQKICKIMDQAITVGAPVIGLNDSGGARIQEGVESLAGYADIFLRNVTASGVIPQISLIMGPCAGGAVYSPALTDFTFMVKDTSYLFITGPDVVKSVTNEDVTQEELGGAKTHTTMSGVAHRAFENDVDALCNLRDFFNYLPLSSQDPAPVRECHDPSDRLVPELDTIVPLESTKAYNMVDIIHSVVDEREFFEIMPNYAKNIIVGFARMNGRTVGIVGNQPKVASGCLDINSSVKGARFVRFCDAFNIPLITFVDVPGFLPGTAQEYGGIIRHGAKLLYAFAEATVPKVTVITRKAYGGAYDVMSSKHLCGDTNYAWPTAEIAVMGAKGAVEIIFKGHENVEAAQAEYIEKFANPFPAAVRGFVDDIIQPSSTRARICCDLDVLASKKVQRPWRKHANIPL

SEQ ID NO: 857142 - protein, 469 aa, Homo sapiens
APYPRFSTCVLRCAGRGRAGTAKMAAALRVAAVGARLSVLASGLRAAVRSLCSQATSVNERIENKRRTALLGGGQRRIDAQHKRGKLTARERISLLLDPGSFVESDMFVEHRCADFGMAADKNKFPGDSVVTGRGRINGRLVYVFSQDFTVFGGSLSGAHAQKICKIMDQAITVGAPVIGLNDSGGARIQEGVESLAGYADIFLRNVTASGVIPQISLIMGPCAGGAVYSPALTDFTFMVKDTSYLFITGPDVVKSVTNEDVTQEELGGAKTHTTMSGVAHRAFENDVDALCNLRDFFNYLPLSSQDPAPVRECHDPSDRLVPELDTIVPLESTKAYNMVDIIHSVVDEREFFEIMPNYAKNIIVGFARMNGRTVGIVGNQPKVASGCLDINSSVKGARFVRFCDAFNIPLITFVDVPGFLPGKFLTEWGLGELPFPVRCPLYLEIFLQNSPRTCDFSMYSGCPEDRAV

SEQ ID NO: 857143 - protein, 554 aa, Homo sapiens
GANRKEAPCAGVFNTRHEALRVAAVGARLSVLASGLRAAVRSLCSQATSVNERIENKRRTALLGGGQRRIDAQHKRGKLTARERISLLLDPGSFVESDMFVEHRCADFGMAADKNKFPGDSVVTGRGRINGRLVYVFSQDFTVFGGSLSGAHAQKICKIMDQAITVGAPVIGLNDSGGARIQEGVESLAGYADIFLRNVTASGVIPQISLIMGPCAGGAVYSPALTDFTFMVKDTSYLFITGPDVVKSVTNEDVTQEELGGAKTHTTMSGVAHRAFENDVDALCNLRDFFNYLPLSSQDPAPVRECHDPSDRLVPELDTIVPLESTKAYNMVDIIHSVVDEREFFEIMPNYAKNIIVGFARMNGRTVGIVGNQPKVASGCLDINSSVKGARFVRFCDAFNIPLITFVDVPGFLPGTAQEYGGIIRHGAKLLYAFAEATVPKVTVITRKAYGGAYDVMSSKHLCGDTNYAWPTAEIAVMGAKGAVEIIFKGHENVEAAQAEYIEKFANPFPAAVRGFVDDIIQPSSTRARICCDLDVLASKKVQRPWRKHANIPL

SEQ ID NO: 857144 - protein, 581 aa, Homo sapiens
SSGINSEWLLRPGGRGRAGTAKMAAALRVAAVGARLSVLASGLRAAVRSLCSQATSVNERIENKRRTALLGGGQRRIDAQHKRGKLTARERISLLLDPGSFVESDMFVEHRCADFGMAADKNKFPGDSVVTGRGRINGRLVYVFSQQIIGWAQWLPLVISALWEAEDFTVFGGSLSGAHAQKICKIMDQAITVGAPVIGLNDSGGARIQEGVESLAGYADIFLRNVTASGVIPQISLIMGPCAGGAVYSPALTDFTFMVKDTSYLFITGPDVVKSVTNEDVTQEELGGAKTHTTMSGVAHRAFENDVDALCNLRDFFNYLPLSSQDPAPVRECHDPSDRLVPELDTIVPLESTKAYNMVDIIHSVVDEREFFEIMPNYAKNIIVGFARMNGRTVGIVGNQPKVASGCLDINSSVKGARFVRFCDAFNIPLITFVDVPGFLPGTAQEYGGIIRHGAKLLYAFAEATVPKVTVITRKAYGGAYDVMSSKHLCGDTNYAWPTAEIAVMGAKGAVEIIFKGHENVEAAQAEYIEKFANPFPAAVRGFVDDIIQPSSTRARICCDLDVLASKKVQRPWRKHANIPL

SEQ ID NO: 857145 - protein, 396 aa, Homo sapiens
SLLLAFGLLCLPWLQEGSAFPTIPLSRLFDNSYADIFLRNVTASGVIPQISLIMGPCAGGAVYSPALTDFTFMVKDTSYLFITGPDVVKSVTNEDVTQEELGGAKTHTTMSGVAHRAFENDVDALCNLRDFFNYLPLSSQDPAPVRECHDPSDRLVPELDTIVPLESTKAYNMVDIIHSVVDEREFFEIMPNYAKNIIVGFARMNGRTVGIVGNQPKVASGCLDINSSVKGARFVRFCDAFNIPLITFVDVPGFLPGTAQEYGGIIRHGAKLLYAFAEATVPKVTVITRKAYGGAYDVMSSKHLCGDTNYAWPTAEIAVMGAKGAVEIIFKGHENVEAAQAEYIEKFANPFPAAVRGFVDDIIQPSSTRARICCDLDVLASKKVQRPWRKHANIPL

SEQ ID NO: 857146 - protein, 398 aa, Homo sapiens
GGSVRGGDGGSVRSTCPKDLIMDQAITVGAPVIGLNDSGGARIQEGVESLAGYADIFLRNVTASGVIPQISLIMGPCAGGAVYSPALTDFTFMVKDTSYLFITGPDVVKSVTNEDVTQEELGGAKTHTTMSGVAHRAFLSSQDPAPVRECHDPSDRLVPELDTIVPLESTKAYNMVDIIHSVVDEREFFEIMPNYAKNIIVGFARMNGRTVGIVGNQPKVASGCLDINSSVKGARFVRFCDAFNIPLITFVDVPGFLPGTAQEYGGIIRHGAKLLYAFAEATVPKVTVITRKAYGGAYDVMSSKHLCGDTNYAWPTAEIAVMGAKGAVEIIFKGHENVEAAQAEYIEKFANPFPAAVRGFVDDIIQPSSTRARICCDLDVLASKKVQRPWRKHANIPL

SEQ ID NO: 857147 - protein, 562 aa, Homo sapiens; identical to SEQ ID NO: 857141

SEQ ID NO: 857148 - protein, 561 aa, Homo sapiens
SSGINSEWLLRPGGRGRAGTAKMAAALRVAAVGARLSVLASGLRAAVRSLCSQATSVNERIENKRRTALLGGGQRRIDAQHKRGKLTARERISLLLDPGSFVESDMFVEHRCADFGMAADKNKFPGDSVVTGRGRINGRLVYVFSQDFTVFGGSLSGAHAQKICKIMDQAITVGAPVIGLNDSGGARIQEGVESLAGYADIFLRNVTASGVIPQISLIMGPCAGGAVYSPALTDFTFMVKDTSYLFITGPDVVKSVTNEDVTQEELGGAKTHTTMSGVAHRAFENDVDALCNLRDFFNYLPLSSQDPAPVRECHDPSDRLVPELDTIVPLESTKAYNMVDIIHSVVDEREFFEIMPNYAKNIIVGFARMNGRTVGIVGNQPKVASGCLDINSSVKGARFVRFCDAFNIPLITFVDVPGFLPGTAQEYGGIIRHGAKLLYAFAEATVPKVTVITRKAYGGAYDVMSSKHLCGDTNYAWPTAEIAVMGAKGAVEIIFKGHENVEAAQAEYIEKFANPFPAAVRGFVDDIIQPSSTRARICCDLDVLASKKVQRPWRKHANIPL

SEQ ID NO: 857149 - protein, 428 aa, Homo sapiens
APYPRFSTCVLRCAGRGRAGTAKMAAALRVAAVGARLSVLASGLRAAVRSLCSQATSVNERIENKRRTALLGGGQRRIDAQHKRGKLTARERISLLLDPGSFVESDMFVEHRCADFGMAADKNKFPGDSVVTGRGRINGRLVYVFSQDFTVFGGSLSGAHAQKICKIMDQAITVGAPVIGLNDSGGARIQEGVESLAGYADIFLRNVTASGVIPQISLIMGPCAGGAVYSPALTDFTFMVKDTSYLFITGPDVVKSVTNEDVTQEELGGAKTHTTMSGVAHRAFENDVDALCNLRDFFNYLPLSSQDPAPVRECHDPSDRLVPELDTIVPLESTKAYNMVDIIHSVVDEREFFEIMPNYAKNIIVGFARMNGRTVGIVGNQPKVASGCLDINSSVKGARFVRFCDAFNIPLITFVDVPGFLPGLWRCL

SEQ ID NO: 857150 - protein, 511 aa, Homo sapiens
RTRGSTDAWVLENKRRTALLGGGQRRIDAQHKRGKLTARERISLLLDPGSFVESDMFVEHRCADFGMAADKNKFPGDSVVTGRGRINGRLVYVFSQDFTVFGGSLSGAHAQKICKIMDQAITVGAPVIGLNDSGGARIQEGVESLAGYADIFLRNVTASGVIPQISLIMGPCAGGAVYSPALTDFTFMVKDTSYLFITGPDVVKSVTNEDVTQEELGGAKTHTTMSGVAHRAFENDVDALCNLRDFFNYLPLSSQDPAPVRECHDPSDRLVPELDTIVPLESTKAYNMVDIIHSVVDEREFFEIMPNYAKNIIVGFARMNGRTVGIVGNQPKVASGCLDINSSVKGARFVRFCDAFNIPLITFVDVPGFLPGTAQEYGGIIRHGAKLLYAFAEATVPKVTVITRKAYGGAYDVMSSKHLCGDTNYAWPTAEIAVMGAKGAVEIIFKGHENVEAAQAEYIEKFANPFPAAVRGFVDDIIQPSSTRARICCDLDVLASKKVQRPWRKHANIPL

SEQ ID NO: 857151 - protein, 544 aa, Homo sapiens
APYPRFSTCVLRCAGRGRAGTAKMAAALRVAAVGARLSVLASGLRAAVRSLCSQATSVNERIENKRRTALLGGGQRRIDAQHKRGKLTARERISLLLDPGSFVESDMFVEHRCADFGMAADKNKFPGDSVVTGRGRINGRLVYVFSQDFTVFGGSLSGAHAQKICKIMDQAITVGAPVIGLNDSGGARIQEGVESLAGYADIFLRNVTASGVIPQISLIMGPCAGGAVYSPALTDFTFMVKDTSYLFITGPDVVKSVTNEDVTQEELGGAKTHTTMSGVAHRAFLSSQDPAPVRECHDPSDRLVPELDTIVPLESTKAYNMVDIIHSVVDEREFFEIMPNYAKNIIVGFARMNGRTVGIVGNQPKVASGCLDINSSVKGARFVRFCDAFNIPLITFVDVPGFLPGTAQEYGGIIRHGAKLLYAFAEATVPKVTVITRKAYGGAYDVMSSKHLCGDTNYAWPTAEIAVMGAKGAVEIIFKGHENVEAAQAEYIEKFANPFPAAVRGFVDDIIQPSSTRARICCDLDVLASKKVQRPWRKHANIPL

SEQ ID NO: 857152 - protein, 153 aa, Homo sapiens
AAAGLLGALHLVMTLVVAAARAEKEGGCPPAASLRRGCHPALAEAGRAGPGGRAAAGAPAQSWAVGYRPEPGPRGARRTEWPSLSVIPSRAFPRLLSLPFQNFLTSRTFLPLGPLGRRGIFFGFIAANRYILGHFCFLGCGWLHADRAYFKMW

SEQ ID NO: 857153 - protein, 71 aa, Homo sapiens
GSTDVKPSLELPYTPPLESKQRRNLPSKIPLPTAMTSGSKSRNAQKTKGTSKLVDNRPPARPSVRARGTEL

SEQ ID NO: 857154 - protein, 1784 aa, Homo sapiens
AAAGLLGALHLVMTLVVAAARAEKEAFVQSESIIEVLRFDDGGLLQTETTLGLSSYQQKSISLYRGNCRPIRFEPPMLDFHEQPVGMPKMEKVYLHNPSSEETITLVSISATTSHFHASFFQNRKILPGGNTSFDVVFLARVVGNVENTLFINTSNHGVFTYQVFGVGVPNPYRLRPFLGARVPVNSSFSPIINIHNPHSEPLQVVEMYSSGGDLHLELPTGQQGGTRKLWEIPPYETKGVMRASFSSREADNHTAFIRIKTNASDSTEFIILPVEVEVTTAPGIYSSTEMLDFGTLRTQDLPKVLNLHLLNSGTKDVPITSVRPTPQNDAITVHFKPITLKASESKYTKVASISFDASKAKKPSQFSGKITVKAKEKSYSKLEIPYQAEVLDGYLGFDHAATLFHIRDSPADPVERPIYLTNTFSFAILIHDVLLPEEAKTMFKVHNFSKPVLILPNESGYIFTLLFMPSTSSMHIDNNILLITNASKFHLPVRVYTGFLDYFVLPPKIEERFIDFGVLSATEASNILFAIINSNPIELAIKSWHIIGDGLSIELVAVERGNRTTIISSLPEFEKSSLSDQSSVTLASGYFAVFRVKLTAKKLEGIHDGAIQITTDYEILTIPVKAVIAVGSLTCFPKHVVLPPSFPGKIVHQSLNIMNSFSQKVKIQQIRSLSEDVRFYYKRLRGNKEDLEPGKKSKIANIYFDPGLQCGDHCYVGLPFLSKSEPKVQPGVAMQEDMWDADWDLHQSLFKGWTGIKENSGHRLSAIFEVNTDLQKNIISKITAELSWPSILSSPRHLKFPLTNTNCSSEEEITLENPADVPVYVQFIPLALYSNPSVFVDKLVSRFNLSKVAKIDLRTLEFQVFRNSAHPLQSSTGFMEGLSRHLILNLILKPGEKKSVKVKFTPVHNRTVSSLIIVRNNLTVMDAVMVQGQGTTENLRVAGKLPGPGSSLRFKITEALLKDCTDSLKLREPNFTLKRTFKVENTGQLQIHIETIEISGYSCEGYGFKVVNCQEFTLSANASRDIIIFALFLLVIGTAYLEAQGIWEPFRRRLSFEASNPPFDVGRPFDLRRIVGISSEGNLNTLSCDPGHSRGFCGAGGSSSRPSAGSHKQCGPSVHPHSSHSNRNSADVENVRAKNSSSTSSRTSAQAASSQSANKTSPLVLDSNTVTQGHTAGRKSKGAKQSQHGSQHHAHSPLEQHPQPPLPPPVPQPQELQPERLSPAPLAHPSHPERASSARHSSEDSDITSLIEAMDKDFDHHDSPALEVFTEQPPSPLPKSKGKGKPLQRKVKPPKKQEEKEKKGKGKPQEDELKDSLADDDSSSTTTETSNPDTEPLLKEDTEKQKGKQAMPEKHESEMSQVKQKSKKLLNIKKEIPTDVKPSSLELPYTPPLESKQRRNLPSKIPLPTAMTSGSKSRNAQKTKGTSKLVDNRPPALAKFLPNSQELGNTSSSEGEKDSPPPEWDSVPVHKPGSSTDSLYKLSLQTLNADIFLKQRQTSPTPASPSPPAAPCPFVARGSYSSIVNSSSSSDPKIKQPNGSKHKLTKAASLPGKNGNPTFAAVTAGYDKSPGGNGFAKVSSNKTGFSSSLGISHAPVDSDGSDSSGLWSPVSNPSSPDFTPLNSFSAFGNSFNLTGEVFSKLGLSRSCNQASQRSWNEFNSGPSYLWESPATDPSPSWPASSGSPTHTATSVLGNTSGLWSTTPFSSSIWSSNLSSALPFTTPANTLASIGLMGTENSPAPHAPSTSSPADDLGQTYNPWRIWSPTIGRRSSDPWSNSHFPHEN

SEQ ID NO: 857155 - protein, 710 aa, Homo sapiens
TKGDLCTKGDLCTKGDAVHEVGFCGAGGSSSRPSAGSHKQCGPSVHPHSSHSNRNSADVENVRAKNSSSTSSRTSAQAASSQSANKTSPLVLDSNTVTQGHTAGRKSKGAKQSQHGSQHHAHSPLEQHPQPPLPPPVPQPQELQPERLSPAPLAHPSHPERASSARHSSEDSDITSLIEAMDKDFDHHDSPALEVFTEQPPSPLPKSKGKGKPLQRKVKPPKKQEEKEKKGKGKPQEDELKDSLADDDSSSTTTETSNPDTEPLLKEDTEKQKGKQAMPEKHESEMSQVKQKSKKLLNIKKEIPTDVKPSSLELPYTPPLESKQRRNLPSKIPLPTAMTSGSKSRNAQKTKGTSKLVDNRPPALAKFLPNSQELGNTSSSEGEKDSPPPEWDSVPVHKPGSSTDSLYKLSLQTLNADIFLKQRQTSPTPASPSPPAAPCPFVARGSYSSIVNSSSSSDPKIKQPNGSKHKLTKAASLPGKNGNPTFAAVTAGYDKSPGGNGFAKVSSNKTGFSSSLGISHAPVDSDGSDSSGLWSPVSNPSSPDFTPLNSFSAFGNSFNLTGEVFSKLGLSRSCNQASQRSWNEFNSGPSYLWESPATDPSPSWPASSGSPTHTATSVLGNTSGLWSTTPFSSSIWSSNLSSALPFTTPANTLASIGLMGTENSPAPHAPSTSSPADDLGQTYNPWRIWSPTIGRRSSDPWSNSHFPHEN

SEQ ID NO: 857156 - protein, 402 aa, Homo sapiens
SSSNCNDKWNLAGRFLRAYFPSKIPLPTAMTSGSKSRNAQKTKGTSKLVDNRPPALAKFLPNSQELGNTSSSEGEKDSPPPEWDSVPVHKPGSSTDSLYKLSLQTLNADIFLKQRQTSPTPASPSPPAAPCPFVARGSYSSIVNSSSSSDPKIKQPNGSKHKLTKAASLPGKNGNPTFAAVTAGYDKSPGGNGFAKVSSNKTGFSSSLGISHAPVDSDGSDSSGLWSPVSNPSSPDFTPLNSFSAFGNSFNLTGEVFSKLGLSRSCNQASQRSWNEFNSGPSYLWESPATDPSPSWPASSGSPTHTATSVLGNTSGLWSTTPFSSSIWSSNLSSALPFTTPANTLASIGLMGTENSPAPHAPSTSSPADDLGQTYNPWRIWSPTIGRRSSDPWSNSHFPHEN

SEQ ID NO: 857157 - protein, 1846 aa, Homo sapiens
AAAGLLGALHLVMTLVVAAARAEKEAFVQSESIIEVLRFDDGGLLQTETTLGLSSYQQKSISLYRGNCRPIRFEPPMLDFHEQPVGMPKMEKVYLHNPSSEETITLVSISATTSHFHASFFQNRKILPGGNTSFDVVFLARVVGNVENTLFINTSNHGVFTYQVFGVGVPNPYRLRPFLGARVPVNSSFSPIINIHNPHSEPLQVVEMYSSGGDLHLELPTGQQGGTRKLWEIPPYETKGVMRASFSSREADNHTAFIRIKTNASDSTEFIILPVEVEVTTAPGIYSSTEMLDFGTLRTQDLPKVLNLHLLNSGTKDVPITSVRPTPQNDAITVHFKPITLKASESKYTKVASISFDASKAKKPSQFSGKITVKAKEKSYSKLEIPYQAEVLDGYLGFDHAATLFHIRDSPADPVERPIYLTNTFSFAILIHDVLLPEEAKTMFKVHNFSKPVLILPNESGYIFTLLFMPSTSSMHIDNNILLITNASKFHLPVRVYTGFLDYFVLPPKIEERFIDFGVLSATEASNILFAIINSNPIELAIKSWHIIGDGLSIELVAVERGNRTTIISSLPEFEKSSLSDQSSVTLASGYFAVFRVKLTAKKLEGIHDGAIQITTDYEILTIPVKAVIAVGSLTCFPKHVVLPPSFPGKIVHQSLNIMNSFSQKVKIQQIRSLSEDVRFYYKRLRGNKEDLEPGKKSKIANIYFDPGLQCGDHCYVGLPFLSKSEPKVQPGVAMQEDMWDADWDLHQSLFKGWTGIKENSGHRLSAIFEVNTDLQKNIISKITAELSWPSILSSPRHLKFPLTNTNCSSEEEITLENPADVPVYVQFIPLALYSNPSVFVDKLVSRFNLSKVAKIDLRTLEFQVFRNSAHPLQSSTGFMEGLSRHLILNLILKPGEKKSVKVKFTPVHNRTVSSLIIVRNNLTVMDAVMVQGQGTTENLRVAGKLPGPGSSLRFKITEALLKDCTDSLKLREPNFTLKRTFKVENTGQLQIHIETIEISGYSCEGYGFKVVNCQEFTLSANASRDIIILFTPDFTASRVIRELKFITTSGSEFVFILNASLPYHMLATCAEALPRPNWELALYIIISGIMSALFLLVIGTAYLEAQGIWEPFRRRLSFEASNPPFDVGRPFDLRRIVGISSEGNLNTLSCDPGHSRGFCGAGGSSSRPSAGSHKQCGPSVHPHSSHSNRNSADVENVRAKNSSSTSSRTSAQAASSQSANKTSPLVLDSNTVTQGHTAGRKSKGAKQSQHGSQHHAHSPLEQHPQPPLPPPVPQPQELQPERLSPAPLAHPSHPERASSARHSSEDSDITSLIEAMDKDFDHHDSPALEVFTEQPPSPLPKSKGKGKPLQRKVKPPKKQEEKEKKGKGKPQEDELKDSLADDDSSSTTTETSNPDTEPLLKEDTEKQKGKQAMPEKHESEMSQVKQKSKKLLNIKKEIPTDVKPSSLELPYTPPLESKQRRNLPSKIPLPTAMTSGSKSRNAQKTKGTSKLVDNRPPALAKFLPNSQELGNTSSSEGEKDSPPPEWDSVPVHKPGSSTDSLYKLSLQTLNADIFLKQRQTSPTPASPSPPAAPCPFVARGSYSSIVNSSSSSDPKIKQPNGSKHKLTKAASLPGKNGNPTFAAVTAGYDKSPGGNGFAKVSSNKTGFSSSLGISHAPVDSDGSDSSGLWSPVSNPSSPDFTPLNSFSAFGNSFNLTGEVFSKLGLSRSCNQASQRSWNEFNSGPSYLWESPATDPSPSWPASSGSPTHTATSVLGNTSGLWSTTPFSSSIWSSNLSSALPFTTPANTLASIGLMGTENSPAPHAPSTSSPADDLGQTYNPWRIWSPTIGRRSSDPWSNSHFPHEN

SEQ ID NO: 857158 - protein, 263 aa, Homo sapiens
MSSLFASFSSDPKIKQPNGSKHKLTKAASLPGKNGNPTFAAVTAGYDKSPGGNGFAKVSSNKTGFSSSLGISHAPVDSDGSDSSGLWSPVSNPSSPDFTPLNSFSAFGNSFNLTGEVFSKLGLSRSCNQASQRSWNEFNSGPSYLWESPATDPSPSWPASSGSPTHTATSVLGNTSGLWSTTPFSSSIWSSNLSSALPFTTPANTLASIGLMGTENSPAPHAPSTSSPADDLGQTYNPWRIWSPTIGRRSSDPWSNSHFPHEN

SEQ ID NO: 857159 - protein, 1356 aa, Homo sapiens
AAAGLLGALHLVMTLVVAAARAEKEAFVQSESIIEVLRFDDGGLLQTETTLGLSSYQQKSISLYRGNCRPIRFEPPMLDFHEQPVGMPKMEKVYLHNPSSEETITLVSISATTSHFHASFFQNRKILPGGNTSFDVVFLARVVGNVENTLFINTSNHGVFTYQVFGVGVPNPYRLRPFLGARVPVNSSFSPIINIHNPHSEPLQVVEMYSSGGDLHLELPTGQQGGTRKLWEIPPYETKGVMRASFSSREADNHTAFIRIKTNASDSTEFIILPVEVEVTTAPGIYSSTEMLDFGTLRTQDLPKVLNLHLLNSGTKDVPITSVRPTPQNDAITVHFKPITLKASESKYTKVASISFDASKAKKPSQFSGKITVKAKEKSYSKLEIPYQAEVLDGYLGFDHAATLFHIRDSPADPVERPIYLTNTFSFAILIHDVLLPEEAKTMFKVHNFSKPVLILPNESGYIFTLLFMPSTSSMHIDNNILLITNASKFHLPVRVYTGFLDYFVLPPKIEERFIDFGVLSATEASNILFAIINSNPIELAIKSWHIIGDGLSIELVAVERGNRTTIISSLPEFEKSSLSDQSSVTLASGYFAVFRVKLTAKKLEGIHDGAIQITTDYEILTIPVKAVIAVGSLTCFPKHVVLPPSFPGKIVHQSLNIMNSFSQKVKIQQIRSLSEDVRFYYKRLRGNKEDLEPGKKSKIANIYFDPGLQCGDHCYVGLPFLSKSEPKVQPGVAMQEDMWDADWDLHQSLFKGWTGIKENSGHRLSAIFEVNTDLQKNIISKITAELSWPSILSSPRHLKFPLTNTNCSSEEEITLENPADVPVYVQFIPLALYSNPSVFVDKLVSRFNLSKVAKIDLRTLEFQVFRNSAHPLQSSTGFMEGLSRHLILNLILKPGEKKSVKVKFTPVHNRTVSSLIIVRNNLTVMDAVMVQGQGTTENLRVAGKLPGPGSSLRFKITEALLKDCTDSLKLREPNFTLKRTFKVENTGQLQIHIETIEISGYSCEGYGFKVVNCQEFTLSANASRDIIILFTPDFTASRVIRELKFITTSGSEFVFILNASLPYHMLATCAEALPRPNWELALYIIISGIMSALFLLVIGTAYLEAQGIWEPFRRRLSFEASNPPFDVGRPFDLRRIVGISSEGNLNTLSCDPGHSRGFCGAGGSSSRPSAGSHKQCGPSVHPHSSHSNRNSADVENVRAKNSSSTSSRTSAQAASSQSANKTSPLVLDSNTVTQGHTAGRKSKGAKQSQHGSQHHAHSPLEQHPQPPLPPPVPQPQELQPERLSPAPLAHPSHPERASSARHSSEDSDITSLIEAMDKDFDHHDSPALEVFTEQPPSPLPKSKGNHLPLPEIRDV

SEQ ID NO: 857160 - protein, 78 aa, Homo sapiens
FSRSPGSGLSCPPLEDVEDPPPLPEVGEVKTLTVRHTTQQGPGTLLLPSNPRVQRDVAAFSLKPVKQNTSKSFRLFSL

SEQ ID NO: 857161 - protein, 1846 aa, Homo sapiens; identical to SEQ ID NO: 857157

SEQ ID NO: 857162 - protein, 1807 aa, Homo sapiens
AAAGLLGALHLVMTLVVAAARAEKEAFVQSESIIEVLRFDDGGLLQTETTLGLSSYQQKSISLYRGNCRPIRFEPPMLDFHEQPVGMPKMEKVYLHNPSSEETITLVSISATTSHFHASFFQNRVFGVGVPNPYRLRPFLGARVPVNSSFSPIINIHNPHSEPLQVVEMYSSGGDLHLELPTGQQGGTRKLWEIPPYETKGVMRASFSSREADNHTAFIRIKTNASDSTEFIILPVEVEVTTAPGIYSSTEMLDFGTLRTQDLPKVLNLHLLNSGTKDVPITSVRPTPQNDAITVHFKPITLKASESKYTKVASISFDASKAKKPSQFSGKITVKAKEKSYSKLEIPYQAEVLDGYLGFDHAATLFHIRDSPADPVERPIYLTNTFSFAILIHDVLLPEEAKTMFKVHNFSKPVLILPNESGYIFTLLFMPSTSSMHIDNNILLITNASKFHLPVRVYTGFLDYFVLPPKIEERFIDFGVLSATEASNILFAIINSNPIELAIKSWHIIGDGLSIELVAVERGNRTTIISSLPEFEKSSLSDQSSVTLASGYFAVFRVKLTAKKLEGIHDGAIQITTDYEILTIPVKAVIAVGSLTCFPKHVVLPPSFPGKIVHQSLNIMNSFSQKVKIQQIRSLSEDVRFYYKRLRGNKEDLEPGKKSKIANIYFDPGLQCGDHCYVGLPFLSKSEPKVQPGVAMQEDMWDADWDLHQSLFKGWTGIKENSGHRLSAIFEVNTDLQKNIISKITAELSWPSILSSPRHLKFPLTNTNCSSEEEITLENPADVPVYVQFIPLALYSNPSVFVDKLVSRFNLSKVAKIDLRTLEFQVFRNSAHPLQSSTGFMEGLSRHLILNLILKPGEKKSVKVKFTPVHNRTVSSLIIVRNNLTVMDAVMVQGQGTTENLRVAGKLPGPGSSLRFKITEALLKDCTDSLKLREPNFTLKRTFKVENTGQLQIHIETIEISGYSCEGYGFKVVNCQEFTLSANASRDIIILFTPDFTASRVIRELKFITTSGSEFVFILNASLPYHMLATCAEALPRPNWELALYIIISGIMSALFLLVIGTAYLEAQGIWEPFRRRLSFEASNPPFDVGRPFDLRRIVGISSEGNLNTLSCDPGHSRGFCGAGGSSSRPSAGSHKQCGPSVHPHSSHSNRNSADVENVRAKNSSSTSSRTSAQAASSQSANKTSPLVLDSNTVTQGHTAGRKSKGAKQSQHGSQHHAHSPLEQHPQPPLPPPVPQPQELQPERLSPAPLAHPSHPERASSARHSSEDSDITSLIEAMDKDFDHHDSPALEVFTEQPPSPLPKSKGKGKPLQRKVKPPKKQEEKEKKGKGKPQEDELKDSLADDDSSSTTTETSNPDTEPLLKEDTEKQKGKQAMPEKHESEMSQVKQKSKKLLNIKKEIPTDVKPSSLELPYTPPLESKQRRNLPSKIPLPTAMTSGSKSRNAQKTKGTSKLVDNRPPALAKFLPNSQELGNTSSSEGEKDSPPPEWDSVPVHKPGSSTDSLYKLSLQTLNADIFLKQRQTSPTPASPSPPAAPCPFVARGSYSSIVNSSSSSDPKIKQPNGSKHKLTKAASLPGKNGNPTFAAVTAGYDKSPGGNGFAKVSSNKTGFSSSLGISHAPVDSDGSDSSGLWSPVSNPSSPDFTPLNSFSAFGNSFNLTGEVFSKLGLSRSCNQASQRSWNEFNSGPSYLWESPATDPSPSWPASSGSPTHTATSVLGNTSGLWSTTPFSSSIWSSNLSSALPFTTPANTLASIGLMGTENSPAPHAPSTSSPADDLGQTYNPWRIWSPTIGRRSSDPWSNSHFPHEN

SEQ ID NO: 857163 - protein, 1722 aa, Homo sapiens
AAAGLLGALHLVMTLVVAAARAEKEAFVQSESIIEVLRFDDGGLLQTETTLGLSSYQQKSISLYRGNCRPIRFEPPMLDFHEQPVGMPKMEKVYLHNPSSEETITLVSISATTSHFHASFFQNRKILPGGNTSFDVVFLARVVGNVENTLFINTSNHGVFTYQVFGVGVPNPYRLRPFLGARVPVNSSFSPIINIHNPHSEPLQVVEMYSSGGDLHLELPTGQQGGTRKLWEIPPYETKGVMRASFSSREADNHTAFIRIKTNASDSTEFIILPVEVEVTTAPGIYSSTEMLDFGTLRTQDLPKVLNLHLLNSGTKDVPITSVRPTPQNDAITVHFKPITLKASESKYTKVASISFDASKAKKPSQFSGKITVKAKEKSYSKLEIPYQAEVLDGYLGFDHAATLFHIRDSPADPVERPIYLTNTFSFAILIHDVLLPEEAKTMFKVHNFSKPVLILPNESGYIFTLLFMPSTSSMHIDNNILLITNASKFHLPVRVYTGFLDYFVLPPKIEERFIDFGVLSATEASNILFAIINSNPIELAIKSWHIIGDGLSIELVAVERGNRTTIISSLPEFEKSSLSDQSSVTLASGYFAVFRVKLTAKKLEGIHDGAIQITTDYEILTIPVKAVIAVGSLTCFPKHVVLPPSFPGKIVHQSLNIMNSFSQKVKIQQIRSLSEDVRFYYKRLRGNKEDLEPGKKSKIANIYFDPGLQCGDHCYVGLPFLSKSEPKVQPGVAMQEDMWDADWDLHQSLFKGWTGIKENSGHRLSAIFEVNTDLQKNIISKITAELSWPSILSSPRHLKFPLTNTNCSSEEEITLENPADVPVYVQFIPLALYSNPSVFVDKLVSRFNLSKVAKIDLRTLEFQVFRNSAHPLQSSTGFMEGLSRHLILNLILKPGEKKSVKVKFTPVHNRTVSSLIIVRNNLTVMDAVMVQGQGTTENLRVAGKLPGPGSSLRFKITEALLKDCTDSLKLREPNFTLKRTFKVENTGQLQIHIETIEISGYSCEGYGFKVVNCQEFTLSANASRDIIILFTPDFTASRVIRELKFITTSGSEFVFILNASLPYHMLATCAEALPRPNWELALYIIISGIMSALFLLVIGTAYLEAQGIWEPFRRRLSFEASNPPFDVGRPFDLRRIVGISSEGNLNTLSCDPGHSRGFCGAGGSSSRPSAGSHKQCGPSVHPHSSHSNRNSADVENVRAKNSSSTSSRTSAQAASSQSANKTSPLVLDSNTVTQGHTAGRKSKGAKQSQHGSQHHAHSPLEQHPQPPLPPPVPQPQELQPERLSPAPLAHPSHPERASSARHSSEDSDITSLIEAMDKDFDHHDSPALEVFTEQPPSPLPKSKGKGKPLQRKVKPPKKQEEKEKKGKGKPQEDELKDSLADDDSSSTTTETSNPDTEPLLKEDTEKQKGKQAMPEKHESEMSQVKQKSKKLLNIKKEIPTDVKPSSLELPYTPPLESKQRRNLPSKIPLPTAMTSGSKSRNAQKTKGTSKLVDNRPPALAKFLPNSQELGNTSSSEGEKDSPPPEWDSVPVHKPGSSTDSLYKLSLQTLNADIFLKQRQTSPTPASPSPPAAPCPFVARGSYSSIVNSSSSSDPKIKQPNGSKHKLTKAASLPGKNGNPTFAAVTAGYDKSPGGNGFAKVSSNKTGFSSSLGISHAPVDSDGSDSSGLWSPVSNPSSPDFTPLNSFSAFGNSFNLTGEVFSKLGLSRSCNQASRSLHLQSS

SEQ ID NO: 857164 - protein, 146 aa, Homo sapiens
FSVALPPYPLDPLPAGLSAGRFLFCRSRSSVTPAACGPPLHSAAPFGPATLAAPFPSPLQQTRWQASASWAQKTPLLLTLPPPPVQLTTWDRPTTRGGYGAPRLEEEARTLGLIRTFLTRIKLSKKQTNIVGPRLDHDVPVSETSF

SEQ ID NO: 857165 - protein, 1182 aa, Homo sapiens
AAAGLLGALHLVMTLVVAAARAEKEAFVQSESIIEVLRFDDGGLLQTETTLGLSSYQQKSISLYRGNCRPIRFEPPMLDFHEQPVGMPKMEKVYLHNPSSEETITLVSISATTSHFHASFFQNRKILPGGNTSFDVVFLARVVGNVENTLFINTSNHGVFTYQVFGVGVPNPYRLRPFLGARVPVNSSFSPIINIHNPHSEPLQVVEMYSSGGDLHLELPTGQQGGTRKLWEIPPYETKGVMRASFSSREADNHTAFIRIKTNASDSTEFIILPVEVEVTTAPGIYSSTEMLDFGTLRTQDLPKVLNLHLLNSGTKDVPITSVRPTPQNDAITVHFKPITLKASESKYTKVASISFDASKAKKPSQFSGKITVKAKEKSYSKLEIPYQAEVLDGYLGFDHAATLFHIRDSPADPVERPIYLTNTFSFAILIHDVLLPEEAKTMFKVHNFSKPVLILPNESGYIFTLLFMPSTSSMHIDNNILLITNASKFHLPVRVYTGFLDYFVLPPKIEERFIDFGVLSATEASNILFAIINSNPIELAIKSWHIIGDGLSIELVAVERGNRTTIISSLPEFEKSSLSDQSSVTLASGYFAVFRVKLTAKKLEGIHDGAIQITTDYEILTIPVKAVIAVGSLTCFPKHVVLPPSFPGKIVHQSLNIMNSFSQKVKIQQIRSLSEDVRFYYKRLRGNKEDLEPGKKSKIANIYFDPGLQCGDHCYVGLPFLSKSEPKVQPGVAMQEDMWDADWDLHQSLFKGWTGIKENSGHRLSAIFEVNTDLQKNIISKITAELSWPSILSSPRHLKFPLTNTNCSSEEEITLENPADVPVYVQFIPLALYSNPSVFVDKLVSRFNLSKVAKIDLRTLEFQVFRNSAHPLQSSTGFMEGLSRHLILNLILKPGEKKSVKVKFTPVHNRTVSSLIIVRNNLTVMDAVMVQGQGTTENLRVAGKLPGPGSSLRFKITEALLKDCTDSLKLREPNFTLKRTFKVENTGQLQIHIETIEISGYSCEGYGFKVVNCQEFTLSANASRDIIILFTPDFTASRVIRELKFITTSGSEFVFILNASLPYHMLATCAEALPRPNWELALYIIISGIMSALFLLVIGTAYLEAQGIWEPFRRRLSFEASNPPFDVGRPFDLRRIVGISSEGKYVHMLAINSLVYIDLADKITIKNKFLFIFAQEKKNQN

SEQ ID NO: 857166 - protein, 221 aa, Homo sapiens
GEQRAALPPAPKECTHPNVTNTLVQAESSDAGVRLRWGRGLTARPDASAMEEYAREPCPWRIVDDCGGAFTMGVIGGGVFQAIKGFRNAPVGIRHRLRGSANAVRIRAPQIGGSFAVWGGLFSTIDCGLVRLRGKEDPWNSITSGALTGAVLAARSGPLAMVGSAMMGGILLALIEGVGILLTRYTAQQFRNAPPFLEDPSQLPPKDGTPAPGYPSYQQYH

SEQ ID NO: 857167 - protein, 150 aa, Homo sapiens [sequence omitted]

SEQ ID NO: 857168 - protein, 271 aa, Homo sapiens
GEQRAALPPAPKECTHPNVTNTLVQAESSDAGVRLRWGRGLTARPDASAMEEYAREPCPWRIVDDCGGAFTMGVIGGGVFQAIKGFRNAPVCRLLSEAPLFIYSCSRSVSPTVNVSSERAESRPTLFMAVSLHMAWCLAHIGIRHRLRGSANAVRIRAPQIGGSFAVWGGLFSTIDCGLVRLRGKEDPWNSITSGALTGAVLAARSGPLAMVGSAMMGGILLALIEGVGILLTRYTAQQFRNAPPFLEDPSQLPPKDGTPAPGYPSYQQYH

SEQ ID NO: 857169 - protein, 186 aa, Homo sapiens
MAFPLQCRLLSEAPLFIYSCSRSVSPTVNVSSERAESRPTLFMAVSLHMAWCLAHIGIRHRLRGSANAVRIRAPQIGGSFAVWGGLFSTIDCGLVRLRGKEDPWNSITSGALTGAVLAARSGPLAMVGSAMMGGILLALIEGVGILLTRYTAQQFRNAPPFLEDPSQLPPKDGTPAPGYPSYQQYH

SEQ ID NO: 857170 - protein, 153 aa, Homo sapiens
GEQRAALPPAPKECTHPNVTNTLVQAESSDAGVRLRWGRGLTARPDASAMEEYAREPCPWRIVDDCGGAFTMGVIGGGVFQAIKGFRNAPVVSPGLPWVGVGLAILPTREAALKTAWSCQSRALIHSGAHSPTMCRAWLLYLGFCRDCKHGLC

SEQ ID NO: 857171 - protein, 186 aa, Homo sapiens
MYGSSSVNSDEGSAMEEYAREPCPWRIVDDCGGAFTMGVIGGGVFQAIKGFRNAPVGIRHRLRGSANAVRIRAPQIGGSFAVWGGLFSTIDCGLVRLRGKEDPWNSITSGALTGAVLAARSGPLAMVGSAMMGGILLALIEGVGILLTRYTAQQFRNAPPFLEDPSQLPPKDGTPAPGYPSYQQYH

SEQ ID NO: 857172 - protein, 192 aa, Homo sapiens
MIAVEPSLWVSSVAESSRPSRVSAMPLLSVSPTVNVSSERAESRPTLFMAVSLHMAWCLAHIGIRHRLRGSANAVRIRAPQIGGSFAVWGGLFSTIDCGLVRLRGKEDPWNSITSGALTGAVLAARSGPLAMVGSAMMGGILLALIEGVGILLTRYTAQQFRNAPPFLEDPSQLPPKDGTPAPGYPSYQQYH

SEQ ID NO: 857173 - protein, 334 aa, Homo sapiens
GGAEGSTSSSSKRVHPPQRYQYTRAGGKLRRRCASTLGAWPDCAARRQRHGGVRSGALVRQWAQASGILLRRQGQPWGSGGGGIGRTEPCTRLGGLLTYLPLPPLGSCHSGSVMRGHNQRSPWRIVDDCGGAFTMGVIGGGVFQAIKGFRNAPVCRLLSEAPLFIYSCSRSVSPTVNVSSERAESRPTLFMAVSLHMAWCLAHIGIRHRLRGSANAVRIRAPQIGGSFAVWGGLFSTIDCGLVRLRGKEDPWNSITSGALTGAVLAARSGPLAMVGSAMMGGILLALIEGVGILLTRYTAQQFRNAPPFLEDPSQLPPKDGTPAPGYPSYQQYH

SEQ ID NO: 857174 - protein, 186 aa, Homo sapiens; identical to SEQ ID NO: 857169

SEQ ID NO: 857175 - protein, 108 aa, Homo sapiens
RTVGQTWWLTPVIPALWEGKGDGSLENRSSRPAWSACRNPVSTKNTNNNNKKSAGYGGTCLYSQLLWKSKHKNVLNPGGRGCSKPRSCHCTPAWVTERDSVLKTKTNK

SEQ ID NO: 857176 - protein, 355 aa, Homo sapiens
GGRSSAAHDPERRSREAWALRRQEEDGEGRSRAAAASLAHSLAHSPAPSLPPLPSPAPALAPAHSLLGLLLGRMSGSSLPSALALSLLLVSGSLLPGPGAAQNEPRIVTSEEVIIRDSPVLPVTLQCNLTSSSHTLTYSYWTKNGVELSATRKNASNMEYRINKPRAEDSGEYHCVYHFVSAPKANATIEVKAAPDITGHKRSENKNEGQDATMYCKSVGYPHPDWIWRKKENGMPMDIVNTSGRFFIINKENYTELNIVNLQITEDPGEYECNATNAIGSASVVTVLRVRSHLAPLWPFLGILAEIIILVVIIVVYEKRKRPDEVPDDDEPAGPMKTNSTNNHKDKNLRQRNTN

SEQ ID NO: 857177 - protein, 471 aa, Homo sapiens
GGRSSAAHDPERRSREAWALRRQEEDGEGRSRAAAASLAHSLAHSPAPSLPPLPSPAPALAPAHSLLGLLLGRMSGSSLPSALALSLLLVSGSLLPGPGAAQNAGFVKSPMSETKLTGDAFELYCDVVGSPTPEIQWWYAEVNRAESFRQLWDGARKRRVTVNTAYGSNGVSVLRITRLTLEDSGTYECRASNDPKRNDLRQNPSITWIRAQATISVLQKPRIVTSEEVIIRDSPVLPVTLQCNLTSSSHTLTYSYWTKNGVELSATRKNASNMEYRINKPRAEDSGEYHCVYHFVSAPKANATIEVKAAPDITGHKRSENKNEGQDATMYCKSVGYPHPDWIWRKKENGMPMDIVNTSGRFFIINKENYTELNIVNLQITEDPGEYECNATNAIGSASVVTVLRVRSHLAPLWPFLGILAEIIILVVIIVVYEKRKRPDEVPDDDEPAGPMKTNSTNNHKDKNLRQRNTN

SEQ ID NO: 857178 - protein, 361 aa, Homo sapiens
MSETKLTGDAFELYCDVVGSPTPEIQWWYAEVNRAESFRQLWDGARKRRVTVNTAYGSNGVSVLRITRLTLEDSGTYECRASNDPKRNDLRQNPSITWIRAQATISVLQKPRIVTSEEVIIRDSPVLPVTLQCNLTSSSHTLTYSYWTKNGVELSATRKNASNMEYRINKPRAEDSGEYHCVYHFVSAPKANATIEVKAAPDITGHKRSENKNEGQDATMYCKSVGYPHPDWIWRKKENGMPMDIVNTSGRFFIINKENYTELNIVNLQITEDPGEYECNATNAIGSASVVTVLRVRSHLAPLWPFLGILAEIIILVVIIVVYEKRKRPDEVPDDDEPAGPMKTNSTNNHKDKNLRQRNTN

SEQ ID NO: 857179 - protein, 361 aa, Homo sapiens; identical to SEQ ID NO: 857178

SEQ ID NO: 857180 - protein, 266 aa, Homo sapiens
LQFDLRSRLHTSENEPRIVTSEEVIIRDSPVLPVTLQCNLTSSSHTLTYSYWTKNGVELSATRKNASNMEYRINKPRAEDSGEYHCVYHFVSAPKANATIEVKAAPDITGHKRSENKNEGQDATMYCKSVGYPHPDWIWRKKENGMPMDIVNTSGRFFIINKENYTELNIVNLQITEDPGEYECNATNAIGSASVVTVLRVRSHLAPLWPFLGILAEIIILVVIIVVYEKRKRPDEVPDDDEPAGPMKTNSTNNHKDKNLRQRNTN

SEQ ID NO: 857181 - protein, 134 aa, Homo sapiens
MLSYSLSPLCILTFLQDIVNTSGRFFIINKENYTELNIVNLQITEDPGEYECNATNAIGSASVVTVLRVRSHLAPLWPFLGILAEIIILVVIIVVYEKRKRPDEVPDDDEPAGPMKTNSTNNHKDKNLRQRNTN

SEQ ID NO: 857182 - protein, 355 aa, Homo sapiens; identical to SEQ ID NO: 857176

SEQ ID NO: 857183 - protein, 332 aa, Homo sapiens
  misc_feature (287)..(287): Xaa can be any naturally occurring amino acid
  misc_feature (290)..(290): Xaa can be any naturally occurring amino acid
  misc_feature (307)..(307): Xaa can be any naturally occurring amino acid
GGRSSAAHDPERRSREAWALRRQEEDGEGRSRAAAASLAHSLAHSPAPSLPPLPSPAPALAPAHSLLGLLLGRMSGSSLPSALALSLLLVSGSLLPGPGAAQNEPRIVTSEEVIIRDSPVLPVTLQCNLTSSSHTLTYSYWTKNGVELSATRKNASNMEYRINKPRAEDSGEYHCVYHFVSAPKANATIEVKAAPDITGHKRSENKNEGQDATMYCKSVGYPHPDWIWRKKENGMPMDIVNTSGRFFADVTPRALSDPEPRPPQPSKTVPPHYPVVCCPTSGPQMCXKRXARGRATLGSQQKRRKSXTPDPKEKQTCDIRLGVSGLNTGSIE

SEQ ID NO: 857184 - protein, 208 aa, Homo sapiens
GGRSSAAHDPERRSREAWALRRQEEDGEGRSRAAAASLAHSLAHSPAPSLPPLPSPAPALAPAHSLLGLLLGRMSGSSLPSALALSLLLVSGSLLPGPGAAQNEPRIVTSEEVIIRDSPVLPVTLQCNLTSSSHTLTYSYWTKNGVELSATRKNASNMEYRINKPRAEDSGEYHCVYHFVSAPKANATIEVKAAPDIFIWGPACWSGS

SEQ ID NO: 857185 - protein, 294 aa, Homo sapiens
GGRSSAAHDPERRSREAWALRRQEEDGEGRSRAAAASLAHSLAHSPAPSLPPLPSPAPALAPAHSLLGLLLGRMSGSSLPSALALSLLLVSGSLLPGPGAAQNEPRIVTSEEVIIRDSPVLPVTLQCNLTSSSHTLTYSYWTKNGVELSATRKNASNMEYRINKPRAEDSGEYHCVYHFVSAPKANATIEVKAAPDITGHKRSENKNEGQDATMYCKSVGYPHPDWIWRKKENGMPMDIVNTSGRFFIINKENYTELNIVNLQITEDPGEYECNATWPHSGLSWEFWLKLSSLW

SEQ ID NO: 857186 - protein, 303 aa, Homo sapiens
RSLLSRPRPGAKVSRGLGAAAAGGGRGRTEPSRGCLPRSLPRALARPLPPSQPRIVTSEEVIIRDSPVLPVTLQCNLTSSSHTLTYSYWTKNGVELSATRKNASNMEYRINKPRAEDSGEYHCVYHFVSAPKANATIEVKAAPDITGHKRSENKNEGQDATMYCKSVGYPHPDWIWRKKENGMPMDIVNTSGRFFIINKENYTELNIVNLQITEDPGEYECNATNAIGSASVVTVLRVRSHLAPLWPFLGILAEIIILVVIIVVYEKRKRPDEVPDDDEPAGPMKTNSTNNHKDKNLRQRNTN

SEQ ID NO: 857187 - protein, 339 aa, Homo sapiens
  misc_feature (278)..(278): Xaa can be any naturally occurring amino acid
GGRSSAAHDPERRSREAWALRRQEEDGEGRSRAAAASLAHSLAHSPAPSLPPLPSPAPALAPAHSLLGLLLGRMSGSSLPSALALSLLLVSGSLLPGPGAAQNEPRIVTSEEVIIRDSPVLPVTLQCNLTSSSHTLTYSYWTKNGVELSATRKNASNMEYRINKPRAEDSGEYHCVYHFVSAPKANATIEVKAAPDITGHKRSENKNEGQDATMYCKSVGYPHPDWIWRKKENGMPMDIVNTSGRFFIINKENYTELNIVNLQITEDPGEYECNATWXPIFGLFFGDFGLNIILVVIIVVYEKRKRPDEVPDDDEPAGPMKTNSTNNHKDKNLRQRNTN

SEQ ID NO: 857188 - protein, 355 aa, Homo sapiens; identical to SEQ ID NO: 857176

SEQ ID NO: 857189 - protein, 278 aa, Homo sapiens
GGRSSAAHDPERRSREAWALRRQEEDGEGRSRAAAASLAHSLAHSPAPSLPPLPSPAPALAPAHSLLGLLLGRMSGSSLPSALALSLLLVSGSLLPGPGAAQNEPRIVTSEEVIIRDSPVLPVTLQCNLTSSSHTLTYSYWTKNGVELSATRKNASNMEYRINKPRAEDSGEYHCVYHFVSAPKANATIEVKAAPDITGHKRSENKNEGQDATMYCKSVGYPHPDWIWRKKENGMPMVSRRQARVSGCWSFPCRGPDTWVSYCSSCILGCVHGEGHPF

SEQ ID NO: 857190 - protein, 161 aa, Homo sapiens
GGRSSAAHDPERRSREAWALRRQEEDGEGRSRAAAASLAHSLAHSPAPSLPPLPSPAPALAPAHSLLGLLLGRMSGSSLPSALALSLLLVSGSLLPGPGAAQNEPRIVTSEEVIIRDSPVLPVTLQCNLTSSSHTLTYSYWTKNGVELSATRKNASNMEYR

SEQ ID NO: 857191 - protein, 661 aa, Homo sapiens
MQSSGSFNYARPKQFIAAQNLGPASGHGTPASSPSSSSLPSPMSPTPRQFGRAPVPPFAQPFGAEPEAPWGSSSPSPRAPPPPVFSPTAAFPVPDVFPLPPPPPPLPSPGQASHCSSPATRFGHGQTPAAFLSALLPSQPPPAAVNALGLPKGVTPAGFPKKASRTARIASDEEIQGTKDAVIQDLERKLRFKEDLLNNGQPRLTYEERMARRLLGADSATVFNIQEPEEETANQEYKVSSCEQRLISEIEYRLERSPVDESGDEVQYGDVPVENGMAPFFEMKLKHYKIFEGMPVTFTCRVAGNPKPKIYWFKDGKQISPKSDHYTIQRDLDGTCSLHTTASTLDDDGNYTIMAANPQGRISCTGRLMVQAVNQRGRSPRSPSGHPHVRRPRSRSRDSGDENEPIQERFFRPHFLQAPGDLTVQEGKLCRMDCKVSGLPTPDLSWQLDGKPVRPDSAHKMLVRENGVHSLIIEPVTSRDAGIYTCIATNRAGQNSFSLELVVAAKEAHKPPVFIEKLQNTGVADGYPVRLECRVLGVPPPQIFWKKENESLTHSTDRVSMHQDNHGYICLLIQGATKEDAGWYTVSAKNEAGIVSCTARLDVYTQWHQQSQSTKPKKVRPSASRYAALSDQGLDIKAAFQPEANPSHLTLNTALVESEDL

SEQ ID NO: 857192 - protein, 665 aa, Homo sapiens
  misc_feature (18)..(18): Xaa can be any naturally occurring amino acid
  misc_feature (24)..(24): Xaa can be any naturally occurring amino acid
KERNQKPKCICRPKGYSXSAPWVXVLKTSRHGGSGPRRATARRPPAPARPASRRPCPRRRGSSAAPPCRPSRSPSALSPRPRGAPPRRRPAPAAFPVPDVFPLPPPPPPLPSPGQASHCSSPATRFGHGQTPAAFLSALLPSQPPPAAVNALGLPKGVTPAGFPKKASRTARIASDEEIQGTKDAVIQDLERKLRFKEDLLNNGQPRLTYEERMARRLLGADSATVFNIQEPEEETANQEYKVSSCEQRLISEIEYRLERSPVDESGDEVQYGDVPVENGMAPFFEMKLKHYKIFEGMPVTFTCRVAGNPKPKIYWFKDGKQISPKSDHYTIQRDLDGTCSLHTTASTLDDDGNYTIMAANPQGRISCTGRLMVQAVNQRGRSPRSPSGHPHVRRPRSRSRDSGDENEPIQERFFRPHFLQAPGDLTVQEGKLCRMDCKVSGLPTPDLSWQLDGKPVRPDSAHKMLVRENGVHSLIIEPVTSRDAGIYTCIATNRAGQNSFSLELVVAAKEAHKPPVFIEKLQNTGVADGYPVRLECRVLGVPPPQIFWKKENESLTHSTDRVSMHQDNHGYICLLIQGATKEDAGWYTVSAKNEAGIVSCTARLDVYTQWHQQSQSTKPKKVRPSASRYAALSDQGLDIKAAFQPEANPSHLTLNTALVESEDL

SEQ ID NO: 857193 - protein, 522 aa, Homo sapiens
WLVEAGGESAEAKVSPPAGFPKKASRTARIASDEEIQGTKDAVIQDLERKLRFKEDLLNNGQPRLTYEERMARRLLGADSATVFNIQEPEEETANQEYKVSSCEQRLISEIEYRLERSPVDESGDEVQYGDVPVENGMAPFFEMKLKHYKIFEGMPVTFTCRVAGNPKPKIYWFKDGKQISPKSDHYTIQRDLDGTCSLHTTASTLDDDGNYTIMAANPQGRISCTGRLMVQAVNQRGRSPRSPSGHPHVRRPRSRSRDSGDENEPIQERFFRPHFLQAPGDLTVQEGKLCRMDCKVSGLPTPDLSWQLDGKPVRPDSAHKMLVRENGVHSLIIEPVTSRDAGIYTCIATNRAGQNSFSLELVVAAKEAHKPPVFIEKLQNTGVADGYPVRLECRVLGVPPPQIFWKKENESLTHSTDRVSMHQDNHGYICLLIQGATKEDAGWYTVSAKNEAGIVSCTARLDVYTQWHQQSQSTKPKKVRPSASRYAALSDQGLDIKAAFQPEANPSHLTLNTALVESEDL

SEQ ID NO: 857194 - protein, 171 aa, Homo sapiens
VVLLSWWCCCPGGAAKEAHKPPVFIEKLQNTGVADGYPVRLECRVLGVPPPQIFWKKENESLTHSTDRVSMHQDNHGYICLLIQGATKEDAGWYTVSAKNEAGIVSCTARLDVYTQWHQQSQSTKPKKVRPSASRYAALSDQGLDIKAAFQPEANPSHLTLNTALVESEDL

SEQ ID NO: 857195 - protein, 428 aa, Homo sapiens
MSALASRSAPAMQSSGSFNYARPKQFIAAQNLGPASGHGTPASSPSSSSLPSPMSPTPRQFGRAPVPPFAQPFGAEPEAPWGSSSPSPRAPPPPVFSPTAAFPVPDVFPLPPPPPPLPSPGQASHCSSPATRFGHGQTPAAFLSALLPSQPPPAAVNALGLPKGVTPAGFPKKASRTARIASDEEIQGTKDAVIQDLERKLRFKEDLLNNGQPRLTYEERMARRLLGADSATVFNIQEPEEETANQEYKVSSCEQRLISEIEYRLERSPVDESGDEVQYGDVPVENGMAPFFEMKLKHYKIFEGMPVTFTCRVAGNPKPKIYWFKDGKQISPKSDHYTIQRDLDGTCSLHTTASTLDDDGNYTIMAANPQGRISCTGRLMVQAVNQRGRSPRSPSGHPHVRRYLTCSFPEVLHYFIYYYKCSTIRIII

SEQ ID NO: 857196 - protein, 277 aa, Homo sapiens
MQSSGSFNYARPKQFIAAQNLGPASGHGTPASSPSSSSLPSPMSPTPRQFGRAPVPPFAQPFGAEPEAPWGSSSPSPRAPPPPVFSPTAAFPVPDVFPLPPPPPPLPSPGQASHCSSPATRFGHGQTPAAFLSALLPSQPPPAAVNALGLPKGVTPAGFPKKASRTARIASDEEIQGTKDAVIQDLERKLRFKEDLLNNGQPRLTYEERMARRLLGADSATVFNIQEPEEETANQVPCCSGLLRVTFILSPFSIFLMDTVLGMSSVESRGQVTEKQY

SEQ ID NO: 857197 - protein, 385 aa, Homo sapiens
MAPFFEMKLKHYKIFEGMPVTFTCRVAGNPKPKIYWFKDGKQISPKSDHYTIQRDLDGTCSLHTTASTLDDDGNYTIMAANPQGRISCTGRLMVQAVNQRGRSPRSPSGHPHVRRPRSRSRDSGDENEPIQERFFRPHFLQAPGDLTVQEGKLCRMDCKVSGLPTPDLSWQLDGKPVRPDSAHKMLVRENGVHSLIIEPVTSRDAGIYTCIATNRAGQNSFSLELVVAAKEAHKPPVFIEKLQNTGVADGYPVRLECRVLGVPPPQIFWKKENESLTHSTDRVSMHQDNHGYICLLIQGATKEDAGWYTVSAKNEAGIVSCTARLDVYTQWHQQSQSTKPKKVRPSASRYAALSDQGLDIKAAFQPEANPSHLTLNTALVESEDL

SEQ ID NO: 857198 - protein, 118 aa, Homo sapiens
PSLANTENCSYESMGESNNDHFQHFPPPPPILETSSLELASKKPSEIQQVNNPELGLSRAALQMQFNAAERETNGVHPSRGVNGLINGKANSNKSLPTPAVLLSPTKEPPPLLAKPKL

SEQ ID NO: 857199 - protein, 752 aa, Homo sapiens
PSLANTENCSYESMGESNNDHFQHFPPPPPILETSSLELASKKPSEIQQVNNPELGLSRAALQMQFNAAERETNGVHPSRGVNGLINGKANSNKSLPTPAVLLSPTKEPPPLLAKPKLGTPASSPSSSSLPSPMSPTPRQFGRAPVPPFAQPFGAEPEAPWGSSSPSPRAPPPPVFSPTAAFPVPDVFPLPPPPPPLPSPGQASHCSSPATRFGHGQTPAAFLSALLPSQPPPAAVNALGLPKGVTPAGFPKKASRTARIASDEEIQGTKDAVIQDLERKLRFKEDLLNNGQPRLTYEERMARRLLGADSATVFNIQEPEEETANQEYKVSSCEQRLISEIEYRLERSPVDESGDEVQYGDVPVENGMAPFFEMKLKHYKIFEGMPVTFTCRVAGNPKPKIYWFKDGKQISPKSDHYTIQRDLDGTCSLHTTASTLDDDGNYTIMAANPQGRISCTGRLMVQAVNQRGRSPRSPSGHPHVRRPRSRSRDSGDENEPIQERFFRPHFLQAPGDLTVQEGKLCRMDCKVSGLPTPDLSWQLDGKPVRPDSAHKMLVRENGVHSLIIEPVTSRDAGIYTCIATNRAGQNSFSLELVVAAKEAHKPPVFIEKLQNTGVADGYPVRLECRVLGVPPPQIFWKKENESLTHSTDRVSMHQDNHGYICLLIQGATKEDAGWYTVSAKNEAGIVSCTARLDVYTQWHQQSQSTKPKKVRPSASRYAALSDQGLDIKAAFQPEANPSHLTLNTALVESEDL

SEQ ID NO: 857200 - protein, 685 aa, Homo sapiens
MQSSGSFNYARPKQFIAAQNLGPASGHGTPASSPSSSSLPSPMSPTPRQFGRAPVPPFAQPFGAEPEAPWGSSSPSPRAPPPPVFSPTAAFPVPDVFPLPPPPPPLPSPGQASHCSSPATRFGHGQTPAAFLSALLPSQPPPAAVNALGLPKGVTPAGFPKKASRTARIASDEEIQGTKDAVIQDLERKLRFKEDLLNNGQPRLTYEERMARRLLGADSATVFNIQEPEEETANQEYKVSSCEQRLISEIEYRLERSPVDESGDEVQYGDVPVENGMAPFFEMKLKHYKIFEGMPVTFTCRVAGNPKPKIYWFKDGKQISPKSDHYTIQRDLDGTCSLHTTASTLDDDGNYTIMAANPQGRISCTGRLMVQAVNQRGRSPRSPSGHPHVRRPRSRSRDSGDENEPIQERFFRPHFLQAPGDLTVQEGKLCRMDCKVSGLPTPDLSWQLDGKPVRPDSAHKMLVRENGVHSLIIEPVTSRDAGIYTCIATNRAGQNSFSLELVVAAKEAHKPPVFIEKLQNTGVADGYPVRLECRVLGVPPPQIFWKKENESLTHSTDRVSMHQDNHGYICLLIQGATKEDAGWYTVSAKNEAGIVSCTARLDVYSECHFISFHCVYSLNYEKLDIWTANHITLYKQLLCFICQKNSYCSLSLSICSFSTLIVNHTRRTNTQVSFRNFELLAKYAC

SEQ ID NO: 857201 - protein, 306 aa, Homo sapiens
MSALASRSAPAMQSSGSFNYARPKQFIAAQNLGPASGHGTPASSPSSSSLPSPMSPTPRQFGRAPVPPFAQPFGAEPEAPWGSSSPSPRAPPPPVFSPTAAFPVPDVFPLPPPPPPLPSPGQASHCSSPATRFGHGQTPAAFLSALLPSQPPPAAVNALGLPKGVTPAGFPKKASRTARIASDEEIQGTKDAVIQDLERKLRFKEDLLNNGQPRLTYEERMARRLLGADSATVFNIQEPEEETANQVPCCSGLLRVTFILSPFSIFLMDTVLGMSSGATTFTLIFFLATSLARARENPTNPPLLAL

SEQ ID NO: 857202 - protein, 113 aa, Homo sapiens
IPQPDSPPRRITHRGQLERPRRSRFDFGASALAGRDWLRPRDGVVSASLPAAARRVLPRAMTASAQPRGRRPGVGVGVVVTSCKHPRCVLLGKRKGSVGAGSFQLPGGHLEFG

SEQ ID NO: 857203 - protein, 224 aa, Homo sapiens
IPQPDSPPRRITHRGQLERPRRSRFDFGASALAGRDWLRPRDGVVSASLPAAARRVLPRAMTASAQPRGRRPGVGVGVVVTSCKHPRCVLLGKRKGSVGAGSFQLPGGHLEFGETWEECAQRETWEEAALHLKNVHFASVVNSFIEKENYHYVTILMKGEVDVTHDSEPKNVEPEKNESWEWVPWEELPPLDQLFWGLRCLKEQGYDPFKEDLNHLVGYKGNHL

SEQ ID NO: 857204 - protein, 224 aa, Homo sapiens; identical to SEQ ID NO: 857203

SEQ ID NO: 857205 - protein, 224 aa, Homo sapiens; identical to SEQ ID NO: 857203

SEQ ID NO: 857206 - protein, 55 aa, Homo sapiens
MDTGQQGRQAAHELLAMKTDQKQMDMGQRGWQTAHKLLLSPKNEWTWGRWTILLS

SEQ ID NO: 857207 - protein, 717 aa, Homo sapiens
MRRSPPSLRLRLSADNLVAASGGCWFVLGERRAGSLLSASYGTFAMPGMVLFGRRWAIASDDLVFPGFFELVVRVLWWIGILTLYLMHRGKLDCAGGALLSSYLIVLMILLAVVICTVSAIMCVSMRGTICNPGPRKSMSKLLYIRLALFFPEMVWASLGAAWVADGVQCDRTVVNGIIATVVVSWIIIAATVVSIIIVFDPLGGKMAPYSSAGPSHLDSHDSSQLLNGLKTAATSVWETRIKLLCCCIGKDDHTRVAFSSTAELFSTYFSDTDLVPSDIAAGLALLHQQQDNIRNNQEPAQVVCHAPGSSQEADLDAELENCHHYMQFAAAAYGWPLYIYRNPLTGLCRIGGDCCRSRTTDYDLVGGDQLNCHFGSILHTTGLQYRDFIHVSFHDKVYELPFLVALDHRKESVVVAVRGTMSLQDVLTDLSAESEVLDVECEVQDRLAHKGISQAARYVYQRLINDGILSQAFSIAPEYRLVIVGHSLGGGAAALLATMLRAAYPQVRCYAFSPPRGLWSKALQEYSQSFIVSLVLGKDVIPRLSVTNLEDLKRRILRVVAHCNKPKYKILLHGLWYELFGGNPNNLPTELDGGDQEVLTQPLLGEQSLLTRWSPAYSFSSDSPLDSSPKYPPLYPPGRIIHLQEEGASGRFGCCSAAHYSAKWSHEAEFSKILIGPKMLTDHMPDILMRALDSVVSDRAACVSCPAQGVSSVDVA

SEQ ID NO: 857208 - protein, 677 aa, Homo sapiens
MHRGKLDCAGGALLSSYLIVLMILLAVVICTVSAIMCVSMRVFNIITELCSHHHHQVYTIFFTPERNPVPGEDTVAHTCNPSTLGSRGTICNPGPRKSMSKLLYIRLALFFPEMVWASLGAAWVADGVQCDRTVVNGIIATVVVSWIIIAATVVSIIIVFDPLGGKMAPYSSAGPSHLDSHDSSQLLNGLKTAATSVWETRIKLLCCCIGKDDHTRVAFSSTAELFSTYFSDTDLVPSDIAAGLALLHQQQDNIRNNQEPAQVVCHAPGSSQEADLDAELENCHHYMQFAAAAYGWPLYIYRNPLTGLCRIGGDCCRSRTTDYDLVGGDQLNCHFGSILHTTGLQYRDFIHVSFHDKVYELPFLVALDHRKESVVVAVRGTMSLQDVLTDLSAESEVLDVECEVQDRLAHKGISQAARYVYQRLINDGILSQAFSIAPEYRLVIVGHSLGGGAAALLATMLRAAYPQVRCYAFSPPRGLWSKALQEYSQSFIVSLVLGKDVIPRLSVTNLEDLKRRILRVVAHCNKPKYKILLHGLWYELFGGNPNNLPTELDGGDQEVLTQPLLGEQSLLTRWSPAYSFSSDSPLDSSPKYPPLYPPGRIIHLQEEGASGRFGCCSAAHYSAKWSHEAEFSKILIGPKMLTDHMPDILMRALDSVVSDRAACVSCPAQGVSSVDVA

SEQ ID NO: 857209 - protein, 391 aa, Homo sapiens
MQFAAAAYGWPLYIYRNPLTGLCRIGGDCCRSRTTDYDLVGGDQLNCHFGSILHTTGLQYRDFIHVSFHDKVYELPFLVALDHRKESVVVAVRGTMSLQDVLTDLSAESEVLDVECEVQDRLAHKGISQAARYVYQRLINDGILSQAFSIAPEYRLVIVGHSLGGGAAALLATMLRAAYPQVRCYAFSPPRGLWSKALQEYSQSFIVSLVLGKDVIPRLSVTNLEDLKRRILRVVAHCNKPKYKILLHGLWYELFGGNPNNLPTELDGGDQEVLTQPLLGEQSLLTRWSPAYSFSSDSPLDSSPKYPPLYPPGRIIHLQEEGASGRFGCCSAAHYSAKWSHEAEFSKILIGPKMLTDHMPDILMRALDSVVSDRAACVSCPAQGVSSVDVA

SEQ ID NO: 857210 - protein, 619 aa, Homo sapiens
MRRSPPSLRLRLSADNLVAASGGCWFVLGERRAGSLLSASYGTFAMPGMVLFGRRWAIASDDLVFPGFFELVVRVLWWIGILTLYLMHRGKLDCAGGALLSSYLIVLMILLAVVICTVSAIMCVSMRGTICNPGPRKSMSKLLYIRLALFFPEMVWASLGAAWVADGVQCDRTVVNGIIATVVVSWIIIAATVVSIIIVFDPLGGKMAPYSSAGPSHLDSHDSSQLLNGLKTAATSVWETRIKLLCCCIGKDDHTRVAFSSTAELFSTYFSDTDLVPSDIAAGLALLHQQQDNIRNNQEPAQVVCHAPGSSQEADLDAELENCHHYMQFAAAAYGWPLYIYRNPLTGLCRIGGDCCRSRTTDYDLVGGDQLNCHFGSILHTTGLQYRDFIHVSFHDKVYELPFLVALDHRKESVVVAVRGTMSLQDVLTDLSAESEVLDVECEVQDRLAHKGISQAARYVYQRLINDGILSQAFSIAPEYRLVIVGHSLGGGAAALLATMLRAAYPQVRCYAFSPPRGLWSKALQEYSQSFIVSLVLGKDVIPRLSVTNLEDLKRRILRVVAHCNKPKYKILLHGLWYELFGGNPNNLSSTRGLQCGRGLTRATGNCPRNDGLTLLSLN

SEQ ID NO: 857211 - protein, 296 aa, Homo sapiens
MSLQDVLTDLSAESEVLDVECEVQDRLAHKGISQAARYVYQRLINDGILSQAFSIAPEYRLVIVGHSLGGGAAALLATMLRAAYPQVRCYAFSPPRGLWSKALQEYSQSFIVSLVLGKDVIPRLSVTNLEDLKRRILRVVAHCNKPKYKILLHGLWYELFGGNPNNLPTELDGGDQEVLTQPLLGEQSLLTRWSPAYSFSSDSPLDSSPKYPPLYPPGRIIHLQEEGASGRFGCCSAAHYSAKWSHEAEFSKILIGPKMLTDHMPDILMRALDSVVSDRAACVSCPAQGVSSVDVA

SEQ ID NO: 857212 - protein, 369 aa, Homo sapiens
MVPSTLHAWPRAGRAIRALRSHRWVSLFSLGFSPRTELGDGAIPAILHRSVRSRDHLSFSHPAHHRLTAASATPFLQDVLTDLSAESEVLDVECEVQDRLAHKGISQAARYVYQRLINDGILSQAFSIAPEYRLVIVGHSLGGGAAALLATMLRAAYPQVRCYAFSPPRGLWSKALQEYSQSFIVSLVLGKDVIPRLSVTNLEDLKRRILRVVAHCNKPKYKILLHGLWYELFGGNPNNLPTELDGGDQEVLTQPLLGEQSLLTRWSPAYSFSSDSPLDSSPKYPPLYPPGRIIHLQEEGASGRFGCCSAAHYSAKWSHEAEFSKILIGPKMLTDHMPDILMRALDSVVSDRAACVSCPAQGVSSVDVA

SEQ ID NO: 857213 - protein, 218 aa, Homo sapiens
MLRAAYPQVRCYAFSPPRGLWSKALQEYSQSFIVSLVLGKDVIPRLSVTNLEDLKRRILRVVAHCNKPKYKILLHGLWYELFGGNPNNLPTELDGGDQEVLTQPLLGEQSLLTRWSPAYSFSSDSPLDSSPKYPPLYPPGRIIHLQEEGASGRFGCCSAAHYSAKWSHEAEFSKILIGPKMLTDHMPDILMRALDSVVSDRAACVSCPAQGVSSVDVA

SEQ ID NO: 857214 - protein, 621 aa, Homo sapiens
MRRSPPSLRLRLSADNLVAASGGCWFVLGERRAGSLLSASYGTFAMPGMVLFGRRWAIASDDLVFPGFFELVVRVLWWIGILTLYLMHRGKLDCAGGALLSSYLIVLMILLAVVICTVSAIMCVSMRGTICNPGPRKSMSKLLYIRLALFFPEMVWASLGAAWVADGVQCDRTVVNGIIATVVVSWIIIAATVVSIIIVFDPLGGKMAPYSSAGPSHLDSHDSSQLLNGLKTAATSVWETRIKLLCCCIGKDDHTRVAFSSTAELFSTYFSDTDLVPSDIAAGLALLHQQQDNIRNNQEPAQVVCHAPGSSQEADLDAELENCHHYMQFAAAAYGWPLYIYRNPLTGLCRIGGDCCRSRTTDYDLVGGDQLNCHFGSILHTTGLQYRDFIHVSFHDKVYELPFLVALDHRKESVVVAVRGTMSLQDVLTDLSAESEVLDVECEVQDRLAHKGISQAARYVYQRLINDGILSQAFSIAPEYRLVIVGHSLGGGAAALLATMLRAAYPQVRCYAFSPPRGLWSKALQEYSQSFIVSLVLGKDVIPRLSVTNLEDLKRRILRVVAHCNKPKVSGCLVERVSRTRGLSLRSCGEPGGIAPSVQGTLCCCWKFSFHHLIRFWARTL

SEQ ID NO: 857215 - protein, 621 aa, Homo sapiens; identical to SEQ ID NO: 857214

SEQ ID NO: 857216 - protein, 218 aa, Homo sapiens
DLPASASQSAGITGVSHRTQLSKALQEYSQSFIVSLVLGKDVIPRLSVTNLEDLKRRILRVVAHCNKPKYKILLHGLWYELFGGNPNNLPTELDGGDQEVLTQPLLGEQSLLTRWSPAYSFSSDSPLDSSPKYPPLYPPGRIIHLQEEGASGRFGCCSAAHYSAKWSHEAEFSKILIGPKMLTDHMPDILMRALDSVVSDRAACVSCPAQGVSSVDVA

SEQ ID NO: 857217 - protein, 429 aa, Homo sapiens
MRRSPPSLRLRLSADNLVAASGGCWFVLGERRAGSLLSASYGTFAMPGMVLFGRRWAIASDDLVFPGFFELVVRVLWWIGILTLYLMHRGKLDCAGGALLSSYLIVLMILLAVVICTVSAIMCVSMRGTICNPGPRKSMSKLLYIRLALFFPEMVWASLGAAWVADGVQCDRTVVNGIIATVVVSWIIIAATVVSIIIVFDPLGGKMAPYSSAGPSHLDSHDSSQLLNGLKTAATSVWETRIKLLCCCIGKDDHTRVAFSSTAELFSTYFSDTDLVPSDIAAGLALLHQQQDNIRNNQEPAQVVCHAPGSSQEADLDAELENCHHYMQFAAAAYGWPLYIYRNPLTGLCRIGGDCCRSRTTDYDLVGGDQLNCHFGSILHTTGLQYRDFIHVSFHDKVWTLQTAALHFFWVLELLEILMEVMNYSSRNS

SEQ ID NO: 857218 - protein, 67 aa, Homo sapiens
MLLIGSRPQYKILLHGLWYELFGGNPNNLPTELDGGDQEVLTQPLLGEQSLLTRWSPAYSFSSDSPL

SEQ ID NO: 857219 - protein, 631 aa, Homo sapiens
MHRGKLDCAGGALLSSYLIVLMILLAVVICTVSAIMCVSMRGTICNPGPRKSMSKLLYIRLALFFPEMVWASLGAAWVADGVQCDRTVVNGIIATVVVSWIIIAATVVSIIIVFDPLGGKMAPYSSAGPSHLDSHDSSQLLNGLKTAATSVWETRIKLLCCCIGKDDHTRVAFSSTAELFSTYFSDTDLVPSDIAAGLALLHQQQDNIRNNQEPAQVVCHAPGSSQEADLDAELENCHHYMQFAAAAYGWPLYIYRNPLTGLCRIGGDCCRSRTTDYDLVGGDQLNCHFGSILHTTGLQYRDFIHVSFHDKVYELPFLVALDHRKESVVVAVRGTMSLQDVLTDLSAESEVLDVECEVQDRLAHKGISQAARYVYQRLINDGILSQAFSIAPEYRLVIVGHSLGGGAAALLATMLRAAYPQVRCYAFSPPRGLWSKALQEYSQSFIVSLVLGKDVIPRLSVTNLEDLKRRILRVVAHCNKPKYKILLHGLWYELFGGNPNNLPTELDGGDQEVLTQPLLGEQSLLTRWSPAYSFSSDSPLDSSPKYPPLYPPGRIIHLQEEGASGRFGCCSAAHYSAKWSHEAEFSKILIGPKMLTDHMPDILMRALDSVVSDRAACVSCPAQGVSSVDVA

SEQ ID NO: 857220 - protein, 551 aa, Homo sapiens
MRRSPPSLRLRLSADNLVAASGGCWFVLGERRAGSLLSASYGTFAMPGMVLFGRRWAIASDDLVFPGFFELVVRVLWWIGILTLYLMHRGKLDCAGGALLSSYLIVLMILLAVVICTVSAIMCVSMRGTICNPGPRKSMSKLLYIRLALFFPEMVWASLGAAWVADGVQCDRTVVNGIIATVVVSWIIIAATVVSIIIVFDPLGGKMAPYSSAGPSHLDSHDSSQLLNGLKTAATSVWETRIKLLCCCIGKDDHTRVAFSSTAELFSTYFSDTDLVPSDIAAGLALLHQQQDNIRNNQEPAQVVCHAPGSSQEADLDAELENCHHYMQFAAAAYGWPLYIYRNPLTGLCRIGGDCCRSRTTDYDLVGGDQLNCHFGSILHTTGLQYRDFIHVSFHDKVYELPFLVALDHRKESVVVAVRGTMSLQDVLTDLSAESEVLDVECEVQDRLAHKGISQAARYVYQRLINDGILSQAFSIAPEYRLVIVGHSLGGGAAALLATMLRAAYPQQSSAGIFSELHRVTRPGEGCDSQAQCDQLGRSEEKNLASGRALQ

SEQ ID NO: 857221 - protein, 630 aa, Homo sapiens
MRRSPPSLRLRLSADNLVAASGGCWFVLGERRAGSLLSASYGTFAMPGMVLFGRRWAIASDDLVFPGFFELVVRVLWWIGILTLYLMHRGKLDCAGGALLSSYLIVLMILLAVVICTVSAIMCVSMRGTICNPGPRKSMSKLLYIRLALFFPEMVWASLGAAWVADGVQCDRTVVNGIIATVVVSWIIIAATVVSIIIVFDPLGGKMAPYSSAGPSHLDSHDSSQLLNGLKTAATSVWETRIKLLCCCIGKDDHTRVAFSSTAELFSTYFSDTDLVPSDIAAGLALLHQQQDNIRNNQEPAQVVCHAPGSSQEADLDAELENCHHYMQFAAAAYGWPLYIYRNPLTGLCRIGGDCCRSRTTDYDLVGGDQLNCHFGSILHTTGLQYRDFIHVSFHDKVYELPFLVALDHRKESVVVAVRGTMSLQDVLTDLSAESEVLDVECEVQDRLAHKGISQAARYVYQRLINDGILSQAFSIAPEYRLVIVGHSLGGGAAALLATMLRAAYPQVRCYAFSPPRGLWSKALQEYSQSFIVSLVLGKDVIPRLSVTNLEDLKRRILRVVAHCNKPKYKILLHGLWYELFGGNPNNLPTELDGGDQEVLTQPLLGEQSLLTRATGNCPRNDGLTLLSLN

SEQ ID NO: 857222 - protein, 717 aa, Homo sapiens; identical to SEQ ID NO: 857207

SEQ ID NO: 857223 - protein, 522 aa, Homo sapiens
MRRSPPSLRLRLSADNLVAASGGCWFVLGERRAGSLLSASYGTFAMPGMVLFGRRWAIASDDLVFPGFFELVVRVLWWIGILTLYLMHRGKLDCAGGALLSSYLIVLMILLAVVICTVSAIMCVSMRGTICNPGPRKSMSKLLYIRLALFFPEMVWASLGAAWVADGVQCDRTVVNGIIATVVVSWIIIAATVVSIIIVFDPLGGKMAPYSSAGPSHLDSHDSSQLLNGLKTAATSVWETRIKLLCCCIGKDDHTRVAFSSTAELFSTYFSDTDLVPSDIAAGLALLHQQQDNIRNNQEPAQVVCHAPGSSQEADLDAELENCHHYMQFAAAAYGWPLYIYRNPLTGLCRIGGDCCRSRTTDYDLVGGDQLNCHFGSILHTTGLQYRDFIHVSFHDKVYELPFLVALDHRKESVVVAVRGTMSLQDVLTDLSAESEVLDVECEVQDRLAHKGISQAARYVYQRLINDGILSQAFSIAPQSSAGIFSELHRVTRPGEGCDSQAQCDQLGRSEEKNLASGRALQ

SEQ ID NO: 857224 - protein, 277 aa, Homo sapiens
MRRSPPSLRLRLSADNLVAASGGCWFVLGERRAGSLLSASYGTFAMPGMVLFGRRWAITMLRAAYPQVRCYAFSPPRGLWSKALQEYSQSFIVSLVLGKDVIPRLSVTNLEDLKRRILRVVAHCNKPKYKILLHGLWYELFGGNPNNLPTELDGGDQEVLTQPLLGEQSLLTRWSPAYSFSSDSPLDSSPKYPPLYPPGRIIHLQEEGASGRFGCCSAAHYSAKWSHEAEFSKILIGPKMLTDHMPDILMRALDSVVSDRAACVSCPAQGVSSVDVA

SEQ ID NO: 857225 - protein, 217 aa, Homo sapiens
MEALVGGVIVKLTSSSVWNFSKALQEYSQSFIVSLVLGKDVIPRLSVTNLEDLKRRILRVVAHCNKPKYKILLHGLWYELFGGNPNNLPTELDGGDQEVLTQPLLGEQSLLTRWSPAYSFSSDSPLDSSPKYPPLYPPGRIIHLQEEGASGRFGCCSAAHYSAKWSHEAEFSKILIGPKMLTDHMPDILMRALDSVVSDRAACVSCPAQGVSSVDVA

SEQ ID NO: 857226 - protein, 220 aa, Homo sapiens
MRRSPPSLRLRLSADNLVAASGGCWFVLGERRAGSLLSASYGTFAMPGMVLFGRRWAIASDDLVFPGFFELVVRVLWWIGILTLYLMHRGKLDCAGGALLSSYLIVLMILLAVVICTVSAIMCVSMRGTICNPGPRKSMSKLLYIRLALFFPEMVWASLGAAWVADGVQCDRTVVNGIIATVVVSWIIIAATVVSIIIVFDPLGGKMAPYSLGSASGFRS

SEQ ID NO: 857227 - protein, 77 aa, Homo sapiens
TPGLKCPPALASLSAGITSVRHHTWHLLHVRRCARCQEHSHARWTWLLILQSQIPGETHTSVHSVIPSLSLCWACLV

SEQ ID NO: 857228 - protein, 1273 aa, Homo sapiens
RPFRGGAYFAATTCRTSGLPGSCCGSRMMETERLVLPPPDPLDLPLRAVELGCTGHWELLNLPGAPESSLPHGLPPCAPDLQQEAEQLFLSSPAWLPLHGVEHSARKWQRKTDPWSLLAVLGAPVPSDLQAQRHPTTGQILGYKEVLLENTNLSATTSLSLRRPPGPASQSLWGNPTRYPFWPGGMDEPTITDLNTREEAEEEIDFEKDLLTIPPGFKKGMDFAPKDCPTPAPGLLSLSCLLEPLDLGGGDEDENEAVGQPGGPRGDTVSASPCSAPLARASSLEDLVLKEASTAVSTPEAPEPPSQEQWAIPVDATSPVGDFYRLIPQPAFQWAFEPDVFQKQAILHLERHDSVFVAAHTSAGKTVVAEYAIALAQKHMTRTIYTSPIKALSNQKFRDFRNTFGDVGLLTGDVQLHPEASCLIMTTEILRSMLYSGSDVIRDLEWVIFDEVHYINDVERGVVWEEVLIMLPDHVSIILLSATVPNALEFADWIGRLKRRQIYVISTVTRPVPLEHYLFTGNSSKTQGELFLLLDSRGAFHTKGYYAAVEAKKERMSKHAQTFGAKQPTHQGGPAQDRGVYLSLLASLRTRAQLPVVVFTFSRGRCDEQASGLTSLDLTTSSEKSEIHLFLQRCLARLRGSDRQLPQVLHMSELLNRGLGVHHSGILPILKEIVEMLFSRGLVKVLFATETFAMGVNMPARTVVFDSMRKHDGSTFRDLLPGEYVQMAGRAGRRGLDPTGTVILLCKGRVPEMADLHRMMMGKPSQLQSQFRLTYTMILNLLRVDALRVEDMMKRSFSEFPSRKDSKAHEQALAELTKRLGALEEPDMTGQLVDLPEYYSWGEELTETQHMIQRRIMESVNGLKSLSAGRVVVVKNQEHHNALGVILQVSSNSTSRVFTTLVLCDKPLSQDPQDRGPATAEVPYPDDLVGFKLFLPEGPCDHTVVKLQPGDMAAITTKVLRVNGEKILEDFSKRQQPKFKKDPPLAAVTTAVQELLRLAQAHPAGPPTLDPVNDLQLKDMSVVEGGLRARKLEELIQGAQCVHSPRFPAQYLKLRERMQIQKEMERLRFLLSDQSLLLLPEYHQRVEVLRTLGYVDEVGTVKLAGRVACAMSSHELLLTELMFDNALSTLRPEEIAALLSGLVCQSPGDAGDQLPNTLKQGIERVRAVAKRIGEVQVACGLNQTVEEFVGELNFGLVEVVYEWARGMPFSELAGLSGTPEGLVVRCIQRLAEMCRSLRGAARLVGEPVLGAKMETAATLLRRDIVFAASLYTQ

SEQ ID NO: 857229 - protein, 1200 aa, Homo sapiens
RPFRGGAYFAATTCRTSGLPGSCCGSRMMETERLVLPPPDPLDLPLRAVELGCTGHWELLNLPGAPESSLPHGLPPCAPDLQQEAEQLFLSSPAWLPLHGVEHSARKWQRKTDPWSLLAVLGAPVPSDLQAQRHPTTGQILGYKEVLLENTNLSATTSLSLRRPPGPASQSLWGNPTRYPFWPGGMDEPTITDLNTREEAEEEIDFEKDLLTIPPGFKKGMDFAPKDCPTPAPGLLSLSCLLEPLDLGGGDEDENEAVGQPGGPRGDTVSASPCSAPLARASSLEDLVLKEASTAVSTPEAPEPPSQEQWAIPVDATSPVGDFYRLIPQPAFQWAFEPDVFQKQAILHLERHDSVFVAAHTSAGKTVVAEYAIALAQKHMTRTIYTSPIKALSNQKFRDFRNTFGDVGLLTGDVQLHPEASCLIMTTEILRSMLYSGSDVIRDLEWVIFDEVHYINDVERGVVWEEVLIMLPDHVSIILLSATVPNALEFADWIGRLKRRQIYVISTVTRPVPLEHYLFTGNSSKTQGELFLLLDSRGAFHTKGYYAAVEAKKERMSKHAQTFGAKQPTHQGGPAQDRGVYLSLLASLRTRAQLPVVVFTFSRGRCDEQASGLTSLDLTTSSEKSEIHLFLQRCLARLRGSDRQLPQVLHMSELLNRGLGVHHSGILPILKEIVEMLFSRGLVKVLFATETFAMGVNMPARTVVFDSMRKHDGSTFRDLLPGEYVQMAGRAGRRGLDPTGTVILLCKGRVPEMADLHRMMMGKPSQLQSQFRLTYTMILNLLRVDALRVEDMMKRSFSEFPSRKDSKAHEQALAELTKRLGALEEPDMTGQLVDLPEYYSWGEELTETQHMIQRRIMESVNGLKSLSAGRVVVVKNQEHHNALGVILQVSSNSTSRVFTTLVLCDKPLSQDPQDRGPATAEVPYPDDLVGFKLFLPEGPCDHTVVKLQPGDMAAITTKVLRVNGEKILEDFSKRQQPKFKKDPPLAAVTTAVQELLRLAQAHPAGPPTLDPVNDLQLKDMSVVEGGTVKLAGRVACAMSSHELLLTELMFDNALSTLRPEEIAALLSGLVCQSPGDAGDQLPNTLKQGIERVRAVAKRIGEVQVACGLNQTVEEFVGELNFGLVEVVYEWARGMPFSELAGLSGTPEGLVVRCIQRLAEMCRSLRGAARLVGEPVLGAKMETAATLLRRDIVFAASLYTQ

SEQ ID NO: 857230 - protein, 1307 aa, Homo sapiens
RPFRGGAYFAATTCRTSGLPGSCCGSRMMETERLVLPPPDPLDLPLRAVELGCTGHWELLNLPGAPESSLPHGLPPCAPDLQQEAEQLFLSSPAWLPLHGVEHSARKWQRKTDPWSLLAVLGAPVPSDLQAQRHPTTGQILGYKEVLLENTNLSATTSLSLRRPPGPASQSLWGNPTRYPFWPGGMDEPTITDLNTREEAEEEIDFEKDLLTIPPGFKKGMDFAPKGLVLVFEWGVGEVMSFSYGTEMDMTRLTLLACSSDCPTPAPGLLSLSCLLEPLDLGGGDEDENEAVGQPGGPRGDTVSASPCSAPLARASSLEDLVLKEASTAVSTPEAPEPPSQEQWAIPVDATSPVGDFYRLIPQPAFQWAFEPDVFQKQAILHLERHDSVFVAAHTSAGKTVVAEYAIALAQKHMTRTIYTSPIKALSNQKFRDFRNTFGDVGLLTGDVQLHPEASCLIMTTEILRSMLYSGSDVIRDLEWVIFDEVHYINDVERGVVWEEVLIMLPDHVSIILLSATVPNALEFADWIGRLKRRQIYVISTVTRPVPLEHYLFTGNSSKTQGELFLLLDSRGAFHTKGYYAAVEAKKERMSKHAQTFGAKQPTHQGGPAQDRGVYLSLLASLRTRAQLPVVVFTFSRGRCDEQASGLTSLDLTTSSEKSEIHLFLQRCLARLRGSDRQLPQVLHMSELLNRGLGVHHSGILPILKEIVEMLFSRGLVKVLFATETFAMGVNMPARTVVFDSMRKHDGSTFRDLLPGEYVQMAGRAGRRGLDPTGTVILLCKGRVPEMADLHRMMMGKPSQLQSQFRLTYTMILNLLRVDALRVEDMMKRSFSEFPSRKDSKAHEQALAELTKRLGALEEPDMTGQLVDLPEYYSWGEELTETQHMIQRRIMESVNGLKSLSAGRVVVVKNQEHHNALGVILQVSSNSTSRVFTTLVLCDKPLSQDPQDRGPATAEVPYPDDLVGFKLFLPEGPCDHTVVKLQPGDMAAITTKVLRVNGEKILEDFSKRQQPKFKKDPPLAAVTTAVQELLRLAQAHPAGPPTLDPVNDLQLKDMSVVEGGLRARKLEELIQGAQCVHSPRFPAQYLKLRERMQIQKEMERLRFLLSDQSLLLLPEYHQRVEVLRTLGYVDEVGTVKLAGRVACAMSSHELLLTELMFDNALSTLRPEEIAALLSGLVCQSPGDAGDQLPNTLKQGIERVRAVAKRIGEVQVACGLNQTVEEFVGELNFGLVEVVYEWARGMPFSELAGLSGTPEGLVVRCIQRLAEMCRSLRGAARLVGEPVLGAKMETAATLLRRDIVFAASLYTQ

SEQ ID NO: 857231 - protein, 602 aa, Homo sapiens
RPFRGGAYFAATTCRTSGLPGSCCGSRMMETERLVLPPPDPLDLPLRAVELGCTGHWELLNLPGAPESSLPHGLPPCAPDLQQEAEQLFLSSPAWLPLHGVEHSARKWQRKTDPWSLLAVLGAPVPSDLQAQRHPTTGQILGYKEVLLENTNLSATTSLSLRRPPGPASQSLWGNPTRYPFWPGGMDEPTITDLNTREEAEEEIDFEKDLLTIPPGFKKGMDFAPKDCPTPAPGLLSLSCLLEPLDLGGGDEDENEAVGQPGGPRGDTVSASPCSAPLARASSLEDLVLKEASTAVSTPEAPEPPSQEQWAIPVDATSPVGDFYRLIPQPAFQWAFEPDVFQKQAILHLERHDSVFVAAHTSAGKTVVAEYAIALAQKHMTRTIYTSPIKALSNQKFRDFRNTFGDVGLLTGDVQLHPEASCLIMTTEILRSMLYSGSDVIRDLEWVIFDEVHYINDVERGVVWEEVLIMLPDHVSIILLSATVPNALEFADWIGADEAVKKILCGIATGYPARCPWSTTIHQGTQSKNPRGSLKKEAGAPKEDLPIKKRHLTSSKEGKNGKHRTKATKTMETSAPHYRGRGKTTDKQAEETADKITTDHRH

SEQ ID NO: 857232 - protein, 1273 aa, Homo sapiens; identical to SEQ ID NO: 857228

SEQ ID NO: 857233 - protein, 1210 aa, Homo sapiens
RPFRGGAYFAATTCRTSGLPGSCCGSRMMETERLVLPPPDPLDLPLRAVELGCTGHWELLNLPGAPESSLPHGLPPCAPDLQQEAEQLFLSSPAWLPLHGVEHSARKWQRKTDPWSLLAVLGAPVPSDLQAQRHPTTGQILGYKEVLLENTNLSATTSLSLRRPPGPASQSLWGNPTRYPFWPGGMDEPTITDLNTREEAEEEIDFEKDLLTIPPGFKKGMDFAPKDCPTPAPGLLSLSCLLEPLDLGGGDEDENEAVGQPGGPRGDTVSASPCSAPLARASSLEDLVLKEASTAVSTPEAPEPPSQEQWAIPVDATSPVGDFYRLIPQPAFQWAFEPDVFQKQAILHLERHDSVFVAAHTSAGKTVVAEYAIALAQKHMTRTIYTSPIKALSNQKFRDFRNTFGDVGLLTGDVQLHPEASCLIMTTEILRSMLYSGSDVIRDLEWVIFDEVHYINDVERGVVWEEVLIMLPDHVSIILLSATVPNALEFADWIGRLKRRQIYVISTVTRPVPLEHYLFTGNSSKTQGELFLLLDSRGAFHTKGYYAAVEAKKERMSKHAQTFGAKQPTHQGGPAQDRGVYLSLLASLRTRAQLPVVVFTFSRGRCDEQASGLTSLDLTTSSEKSEIHLFLQRCLARLRGSDRQLPQVLHMSELLNRGLGVHHSGILPILKEIVEMLFSRGLVKVLFATETFAMGVNMPARTVVFDSMRKHDGSTFRDLLPGEYVQMAGRAGRRGLDPTGTVILLCKGRVPEMADLHRMMMGKPSQLQSQFRLTYTMILNLLRVDALRVEDMMKRSFSEFPSRKDSKAHEQALAELTKRLGALEEPDMTGQLVDLPEYYSWGEELTETQHMIQRRIMESVNGLKSLSAGRVVVVKNQEHHNALGVILQVSSNSTSRVFTTLVLCDKPLSQDPQDRGPATAEVPYPDDLVGFKLFLPEGPCDHTVVKLQPGDMAAITTKVLRVNGEKILEDFSKRQQPKFKKDPPLAAVTTAVQELLRLAQAHPAGPPTLDPVNDLQLKDMSVVEGGLRARKLEELIQGAQCVHSPRFPAQYLKLRERMQIQKEMERLRFLLSDQSLLLLPEYHQRVEVLRTLGYVDEVGTVKLAGRVACAMSSHELLLTELMFDNALSTLRPEEIAALLSGLVCQSPGDAGDQLPNTLKQGIERVRAVAKRIGEVQVACGLNQTVEEFVGELNFGLVEVVYEWARGMVST

SEQ ID NO: 857234 - protein, 1237 aa, Homo sapiens
MDAKARNCLLQHREALEKDIKTSYIMDHMISDGFLTISEEEKVRNEPTQQQRAAMLIKMILKKDNDSYVSFYNALLHEGYKDLAALLHDGIPVVSSSSVRTVLCEGGVPQRPVVFVTRKKLVNAIQQKLSKLKGEPGWVTIHGMAGCGKSVLAAEAVRDHSLLEGCFPGGVHWVSVGKQDKSGLLMKLQNLCTRLDQDESFSQRLPLNIEEAKDRLRILMLRKHPRSLLILDDVWDSWVLKAFDSQCQILLTTRDKSVTDSVMGPKYVVPVESSLGKEKGLEILSLFVNMKKADLPEQAHSIIKECKGSPLVVSLIGALLRDFPNRWEYYLKQLQNKQFKRIRKSSSYDYEALDEAMSISVEMLREDIKDYYTDLSILQKDVKVPTKVLCILWDMETEEVEDILQEFVNKSLLFCDRNGKSFRYYLHDLQVDFLTEKNCSQLQDLHKKIITQFQRYHQPHTLSPDQEDCMYWYNFLAYHMASAKMHKELCALMFSLDWIKAKTELVGPAHLIHEFVEYRHILDEKDCAVSENFQEFLSLNGHLLGRQPFPNIVQLGLCEPETSEVYQQAKLQAKQEVDNGMLYLEWINKKNITNLSRLVVRPHTDAVYHACFSEDGQRIASCGADKTLQVFKAETGEKLLEIKAHEDEVLCCAFSTDDRFIATCSVDKKVKIWNSMTGELVHTYDEHSEQVNCCHFTNSSHHLLLATGSSDCFLKLWDLNQKECRNTMFGHTNSVNHCRFSPDDKLLASCSADGTLKLWDATSANERKSINVKQFFLNLEDPQEDMEVIVKCCSWSADGARIMVAAKNKIFLFDIHTSGLLGEIHTGHHSTIQYCDFSPQNHLAVVALSQYCVELWNTDSRSKVADCRGHLSWVHGVMFSPDGSSFLTSSDDQTIRLWETKKVCKNSAVMLKQEVDVVFQENEVMVLAVDHIRRLQLINGRTGQIDYLTEAQVSCCCLSPHLQYIAFGDENGAIEILELVNNRIFQSRFQHKKTVWHIQFTADEKTLISSSDDAEIQVWNWQLDKCIFLRGHQETVKDFRLLKNSRLLSWSFDGTVKVWNIITGNKEKDFVCHQGTVLSCDISHDATKFSSTSADKTAKIWSFDLLLPLHELRGHNGCVRCSAFSVDSTLLATGDDNGEIRIWNVSNGELLHLCAPLSEEGAATHGGWVTDLCFSPDGKMLISAGGYIKWWNVVTGESSQTFYTNGTNLKKIHVSPDFKTYVTVDNLGILYILQTLE

SEQ ID NO: 857235 - protein, 1205 aa, Homo sapiens
MDAKARNCLLQHREALEKDIKTSYIMDHMISDGFLTISEEEKVRNEPTQQQRAAMLIKMILKKDNDSYVSFYNALLHEGYKDLAALLHDGIPVVSSSSGKDSVSGITSYVRTVLCEGGVPQRPVVFVTRKKLVNAIQQKLSKLKGEPGWVTIHGMAGCGKSVLAAEAVRDHSLLEGCFPGGVHWVSVGKQDKSGLLMKLQNLCTRLDQDESFSQRLPLNIEEAKDRLRILMLRKHPRSLLILDDVWDSWVLKAFDSQCQILLTTRDKSVTDSVMGPKYVVPVESSLGKEKGLEILSLFVNMKKADLPEQAHSIIKECKGSPLVVSLIGALLRDFPNRWEYYLKQLQNKQFKRIRKSSSYDYEALDEAMSISVEMLREDIKDYYTDLSILQKDVKVPTKVLCILWDMETEEVEDILQEFVNKSLLFCDRNGKSFRYYLHDLQVDFLTEKNCSQLQDLHKKIITQFQRYHQPHTLSPDQEDCMYWYNFLAYHMASAKMHKELCALMFSLDWIKAKTELVGPAHLIHEFVEYRHILDEKDCAVSENFQEFLSLNGHLLGRQPFPNIVQLGLCEPETSEVYQQAKLQAKQEVDNGMLYLEWINKKNITNLSRLVVRPHTDAVYHACFSEDGQRIASCGADKTLQVFKAETGEKLLEIKAHEDEVLCCAFSTDDRFIATCSVDKKVKIWNSMTGELVHTYDEHSEQVNCCHFTNSSHHLLLATGSSDCFLKLWDLNQKECRNTMFGHTNSVNHCRFSPDDKLLASCSADGTLKLWDATSANERKSINVKQFFLNLEDPQEDMEVIVKCCSWSADGARIMVAAKNKIFLWNTDSRSKVADCRGHLSWVHGVMFSPDGSSFLTSSDDQTIRLWETKKVCKNSAVMLKQEVDVVFQENEVMVLAVDHIRRLQLINGRTGQIDYLTEAQVSCCCLSPHLQYIAFGDENGAIEILELVNNRIFQSRFQHKKTVWHIQFTADEKTLISSSDDAEIQVWNWQLDKCIFLRGHQETVKDFRLLKNSRLLSWSFDGTVKVWNIITGNKEKDFVCHQGTVLSCDISHDATKFSSTSADKTAKIWSFDLLLPLHELRGHNGCVRCSAFSVDSTLLATGDDNGEIRIWNVSNGELLHLCAPLSEEGAATHGGWVTDLCFSPDGKMLISAGGYIKWWNVVTGESSQTFYTNGTNLKKIHVSPDFKTYVTVDNLGILYILQTLE

SEQ ID NO: 857236 - protein, 1205 aa, Homo sapiens; identical to SEQ ID NO: 857235

SEQ ID NO: 857237 - protein, 745 aa, Homo sapiens
MFSLDWIKAKTELVGPAHLIHEFVEYRHILDEKDCAVSENFQEFLSLNGHLLGRQPFPNIVQLGLCEPETSEVYQQAKLQAKQEVDNGMLYLEWINKKNITNLSRLVVRPHTDAVYHACFSEDGQRIASCGADKTLQVFKAETGEKLLEIKAHEDEVLCCAFSTDDRFIATCSVDKKVKIWNSMTGELVHTYDEHSEQVNCCHFTNSSHHLLLATGSSDCFLKLWDLNQKECRNTMFGHTNSVNHCRFSPDDKLLASCSADGTLKLWDATSANERKSINVKQFFLNLEDPQEDMEVIVKCCSWSADGARIMVAAKNKIFLFDIHTSGLLGEIHTGHHSTIQYCDFSPQNHLAVVALSQYCVELWNTDSRSKVADCRGHLSWVHGVMFSPDGSSFLTSSDDQTIRLWETKKVCKNSAVMLKQEVDVVFQENEVMVLAVDHIRRLQLINGRTGQIDYLTEAQVSCCCLSPHLQYIAFGDENGAIEILELVNNRIFQSRFQHKKTVWHIQFTADEKTLISSSDDAEIQVWNWQLDKCIFLRGHQETVKDFRLLKNSRLLSWSFDGTVKVWNIITGNKEKDFVCHQGTVLSCDISHDATKFSSTSADKTAKIWSFDLLLPLHELRGHNGCVRCSAFSVDSTLLATGDDNGEIRIWNVSNGELLHLCAPLSEEGAATHGGWVTDLCFSPDGKMLISAGGYIKWWNVVTGESSQTFYTNGTNLKKIHVSPDFKTYVTVDNLGILYILQTLE

SEQ ID NO: 857238 - protein, 1194 aa, Homo sapiens
MDAKARNCLLQHREALEKDIKTSYIMDHMISDGFLTISEEEKVRNEPTQQQRAAMLIKMILKKDNDSYVSFYNALLHEGYKDLAALLHDGIPVVSSSSVRTVLCEGGVPQRPVVFVTRKKLVNAIQQKLSKLKGEPGWVTIHGMAGCGKSVLAAEAVRDHSLLEGCFPGGVHWVSVGKQDKSGLLMKLQNLCTRLDQDESFSQRLPLNIEEAKDRLRILMLRKHPRSLLILDDVWDSWVLKAFDSQCQILLTTRDKSVTDSVMGPKYVVPVESSLGKEKGLEILSLFVNMKKADLPEQAHSIIKECKGSPLVVSLIGALLRDFPNRWEYYLKQLQNKQFKRIRKSSSYDYEALDEAMSISVEMLREDIKDYYTDLSILQKDVKVPTKVLCILWDMETEEVEDILQEFVNKSLLFCDRNGKSFRYYLHDLQVDFLTEKNCSQLQDLHKKIITQFQRYHQPHTLSPDQEDCMYWYNFLAYHMASAKMHKELCALMFSLDWIKAKTELVGPAHLIHEFVEYRHILDEKDCAVSENFQEFLSLNGHLLGRQPFPNIVQLGLCEPETSEVYQQAKLQAKQEVDNGMLYLEWINKKNITNLSRLVVRPHTDAVYHACFSEDGQRIASCGADKTLQVFKAETGEKLLEIKAHEDEVLCCAFSTDDRFIATCSVDKKVKIWNSMTGELVHTYDEHSEQVNCCHFTNSSHHLLLATGSSDCFLKLWDLNQKECRNTMFGHTNSVNHCRFSPDDKLLASCSADGTLKLWDATSANERKSINVKQFFLNLEDPQEDMEVIVKCCSWSADGARIMVAAKNKIFLWNTDSRSKVADCRGHLSWVHGVMFSPDGSSFLTSSDDQTIRLWETKKVCKNSAVMLKQEVDVVFQENEVMVLAVDHIRRLQLINGRTGQIDYLTEAQVSCCCLSPHLQYIAFGDENGAIEILELVNNRIFQSRFQHKKTVWHIQFTADEKTLISSSDDAEIQVWNWQLDKCIFLRGHQETVKDFRLLKNSRLLSWSFDGTVKVWNIITGNKEKDFVCHQGTVLSCDISHDATKFSSTSADKTAKIWSFDLLLPLHELRGHNGCVRCSAFSVDSTLLATGDDNGEIRIWNVSNGELLHLCAPLSEEGAATHGGWVTDLCFSPDGKMLISAGGYIKWWNVVTGESSQTFYTNGTNLKKIHVSPDFKTYVTVDNLGILYILQTLE

SEQ ID NO: 857239 - protein, 1248 aa, Homo sapiens
MDAKARNCLLQHREALEKDIKTSYIMDHMISDGFLTISEEEKVRNEPTQQQRAAMLIKMILKKDNDSYVSFYNALLHEGYKDLAALLHDGIPVVSSSSGKDSVSGITSYVRTVLCEGGVPQRPVVFVTRKKLVNAIQQKLSKLKGEPGWVTIHGMAGCGKSVLAAEAVRDHSLLEGCFPGGVHWVSVGKQDKSGLLMKLQNLCTRLDQDESFSQRLPLNIEEAKDRLRILMLRKHPRSLLILDDVWDSWVLKAFDSQCQILLTTRDKSVTDSVMGPKYVVPVESSLGKEKGLEILSLFVNMKKADLPEQAHSIIKECKGSPLVVSLIGALLRDFPNRWEYYLKQLQNKQFKRIRKSSSYDYEALDEAMSISVEMLREDIKDYYTDLSILQKDVKVPTKVLCILWDMETEEVEDILQEFVNKSLLFCDRNGKSFRYYLHDLQVDFLTEKNCSQLQDLHKKIITQFQRYHQPHTLSPDQEDCMYWYNFLAYHMASAKMHKELCALMFSLDWIKAKTELVGPAHLIHEFVEYRHILDEKDCAVSENFQEFLSLNGHLLGRQPFPNIVQLGLCEPETSEVYQQAKLQAKQEVDNGMLYLEWINKKNITNLSRLVVRPHTDAVYHACFSEDGQRIASCGADKTLQVFKAETGEKLLEIKAHEDEVLCCAFSTDDRFIATCSVDKKVKIWNSMTGELVHTYDEHSEQVNCCHFTNSSHHLLLATGSSDCFLKLWDLNQKECRNTMFGHTNSVNHCRFSPDDKLLASCSADGTLKLWDATSANERKSINVKQFFLNLEDPQEDMEVIVKCCSWSADGARIMVAAKNKIFLFDIHTSGLLGEIHTGHHSTIQYCDFSPQNHLAVVALSQYCVELWNTDSRSKVADCRGHLSWVHGVMFSPDGSSFLTSSDDQTIRLWETKKVCKNSAVMLKQEVDVVFQENEVMVLAVDHIRRLQLINGRTGQIDYLTEAQVSCCCLSPHLQYIAFGDENGAIEILELVNNRIFQSRFQHKKTVWHIQFTADEKTLISSSDDAEIQVWNWQLDKCIFLRGHQETVKDFRLLKNSRLLSWSFDGTVKVWNIITGNKEKDFVCHQGTVLSCDISHDATKFSSTSADKTAKIWSFDLLLPLHELRGHNGCVRCSAFSVDSTLLATGDDNGEIRIWNVSNGELLHLCAPLSEEGAATHGGWVTDLCFSPDGKMLISAGGYIKWWNVVTGESSQTFYTNGTNLKKIHVSPDFKTYVTVDNLGILYILQTLE

SEQ ID NO: 857240 - protein, 999 aa, Homo sapiens
MDAKARNCLLQHREALEKDIKTSYIMDHMISDGFLTISEEEKVRNEPTQQQRAAMLIKMILKKDNDSYVSFYNALLHEGYKDLAALLHDGIPVVSSSSGKDSVSGITSYVRTVLCEGGVPQRPVVFVTRKKLVNAIQQKLSKLKGEPGWVTIHGMAGCGKSVLAAEAVRDHSLLEGCFPGGVHWVSVGKQDKSGLLMKLQNLCTRLDQDESFSQRLPLNIEEAKDRLRILMLRKHPRSLLILDDVWDSWVLKAFDSQCQILLTTRDKSVTDSVMGPKYVVPVESSLGKEKGLEILSLFVNMKKADLPEQAHSIIKECKGSPLVVSLIGALLRDFPNRWEYYLKQLQNKQFKRIRKSSSYDYEALDEAMSISVEMLREDIKDYYTDLSILQKDVKVPTKVLCILWDMETEEVEDILQEFVNKSLLFCDRNGKSFRYYLHDLQVDFLTEKNCSQLQDLHKKIITQFQRYHQPHTLSPDQEDCMYWYNFLAYHMASAKMHKELCALMFSLDWIKAKTELVGPAHLIHEFVEYRHILDEKDCAVSENFQEFLSLNGHLLGRQPFPNIVQLGLCEPETSEVYQQAKLQAKQEVDNGMLYLEWINKKNITNLSRLVVRPHTDAVYHACFSEDGQRIASCGADKTLQVFKAETGEKLLEIKAHEDEVLCCAFSTDDRFIATCSVDKKVKIWNSMTGELVHTYDEHSEQVNCCHFTNSSHHLLLATGSSDCFLKLWDLNQKECRNTMFGHTNSVNHCRFSPDDKLLASCSADGTLKLWDATSANERKSINVKQFFLNLEDPQEDMEVIVKCCSWSADGARIMVAAKNKIFLFDIHTSGLLGEIHTGHHSTIQYCDFSPQNHLAVVALSQYCVELWNTDSRSKVADCRGHLSWVHGVMFSPDGSSFLTSSDDQTIRLWETKKVCKNSAVMLKQEVDVVFQENEVMVLAVDHIRRLQLINGRTGQIDYLTEAQVSCCCLSPHLQYIAFGDENGAIEVFSASLQNLSVQN

SEQ ID NO: 857241 - protein, 148 aa, Homo sapiens
MAVEQMPKKDWYSILGADPSANISDLKQKYQKLILMYHPDKQSTDVPAGTVEECVQKFIEIDQAWKILGNEETKREYDLQRCEDDLRNVGPVDAQVYLEEMSWNEGDHSFYLSCRCGGKYSVSKDEAEEVSLISCDTCSLIIELLHYN

SEQ ID NO: 857242 - protein, 148 aa, Homo sapiens; identical to SEQ ID NO: 857241

SEQ ID NO: 857243 - protein, 148 aa, Homo sapiens; identical to SEQ ID NO: 857241

SEQ ID NO: 857244 - protein, 148 aa, Homo sapiens; identical to SEQ ID NO: 857241

SEQ ID NO: 857245 - protein, 148 aa, Homo sapiens; identical to SEQ ID NO: 857241

SEQ ID NO: 857246 - protein, 148 aa, Homo sapiens; identical to SEQ ID NO: 857241

SEQ ID NO: 857247 - protein, 474 aa, Homo sapiens
MFLSSCTFEVSGKPFTCKEVGKDFLVRSRFLQQQAAHTRKKSNRTKSAVAFHSVKNHYNWGECVKAFSYKHVRVQHQGDLIRERSYMCSECGKSFSTSCSLSDHLRVHTSEKPYTCGECGKSYRQSSSLITHRRIHTGVRPHQCDECGKLFNRKYDLLIHQRVHTGERPYKCSECGKSFSHSSSLITHQRIHTGMRPYECSECGKSFIHSSSLITHQRVHTGTRPYMCSECGKSFSQSCHLIKHRRLHIGEGPYECSECGKLFTYRSRFFQHQRVHTGVRSHECHECGKLFSRKFDLIVHERVHTGERPYECSECGKSFTCKSYLISHWKVHTGARPYECGECGKSFTHSSTLLQHQRVHTGERPYECNECGKFFSQSSSLIRHRRSHTGERPYECSECWKSFSNHSSLVKHRRVHTGERPYECSECGKSFSQSSNLTNHQRIHSGERPYECSDCGKFFTFNSNLLKHQNVHKG

SEQ ID NO: 857248 - protein, 148 aa, Homo sapiens
MAAAELTAPAQGIVTFEDVAVYFSWKEWGLLDEAQKCLYHDVMLENLTLTTSLGGSGAGDEEAPYQQSTSPQRVSQVRIPKALPSPQKTNPCEICGPVLRQILHLVEHQGTHHGQKLYTDGACRKQLQFTAYLHQHQKQHVGQKHFSL

SEQ ID NO: 857249 - protein, 627 aa, Homo sapiens
MAAAELTAPAQGIVTFEDVAVYFSWKEWGLLDEAQKCLYHDVMLENLTLTTSLGGSGAGDEEAPYQQSTSPQRVSQVRIPKALPSPQKTNPCEICGPVLRQILHLVEHQGTHHGQKLYTDGACRKQLQFTAYLHQHQKQHVGQKHFRSNGGRDMFLSSCTFEVSGKPFTCKEVGKDFLVRSRFLQQQAAHTRKKSNRTKSAVAFHSVKNHYNWGECVKAFSYKHVRVQHQGDLIRERSYMCSECGKSFSTSCSLSDHLRVHTSEKPYTCGECGKSYRQSSSLITHRRIHTGVRPHQCDECGKLFNRKYDLLIHQRVHTGERPYKCSECGKSFSHSSSLITHQRIHTGMRPYECSECGKSFIHSSSLITHQRVHTGTRPYMCSECGKSFSQSCHLIKHRRLHIGEGPYECSECGKLFTYRSRFFQHQRVHTGVRSHECHECGKLFSRKFDLIVHERVHTGERPYECSECGKSFTCKSYLISHWKVHTGARPYECGECGKSFTHSSTLLQHQRVHTGERPYECNECGKFFSQSSSLIRHRRSHTGERPYECSECWKSFSNHSSLVKHRRVHTGERPYECSECGKSFSQSSNLTNHQRIHSGERPYECSDCGKFFTFNSNLLKHQNVHKG

SEQ ID NO: 857250 - protein, 437 aa, Homo sapiens
MIVFVRFNSSHGFPVEVDSDTSIFQLKEVVAKRQGVPADQLRVIFAGKELRNDWTVQNCDLDQQSIVHIVQRPWRKGQEMNATGGDDPRNAAGGCEREPQSLTRVDLSSSVLPGDSVGLAVILHTDSRKDSPPAGSPAGRSIYNSFYVYCKGPCQRVQPGKLRVQCSTCRQATLTLTQEFFFKCGAHPTSDKETPVALHLIATNSRNITCITCTDVRSPVLVFQCNSRHVICLDCFHLYCVTRLNDRQFVHDPQLGYSLPCVAGCPNSLIKELHHFRILGEEQYNRYQQYGAEECVLQMGGVLCPRPGCGAGLLPEPDQRKVTCEGGNGLGCGFAFCRECKEAYHEGECSAVFEASGTTTQAYRVDERAAEQARWEAASKETIKKTTKPCPRCHVPVEKNGGCMHMKCPQPQCRLEWCWNCGCEWNRVCMGDHWFDV

SEQ ID NO: 857251 - protein, 73 aa, Homo sapiens
AGGVRRNYALELRLPAGPGPRPPRVRIPRAGRGGGEAGRIYPGDRWWEARLAPLRAWACSWPAAATYPVTMIG

SEQ ID NO: 857252 - protein, 465 aa, Homo sapiens
MIVFVRFNSSHGFPVEVDSDTSIFQLKEVVAKRQGVPADQLRVIFAGKELRNDWTVQNCDLDQQSIVHIVQRPWRKGQEMNATGGDDPRNAAGGCEREPQSLTRVDLSSSVLPGDSVGLAVILHTDSRKDSPPAGSPAGRSIYNSFYVYCKGPCQRVQPGKLRVQCSTCRQATLTLTQGPSCWDDVLIPNRMSGECQSPHCPGTSAEFFFKCGAHPTSDKETPVALHLIATNSRNITCITCTDVRSPVLVFQCNSRHVICLDCFHLYCVTRLNDRQFVHDPQLGYSLPCVAGCPNSLIKELHHFRILGEEQYNRYQQYGAEECVLQMGGVLCPRPGCGAGLLPEPDQRKVTCEGGNGLGCGFAFCRECKEAYHEGECSAVFEASGTTTQAYRVDERAAEQARWEAASKETIKKTTKPCPRCHVPVEKNGGCMHMKCPQPQCRLEWCWNCGCEWNRVCMGDHWFDV

SEQ ID NO: 857253 - protein, 316 aa, Homo sapiens
MIVFVRFNSSHGFPVEVDSDTSIFQLKEVVAKRQGVPADQLRVIFAGKELRNDWTVQEFFFKCGAHPTSDKETPVALHLIATNSRNITCITCTDVRSPVLVFQCNSRHVICLDCFHLYCVTRLNDRQFVHDPQLGYSLPCVAGCPNSLIKELHHFRILGEEQYNRYQQYGAEECVLQMGGVLCPRPGCGAGLLPEPDQRKVTCEGGNGLGCGFAFCRECKEAYHEGECSAVFEASGTTTQAYRVDERAAEQARWEAASKETIKKTTKPCPRCHVPVEKNGGCMHMKCPQPQCRLEWCWNCGCEWNRVCMGDHWFDV

SEQ ID NO: 857254 - protein, 212 aa, Homo sapiens
MNIFRLTGDLSHLAAIVILLLKIWKTRSCAGISGKSQLLFALVFTTRYLDLFTSFISLYNTSMKVIYLACSYATVYLIYLKFKATYDGNHDTFRVEFLVVPVGGLSFLVNHDFSPLEILWTFSIYLESVAILPQLFMISKTGEAETITTHYLFFLGLYRALYLVNWIWRFYFEGFFDLIAVVAGVVQTILYCDFFYLYITKVLKGKKLSLPA

SEQ ID NO: 857255 - protein, 212 aa, Homo sapiens; identical to SEQ ID NO: 857254

SEQ ID NO: 857256 - protein, 212 aa, Homo sapiens; identical to SEQ ID NO: 857254

SEQ ID NO: 857257 - protein, 212 aa, Homo sapiens; identical to SEQ ID NO: 857254

SEQ ID NO: 857258 - protein, 212 aa, Homo sapiens; identical to SEQ ID NO: 857254

SEQ ID NO: 857259 - protein, 214 aa, Homo sapiens
MAMNIFRLTGDLSHLAAIVILLLKIWKTRSCAGISGKSQLLFALVFTTRYLDLFTSFISLYNTSMKVIYLACSYATVYLIYLKFKATYDGNHDTFRVEFLVVPVGGLSFLVNHDFSPLEILWTFSIYLESVAILPQLFMISKTGEAETITTHYLFFLGLYRALYLVNWIWRFYFEGFFDLIAVVAGVVQTILYCDFFYLYITKVLKGKKLSLPA

SEQ ID NO: 857260 - protein, 228 aa, Homo sapiens
STGINAECPLRPGAAEQPPPPRAMNIFRLTGDLSHLAAIVILLLKIWKTRSCALLFALVFTTRYLDLFTSFISLYNTSMKVIYLACSYATVYLIYLKFKATYDGNHDTFRVEFLVVPVGGLSFLVNHDFSPLEILWTFSIYLESVAILPQLFMISKTGEAETITTHYLFFLGLYRALYLVNWIWRFYFEGFFDLIAVVAGVVQTILYCDFFYLYITKVLKGKKLSLPA

SEQ ID NO: 857261 - protein, 150 aa, Homo sapiens
MKVIYLACSYATVYLIYLKFKATYDGNHDTFRVEFLVVPVGGLSFLVNHDFSPLEILWTFSIYLESVAILPQLFMISKTGEAETITTHYLFFLGLYRALYLVNWIWRFYFEGFFDLIAVVAGVVQTILYCDFFYLYITKVLKGKKLSLPA

SEQ ID NO: 857262 - protein, 245 aa, Homo sapiens
MNIFRLTGDLSHLAAIVILLLKIWKTRSCAGSCSVTQARVQGCDHSSLSLSLLESRNPPTSTSHVAGTTGLLFALVFTTRYLDLFTSFISLYNTSMKVIYLACSYATVYLIYLKFKATYDGNHDTFRVEFLVVPVGGLSFLVNHDFSPLEILWTFSIYLESVAILPQLFMISKTGEAETITTHYLFFLGLYRALYLVNWIWRFYFEGFFDLIAVVAGVVQTILYCDFFYLYITKVLKGKKLSLPA

SEQ ID NO: 857263 - protein, 212 aa, Homo sapiens; identical to SEQ ID NO: 857254

SEQ ID NO: 857264 - protein, 228 aa, Homo sapiens
GVRRYSAHIAIAVPRQWEEMRPLDIVELAEPEEVEVLEPEEDFEQFLLPVINEMREDIASLTREHGRAYLRNRSKLWEMDNMLIQIKTQVEASEESALNPPPEPGPPRCADRHRRRRHEHFPADWGPVPPGGHRHPAAEDLEDALLRRYFWEKPGKTGEAETITTHYLFFLGLYRALYLVNWIWRFYFEGFFDLIAVVAGVVQTILYCDFFYLYITKVLKGKKLSLPA

SEQ ID NO: 857265 - protein, 212 aa, Homo sapiens; identical to SEQ ID NO: 857254

SEQ ID NO: 857266 - protein, 212 aa, Homo sapiens; identical to SEQ ID NO: 857254

SEQ ID NO: 857267 - protein, 186 aa, Homo sapiens
MNIFRLTGDLSHLAAIVILLLKIWKTRSCAGISGKSQLLFALVFTTRYLDLFTSFISLYNTSMKVIYLACSYATVYLIYLKFKATYDGNHDTFRVEFLVVPVGGLSFLVNHDFSPLEYSRERSSVCQHKCQRPSPASVLQGARTEFLPQQRHKMLDTENQKLNSFVADSHQWLCKNAEEKSQKVSV

SEQ ID NO: 857268 - protein, 212 aa, Homo sapiens; identical to SEQ ID NO: 857254

SEQ ID NO: 857269 - protein, 212 aa, Homo sapiens; identical to SEQ ID NO: 857254

SEQ ID NO: 857270 - protein, 212 aa, Homo sapiens; identical to SEQ ID NO: 857254

SEQ ID NO: 857271 - protein, 186 aa, Homo sapiens; identical to SEQ ID NO: 857267

SEQ ID NO: 857272 - protein, 236 aa, Homo sapiens
RARARGSSATSLATSRAISPSSPAMNIFRLTGDLSHLAAIVILLLKIWKTRSCAGISGKSQLLFALVFTTRYLDLFTSFISLYNTSMKVIYLACSYATVYLIYLKFKATYDGNHDTFRVEFLVVPVGGLSFLVNHDFSPLEILWTFSIYLESVAILPQLFMISKTGEAETITTHYLFFLGLYRALYLVNWIWRFYFEGFFDLIAVVAGVVQTILYCDFFYLYITKVLKGKKLSLPA

SEQ ID NO: 857273 - protein, 212 aa, Homo sapiens; identical to SEQ ID NO: 857254

SEQ ID NO: 857274 - protein, 329 aa, Homo sapiens
GVRRYSAHIAIAVPRQWEEMRPLDIVELAEPEEVEVLEPEEDFEQFLLPVINEMREDIASLTREHGRAYLRNRSKLWEMDNMLIQIKTQVEASEESALNHLQNPGRRAAPTATAAAAMNIFRLTGDLSHLAAIVILLLKIWKTRSCAGISGKSQLLFALVFTTRYLDLFTSFISLYNTSMKVIYLACSYATVYLIYLKFKATYDGNHDTFRVEFLVVPVGGLSFLVNHDFSPLEILWTFSIYLESVAILPQLFMISKTGEAETITTHYLFFLGLYRALYLVNWIWRFYFEGFFDLIAVVAGVVQTILYCDFFYLYITKVLKGKKLSLPA

SEQ ID NO: 857275 - protein, 212 aa, Homo sapiens; identical to SEQ ID NO: 857254

SEQ ID NO: 857276 - protein, 212 aa, Homo sapiens; identical to SEQ ID NO: 857254

SEQ ID NO: 857277 - protein, 190 aa, Homo sapiens
MNIFRLTGDLSHLAAIVILLLKIWKTRSCATSFISLYNTSMKVIYLACSYATVYLIYLKFKATYDGNHDTFRVEFLVVPVGGLSFLVNHDFSPLEILWTFSIYLESVAILPQLFMISKTGEAETITTHYLFFLGLYRALYLVNWIWRFYFEGFFDLIAVVAGVVQTILYCDFFYLYITKVLKGKKLSLPA

SEQ ID NO: 857278 - protein, 212 aa, Homo sapiens; identical to SEQ ID NO: 857254

SEQ ID NO: 857279 - protein, 198 aa, Homo sapiens
RRTSCGVSFIKQQMRPCFSLSTPPCPLNITVLQAQTYFQTMQAMLLLQRHGEYQPISQEYLKIKVFFFQRAHTTPYVPPEVVIKKVVPFPFFYNQIDRNVRFSPGPEKLKGMNNSSPSQAQFQRCKTGEAETITTHYLFFLGLYRALYLVNWIWRFYFEGFFDLIAVVAGVVQTILYCDFFYLYITKVLKGKKLSLPA

SEQ ID NO: 857280 - protein, 212 aa, Homo sapiens; identical to SEQ ID NO: 857254

SEQ ID NO: 857281 - protein, 212 aa, Homo sapiens; identical to SEQ ID NO: 857254

SEQ ID NO: 857282 - protein, 212 aa, Homo sapiens; identical to SEQ ID NO: 857254

SEQ ID NO: 857283 - protein, 212 aa, Homo sapiens; identical to SEQ ID NO: 857254

SEQ ID NO: 857284 - protein, 212 aa, Homo sapiens; identical to SEQ ID NO: 857254

SEQ ID NO: 857285 - protein, 173 aa, Homo sapiens
EREREREREREREREMAAQGVGPGPGSAAPPGLEAARQKLALRRKKVLSTEEMELYELAQAAGGAIDPDVFKILVDLLKLNVAPLAVFQMLKSMCAGQRLASEPQDPAAVSLPTSSVPETRGRNKGSAALGGALALAERSSREGSSQRMPRQPSATRLPKGGGPGKSPTRGST

SEQ ID NO: 857286 - protein, 195 aa, Homo sapiens
MLLLLPMALSEMQHNLLGQWKKAQSWLPAWKHEETRTGILRRRGEQAAFMGGVPGPGHPHPLTQEGPGTCVLASSLTFALSALFVSLSDLQRPPFSLPGTVAPLQGPPFPPARSLRPLRFCSTARLPHTRLSLQAPRVPSASLAACSLLLQVAFIGLSLGVGALPCFHGNCLAPGGPSSFELQGQDHAGHRCPAA

SEQ ID NO: 857287 - protein, 158 aa, Homo sapiens
MAAQGVGPGPGSAAPPGLEAARQKLALRRKKVLSTEEMELYELAQAAGGAIDPDVFKILVDLLKLNVAPLAVFQMLKSMCAGQRLASEPQDPAAVSLPTSSVPETRGRNKGSAALGGALALAERSSREGSSQRMPRQPSATRLPKGGGPGKSPTRGST

SEQ ID NO: 857288 - protein, 135 aa, Homo sapiens
MAAQGVGPGPGSAAPPGLEAARQKLALRRKKVLSTEEMELYELAQAAGGAIDPDVFKILVDLLKLNVAPLAVFQMLKSMCAGQRLASEPQDPAAVSLPTSSVPETRGQSWARCPCPSGGGGGRGGGRRGTAAAWP

SEQ ID NO: 857289 - protein, 158 aa, Homo sapiens; identical to SEQ ID NO: 857287

SEQ ID NO: 857290 - protein, 158 aa, Homo sapiens; identical to SEQ ID NO: 857287

SEQ ID NO: 857291 - protein, 158 aa, Homo sapiens; identical to SEQ ID NO: 857287

SEQ ID NO: 857292 - protein, 150 aa, Homo sapiens
MAAQGVGPGPGSAAPPGLEAARQKLALRRKKVLSTEEMELYELAQAAGGAIDPDVFKILVDLLKLNVAPLAVFQMLKSMCAGQRLASEPQDPAAVSLPTSSVPETRAAQRYQAAQGGRAWEEPYTGQHLGWGRDLLHLCPQQRLHVTSFN

SEQ ID NO: 857293 - protein, 158 aa, Homo sapiens; identical to SEQ ID NO: 857287

SEQ ID NO: 857294 - protein, 144 aa, Homo sapiens
LKRRVRKAKAGRAGKRNGEAGVRGREWSLAECACVVAASGAPRILVDLLKLNVAPLAVFQMLKSMCAGQRLASEPQDPAAVSLPTSSVPETRGRNKGSAALGGALALAERSSREGSSQRMPRQPSATRLPKGGGPGKSPTRGST

SEQ ID NO: 857295 - protein, 117 aa, Homo sapiens
RAGRRGLTGPASVPARILVDLLKLNVAPLAVFQMLKSMCAGQRLASEPQDPAAVSLPTSSVPETRGRNKGSAALGGALALAERSSREGSSQRMPRQPSATRLPKGGGPGKSPTRGST

SEQ ID NO: 857296 - protein, 120 aa, Homo sapiens
AQGGRAWAGVGAIDPDVFKILVDLLKLNVAPLAVFQMLKSMCAGQRLASEPQDPAAVSLPTSSVPETRGRNKGSAALGGALALAERSSREGSSQRMPRQPSATRLPKGGGPGKSPTRGST

SEQ ID NO: 857297 - protein, 158 aa, Homo sapiens; identical to SEQ ID NO: 857287

SEQ ID NO: 857298 - protein, 158 aa, Homo sapiens; identical to SEQ ID NO: 857287

SEQ ID NO: 857299 - protein, 218 aa, Homo sapiens
MAAQGVGPGPGSAAPPGLEAARQKLALRRKKVLSTEEMELYELAQAAGGAIDPDVFKILVDLLKLNVAPLAVFQMLKSMCAGQRLASEPQDPAAVSLPTSSVPETREASFLSARNSSPPARPSFSSSPQPAASPVLLHSPAATHSPLSPGPPGSLRLSCCLFSPFAGRNKGSAALGGALALAERSSREGSSQRMPRQPSATRLPKGGGPGKSPTRGST

SEQ ID NO: 857300 - protein, 114 aa, Homo sapiens
RERERERERERERERDGGAGRRAWAGVGGAPGAGGGPAEAGAAAEEGAEHRGDGAVRAGAGGGRRYRPRRVQDPGGPAEAERGPPRRLPDAQQPSATRLPKGGGPGKSPTRGST

SEQ ID NO: 857301 - protein, 860 aa, Homo sapiens
MEIGSAGPAGAQPLLMVPRRPGYGTMGKPIKLLANCFQVEIPKIDVYLYEVDIKPDKCPRRVNREVVDSMVQHFKVTIFGDRRPVYDGKRSLYTANPLPVATTGVDLDVTLPGEGGKDRPFKVSIKFVSRVSWHLLHEVLTGRTLPEPLELDKPISTNPVHAVDVVLRHLPSMKYTPVGRSFFSAPEGYDHPLGGGREVWFGFHQSVRPAMWKMMLNIDVSATAFYKAQPVIQFMCEVLDIHNIDEQPRPLTDSHRVKFTKEIKGLKVEVTHCGTMRRKYRVCNVTRRPASHQTFPLQLENGQTVERTVAQYFREKYTLQLKYPHLPCLQVGQEQKHTYLPLEVCNIVAGQRCIKKLTDNQTSTMIKATARSAPDRQEEISRLVRSANYETDPFVQEFQFKVRDEMAHVTGRVLPAPMLQYGGRNRTVATPSHGVWDMRGKQFHTGVEIKMWAIACFATQRQCREEILKGFTDQLRKISKDAGMPIQGQPCFCKYAQGADSVEPMFRHLKNTYSGLQLIIVILPGKTPVYAEVKRVGDTLLGMATQCVQVKNVIKTSPQTLSNLCLKINVKLGGINNILVPHQRPSVFQQPVIFLGADVTHPPAGDGKKPSIAAVVGSMDAHPSRYCATVRVQRPRQEIIQDLASMVRELLIQFYKSTRFKPTRIIFYRDGVSEGQFRQVLYYELLAIREACISLEKDYQPGITYIVVQKRHHTRLFCADRTERVGRSGNIPAGTTVDTDITHPYEFDFYLCSHAGIQGTSRPSHYHVLWDDNCFTADELQLLTYQLCHTYVRCTRSVSIPAPAYYAHLVAFRARYHLVDKEHDSAEGSHVSGQSNGRDPQALAKAVQIHQDTLRTMYFA

SEQ ID NO: 857302 - protein, 878 aa, Homo sapiens
DRRRSHRSSTTAGRASSMNGNRLRRPAGAQPLLMVPRRPGYGTMGKPIKLLANCFQVEIPKIDVYLYEVDIKPDKCPRRVNREVVDSMVQHFKVTIFGDRRPVYDGKRSLYTANPLPVATTGVDLDVTLPGEGGKDRPFKVSIKFVSRVSWHLLHEVLTGRTLPEPLELDKPISTNPVHAVDVVLRHLPSMKYTPVGRSFFSAPEGYDHPLGGGREVWFGFHQSVRPAMWKMMLNIDVSATAFYKAQPVIQFMCEVLDIHNIDEQPRPLTDSHRVKFTKEIKGLKVEVTHCGTMRRKYRVCNVTRRPASHQTFPLQLENGQTVERTVAQYFREKYTLQLKYPHLPCLQVGQEQKHTYLPLEVCNIVAGQRCIKKLTDNQTSTMIKATARSAPDRQEEISRLVRSANYETDPFVQEFQFKVRDEMAHVTGRVLPAPMLQYGGRNRTVATPSHGVWDMRGKQFHTGVEIKMWAIACFATQRQCREEILKGFTDQLRKISKDAGMPIQGQPCFCKYAQGADSVEPMFRHLKNTYSGLQLIIVILPGKTPVYAEVKRVGDTLLGMATQCVQVKNVIKTSPQTLSNLCLKINVKLGGINNILVPHQRPSVFQQPVIFLGADVTHPPAGDGKKPSIAAVVGSMDAHPSRYCATVRVQRPRQEIIQDLASMVRELLIQFYKSTRFKPTRIIFYRDGVSEGQFRQVLYYELLAIREACISLEKDYQPGITYIVVQKRHHTRLFCADRTERVGRSGNIPAGTTVDTDITHPYEFDFYLCSHAGIQGTSRPSHYHVLWDDNCFTADELQLLTYQLCHTYVRCTRSVSIPAPAYYAHLVAFRARYHLVDKEHDSAEGSHVSGQSNGRDPQALAKAVQIHQDTLRTMYFA

SEQ ID NO: 857303 - protein, 235 aa, Homo sapiens [sequence omitted]

SEQ ID NO: 857304 - protein, 229 aa, Homo sapiens
MEIGSAGPAGAQPLLMVPRRPGYGTMGKPIKLLANCFQVEIPKIDVYLYEVDIKPDKCPRRVNREVVDSMVQHFKVTIFGDRRPVYDGKRSLYTANPLPVATTGVDLDVTLPGEGGKDRPFKVSIKFVSRVSWHLLHEVLTGRTLPEPLELDKPISTNPVHAVDVVLRHLPSMKYTPVGRSFFSAPEGYDHPLGGGREVWFGFHQSVRPAMWKMMLNIDERDLWQQCGE

SEQ ID NO: 857305 - protein, 860 aa, Homo sapiens; identical to SEQ ID NO: 857301

SEQ ID NO: 857306 - protein, 626 aa, Homo sapiens
MCEVLDIHNIDEQPRPLTDSHRVKFTKEIKGLKVEVTHCGTMRRKYRVCNVTRRPASHQTFPLQLENGQTVERTVAQYFREKYTLQLKYPHLPCLQVGQEQKHTYLPLEVCNIVAGQRCIKKLTDNQTSTMIKATARSAPDRQEEISRLVRSANYETDPFVQEFQFKVRDEMAHVTGRVLPAPMLQYGGRNRTVATPSHGVWDMRGKQFHTGVEIKMWAIACFATQRQCREEILKGFTDQLRKISKDAGMPIQGQPCFCKYAQGADSVEPMFRHLKNTYSGLQLIIVILPGKTPVYAEVKRVGDTLLGMATQCVQVKNVIKTSPQTLSNLCLKINVKLGGINNILVPHQRPSVFQQPVIFLGADVTHPPAGDGKKPSIAAVVGSMDAHPSRYCATVRVQRPRQEIIQDLASMVRELLIQFYKSTRFKPTRIIFYRDGVSEGQFRQVLYYELLAIREACISLEKDYQPGITYIVVQKRHHTRLFCADRTERVGRSGNIPAGTTVDTDITHPYEFDFYLCSHAGIQGTSRPSHYHVLWDDNCFTADELQLLTYQLCHTYVRCTRSVSIPAPAYYAHLVAFRARYHLVDKEHDSAEGSHVSGQSNGRDPQALAKAVQIHQDTLRTMYFA

SEQ ID NO: 857307 - protein, 229 aa, Homo sapiens; identical to SEQ ID NO: 857304

SEQ ID NO: 857308 - protein, 158 aa, Homo sapiens
QRILKYHLLLQEIAKHFDEEEDGFEVVEDAIDTMTCVAWYINDMKRRHEHAVRLQEIQSLLINWKGPDLTTYGELVLEGTFRVHRVRNERTFFLFDKTLLITKKRGDHFVYKGNIPVTRPCPISSAIFSPSQRIWAPLLVCFLGLQHHPSEITLPASP

SEQ ID NO: 857309 - protein, 245 aa, Homo sapiens
QRILKYHLLLQEIAKHFDEEEDGFEVVEDAIDTMTCVAWYINDMKRRHEHAVRLQEIQSLLINWKGPDLTTYGELVLEGTFRVHRVRNERTFFLFDKTLLITKKRGDHFVYKGNIPCSSLMLIESTRDSLCFTVTHYKHSKQQYSIQAKTVEEKRNWTHHIKRLILENHHATIPQKAKEAILEMDSYYPNRYRCSPERLKKAWSSQDEVSTNVRQGRRQSEPTKHLLRQLNEKARAAGMKVKASG

SEQ ID NO: 857310 - protein, 837 aa, Homo sapiens
MEPAPSEVRLAVREAIHALSSSEDGGHIFCTLESLKRYLGEMEPPALPREKEEFASAHFSPVLRCLASRLSPAWLELLPHGRLEELWASFFLEGPADQAFLVLMETIEGAAGPSFRLMKMARLLARFLREGRLAVLMEAQCRQQTRPGFILLRETLLGKVVALPDHLGNRLQQENLAEFFPQNYFRLLGEEVVRVLQAVVDSLQGGLDSSVSFVSQVLGKACVHGRQQEILGVLVPRLAALTQGSYLHQRVCWRLVEQVPDRAMEAVLTGLVEAALGPEVLSRLLGNLVVKNKKAQFVMTQKLLFLQSRLTTPMLQSLLGHLAMDSQRRPLLLQVLKELLETWGSSSAIRHTPLPQQRHVSKAVLICLAQLGEPELRDSRDELLASMMAGVKCRLDSSLPPVRRLGMIVAEVVSARIHPEGPPLKFQYEEDELSLELLALASPQPAGDGASEAGTSLVPATAEPPAETPAEIVDGGVPQAQLAGSDSDLDSDDEFVPYDMSGDRELKSSKAPAYVRDCVEALTTSEDIERWEAALRALEGLVYRSPTATREVSVELAKVLLHLEEKTCVVGFAGLRQRALVAVTVTDPAPVADYLTSQFYALNYSLRQRMDILDVLTLAAQELSRPGCLGRTPQPGSPSPNTPCLPEAAVSQPGSAVASDWRVVVEERIRSKTQRLSKGGPRQGPAGSPSRFNSVAGHFFFPLLQRFDRPLVTFDLLGEDQLVLGRLAHTLGALMCLAVNTTVAVAMGKALLEFVWALRFHIDAYVRQGLLSAVSSVLLSLPAARLLEDLMDELLEARSWLADVAEKDPDEDCRTLALRALLLLQRLKNRLLPPASP

SEQ ID NO: 857311 - protein, 837 aa, Homo sapiens; identical to SEQ ID NO: 857310

SEQ ID NO: 857312 - protein, 994 aa, Homo sapiens
MEPAPSEVRLAVREAIHALSSSEDGGHIFCTLESLKRYLGEMEPPALPREKEEFASAHFSPVLRCLASRLSPAWLELLPHGRLEELWASFFLEGPADQAFLVLMETIEGAAGPSFRLMKMARLLARFLREGRLAVLMEAQCRQQTRPGFILLRETLLGKVVALPDHLGNRLQQENLAEFFPQNYFRLLGEEVVRVLQAVVDSLQGGLDSSVSFVSQVLGKACVHGRQQEILGVLVPRLAALTQGSYLHQRVCWRLVEQVPDRAMEAVLTGLVEAALGPEVLSRLLGNLVVKNKKAQFVMTQKLLFLQSRLTTPMLQSLLGHLAMDSQRRPLLLQVLKELLETWGSSSAIRHTPLPQQRHVSKAVLICLAQLGEPELRDSRDELLASMMAGVKCRLDSSLPPVRRLGMIVAEVVSARIHPEGPPLKFQYEEDELSLELLALASPQPAGDGASEAGTSLVPATAEPPAETPAEIVDGGVPQAQLAGSDSDLDSDDEFVPYDMSGDRELKSSKAPAYVRDCVEALTTSEDIERWEAALRALEGLVYRSPTATREVSVELAKVLLHLEEKTCVVGFAGLRQRALVAVTVTDPAPVADYLTSQFYALNYSLRQRMDILDVLTLAAQELSRPGCLGRTPQPGSPSPNTPCLPEAAVSQPGSAVASDWRVVVEERIRSKTQRLSKGGPRQGPAGSPSRFNSVAGHFFFPLLQRFDRGSVPQDSSVVELCHEAPGICSDAGLVAWPAVPPARARRHHLLGPARLLLPQPALHWPHVQGVRLSRWQRSVGPGLCCSRGGGLGVGNSWPRWTCARQPCRGSRHPEMSAPTISVQARRWAREEGLCGAPSVSHGGPGGWGPGPEAPAAPWAPSCALRPLVTFDLLGEDQLVLGRLAHTLGALMCLAVNTTVAVAMGKALLEFVWALRFHIDAYVRQGLLSAVSSVLLSLPAARLLEDLMDELLEARSWLADVAEKDPDEDCRTLALRALLLLQRLKNRLLPPASP

SEQ ID NO: 857313 - protein, 837 aa, Homo sapiens; identical to SEQ ID NO: 857310

SEQ ID NO: 857314 - protein, 952 aa, Homo sapiens
MEPAPSEVRLAVREAIHALSSSEDGGHIFCTLESLKRYLGEMEPPALPREKEEFASAHFSPVLRCLASRLSPAWLELLPHGRLEELWASFFLEGPADQAFLVLMETIEGAAGPSFRLMKMARLLARFLREGRLAVLMEAQCRQQTRPGFILLRETLLGKVVALPDHLGNRLQQENLAEFFPQNYFRLLGEEVVRVLQAVVDSLQGGLDSSVSFVSQVLGKACVHGRQQEILGVLVPRLAALTQGSYLHQRVCWRLVEQVPDRAMEAVLTGLVEAALGPEVLSRLLGNLVVKNKKAQFVMTQKLLFLQSRLTTPMLQSLLGHLAMDSQRRPLLLQVLKELLETWGSSSAIRHTPLPQQRHVSKAVLICLAQLGEPELRDSRDELLASMMAGVKCRLDSSLPPVRRLGMIVAEVVSARIHPEGPPLKFQYEEDELSLELLALASPQPAGDGASEAGTSLVPATAEPPAETPAEIVDGGVPQAQLAGSDSDLDSDDEFVPYDMSGDRELKSSKAPAYVRDCVEALTTSEDIERWEAALRALEGLVYRSPTATREVSVELAKVLLHLEEKTCVVGFAGLRQRALVAVTVTDPAPVADYLTSQFYALNYSLRQRMDILDVLTLAAQELSRPGCLGRTPQPGSPSPNTPCLPEAAVSQPGSAVASDWRVVVEERIRSKTQRLSKGGPRQGPAGSPSRFNSVAGHFFFPLLQRFDRGSVPQDSSVVELCHEAPGICSDAGLVAWPAVPPARARRHHLLGPARLLLPQPALHWPHVQGVGSRDGREVWGLGCAAAGVGVSALGTPGPGGLVPDSPAGGVGTRKCLLLRSRCRPLVTFDLLGEDQLVLGRLAHTLGALMCLAVNTTVAVAMGKALLEFVWALRFHIDAYVRQGLLSAVSSVLLSLPAARLLEDLMDELLEARSWLADVAEKDPDEDCRTLALRALLLLQRLKNRLLPPASP

SEQ ID NO: 857315 - protein, 108 aa, Homo sapiens
MKAQLRQSEDGTRGSWLGIGRPGVRPPSVGIGVHALAPPCLQAGLQLWPLTLSCRPEVLSRLLGNLVVKNKKAQFVMTQKLLFLQSRLTVRTPRRVQAAGCPITARMA

SEQ ID NO: 857316 - protein, 96 aa, Homo sapiens
WLTGSLAWYFPNRKCARQGRSVGGLPHSGEWEVWGVVPAELSPRLLAGSYVRQGLLSAVSSVLLSLPAARLLEDLMDELLEARSWLAGECRPAVCV

SEQ ID NO: 857317 - protein, 530 aa, Homo sapiens
MEPAPSEVRLAVREAIHALSSSEDGGHIFCTLESLKRYLGEMEPPALPREKEEFASAHFSPVLRCLASRLSPAWLELLPHGRLEELWASFFLEGPADQAFLVLMETIEGAAGPSFRLMKMARLLARFLREGRLAVLMEAQCRQQTRPGFILLRETLLGKVVALPDHLGNRLQQENLAEFFPQNYFRLLGEEVVRVLQAVVDSLQGGLDSSVSFVSQVLGKACVHGRQQEILGVLVPRLAALTQGSYLHQRVCWRLVEQVPDRAMEAVLTGLVEAALGPEVLSRLLGNLVVKNKKAQFVMTQKLLFLQSRLTTPMLQSLLGHLAMDSQRRPLLLQVLKELLETWGSSSAIRHTPLPQQRHVSKAVLICLAQLGEPELRDSRDELLASMMAGVKCRLDSSLPPVRRLGMIVAEVVSARIHPEGPPLKFQYEEDELSLELLALASPQPAGDGASEAGTSLVPATAEPPAETPAEIVDGGVPQAQLAGSDSDLDSDDEFVPYDMSGDRELKSSKAPAYVRDCVEGADSGCPGAV

SEQ ID NO: 857318 - protein, 470 aa, Homo sapiens
MEPAPSEVRLAVREAIHALSSSEDGGHIFCTLESLKRYLGEMEPPALPREKEEFASAHFSPVLRCLASRLSPAWLELLPHGRLEELWASFFLEGPADQAFLVLMETIEGAAGPSFRLMKMARLLARFLREGRLAVLMEAQCRQQTRPGFILLRETLLGKVVALPDHLGNRLQQENLAEFFPQNYFRLLGEEVVRVLQAVVDSLQGGLDSSVSFVSQVLGKACVHGRQQEILGVLVPRLAALTQGSYLHQRVCWRLVEQVPDRAMEAVLTGLVEAALGPEVLSRLLGNLVVKNKKAQFVMTQKLLFLQSRLTTPMLQSLLGHLAMDSQRRPLLLQVLKELLETWGSSSAIRHTPLPQQRHVSKAVLICLAQLGEPELRDSRDELLASMMAGVKCRLDSSLPPVRRLGMIVAEVVSARIHPEGPPLKFQYEEDELSLELLALASPKHSWRALTRTWTAMMSLSPTTCRGTES

SEQ ID NO: 857319 - protein, 837 aa, Homo sapiens; identical to SEQ ID NO: 857310

SEQ ID NO: 857320 - protein, 804 aa, Homo sapiens
MEPAPSEVRLAVREAIHALSSSEDGGHIFCTLESLKRYLGEMEPPALPREKEEFASAHFSPVLRCLASRLSPAWLELLPHGRLEELWASFFLEGPADQAFLVLMETIEGAAGPSFRLMKMARLLARFLREGRLAVLMEAQCRQQTRPGFILLRETLLGKVVALPDHLGNRLQQENLAEFFPQNYFRLLGEEVVRVLQAVVDSLQGGLDSSVSFVSQVLGKACVHGRQQEILGVLVPRLAALTQGSYLHQRVCWRLVEQVPDRAMEAVLTGLVEAALGPEVLSRLLGNLVVKNKKAQFVMTQKLLFLQSRLTTPMLQSLLGHLAMDSQRRPLLLQVLKELLETWGSSSAIRHTPLPQQRHVSKAVLICLAQLGEPELRDSRDELLASMMAGVKCRLDSSLPPVRRLGMIVAEVVSARIHPEGPPLKFQYEEDELSLELLALASPQPAGDGASEAGTSLVPATAEPPAETPAEIVDGGVPQAQLAGSDSDLDSDDEFVPYDMSGDRELKSSKAPAYVRDCVEALTTSEDIERWEAALRALEGLVYRSPTATREVSVELAKVLLHLEEKTCVVGFAGLRQRALVAVTVTDPAPVADYLTSQFYALNYSLRQRMDILDVLTLAAQELSRPGCLGRTPQPGSPSPNTPCLPEAAVSQPGSAVASDWRVVVEERIRSKTQRLSKGGPRQGPAGSPSRFNSVAGHFFFPLLQRFDRPLVTFDLLGEDQLVLGRLAHTLGALMCLAVNTTVAVAMGKALLEFVWALRFHIDAYVRQGLLSAVSSVLLSLPAARLLEDLMDELLSENKLLYWN

SEQ ID NO: 857321 - protein, 68 aa, Homo sapiens
VADYLTSQFYALNYSLRQRMDILDVSASWASVPLVWPKLPKVGLPKPGSPCCWAPRARAGLSTAFVSV

SEQ ID NO: 857322 - protein, 747 aa, Homo sapiens
MTSFQEVPLQTSNFAHVIFQNVAKSYLPNAHLECHYTLTPYIHPHPKDWVGIFKVGWSTARDYYTFLWSPMPEHYVEGSTVNCVLAFQGYYLPNDDGEFYQFCYVTHKGEIRGASTPFQFRASSPVEELLTMEDEGNSDMLVVTTKAGLLELKIEKTMKEKEELLKLIAVLEKETAQLREQVGRMERELNHEKERCDQLQAEQKGLTEVTQSLKMENEEFKKRFSDATSKAHQLEEDIVSVTHKAIEKETELDSLKDKLKKAQHEREQLECQLKTEKDEKELYKVHLKNTEIENTKLMSEVQTLKNLDGNKESVITHFKEEIGRLQLCLAEKENLQRTFLLTTSSKEDTCFLKEQLRKAEEQVQATRQEVVFLAKELSDAVNVRDRTMADLHTARLENEKVKKQLADAVAELKLNAMKKDQDKTDTLEHELRREVEDLKLRLQMAADHYKEKFKECQRLQKQINKLSDQSANNNNVFTKKTGNQQKVNDASVNTDPATSASTVDVKPSPSAAEADFDIVTKGQVCEMTKEIADKTEKYNKCKQLLQDEKAKCNKYADELAKMELKWKEQVKIAENVKLELAEVQDNYKELKRSLENPAERKMEDGADGAFYPDEIQRPPVRVPSWGLEDNVVCSQPARNFSRPDGLEDSEDSKEDENVPTAPDPPSQHLRGHGTGFCFDSSFDVHKKCPLCELMFPPNYDQSKFEEHVESHWKVCPMCSEQFPPDYDQQVFERHVQTHFDQNVLNFD

SEQ ID NO: 857323 - protein, 790 aa, Homo sapiens
MTSFQEVPLQTSNFAHVIFQNVAKSYLPNAHLECHYTLTPYIHPHPKDWVGIFKVGWSTARDYYTFLWSPMPEHYVEGSTVNCVLAFQGYYLPNDDGEFYQFCYVTHKGEIRGASTPFQFRASSPVEELLTMEDEGNSDMLVVTTKAGLLELKIEKTMKEKEELLKLIAVLEKETAQLREQVGRMERELNHEKERCDQLQAEQKGLTEVTQSLKMENEEFKKRFSDATSKAHQLEEDIVSVTHKAIEKETELDSLKDKLKKAQHEREQLECQLKTEKDEKELYKVHLKNTEIENTKLMSEVQTLKNLDGNKESVITHFKEEIGRLQLCLAEKENLQRTFLLTTSSKEDTCFLKEQLRKAEEQVQATRQEVVFLAKELSDAVNVRDRTMADLHTARLENEKVKKQLADAVAELKLNAMKKDQDKTDTLEHELRREVEDLKLRLQMAADHYKEKFKECQRLQKQINKLSDQSANNNNVFTKKTGNQQKVNDASVNTDPATSASTVDVKPSPSAAEADFDIVTKGQVCEMTKEIADKTEKYNKCKQLLQDEKAKCNKYADELAKMELKWKEQVKIAENVKLELAEVQDNYKELKRSLENPAERKMEEGQNSQSPQCFKTCSEQNGYVLTLSNAQPVLQYGNPYASQETRDGADGAFYPDEIQRPPVRVPSWGLEDNVVCSQPARNFSRPDGLEDSEDSKEDENVPTAPDPPSQHLRGHGTGFCFDSSFDVHKKCPLCELMFPPNYDQSKFEEHVESHWKVCPMCSEQFPPDYDQQVFERHVQTHFDQNVLNFD

SEQ ID NO: 857324 - protein, 747 aa, Homo sapiens; identical to SEQ ID NO: 857322

SEQ ID NO: 857325 - protein, 747 aa, Homo sapiens; identical to SEQ ID NO: 857322

SEQ ID NO: 857326 - protein, 671 aa, Homo sapiens
MTSFQEVPLQTSNFAHVIFQNVAKSYLPNAHLECHYTLTPYIHPHPKDWVGIFKVGWSTARDYYTFLWSPMPEHYVEGSTVNCVLAFQGYYLPNDDGEFYQFCYVTHKGEIRGASTPFQFRASSPVEELLTMEDEGNSDMLVVTTKAGLLELKIEKTMKEKEELLKLIAVLEKETAQLREQVGRMERELNHEKERCDQLQAEQKGLTEVTQSLKMENEEFKKRFSDATSKAHQLEEDIVSVTHKAIEKETELDSLKDKLKKAQHEREQLECQLKTEKDEKELYKVHLKNTEIENTKLMSEVQTLKNLDGNKESVITHFKEEIGRLQLCLAEKENLQRTFLLTTSSKEDTCFLKEQLRKAEEQVQATRQEVVFLAKELSDAVNVRDRTMADLHTARLENEKVKKQLADAVAELKLNAMKKDQDKTDTLEHELRREVEDLKLRLQMAADHYKEKFKECQRLQKQINKLSDQSANNNNVFTKKTGNQQKVNDASVNTDPATSASTVDVKPSPSAAEADFDIVTKGQVCEMTKEIADKTEKYNKCKQLLQDEKAKCNKYADELAKMELKWKEQVKIAENVKLELAEVQDNYKELKRSLENPAERKMEEGQNSQSPQCFKTCSELILMHLRKQEMEQMVLFTQMKYKGHLSESPLGDWKTMLSAASLLETLVGLMA

SEQ ID NO: 857327 - protein, 697 aa, Homo sapiens
MTFQVGWSTARDYYTFLWSPMPEHYVEGSTVNCVLAFQGYYLPNDDGEFYQFCYVTHKGEIRGASTPFQFRASSPVEELLTMEDEGNSDMLVVTTKAGLLELKIEKTMKEKEELLKLIAVLEKETAQLREQVGRMERELNHEKERCDQLQAEQKGLTEVTQSLKMENEEFKKRFSDATSKAHQLEEDIVSVTHKAIEKETELDSLKDKLKKAQHEREQLECQLKTEKDEKELYKVHLKNTEIENTKLMSEVQTLKNLDGNKESVITHFKEEIGRLQLCLAEKENLQRTFLLTTSSKEDTCFLKEQLRKAEEQVQATRQEVVFLAKELSDAVNVRDRTMADLHTARLENEKVKKQLADAVAELKLNAMKKDQDKTDTLEHELRREVEDLKLRLQMAADHYKEKFKECQRLQKQINKLSDQSANNNNVFTKKTGNQQKVNDASVNTDPATSASTVDVKPSPSAAEADFDIVTKGQVCEMTKEIADKTEKYNKCKQLLQDEKAKCNKYADELAKMELKWKEQVKIAENVKLELAEVQDNYKELKRSLENPAERKMEDGADGAFYPDEIQRPPVRVPSWGLEDNVVCSQPARNFSRPDGLEDSEDSKEDENVPTAPDPPSQHLRGHGTGFCFDSSFDVHKKCPLCELMFPPNYDQSKFEEHVESHWKVCPMCSEQFPPDYDQQVFERHVQTHFDQNVLNFD

SEQ ID NO: 857328 - protein, 590 aa, Homo sapiens
MKEKEELLKLIAVLEKETAQLREQVGRMERELNHEKERCDQLQAEQKGLTEVTQSLKMENEEFKKRFSDATSKAHQLEEDIVSVTHKAIEKETELDSLKDKLKKAQHEREQLECQLKTEKDEKELYKVHLKNTEIENTKLMSEVQTLKNLDGNKESVITHFKEEIGRLQLCLAEKENLQRTFLLTTSSKEDTCFLKEQLRKAEEQVQATRQEVVFLAKELSDAVNVRDRTMADLHTARLENEKVKKQLADAVAELKLNAMKKDQDKTDTLEHELRREVEDLKLRLQMAADHYKEKFKECQRLQKQINKLSDQSANNNNVFTKKTGNQQKVNDASVNTDPATSASTVDVKPSPSAAEADFDIVTKGQVCEMTKEIADKTEKYNKCKQLLQDEKAKCNKYADELAKMELKWKEQVKIAENVKLELAEVQDNYKELKRSLENPAERKMEDGADGAFYPDEIQRPPVRVPSWGLEDNVVCSQPARNFSRPDGLEDSEDSKEDENVPTAPDPPSQHLRGHGTGFCFDSSFDVHKKCPLCELMFPPNYDQSKFEEHVESHWKVCPMCSEQFPPDYDQQVFERHVQTHFDQNVLNFD

SEQ ID NO: 857329 - protein, 703 aa, Homo sapiens
MTSFQEVPLQTSNFAHVIFQNVAKSYLPNAHLECHYTLTPYIHPHPKDWVGIFKVGWSTARDYYTFLWSPMPEHYVEGSTVNCVLAFQGYYLPNDDGEFYQFCYVTHKGEIRGASTPFQFRASSPVEELLTMEDEGNSDMLVVTTKAGLLELKIEKTMKEKEELLKLIAVLEKETAQLREQVGRMERELNHEKERCDQLQAEQKGLTEVTQSLKMENEEFKKRFSDATSKAHQLEEDIVSVTHKAIEKETELDSLKDKLKKAQHEREQLECQLKTEKDEKELYKVHLKNTEIENTKLMSEVQTLKNLDGNKESVITHFKEEIGRLQLCLAEKENLQRTFLLTTSSKEDTCFLKEQLRKAEEQVQATRQEVVFLAKELSDAVNVRDRTMADLHTARLENEKVKKQLADAVAELKLNAMKKDQDKTDTLEHELRREVEDLKLRLQMAADHYKEKFKECQRLQKQINKLSDQSANNNNVFTKKTGNQQKVNDASVNTDPATSASTVDVKPSPSAAEADFDIVTKGQVCEMTKEIADKTEKYNKCKQLLQDEKAKCNKYADELAKMELKWKEQVKIAENVKLELAEVQDNYKELKRSLENPAERKMEDGADGAFYPDEIQRPPVRVPSWGLEDNVVCSQPARNFSRPDGLEDSEDSKEDENVPTAPDPPSQHLRGHGTGFCFDSRGSINGLHNCLQQAFRSREMFLE

SEQ ID NO: 857330 - protein, 614 aa, Homo sapiens
MTSFQEVPLQTSNFAHVIFQNVAKSYLPNAHLECHYTLTPYIHPHPKDWVGIFKVGWSTARDYYTFLWSPMPEHYVEGSTVNCVLAFQGYYLPNDDGEFYQFCYVTHKGEIRGASTPFQFRASSPVEELLTMEDEGNSDMLVVTTKAGLLELKIEKTMKEKEELLKLIAVLEKETAQLREQVGRMERELNHEKERCDQLQAEQKGLTEVTQSLKMENEEFKKRFSDATSKAHQLEEDIVSVTHKAIEKETELDSLKDKLKKAQHEREQLECQLKTEKDEKELYKVHLKNTEIENTKLMSEVQTLKNLDGNKESVITHFKEEIGRLQLCLAEKENLQRTFLLTTSSKEDTCFLKEQLRKAEEQVQATRQEVVFLAKELSDAVNVRDRTMADLHTARLENEKVKKQLADAVAELKLNAMKKDQDKTDTLEHELRREVEDLKLRLQMAADHYKEKFKECQRLQKQINKLSDQSANNNNVFTKKTGNQQKVNDASVNTDPATSASTVDVKPSPSAAEADFDIVTKGQVCEMTKEIADKTEKYNKCKQLLQDEKAKCNKYADELAKMELKWKEQVKIAENVKLELAEVQDNYKELKRSLENPAERKMEGKKKKKKPHLK

SEQ ID NO: 857331 - protein, 221 aa, Homo sapiens [sequence omitted]

SEQ ID NO: 857332 - protein, 264 aa, Homo sapiens
MTKEIADKTEKYNKCKQLLQDEKAKCNKYADELAKMELKWKEQVKIAENVKLELAEVQDNYKELKRSLENPAERKMEEGQNSQSPQCFKTCSEQNGYVLTLSNAQPVLQYGNPYASQETRDGADGAFYPDEIQRPPVRVPSWGLEDNVVCSQPARNFSRPDGLEDSEDSKEDENVPTAPDPPSQHLRGHGTGFCFDSSFDVHKKCPLCELMFPPNYDQSKFEEHVESHWKVCPMCSEQFPPDYDQQVFERHVQTHFDQNVLNFD

SEQ ID NO: 857333 - protein, 747 aa, Homo sapiens; identical to SEQ ID NO: 857322

SEQ ID NO: 857334 - protein, 343 aa, Homo sapiens
MTSFQEVPLQTSNFAHVIFQNVAKSYLPNAHLECHYTLTPYIHPHPKDWVGIFKVGWSTARDYYTFLWSPMPEHYVEGSTVNCVLAFQGYYLPNDDGEFYQFCYVTHKGEIRGASTPFQFRASSPVEELLTMEDEGNSDMLVVTTKAGLLELKIEKTMKEKEELLKLIAVLEKETAQLREQVGRMERELNHEKERCDQLQAEQKGLTEVTQSLKMENEEFKKRFSDATSKAHQLEEDIVSVTHKAIEKETELDSLKDKLKKAQHEREQLECQLKTEKDEKELYKVHLKNTEIENTKLMSEVQTLKNLDGNKESVITHFKEEIGRLQLCLAEKGRYLFFKGATS

SEQ ID NO: 857335 - protein, 646 aa, Homo sapiens
MTSFQEVPLQTSNFAHVIFQNVAKSYLPNAHLECHYTLTPYIHPHPKDWVGIFKVGWSTARDYYTFLWSPMPEHYVEGSTVNCVLAFQGYYLPNDDGEFYQFCYVTHKGEIRGASTPFQFRASSPVEELLTMEDEGNSDMLVVTTKAGLLELKIEKTMKEKEELLKLIAVLEKETAQLREQVGRMERELNHEKERCDQLQAEQKGLTEVTQSLKMENEEFKKRFSDATSKAHQLEEDIVSVTHKAIEKETELDSLKDKLKKAQHEREQLECQLKTEKDEKELYKVHLKNTEIENTKLMSEVQTLKNLDGNKESVITHFKEEIGRLQLCLAEKENLQRTFLLTTSSKEDTCFLKEQLRKAEEQVQATRQEVVFLAKELSDAVNVRDRTMADLHTARLENEKVKKQLADAVAELKLNAMKKDQDKTDTLEHELRREVEDLKLRLQMAADHYKEKFKECQRLQKQINKLSDQSANNNNVFTKKTGNQQKVNDASVNTDPATSASTVDVKPSPSAAEADFDIVTKGQVCEMTKEIADKTEKYNKCKQLLQDEKAKCNKYADELAKMELKWKEQVKIAENVKLELAEVQDNYKELKRSLENPAERKMEEGQNSQSPQCFKTCSEQNGYVLTLSNAQPVLQYGWSRWCFLPR

SEQ ID NO: 857336 - protein, 682 aa, Homo sapiens
MTSFQEVPLQTSNFAHVIFQNVAKSYLPNAHLECHYTLTPYIHPHPKDWVGIFKVGWSTARDYYTFLWSPMPEHYVEGSTVNCVLAFQGYYLPNDDGEFYQFCYVTHKGEIRGASTPFQFRASSPVEELLTMEDEGNSDMLVVTTKAGLLELKIEKTMKEKEELLKLIAVLEKETAQLREQVGRMERELNHEKERCDQLQAEQKGLTEVTQSLKMENEEFKKRFSDATSKAHQLEEDIVSVTHKAIEKETELDSLKDKLKKAQHEREQLECQLKTEKDEKELYKVHLKNTEIENTKLMSEVQTLKNLDGNKESVITHFKEEIGRLQLCLAEKENLQRTFLLTTSSKEDTCFLKEQLRKAEEQVQATRQEVVFLAKELSDAVNVRDRTMADLHTARLENEKVKKQLADAVAELKLNAMKKDQDKTDTLEHELRREVEDLKLRLQMAADHYKEKFKECQRLQKQINKLSDQSANNNNVFTKKTGNQQKVNDASVNTDPATSASTVDVKPSPSAAEADFDIVTKGQVCEMTKEIADKTEKYNKCKQLLQDEKAKCNKYADELAKMELKWKEQVKIAENVKLELAEVQDNYKEDENVPTAPDPPSQHLRGHGTGFCFDSSFDVHKKCPLCELMFPPNYDQSKFEEHVESHWKVCPMCSEQFPPDYDQQVFERHVQTHFDQNVLNFD

SEQ ID NO: 857337 - protein, 703 aa, Homo sapiens; identical to SEQ ID NO: 857329

SEQ ID NO: 857338 - protein, 703 aa, Homo sapiens; identical to SEQ ID NO: 857329

SEQ ID NO: 857339 - protein, 253 aa, Homo sapiens
  misc_feature (7)..(8): Xaa can be any naturally occurring amino acid
  misc_feature (10)..(10): Xaa can be any naturally occurring amino acid
KQAGTAXXVXDKPSPSAAEADFDIVTKGQVCEMTKEIADKTEKYNKCKQLLQDEKAKCNKYADELAKMELKWKEQVKIAENVKLELAEVQDNYKELKRSLENPAERKMEDGADGAFYPDEIQRPPVRVPSWGLEDNVVCSQPARNFSRPDGLEDSEDSKEDENVPTAPDPPSQHLRGHGTGFCFDSSFDVHKKCPLCELMFPPNYDQSKFEEHVESHWKVCPMCSEQFPPDYDQQVFERHVQTHFDQNVLNFD

SEQ ID NO: 857340 - protein, 215 aa, Homo sapiens
MTSFQEVPLQTSNFAHVIFQNVAKSYLPNAHLECHYTLTPYIHPHPKDWVGIFKVGWSTARDYYTFLWSPMPEHYVEGSTVNCVLAFQGYYLPNDDGEFYQFCYVTHKGEIRGASTPFQFRASSPVEELLTMEDEGNSDMLVVTTKAGLLELKIEKTMKEKEELLKLIAVLEKETAQLREQVGRMERELNHEKERCDQLQAEQKEPENHQGRTTI

SEQ ID NO: 857341 - protein, 392 aa, Homo sapiens
MQKWFSAFDDAIIQRQWRANPSRGGGGVSFTKEVDTNVATGAPPRRQRVPGRACPWREPIRGRRGARPGGGDAGMCVATALPALTGLRDDKLTLLSSSPGLGGTPGETVRHCSAPEDPIFRFSSLHSYPFPGTIKSRDMSWKRHHLIPETFGVKRRRKRGPVESDPLRGEPGSARAAVSELMQLFPRGLFEDALPPIVLRSQVYSLVPDRTVADRQLKELQEQGEIRIVQLGFDLDAHGIIFTEDYRTRVLKACDGRPYAGAVQKFLASVLPACGDLSFQQDQMTQTFGFRDSEITHLVNAGVLTVRDAGSWWLAVPGAGRFIKYFVKGRQAVLSMVRKAKYRELLLSELLGRRAPVVVRLGLTYHVHDLIGAQLVDCISTTSGTLLRLPET

SEQ ID NO: 857342 - protein, 109 aa, Homo sapiens [sequence omitted]

SEQ ID NO: 857343 - protein, 188 aa, Homo sapiens
LIRLFSLSSLWRQKELQEQGEIRIVQLGFDLDAHGIIFTEDYRTRVLKACDGRPYAGAVQKFLASVLPACGDLSFQQDQMTQTFGFRDSEITHLVNAGVLTVRDAGSWWLAVPGAGRFIKYFVKGRQAVLSMVRKAKYRELLLSELLGRRAPVVVRLGLTYHVHDLIGAQLVDCISTTSGTLLRLPET

SEQ ID NO: 857344 - protein, 280 aa, Homo sapiens
MQKWFSAFDDAIIQRQWRANPSRGGGGVSFTKEVDTNVATGAPPRRQRVPGRACPWREPIRGRRGARPGGGDAGMCVATALPALTGLRDDKLTLLSSSPGLGGTPGETVRHCSAPEDPIFRFSSLHSYPFPGTIKSRDMSWKRHHLIPETFGVKRRRKRGPVESDPLRGEPGSARAAVSELMQLFPRGLFEDALPPIVLRSQVYSLVPDRTVADRQLKELQEQGEIRIVQLGFDLDAHGIIFTEDYRTRASGECWSPHRPRCWELVASCAWSWEIHQVLC

SEQ ID NO: 857345 - protein, 268 aa, Homo sapiens
MQKWFSAFDDAIIQRQWRANPSRGGGGVSFTKEVDTNVATGAPPRRQRVPGRACPWREPIRGRRGARPGGGDAGGTPGETVRHCSAPEDPIFRFSSLHSYPFPGTIKSRDMSWKRHHLIPETFGVKRRRKRGPVESDPLRGEPGSARAAVSELMQLFPRGLFEDALPPIVLRSQVYSLVPDRTVADRQLKELQEQGEIRIVQLGFDLDAHGIIFTEDYRTRVLKACDGRPYAGAVQKFLASVLPACGDLSFQQDQMTQTFGFRDSEIT

SEQ ID NO: 857346 - protein, 364 aa, Homo sapiens
MQKWFSAFDDAIIQRQWRANPSRGGGGVSFTKEVDTNVATGAPPRRQRVPGRACPWREPIRGRRGARPGGGDAGGTPGETVRHCSAPEDPIFRFSSLHSYPFPGTIKSRDMSWKRHHLIPETFGVKRRRKRGPVESDPLRGEPGSARAAVSELMQLFPRGLFEDALPPIVLRSQVYSLVPDRTVADRQLKELQEQGEIRIVQLGFDLDAHGIIFTEDYRTRVLKACDGRPYAGAVQKFLASVLPACGDLSFQQDQMTQTFGFRDSEITHLVNAGVLTVRDAGSWWLAVPGAGRFIKYFVKGRQAVLSMVRKAKYRELLLSELLGRRAPVVVRLGLTYHVHDLIGAQLVDCISTTSGTLLRLPET

SEQ ID NO: 857347 - protein, 241 aa, Homo sapiens
RVLLEPRPRPSSLSVSRFICRSARAAVSELMQLFPRGLFEDALPPIVLRSQVYSLVPDRTVADRQLKELQEQGEIRIVQLGFDLDAHGIIFTEDYRTRVLKACDGRPYAGAVQKFLASVLPACGDLSFQQDQMTQTFGFRDSEITHLVNAGVLTVRDAGSWWLAVPGAGRFIKYFVKGRQAVLSMVRKAKYRELLLSELLGRRAPVVVRLGLTYHVHDLIGAQLVDCISTTSGTLLRLPET

SEQ ID NO: 857348 - protein, 268 aa, Homo sapiens; identical to SEQ ID NO: 857345

SEQ ID NO: 857349 - protein, 295 aa, Homo sapiens
RVLLEPRPRPSSLSVSRFICRSARAAVSELMQLFPRGLFEDALPPIVLRSQVYSLVPDRTVADRQLVRGVGATAGSPFPNSWNSLSLSHSASRSASIRPFRRGHCARHWGATETLLKVPQKELQEQGEIRIVQLGFDLDAHGIIFTEDYRTRVLKACDGRPYAGAVQKFLASVLPACGDLSFQQDQMTQTFGFRDSEITHLVNAGVLTVRDAGSWWLAVPGAGRFIKYFVKGRQAVLSMVRKAKYRELLLSELLGRRAPVVVRLGLTYHVHDLIGAQLVDCISTTSGTLLRLPET

SEQ ID NO: 857350 - protein, 145 aa, Homo sapiens
RVLLEPRPRPSSLSVSRFICRSARAAVSELMQLFPRGLFEDALPPIVLRSQVYSLVPDRTVADRQLKELQEQGEIRIVQLGFDLDAHGIIFTEDYRTRVLKACDGRPYAGAVQKFLASVLPACGDLSFQQDQMTQTFGFRDSEIT

SEQ ID NO: 857351 - protein, 677 aa, Homo sapiens
QTVIRSLNRTDFHGSGYTSMAIIYGVFSASNLITPSVVAIVGPQLSMFASGLFYSMYIAVFIQPFPWSLTRTQTSRPESPGMTSPSPRIQIISTDSAVASPQRIQIVTDQQTGQKIQIVTAVDASGSPKQQFILTSPDGAGTGKVILASPETSSAKQLIFTTSDNLVPGRIQIVTDSASVERLLGKTDVQRPQVVEYCVVCGDKASGRHYGAVSCEGCKGFFKRSVRKNLTYSCRSNQDCIINKHHRNRCQFCRLKKCLEMGMKMESVQSERKPFDVQREKPSNCAASTEKIYIRKDLRSPLIATPTFVADKDGARQTGLLDPGMLVNIQQPLIREDGTVLLATDSKAETSQGALGTLANVVTSLANLSESLNNGDTSEIQPEDQSASEITRAFDTLAKALNTTDSSSSPSLADGIDTSGGGSIHVISRDQSTPIIEVEGPLLSDTHVTFKLTMPSPMPEYLNVHYICESASRLLFLSMHWARSIPAFQALGQDCNTSLVRACWNELFTLGLAQCAQVMSLSTILAAIVNHLQNSIQEDKLSGDRIKQVMEHIWKLQEFCNSMAKLDIDGYEYAYLKAIVLFSPDHPGLTSTSQIEKFQEKAQMELQDYVQKTYSEDTYRLARILVRLPALRLMSSNITEELFFTGLIGNVSIDSIIPYILKMETAEYNGQITGASL

SEQ ID NO: 857352 - protein, 596 aa, Homo sapiens
  misc_feature (19)..(19): Xaa can be any naturally occurring amino acid
RGGGGWEGEGKVFCNDALXLQRYNIVTDQQTGQKIQIVTAVDASGSPKQQFILTSPDGAGTGKVILASPETSSAKQLIFTTSDNLVPGRIQIVTDSASVERLLGKTDVQRPQVVEYCVVCGDKASGRHYGAVSCEGCKGFFKRSVRKNLTYSCRSNQDCIINKHHRNRCQFCRLKKCLEMGMKMESVQSERKPFDVQREKPSNCAASTEKIYIRKDLRSPLIATPTFVADKDGARQTGLLDPGMLVNIQQPLIREDGTVLLATDSKAETSQGALGTLANVVTSLANLSESLNNGDTSEIQPEDQSASEITRAFDTLAKALNTTDSSSSPSLADGIDTSGGGSIHVISRDQSTPIIEVEGPLLSDTHVTFKLTMPSPMPEYLNVHYICESASRLLFLSMHWARSIPAFQALGQDCNTSLVRACWNELFTLGLAQCAQVMSLSTILAAIVNHLQNSIQEDKLSGDRIKQVMEHIWKLQEFCNSMAKLDIDGYEYAYLKAIVLFSPDHPGLTSTSQIEKFQEKAQMELQDYVQKTYSEDTYRLARILVRLPALRLMSSNITEELFFTGLIGNVSIDSIIPYILKMETAEYNGQITGASL

SEQ ID NO: 857353 - protein, 628 aa, Homo sapiens
MTSPSPRIQIISTDSAVASPQRIQGSEPASGPLSVFTSLNKEKIVTDQQTGQKIQIVTAVDASGSPKQQFILTSPDGAGTGKVILASPETSSAKQLIFTTSDNLVPGRIQIVTDSASVERLLGKTDVQRPQVVEYCVVCGDKASGRHYGAVSCEGCKGFFKRSVRKNLTYSCRSNQRTGIHSTHNIPPGNPLWSGLRPGWNKLPSAGWGLTHLGPSVHEVHPEIPFDVQREKPSNCAASTEKIYIRKDLRSPLIATPTFVADKDGARQTGLLDPGMLVNIQQPLIREDGTVLLATDSKAETSQGALGTLANVVTSLANLSESLNNGDTSEIQPEDQSASEITRAFDTLAKALNTTDSSSSPSLADGIDTSGGGSIHVISRDQSTPIIEVEGPLLSDTHVTFKLTMPSPMPEYLNVHYICESASRLLFLSMHWARSIPAFQALGQDCNTSLVRACWNELFTLGLAQCAQVMSLSTILAAIVNHLQNSIQEDKLSGDRIKQVMEHIWKLQEFCNSMAKLDIDGYEYAYLKAIVLFSPDHPGLTSTSQIEKFQEKAQMELQDYVQKTYSEDTYRLARILVRLPALRLMSSNITEELFFTGLIGNVSIDSIIPYILKMETAEYNGQITGASL

SEQ ID NO: 857354 - protein, 220 aa, Homo sapiens
MPEYLNVHYICESASRLLFLSMHWARSIPAFQALGQDCNTSLVRACWNELFTLGLAQCAQVMSLSTILAAIVNHLQNSIQEDKLSGDRIKQVMEHIWKLQEFCNSMAKLDIDGYEYAYLKAIVLFSPDHPGLTSTSQIEKFQEKAQMELQDYVQKTYSEDTYRLARILVRLPALRLMSSNITEELFFTGLIGNVSIDSIIPYILKMETAEYNGQITGASL

SEQ ID NO: 857355 - protein, 376 aa, Homo sapiens
MTSPSPRIQIISTDSAVASPQRIQGSEPASGPLSVFTSLNKEKIVTDQQTGQKIQIVTAVDASGSPKQQFILTSPDGAGTGKVILASPETSSAKQLIFTTSDNLVPGRIQIVTDSASVERLLGKTDVQRPQVVEYCVVCGDKASGRHYGAVSCEGCKGFFKRSVRKNLTYSCRSNQRTGIHSTHNIPPGNPLWSGLRPGWNKLPSAGWGLTHLGPSVHEVHPEIPFDVQREKPSNCAASTEKIYIRKDLRSPLIATPTFVADKDGARQTGLLDPGMLVNIQQPLIREDGTVLLATDSKAETSQGALGTLANVVTSLANLSESLNNGDTSEIQPEDQSASEITRYEPMRMESPLLAWTPSLYCEGGKQHFGTCAVFN

SEQ ID NO: 857356 - protein, 689 aa, Homo sapiens
EFAAPTSASRLSPAAPRARGPRLPPSADTGSPGSPRPALRAGGRPPQTRDPLRGRFGANPEVTRTQTSRPESPGMTSPSPRIQIISTDSAVASPQRIQGSEPASGPLSVFTSLNKEKIVTDQQTGQKIQIVTAVDASGSPKQQFILTSPDGAGTGKVILASPETSSAKQLIFTTSDNLVPGRIQIVTDSASVERLLGKTDVQRPQVVEYCVVCGDKASGRHYGAVSCEGCKGFFKRSVRKNLTYSCRSNQDCIINKHHRNRCQFCRLKKCLEMGMKMESVQSERKPFDVQREKPSNCAASTEKIYIRKDLRSPLIATPTFVADKDGARQTGLLDPGMLVNIQQPLIREDGTVLLATDSKAETSQGALGTLANVVTSLANLSESLNNGDTSEIQPEDQSASEITRAFDTLAKALNTTDSSSSPSLADGIDTSGGGSIHVISRDQSTPIIEVEGPLLSDTHVTFKLTMPSPMPEYLNVHYICESASRLLFLSMHWARSIPAFQALGQDCNTSLVRACWNELFTLGLAQCAQVMSLSTILAAIVNHLQNSIQEDKLSGDRIKQVMEHIWKLQEFCNSMAKLDIDGYEYAYLKAIVLFSPDHPGLTSTSQIEKFQEKAQMELQDYVQKTYSEDTYRLARILVRLPALRLMSSNITEELFFTGLIGNVSIDSIIPYILKMETAEYNGQITGASL

SEQ ID NO: 857357 - protein, 159 aa, Homo sapiens
MSLSTILAAIVNHLQNSIQEDKLSGDRIKQVMEHIWKLQEFCNSMAKLDIDGYEYAYLKAIVLFSPDHPGLTSTSQIEKFQEKAQMELQDYVQKTYSEDTYRLARILVRLPALRLMSSNITEELFFTGLIGNVSIDSIIPYILKMETAEYNGQITGASL

SEQ ID NO: 857358 - protein, 608 aa, Homo sapiens
  misc_feature (19)..(19): Xaa can be any naturally occurring amino acid
RGGGGWEGEGKVFCNDALXLQRYNIVTDQQTGQKIQIVTAVDASGSPKQQFILTSPDGAGTGKVILASPETSSAKQLIFTTSDNLVPGRIQIVTDSASVERLLGKTDVQRPQVVEYCVVCGDKASGRHYGAVSCEGCKGFFKRSVRKNLTYSCRSNQDCIINKHHRNRCQFCRLKKCLEMGMKMESVQSERKPFDVQREKPSNCAASTEKIYIRKDLRSPLIATPTFVADKDGARQTGLLDPGMLVNIQQPLIREDGTVLLATDSKAETSQGALGTLANVVTSLANLSESLNNGDTSEIQPEDQSASEITRAFDTLAKALNTTDSSSSPSLADGIDTSGGGSIHVISRDQSTPIIEVEGPLLSDTHVTFKLTMPSPMPEYLNVHYICESASRLLFLSMHWARSIPAFQALGQDCNTSLVRACWNELFTLGLAQCAQVMSLSTILAAIVNHLQNSIQEDKLSGDRIKQVMEHIWKLQEFCNSMAKLDIDGYEYAYLKAIVLFSPDHPGLTSTSQIEKFQEKAQMELQDYVQKTYSEDTYRSNQTTHSFFPKIFLMCSMISLLLLVSTSTRTCSPESGNGKHGAEEKQNSQRTQPQKVVIWDLLLVAETF

SEQ ID NO: 857359 - protein, 34 aa, Homo sapiens
MSQITLQSGTREQLQQFQLVCYRVIHKHALLLNN

SEQ ID NO: 857360 - protein, 632 aa, Homo sapiens
GGGAGPPPSRAGVGRRAWRPRTETAVPDPRAGAERAEAGAMEKARPLWANSLQFVFACISYAVGLGNVWRFPYLCQMYGGGSFLVPYIIMLIVEGMPLLYLELAVGQRMRQGSIGAWRTISPYLSGVGVASVVVSFFLSMYYNVINAWAFWYLFHSFQDPLPWSVCPLNGNHTGYDEECEKASSTQYFWYRKTLNISPSLQENGGVQWEPALCLLLAWLVVYLCILRGTESTGKVVYFTASLPYCVLIIYLIRGLTLHGATNGLMYMFTPKIEQLANPKAWINAATQIFFSLGLGFGSLIAFASYNEPSNNCQKHAIIVSLINSFTSIFASIVTFSIYGFKATFNYENCLKKVSLLLTNTFDLEDGFLTASNLEQVKGYLASAYPSKYSEMFPQIKNCSLESELDTAVQGTGLAFIVYTEAIKNMEVSQLWSVLYFFMLLMLGIGSMLGNTAAILTPLTDSKIISSHLPKEAISGLVCLVNCAIGMVFTMEAGNYWFDIFNDYAATLSLLLIVLVETIAVCYVYGLRRFESDLKAMTGRAVSWYWKVMWAGVSPLLIVSLFVFYLSDYILTGTLKYQAWDASQGQLVTKDYPAYALAVIGLLVASSTMCIPLAALGTFVQRRLKRGDADPVA

SEQ ID NO: 857361 - protein, 595 aa, Homo sapiens
GGGAGPPPSRAGVGRRAWRPRTETAVPDPRAGAERAEAGAMEKARPLWANSLQFVFACISYAVGLGNVWRFPYLCQMYGGGSFLVPYIIMLIVEGMPLLYLELAVGQRMRQGSIGAWRTISPYLSGVGVASVVVSFFLSMYYNVINAWAFWYLFHSFQDPLPWSVCPLNGNHTGYDEECEKASSTQYFWYRKTLNISPSLQENGGVQWEPALCLLLAWLVVYLCILRGTESTGKIEQLANPKAWINAATQIFFSLGLGFGSLIAFASYNEPSNNCQKHAIIVSLINSFTSIFASIVTFSIYGFKATFNYENCLKKVSLLLTNTFDLEDGFLTASNLEQVKGYLASAYPSKYSEMFPQIKNCSLESELDTAVQGTGLAFIVYTEAIKNMEVSQLWSVLYFFMLLMLGIGSMLGNTAAILTPLTDSKIISSHLPKEAISGLVCLVNCAIGMVFTMEAGNYWFDIFNDYAATLSLLLIVLVETIAVCYVYGLRRFESDLKAMTGRAVSWYWKVMWAGVSPLLIVSLFVFYLSDYILTGTLKYQAWDASQGQLVTKDYPAYALAVIGLLVASSTMCIPLAALGTFVQRRLKRGDADPVA

SEQ ID NO: 857362 - protein, 632 aa, Homo sapiens; identical to SEQ ID NO: 857360

SEQ ID NO: 857363 - protein, 654 aa, Homo sapiens
ITSSARSSPLPVNSGALSLSFSFSSSSSLSPNCCTPATASPQAPFRLWTKLFAMSTTLVILLACLHGSTHPFPYRVSQPTHSPCTPHPGFIHGGCTLAFGMGQVLHLANAVPRNKMTVSSFPFPIPDATDVSAESQPTPRPPLPGHTPSISECPDLCSNCLMNQGPICVLIILPCSIPLHTSALAYSGGIAASGYTPPMAEVLWRIRSTLCPPHSTCILHSTLALGGVQLEVCVSSAREWMGPGELVSSPRGAPDGCVLWVSSFPSLGYSPVAGLSIWDSTQGSSALSLLAFQIEQLANPKAWINAATQIFFSLGLGFGSLIAFASYNEPSNNCQKHAIIVSLINSFTSIFASIVTFSIYGFKATFNYENCLKKVSLLLTNTFDLEDGFLTASNLEQVKGYLASAYPSKYSEMFPQIKNCSLESELDTAVQGTGLAFIVYTEAIKNMEVSQLWSVLYFFMLLMLGIGSMLGNTAAILTPLTDSKIISSHLPKEAISGLVCLVNCAIGMVFTMEAGNYWFDIFNDYAATLSLLLIVLVETIAVCYVYGLRRFESDLKAMTGRAVSWYWKVMWAGVSPLLIVSLFVFYLSDYILTGTLKYQAWDASQGQLVTKDYPAYALAVIGLLVASSTMCIPLAALGTFVQRRLKRGDADPVA

SEQ ID NO: 857364 - protein, 82 aa, Homo sapiens
GGGAGPPPSRAGVGRRAWRPRTETAVPDPRAGAERAEAGAMEKARPLWANSLQFVFACISYAVGLGNVWRFPYLCQMYGGVM

SEQ ID NO: 857365 - protein, 569 aa, Homo sapiens
GGGAGPPPSRAGVGRRAWRPRTETAVPDPRAGAERAEAGAMEKARPLWANSLQFVFACISYAVGLGNVWRFPYLCQMYGGGSFLVPYIIMLIVEGMPLLYLELAVGQRMRQGSIGAWRTISPYLSGVGVASVVVSFFLSMYYNVINAWAFWYLFHSFQDPLPWSVCPLNGNHTGYDEECEKASSTQYFWYRKTLNISPSLQENGGVQWEPALCLLLAWLVVYLCILRGTESTGKVVYFTASLPYCVLIIYLIRGLTLHGATNGLMYMFTPKIEQLANPKAWINAATQIFFSLGLGFGSLIAFASYNEPSNNCQKHAIIVSLINSFTSIFASIVTFSIYGFKATFNYENCLKKVSLLLTNTFDLEDGFLTASNLEQVKGYLASAYPSKYSEMFPQIKNCSLESELDTAVQGTGLAFIVYTEAIKNMEVSQLWSVLYFFMLLMLGIGSMLGNTAAILTPLTDSKIISSHLPKEAISGLVCLVNCAIGMVFTMEAGNYWFDIFNDYAATLSLLLIVLVETIAVCYVYGLRRFESDLKAMTGRAVSHRARLKIFLNCNKYSAFFLMKMNFVYQ

SEQ ID NO: 857366 - protein, 185 aa, Homo sapiens
TCVSTESKEALYLVISRAGHRYHCGPYTRFISISSSSCSRPPSPFGCCCTLECELQKSPKIPDRQHILCRPSKPSAASKIKAQLLNSVQCATSNLFICSLHLQFSVIPKPHPCKALYSAPQMISRQLRSLSCLCPALFPGTSSFIVALSSPANLYIPQRQRSDELVFESQKGSAMELAVITVDGV

SEQ ID NO: 857367 - protein, 264 aa, Homo sapiens
RSAGPPLLAGTAAPPAQPLAKKKVVKRRADTTTPTPTAILAPGSPASPPGSLEPKAARLPPMRRESGRPIKPPRKDLPDSQQQHQSSKKGKLSEQLKHCNGILKELLSKKHAAYAWPFYKPVDLLHLACMTTMTSLSTPWTNRNGKRTPTHTSRVGTCLYASPEQLEGSEYDAKSDMYSLGVVLLELFQPFGTEMERAEVLTGLRTGQLPESLRKRCPVQAKYIQHLTRRNSSQRPSAIQLLQSELFQNSGNVCAFLSLGPGVK

SEQ ID NO: 857368 - protein, 247 aa, Homo sapiens
MQGGNSGVRKREEEGDGAGAVAAPPAIDFPAEGPDPEYDVANQLLLVSLLEHLSHVHEPNPLRSRQVFKLLCQTFIKMGLLSSFTCSDEFSSLRLHHNRAITHLMRSAKERVRQDPCEDISRIQKIRSREVALEAQTSRYLNEFEELAILGKGGYGRVYKVRNKLDGQYYAIKKILIKGATKTVCMKVLREVKVLAGLQHPNIVGYHTAWIEHVHVIQPRADRAAIEWHTLKLHPDQGEDRKHGGSA

SEQ ID NO: 857369 - protein, 630 aa, Homo sapiens
MQGGNSGVRKREEEGDGAGAVAAPPAIDFPAEGPDPEYDESDVPAEIQVLKEPLQQPTFPFAVANQLLLVSLLEHLSHVHEPNPLRSRQVFKLLCQTFIKMGLLSSFTCSDEFSSLRLHHNRAITHLMRSAKERVRQDPCEDISRIQKIRSREVALEAQTSRYLNEFEELAILGKGGYGRVYKVRNKLDGQYYAIKKILIKGATKTVCMKVLREVKVLAGLQHPNIVGYHTAWIEHVHVIQPRADRAAIELPSLEVLSDQEEDREQCGVKNDESSSSSIIFAEPTPEKEKRFGESDTENQNNKSVKYTTNLVIRESGELESTLELQENGLAGLSASSIVEQQLPLRRNSHLEESFTSTEESSEENVNFLGQTEAQYHLMLHIQMQLCELSLWDWIVERNKRGREYVDESACPYVMANVATKIFQELVEGVFYIHNMGIVHRDLKPRNIFLHGPDQQVKIGDFGLACTDILQKNTDWTNRNGKRTPTHTSRVGTCLYASPEQLEGSEYDAKSDMYSLGVVLLELFQPFGTEMERAEVLTGLRTGQLPESLRKRCPVQAKYIQHLTRRNSSQRPSAIQLLQSELFQNSGNVNLTLQMKIIEQEKEIAELKKQLNLLSQDKGVRDDGKDGGVG

SEQ ID NO: 857370 - protein, 630 aa, Homo sapiens; identical to SEQ ID NO: 857369

SEQ ID NO: 857371 - protein, 630 aa, Homo sapiens; identical to SEQ ID NO: 857369

SEQ ID NO: 857372 - protein, 502 aa, Homo sapiens
MQGGNSGVRKREEEGDGAGAVAAPPAIDFPAEGPDPEYDESDVPAEIQVLKEPLQQPTFPFAVANQLLLVSLLEHLSHVHEPNPLRSRQVFKLLCQTFIKMGLLSSFTCSDEFSSLRLHHNRAITHLMRSAKERVRQDPCEDISRIQKIRSREVALEAQTSRYLNEFEELAILGKGGYGRVYKVRNKLDGQYYAIKKILIKGATKTVCMKVLREVKVLAGLQHPNIVGYHTAWIEHVHVIQPRADRAAIELPSLEVLSDQEEDREQCGVKNDESSSSSIIFAEPTPEKEKRFGESDTENQNNKSVKYTTNLVIRESGELESTLELQENGLAGLSASSIVEQQLPLRRNSHLEESFTSTEESSEENVNFLGQTEAQYHLMLHIQMQLCELSLWDWIVERNKRGREYVDESACPYVMANVATKIFQELVEGVFYIHNMGIVHRDLKPRNIFLHGPDQQVKIGDFGLACTDILQKNTDWTNRNGKSKFLVLFCFLCISKRHGCTC

SEQ ID NO: 857373 - protein, 648 aa, Homo sapiens
MRRWVDSMCAPRSGGPVMQQKSEVDGCLLLVDVRSLYVSSLNVSPLPTWPGCTSEYDESDVPAEIQVLKEPLQQPTFPFAVANQLLLVSLLEHLSHVHEPNPLRSRQVFKLLCQTFIKMGLLSSFTCSDEFSSLRLHHNRAITHLMRSAKERVRQDPCEDISRIQKIRSREVALEAQTSRYLNEFEELAILGKGGYGRVYKVRNKLDGQYYAIKKILIKGATKTVCMKVLREVKVLAGLQHPNIVGYHTAWIEHVHVIQPRADRAAIELPSLEVLSDQEEDREQCGVKNDESSSSSIIFAEPTPEKEKRFGESDTENQNNKSVKYTTNLVIRESGELESTLELQENGLAGLSASSIVEQQLPLRRNSHLEESFTSTEESSEENVNFLGQTEAQYHLMLHIQMQLCELSLWDWIVERNKRGREYVDESACPYVMANVATKIFQELVEGVFYIHNMGIVHRDLKPRNIFLHGPDQQVKIGDFGLACTDILQKNTDWTNRNGKRTPTHTSRVGTCLYASPEQLEGSEYDAKSDMYSLGVVLLELFQPFGTEMERAEVLTGLRTGQLPESLRKRCPVQAKYIQHLTRRNSSQRPSAIQLLQSELFQNSGNVNLTLQMKIIEQEKEIAELKKQLNLLSQDKGVRDDGKDGGVG

SEQ ID NO: 857374 - protein, 662 aa, Homo sapiens
MQGGNSGVRKREEEGDGAGAVAAPPAIDFPAEGPDPEYDEMWSCCVSQAGLERLASSDSPASAFQNAVDYRESDVPAEIQVLKEPLQQPTFPFAVANQLLLVSLLEHLSHVHEPNPLRSRQVFKLLCQTFIKMGLLSSFTCSDEFSSLRLHHNRAITHLMRSAKERVRQDPCEDISRIQKIRSREVALEAQTSRYLNEFEELAILGKGGYGRVYKVRNKLDGQYYAIKKILIKGATKTVCMKVLREVKVLAGLQHPNIVGYHTAWIEHVHVIQPRADRAAIELPSLEVLSDQEEDREQCGVKNDESSSSSIIFAEPTPEKEKRFGESDTENQNNKSVKYTTNLVIRESGELESTLELQENGLAGLSASSIVEQQLPLRRNSHLEESFTSTEESSEENVNFLGQTEAQYHLMLHIQMQLCELSLWDWIVERNKRGREYVDESACPYVMANVATKIFQELVEGVFYIHNMGIVHRDLKPRNIFLHGPDQQVKIGDFGLACTDILQKNTDWTNRNGKRTPTHTSRVGTCLYASPEQLEGSEYDAKSDMYSLGVVLLELFQPFGTEMERAEVLTGLRTGQLPESLRKRCPVQAKYIQHLTRRNSSQRPSAIQLLQSELFQNSGNVNLTLQMKIIEQEKEIAELKKQLNLLSQDKGVRDDGKDGGVG

SEQ ID NO: 857375 - protein, 506 aa, Homo sapiens
MNQTHFVQDRCLSDPCEDISRIQKIRSREVALEAQTSRYLNEFEELAILGKGGYGRVYKVRNKLDGQYYAIKKILIKGATKTVCMKVLREVKVLAGLQHPNIVGYHTAWIEHVHVIQPRADRAAIELPSLEVLSDQEEDREQCGVKNDESSSSSIIFAEPTPEKEKRFGESDTENQNNKSVKYTTNLVIRESGELESTLELQENGLAGLSASSIVEQQLPLRRNSHLEESFTSTEESSEENVNFLGQTEAQYHLMLHIQMQLCELSLWDWIVERNKRGREYVDESACPYVMANVATKIFQELVEGVFYIHNMGIVHRDLKPRNIFLHGPDQQVKIGDFGLACTDILQKNTDWTNRNGKRTPTHTSRVGTCLYASPEQLEGSEYDAKSDMYSLGVVLLELFQPFGTEMERAEVLTGLRTGQLPESLRKRCPVQAKYIQHLTRRNSSQRPSAIQLLQSELFQNSGNVNLTLQMKIIEQEKEIAELKKQLNLLSQDKGVRDDGKDGGVG

SEQ ID NO: 857376 - protein, 630 aa, Homo sapiens; identical to SEQ ID NO: 857369

SEQ ID NO: 857377 - protein, 602 aa, Homo sapiens
MQGGNSGVRKREEEGDGAGAVAAPPAIDFPAEGPDPEYDESDVPAEIQVLKEPLQQPTFPFAVANQLLLVSLLEHLSHVHEPNPLRSRQVFKLLCQTFIKMGLLSSFTCSDEFSSLRLHHNRAITHLMRSAKERVRQDPCEDISRIQKIRSREVALEAQTSRYLNEFEELAILGKGGYGRVYKVRNKLDGQYYAIKKILIKGATKTVCMKVLREVKVLAGLQHPNIVGYHTAWIEHVHVIQPRADRAAIELPSLEVLSDQEEDREQCGVKNDESSSSSIIFAEPTPEKEKRFGESDTENQNNKSVKYTTNLVIRESGELESTLELQENGLAGLSASSIVEQQLPLRRNSHLEESFTSTEESSEENVNFLGQTEAQYHLMLHIQMQLCELSLWDWIVERNKRGREYVDESACPYVMANVATKIFQELVEGVFYIHNMGIVHRDLKPRNIFLHGPDQQVKIGDFGLACTDILQKNTDWTNRNGKRTPTHTSRVGTCLYASPEQLEGSEYDAKSDMYSLGVVLLELFQPFGTEMERAEVLTGLRTGQLPESLRKRCPVQAKYIQHLTRRNSSQRPSAIQLLQSELFQNSGNVNLTLQMKIIEQER

SEQ ID NO: 857378 - protein, 630 aa, Homo sapiens; identical to SEQ ID NO: 857369

SEQ ID NO: 857379 - protein, 630 aa, Homo sapiens; identical to SEQ ID NO: 857369

SEQ ID NO: 857380 - protein, 196 aa, Homo sapiens
MQGGNSGVRKREEEGDGAGAVAAPPAIDFPAEGPDPEYDESDVPAEIQVLKEPLQQPTFPFAVANQLLLVSLLEHLSHVHEPNPLRSRQVFKLLCQTFIKMGLLSSFTCSDEFSSLRLHHNRAITHLMRSAKERVRQDPCEDISRIQKIRSREVALEAQTSRYLNEFEELAILGKGGYGRVYKVVFHVLVLTYYPK

SEQ ID NO: 857381 - protein, 630 aa, Homo sapiens; identical to SEQ ID NO: 857369

SEQ ID NO: 857382 - protein, 630 aa, Homo sapiens; identical to SEQ ID NO: 857369

SEQ ID NO: 857383 - protein, 630 aa, Homo sapiens; identical to SEQ ID NO: 857369

SEQ ID NO: 857384 - protein, 101 aa, Homo sapiens
QVTLAGSLQGERTGQLPESLRKRCPVQAKYIQHLTRRNSSQRPSAIQLLQSELFQNSGNVNLTLQMKIIEQEKEIAELKKQLNLLSQDKGVRDDGKDGGVG

SEQ ID NO: 857385 - protein, 185 aa, Homo sapiens; identical to SEQ ID NO: 857366

SEQ ID NO: 857386 - protein, 381 aa, Homo sapiens
MQGGNSGVRKREEEGDGAGAVAAPPAIDFPAEGPDPEYDESDVPAEIQVLKEPLQQPTFPFAVANQLLLVSLLEHLSHVHEPNPLRSRQVFKLLCQTFIKMGLLSSFTCSDEFSSLRLHHNRAITHLMRSAKERVRQDPCEDISRIQKIRSREVALEAQTSRYLNEFEELAILGKGGYGRVYKVRNKLDGQYYAIKKILIKGATKTVCMKVLREVKVLAGLQHPNIVGYHTAWIEHVHVIQPRADRAAIELPSLEVLSDQEEDREQCGVKNDESSSSSIIFAEPTPEKEKRFGESDTENQNNKSVKYTTNLVIRESGELESTLELQENGLAGLSASSIVEQQLPLRRNSHLEESFTSTEESSEENVNFLGQTEVDYFPRPS

SEQ ID NO: 857387 - protein, 532 aa, Homo sapiens
MQGGNSGVRKREEEGDGAGAVAAPPAIDFPAEGPDPEYDESDVPAEIQVLKEPLQQPTFPFAVANQLLLVSLLEHLSHVHEPNPLRSRQVFKLLCQTFIKMGLLSSFTCSDEFSSLRLHHNRAITHLMRSAKERVRQDPCEDISRIQKIRSREVALEAQTSRYLNEFEELAILGKGGYGRVYKVRNKLDGQYYAIKKILIKGATKTVCMKVLREVKVLAGLQHPNIVGYHTAWIEHVHVIQPRADRAAIELPSLEVLSDQEEDREQCGVKNDESSSSSIIFAEPTPEKEKRFGESDTENQNNKSVKYTTNLVIRESGELESTLELQENGLAGLSASSIVEQQLPLRRNSHLEESFTSTEESSEENVNFLGQTEAQYHLMLHIQMQLCELSLWDWIVERNKRGREYVDESACLMYMATCRKQQHLHRLVRRCVTYTNMTNWATENLTPLKYPLPGLLPSKYKIGDYGSGLNRNPYRSTRTDQQTPGQTTTTTSSEGTHADAKPQRASTEKNHQKEQAVPQTHTSTKRTKSTST

SEQ ID NO: 857388 - protein, 247 aa, Homo sapiens
MQGGNSGVRKREEEGDGAGAVAAPPAIDFPAEGPDPEYDESDVPAEIQVLKEPLQQPTFPFAVANQLLLVSLLEHLSHVHEPNPLRSRQVFKQVSCPELLDQHYTVDMTETEHSIQHPVTKTATRRIVHAGLQPNPGDPSAGHHSLALCPELAPYATILASIVDSKPNGVRQRPIAFDNATHYYLYNRLMDFLTSREIVNRQIHDIVQSCQPGEVVIRDTLYRLGVAQIKTETEEEGEEEEVAAVAE

SEQ ID NO: 857389 - protein, 630 aa, Homo sapiens; identical to SEQ ID NO: 857369

SEQ ID NO: 857390 - protein, 630 aa, Homo sapiens; identical to SEQ ID NO: 857369

SEQ ID NO: 857391 - protein, 630 aa, Homo sapiens; identical to SEQ ID NO: 857369

SEQ ID NO: 857392 - protein, 630 aa, Homo sapiens; identical to SEQ ID NO: 857369

SEQ ID NO: 857393 - protein, 624 aa, Homo sapiens
CESLEDPAHAVGGAVAAPPAIDFPAEGPDPEYDESDVPAEIQVLKEPLQQPTFPFAVANQLLLVSLLEHLSHVHEPNPLRSRQVFKLLCQTFIKMGLLSSFTCSDEFSSLRLHHNRAITHLMRSAKERVRQDPCEDISRIQKIRSREVALEAQTSRYLNEFEELAILGKGGYGRVYKVRNKLDGQYYAIKKILIKGATKTVCMKVLREVKVLAGLQHPNIVGYHTAWIEHVHVIQPRADRAAIELPSLEVLSDQEEDREQCGVKNDESSSSSIIFAEPTPEKEKRFGESDTENQNNKSVKYTTNLVIRESGELESTLELQENGLAGLSASSIVEQQLPLRRNSHLEESFTSTEESSEENVNFLGQTEAQYHLMLHIQMQLCELSLWDWIVERNKRGREYVDESACPYVMANVATKIFQELVEGVFYIHNMGIVHRDLKPRNIFLHGPDQQVKIGDFGLACTDILQKNTDWTNRNGKRTPTHTSRVGTCLYASPEQLEGSEYDAKSDMYSLGVVLLELFQPFGTEMERAEVLTGLRTGQLPESLRKRCPVQAKYIQHLTRRNSSQRPSAIQLLQSELFQNSGNVNLTLQMKIIEQEKEIAELKKQLNLLSQDKGVRDDGKDGGVG

SEQ ID NO: 857394 - protein, 567 aa, Homo sapiens
LERWSPVDEPKPNIASPTRCLQSSYSRKSVLCQTFIKMGLLSSFTCSDEFSSLRLHHNRAITHLMRSAKERVRQDPCEDISRIQKIRSREVALEAQTSRYLNEFEELAILGKGGYGRVYKVRNKLDGQYYAIKKILIKGATKTVCMKVLREVKVLAGLQHPNIVGYHTAWIEHVHVIQPRADRAAIELPSLEVLSDQEEDREQCGVKNDESSSSSIIFAEPTPEKEKRFGESDTENQNNKSVKYTTNLVIRESGELESTLELQENGLAGLSASSIVEQQLPLRRNSHLEESFTSTEESSEENVNFLGQTEAQYHLMLHIQMQLCELSLWDWIVERNKRGREYVDESACPYVMANVATKIFQELVEGVFYIHNMGIVHRDLKPRNIFLHGPDQQVKIGDFGLACTDILQKNTDWTNRNGKRTPTHTSRVGTCLYASPEQLEGSEYDAKSDMYSLGVVLLELFQPFGTEMERAEVLTGLRTGQLPESLRKRCPVQAKYIQHLTRRNSSQRPSAIQLLQSELFQNSGNVNLTLQMKIIEQEKEIAELKKQLNLLSQDKGVRDDGKDGGVG

SEQ ID NO: 857395 - protein, 422 aa, Homo sapiens
MKVLREVKVLAGLQHPNIVGYHTAWIEHVHVIQPRADRAAIELPSLEVLSDQEEDREQCGVKNDESSSSSIIFAEPTPEKEKRFGESDTENQNNKSVKYTTNLVIRESGELESTLELQENGLAGLSASSIVEQQLPLRRNSHLEESFTSTEESSEENVNFLGQTEAQYHLMLHIQMQLCELSLWDWIVERNKRGREYVDESACPYVMANVATKIFQELVEGVFYIHNMGIVHRDLKPRNIFLHGPDQQVKIGDFGLACTDILQKNTDWTNRNGKRTPTHTSRVGTCLYASPEQLEGSEYDAKSDMYSLGVVLLELFQPFGTEMERAEVLTGLRTGQLPESLRKRCPVQAKYIQHLTRRNSSQRPSAIQLLQSELFQNSGNVNLTLQMKIIEQEKEIAELKKQLNLLSQDKGVRDDGKDGGVG

SEQ ID NO: 857396 - protein, 630 aa, Homo sapiens; identical to SEQ ID NO: 857369

SEQ ID NO: 857397 - protein, 196 aa, Homo sapiens; identical to SEQ ID NO: 857380

SEQ ID NO: 857398 - protein, 195 aa, Homo sapiens [sequence omitted]

SEQ ID NO: 857399 - protein, 630 aa, Homo sapiens; identical to SEQ ID NO: 857369

SEQ ID NO: 857400 - protein, 294 aa, Homo sapiens
RSAGPPLLAGTAAPPAQPLAKKKVVKRRADTTTPTPTAILAPGSPASPPGSLEPKAARLPPMRRESGRPIKPPRKDLPDSQQQHQSSKKGKLSEQLKHCNGILKELLSKKHAAYAWPFYKPVDLLHLACMTTMTSLSTPWTNRNGKRTPTHTSRVGTCLYASPEQLEGSEYDAKSDMYSLGVVLLELFQPFGTEMERAEVLTGLRTGQLPESLRKRCPVQAKYIQHLTRRNSSQRPSAIQLLQSELFQNSGNVNLTLQMKIIEQEKEIAELKKQLNLLSQDKGVRDDGKDGGVG

SEQ ID NO: 857401 - protein, 155 aa, Homo sapiens
EGSEYDANCSGEAYRQVPTLDASPEQLEGSEYDAKSDMYSLGVVLLELFQPFGTEMERAEVLTGLRTGQLPESLRKRCPVQAKYIQHLTRRNSSQRPSAIQLLQSELFQNSGNVNLTLQMKIIEQEKEIAELKKQLNLLSQDKGVRDDGKDGGVG

SEQ ID NO: 857402 - protein, 630 aa, Homo sapiens; identical to SEQ ID NO: 857369

SEQ ID NO: 857403 - protein, 1003 aa, Homo sapiens
  misc_feature (746)..(746): Xaa can be any naturally occurring amino acid
MQGGNSGVRKREEEGDGAGAVAAPPAIDFPAEGPDPEYDESDVPAEIQVLKEPLQQPTFPFAVANQLLLVSLLEHLSHVHEPNPLRSRQVFKLLCQTFIKMGLLSSFTCSDEFSSLRLHHNRAITHLMRSAKERVRQDPCEDISRIQKIRSREVALEAQTSRYLNEFEELAILGKGGYGRVYKVRNKLDGQYYAIKKILIKGATKTVCMKVLREVKVLAGLQHPNIVGYHTAWIEHVHVIQPRADRAAIELPSLEVLSDQEEDREQCGVKNDESSSSSIIFAEPTPEKEKRFGESDTENQNNKSVKYTTNLVIRESGELESTLELQENGLAGLSASSIVEQQLPLRRNSHLEESFTSTEESSEENVNFLGQTEAQYHLMLHIQMQLCELSLWDWIVERNKRGREYVDESACPFMFMAHHVANNTHFSKHIGQQQVCSTITVNQWAIVHRSICKPKQHHYVYPWRPASRPRYTHIKRSTYRILALATQPPIPHSTATDTGTKDTNTRHTPAAQQQHDTNNTINRYTQHAMETNTIMTSWSHRHLYTTHGRHTGGDGKAAIHWTDTCTCHNTDTAGQYHGLAKTILTRNGLRIHLGPKGTDNSNKDNETRRTWENNHRNKHGARHRQGSERNNAIITIQKPTGRIRLQEEQNIDEKSTSNSRTHGDNKYPKSPTERAKRGLDSTTERKKPNPNKNTIALTTTDTTTNNHGQGPRRTTRTQDTGPKTSKPQHTYGGTITQTRWPGHQQXRHHHIANPTTNNYHRSKNSEHITRTKPTVAKAHGHKQQTHHDSQREKTTHQIGKQTLQPEQQHQNKHPNTTYINTDRHRRTITSKLEQQPQQQRRQMTTNNNKNTIKTPNKKTLNSTKRTQHTHDDTNYESTRQEEQKNQDDGQQRKADIYDKGRTTQMTGRATERQTGDAHERRAEHRATHDQDARHIECHEEHKQNQTDRRTRETLNSNNQVESTASYSRTQTHRNEQDNSRVKEERWTAHRERHDTRIDDETPP

SEQ ID NO: 857404 - protein, 71 aa, Homo sapiens
  misc_feature (5)..(5): Xaa can be any naturally occurring amino acid
  misc_feature (9)..(9): Xaa can be any naturally occurring amino acid
  misc_feature (25)..(25): Xaa can be any naturally occurring amino acid
VGGPXSEMXPTDGEGNIARFLFSLXGQKHNAVNATLIDSWVDIAIFQLKEGSSKEKAAVFRSMNSLLSIST

SEQ ID NO: 857405 - protein, 119 aa, Homo sapiens
MIARRNPEPLRFLPDEARSLPPPKLTDPRLLYIGFLGYCSGLIDNLIRRRPIATAGLHRQLLYITAFFFAGYYLVKREDYLYAVRDREMFGYMKLHPEDFPEEDKKTYGEIFEKFHPIR

SEQ ID NO: 857406 - protein, 119 aa, Homo sapiens
TLAGSDLETTLALPDEARSLPPPKLTDPRLLYIGFLGYCSGLIDNLIRRRPIATAGLHRQLLYITAFFFAGYYLVKREDYLYAVRDREMFGYMKLHPEDFPEEDKKTYGEIFEKFHPIR

SEQ ID NO: 857407 - protein, 119 aa, Homo sapiens; identical to SEQ ID NO: 857405

SEQ ID NO: 857408 - protein, 119 aa, Homo sapiens; identical to SEQ ID NO: 857405

SEQ ID NO: 857409 - protein, 119 aa, Homo sapiens; identical to SEQ ID NO: 857405

SEQ ID NO: 857410 - protein, 119 aa, Homo sapiens; identical to SEQ ID NO: 857405

SEQ ID NO: 857411 - protein, 103 aa, Homo sapiens
MIARRNPEPLRFLPDEARSLPPPKLTDPRLLYIGFLGYCSGLIDNLIRRRPIATAGLHRQLLYITAFFFAGYYLVKMKLHPEDFPEEDKKTYGEIFEKFHPIR

SEQ ID NO: 857412 - protein, 178 aa, Homo sapiens
MIARRNPEPLRFLPDEARSLPPPKLTDPRLLYIGFLGYCSGLIDNLIRRRPIATAGLHRQLLYITAFFFAGYYLVKREDYLYAVRDREMFGYMKLHPEDFPEEDVYFVELNVGGEFHTTTLGTLRKFPGSKLAEMFSSLAKASTDAEGRFFIDRPSTYFRPILDYLRTGQVPTQHIPE

SEQ ID NO: 857413 - protein, 119 aa, Homo sapiens; identical to SEQ ID NO: 857405

SEQ ID NO: 857414 - protein, 119 aa, Homo sapiens; identical to SEQ ID NO: 857405

SEQ ID NO: 857415 - protein, 119 aa, Homo sapiens; identical to SEQ ID NO: 857405

SEQ ID NO: 857416 - protein, 119 aa, Homo sapiens; identical to SEQ ID NO: 857405

SEQ ID NO: 857417 - protein, 275 aa, Homo sapiens
MIARRNPEPLRFLPDEARSLPPPKLTDPRLLYIGFLGYCSGLIDNLIRRRPIATAGLHRQLLYITAFFFAGYYLVKREDYLYAVRDREMFGYMKLHPEDFPEEDKKTYGEILYIQKLPPPPLTKKPIKITKTKHKPTHSPNTKPTTHNHFHRRRPPPVHTTAALPTPPPPPPPSPAPQQRATNRTAPPHMAAPLSITPPCISDTILNRIPLMRQSPVDFHPSSSTLIIPPTHSTQHPYLLHLSFLLISLNLISQLVLLAIACLKSTPPPIHLLHN

SEQ ID NO: 857418 - protein, 513 aa, Homo sapiens
AGGRASGIRLAQLTAPENGRGGAPVEQGVSRPGRLAAVLMSSEDREAQEDELLALASIYDGDEFRKAESVQGGETRIYLDLPQNFKIFVSGNSNECLQNSGFEYTICFLPPLVLNFELPPDYPSSSPPSFTLSGKWLSPTQLSALCKHLDNLWEEHRGSVVLFAWMQFLKEETLAYLNIVSPFELKIGSQKKVQRRTAQASPNTELDFGGAAGSDVDQEEIVDERAVQDVESLSNLIQEILDFDQAQQIKCFNSKLFLCSICFCEKLGSECMYFLECRHVYCKACLKDYFEIQIRDGQVQCLNCPEPKCPSVATPGQVKELVEAELFARYDRLLLQSSLDLMADVVYCPRPCCQLPVMQEPGCTMGICSSCNFAFCTLCRLTYHGVSPCKVTAEKLMDLRNEYLQADEANKRLLDQRYGKRVIQKALEEMESKEWLEKNSKSCPCCGTPIEKLDGCNKMTCTGCMQYFCWICMGSLSRANPYKHFNDPGSPCFNRLFYAVDVDDDIWEDEVED

SEQ ID NO: 857419 - protein, 141 aa, Homo sapiens
MSSEDREAQEDELLALASIYDGDEFRKAESVQGGETRIYLDLPQNFKIFVSEKLMDLRNEYLQADEANKRLLDQRYGKRVIQKALEEMESKEWLEKNSKSCPCCGTPIEWICMGSLSRANPYKHFNDPGSPCFNRYVYTEF

SEQ ID NO: 857420 - protein, 47 aa, Homo sapiens
MSSEDREAQEDELLALASIYDGDEFRKEFQDFVSGNSECLQNSGFVH

SEQ ID NO: 857421 - protein, 118 aa, Homo sapiens
YWWCWLECSVSVLVALASIYDGDEFRKAESVQGGETRIYLDLPQNFKIFVSGNSNECLQNSGFEYTICFLPPLVLNFELPPDYPSSSPPSFTLSGKWLSPTQLSAICKHHQYRQHHQY

SEQ ID NO: 857422 - protein, 474 aa, Homo sapiens
MSSEDREAQEDELLALASIYDGDEFRKAESVQGGETRIYLDLPQNFKIFVSGNSNECLQNSGFEYTICFLPPLVLNFELPPDYPSSSPPSFTLSGKWLSPTQLSALCKHLDNLWEEHRGSVVLFAWMQFLKEETLAYLNIVSPFELKIGSQKKVQRRTAQASPNTELDFGGAAGSDVDQEEIVDERAVQDVESLSNLIQEILDFDQAQQIKCFNSKLFLCSICFCEKLGSECMYFLECRHVYCKACLKDYFEIQIRDGQVQCLNCPEPKCPSVATPGQVKELVEAELFARYDRLLLQSSLDLMADVVYCPRPCCQLPVMQEPGCTMGICSSCNFAFCTLCRLTYHGVSPCKVTAEKLMDLRNEYLQADEANKRLLDQRYGKRVIQKALEEMESKEWLEKNSKSCPCCGTPIEKLDGCNKMTCTGCMQYFCWICMGSLSRANPYKHFNDPGSPCFNRLFYAVDVDDDIWEDEVED

SEQ ID NO: 857423 - protein, 474 aa, Homo sapiens; identical to SEQ ID NO: 857422

SEQ ID NO: 857424 - protein, 498 aa, Homo sapiens
AWASSLFSSRRGLWSPLSEHSEVLMSSEDREAQEDELLALASIYDGDEFRKAESVQGGETRIYLDLPQNFKIFVSGNSNECLQNSGFEYTICFLPPLVLNFELPPDYPSSSPPSFTLSGKWLSPTQLSALCKHLDNLWEEHRGSVVLFAWMQFLKEETLAYLNIVSPFELKIGSQKKVQRRTAQASPNTELDFGGAAGSDVDQEEIVDERAVQDVESLSNLIQEILDFDQAQQIKCFNSKLFLCSICFCEKLGSECMYFLECRHVYCKACLKDYFEIQIRDGQVQCLNCPEPKCPSVATPGQVKELVEAELFARYDRLLLQSSLDLMADVVYCPRPCCQLPVMQEPGCTMGICSSCNFAFCTLCRLTYHGVSPCKVTAEKLMDLRNEYLQADEANKRLLDQRYGKRVIQKALEEMESKEWLEKNSKSCPCCGTPIEKLDGCNKMTCTGCMQYFCWICMGSLSRANPYKHFNDPGSPCFNRLFYAVDVDDDIWEDEVED

SEQ ID NO: 857425 - protein, 474 aa, Homo sapiens; identical to SEQ ID NO: 857422

SEQ ID NO: 857426 - protein, 474 aa, Homo sapiens; identical to SEQ ID NO: 857422

SEQ ID NO: 857427 - protein, 474 aa, Homo sapiens; identical to SEQ ID NO: 857422

SEQ ID NO: 857428 - protein, 513 aa, Homo sapiens; identical to SEQ ID NO: 857418

SEQ ID NO: 857429 - protein, 510 aa, Homo sapiens
LRRMRPGLRGQARWEAAVHAARRLLREREPLHHQVLMSSEDREAQEDELLALASIYDGDEFRKAESVQGGETRIYLDLPQNFKIFVSGNSNECLQNSGFEYTICFLPPLVLNFELPPDYPSSSPPSFTLSGKWLSPTQLSALCKHLDNLWEEHRGSVVLFAWMQFLKEETLAYLNIVSPFELKIGSQKKVQRRTAQASPNTELDFGGAAGSDVDQEEIVDERAVQDVESLSNLIQEILDFDQAQQIKCFNSKLFLCSICFCEKLGSECMYFLECRHVYCKACLKDYFEIQIRDGQVQCLNCPEPKCPSVATPGQVKELVEAELFARYDRLLLQSSLDLMADVVYCPRPCCQLPVMQEPGCTMGICSSCNFAFCTLCRLTYHGVSPCKVTAEKLMDLRNEYLQADEANKRLLDQRYGKRVIQKALEEMESKEWLEKNSKSCPCCGTPIEKLDGCNKMTCTGCMQYFCWICMGSLSRANPYKHFNDPGSPCFNRLFYAVDVDDDIWEDEVED

SEQ ID NO: 857430 - protein, 498 aa, Homo sapiens; identical to SEQ ID NO: 857424

SEQ ID NO: 857431 - protein, 172 aa, Homo sapiens
MADVVYCPRPCCQLPVMQEPGCTMGICSSCNFAFCTLCRLTYHGVSPCKVTAEKLMDLRNEYLQADEANKRLLDQRYGKRVIQKALEEMESKEWLEKNSKSCPCCGTPIEKLDGCNKMTCTGCMQYFCWICMGSLSRANPYKHFNDPGSPCFNRLFYAVDVDDDIWEDEVED

SEQ ID NO: 857432 - protein, 171 aa, Homo sapiens
MSSEDREAQEDELLALASIYDGDEFRKAESVQGGETRIYLDLPQNFKIFVSEKLMDLRNEYLQADEANKRLLDQRYGKRVIQKALEEMESKEWLEKNSKSCPCCGTPIEKLDGCNKMTCTGCMQYFCWICMGSLSRANPYKHFNDPGSPCFNRLFYAVDVDDDIWEDEVED

SEQ ID NO: 857433 - protein, 117 aa, Homo sapiens [sequence omitted]

SEQ ID NO: 857434 - protein, 139 aa, Homo sapiens
ESLSNLIQEILDFDQAQQIKCFNSKLFLCSICFCEKLGSECMYFLECRHVYCKACLKDYFEIQIRDGQVQCLNCPEPKCPSVATPGQVTVYPADGCLLILFHKWRYHLRNFLDRAHGAVRGLGASPQVVLLYPLKMLWS

SEQ ID NO: 857435 - protein, 474 aa, Homo sapiens; identical to SEQ ID NO: 857422

SEQ ID NO: 857436 - protein, 127 aa, Homo sapiens
MSSEDREAQEDELLALASIYDGDEFRKAESVQGGETRIYLDLPQNFKIFVSGNSNECLQNSGFEYTICFLPPLVLNFELPPDYPSSSPPSFTLSGKWLSPTQSAFLLLCQALENNPYGEKPTVGNRG

SEQ ID NO: 857437 - protein, 498 aa, Homo sapiens; identical to SEQ ID NO: 857424

SEQ ID NO: 857438 - protein, 474 aa, Homo sapiens; identical to SEQ ID NO: 857422

SEQ ID NO: 857439 - protein, 348 aa, Homo sapiens
MQFLKEETLAYLNIVSPFELKIGSQKKVQRRTAQASPNTELDFGGAAGSDVDQEEIVDERAVQDVESLSNLIQEILDFDQAQQIKCFNSKLFLCSICFCEKLGSECMYFLECRHVYCKACLKDYFEIQIRDGQVQCLNCPEPKCPSVATPGQVKELVEAELFARYDRLLLQSSLDLMADVVYCPRPCCQLPVMQEPGCTMGICSSCNFAFCTLCRLTYHGVSPCKVTAEKLMDLRNEYLQADEANKRLLDQRYGKRVIQKALEEMESKEWLEKNSKSCPCCGTPIEKLDGCNKMTCTGCMQYFCWICMGSLSRANPYKHFNDPGSPCFNRLFYAVDVDDDIWEDEVED

SEQ ID NO: 857440 - protein, 498 aa, Homo sapiens; identical to SEQ ID NO: 857424

SEQ ID NO: 857441 - protein, 474 aa, Homo sapiens; identical to SEQ ID NO: 857422

SEQ ID NO: 857442 - protein, 298 aa, Homo sapiens
MSSEDREAQEDELLALASIYDGDEFRKAESVQGGETRIYLDLPQNFKIFVSGNSNECLQNSGFEYTICFLPPLVLNFELPPDYPSSSPPSFTLSGKWLSPTQVKELVEAELFARYDRLLLQSSLDLMADVVYCPRPCCQLPVMQEPGCTMGICSSCNFAFCTLCRLTYHGVSPCKVTAEKLMDLRNEYLQADEANKRLLDQRYGKRVIQKALEEMESKEWLEKNSKSCPCCGTPIEKLDGCNKMTCTGCMQYFCWICMGSLSRANPYKHFNDPGSPCFNRLFYAVDVDDDIWEDEVED

SEQ ID NO: 857443 - protein, 238 aa, Homo sapiens
LKTCYVEEIRGVVLEDRHLWNDSHPLKLGGWRPASLRSWGWVVKELVEAELFARYDRLLLQSSLDLMADVVYCPRPCCQLPVMQEPGCTMGICSSCNFAFCTLCRLTYHGVSPCKVTAEKLMDLRNEYLQADEANKRLLDQRYGKRVIQKALEEMESKEWLEKNSKSCPCCGTPIEKLDGCNKMTCTGCMQYFCWICMGSLSRANPYKHFNDPGSPCFNRLFYAVDVDDDIWEDEVED

SEQ ID NO: 857444 - protein, 124 aa, Homo sapiens
MSSEDREAQEDELLALASIYDGDEFRKAESVQGGETRIYLDLPQNFKIFVSGNSNECLQNSGFEYTICFLPPLVLNFELPPDYPSSSPPSFTLSGKWLSPTQLSALCKHLDTRRTVTWLLLMHL

SEQ ID NO: 857445 - protein, 987 aa, Homo sapiens
MVCSPVTVRIAPPDRRFSRSAIPEQIISSTLSSPSSNAPDPCAKETVLSALKEKKKKRTVEEEDQIFLDGQENKRRRHDSSGSGHSAFEPLVASGVPASFVPKPGSLKRGLNSQSSDDHLNKRSRSSSMSSLTGAYTSGIPSSSRNAITSYNSSTRGISQLWKRNGPSSSPFSSPASSRSQTPERPAKKIREEELCHHSSSSTPLAADKESQGEKAADTTPRKKQNSNSQSTPGSSGQRKRKVQLLPSRRGEQLTLPPPPQLGYSITAEDLDLEKKASLQWFNQALEDKSDAASNSVTETPPTTQPSFTFTLPAAATASPPTSLLAPSTNPLLESLKKMQTPPSLPPCPESAGAATTEALSPPKTPSLLPPLGLSQSGPPGLLPSPSFDSKPPTTLLGLIPAPSMVPATDTKAPPTLQAETATKPQATSAPSPAPKQSFLFGTQNTSPSSPAAPAASSASPMFKPIFTAPPKSEKEGPTPPGPSVTATAPSSSSLPTTTSTTAPTFQPVFSSMGPPASVPLPAPFFKQTTTPATAPTTTAPLFTGLASATSAVAPITSASPSTDSASKPAFGFGINSVSSSSVSTTTSTATAASQPFLFGAPQASAASFTPAMGSIFQFGKPPALPTTTTVTTFSQSLPTAVPTATSSSAADFSGFGSTLATSAPATSSQPTLTFSNTSTPTFNIPFGSSAKSPLPSYPGANPQPAFGAAEGQPPGAAKPALTPSFGSSFTFGNSAAPAPATAPTPAPASTIKIVPAHVPTPIQPTFGGATHSAFGLKATASAFGAPASSQPAFGGSTAVFSFGAATSSGFGATTQTASSGSSSSVFGSTTPSPFTFGGSAAPAGSGSFGINVATPGSSATTGAFSFGAGQSGSTATSTPFTGGLGQNALGTTGQSTPFAFNVGSTTESKPVFGGTATPTFGQNTPAPGVGTSGSSLSFGASSAPAQGFVGVGPFGSAAPSFSIGAGSKTPGARQRLQARRQHTRKK

SEQ ID NO: 857446 - protein, 649 aa, Homo sapiens
MQTPPSLPPCPESAGAATTEALSPPKTPSLLPPLGLSQSGPPGLLPSPSFDSKPPTTLLGLIPAPSMVPATDTKAPPTLQAETATKPQATSAPSPAPKQSFLFGTQNTSPSSPAAPAASSASPMFKPIFTAPPKSEKEGPTPPGPSVTATAPSSSSLPTTTSTTAPTFQPVFSSMGPPASVPLPAPFFKQTTTPATAPTTTAPLFTGLASATSAVAPITSASPSTDSASKPAFGFGINSVSSSSVSTTTSTATAASQPFLFGAPQASAASFTPAMGSIFQFGKPPALPTTTTVTTFSQSLPTAVPTATSSSAADFSGFGSTLATSAPATSSQPTLTFSNTSTPTFNIPFGSSAKSPLPSYPGANPQPAFGAAEGQPPGAAKPALTPSFGSSFTFGNSAAPAPATAPTPAPASTIKIVPAHVPTPIQPTFGGATHSAFGLKATASAFGAPASSQPAFGGSTAVFSFGAATSSGFGATTQTASSGSSSSVFGSTTPSPFTFGGSAAPAGSGSFGINVATPGSSATTGAFSFGAGQSGSTATSTPFTGGLGQNALGTTGQSTPFAFNVGSTTESKPVFGGTATPTFGQNTPAPGVGTSGSSLSFGASSAPAQGFVGVGPFGSAAPSFSIGAGSKTPGARQRLQARRQHTRKK

SEQ ID NO: 857447 - protein, 987 aa, Homo sapiens; identical to SEQ ID NO: 857445

SEQ ID NO: 857448 - protein, 899 aa, Homo sapiens
MLPSIKHLTVFSFIRPGSLKRGLNSQSSDDHLNKRSRSSSMSSLTGAYTSGIPSSSRNAITSYNSSTRGISQLWKRNGPSSSPFSSPASSRSQTPERPAKKIREEELCHHSSSSTPLAADKESQGEKAADTTPRKKQNSNSQSTPGSSGQRKRKVQLLPSRRGEQLTLPPPPQLGYSITAEDLDLEKKASLQWFNQALEDKSDAASNSVTETPPTTQPSFTFTLPAAATASPPTSLLAPSTNPLLESLKKMQTPPSLPPCPESAGAATTEALSPPKTPSLLPPLGLSQSGPPGLLPSPSFDSKPPTTLLGLIPAPSMVPATDTKAPPTLQAETATKPQATSAPSPAPKQSFLFGTQNTSPSSPAAPAASSASPMFKPIFTAPPKSEKEGPTPPGPSVTATAPSSSSLPTTTSTTAPTFQPVFSSMGPPASVPLPAPFFKQTTTPATAPTTTAPLFTGLASATSAVAPITSASPSTDSASKPAFGFGINSVSSSSVSTTTSTATAASQPFLFGAPQASAASFTPAMGSIFQFGKPPALPTTTTVTTFSQSLPTAVPTATSSSAADFSGFGSTLATSAPATSSQPTLTFSNTSTPTFNIPFGSSAKSPLPSYPGANPQPAFGAAEGQPPGAAKPALTPSFGSSFTFGNSAAPAPATAPTPAPASTIKIVPAHVPTPIQPTFGGATHSAFGLKATASAFGAPASSQPAFGGSTAVFSFGAATSSGFGATTQTASSGSSSSVFGSTTPSPFTFGGSAAPAGSGSFGINVATPGSSATTGAFSFGAGQSGSTATSTPFTGGLGQNALGTTGQSTPFAFNVGSTTESKPVFGGTATPTFGQNTPAPGVGTSGSSLSFGASSAPAQGFVGVGPFGSAAPSFSIGAGSKTPGARQRLQARRQHTRKK

SEQ ID NO: 857449 - protein, 987 aa, Homo sapiens; identical to SEQ ID NO: 857445

SEQ ID NO: 857450 - protein, 312 aa, Homo sapiens
MVCSPVTVRIAPPDRRFSRSAIPEQIISSTLSSPSSNAPDPCAKETVLSALKEKKKKRTVEEEDQIFLDGQENKRRRHDSSGSGHSAFEPLVASGVPASFVPKPGSLKRGLNSQSSDDHLNKRSRSSSMSSLTGAYTSGIPSSSRNAITSYNSSTRGISQLWKRNGPSSSPFSSPASSRSQTPERPAKKIREEELCHHSSSSTPLAADKESQGEKAADTTPRKKQNSNSQSTPGSSGQRKRKVQLLPSRRGEQLTLVWSCPSTPALPGLALLSLRNAKDKFLLVFFLTYFCFCFLRQHPSVTQAGVQWLDFG

SEQ ID NO: 857451 - protein, 282 aa, Homo sapiens
PTLGHTRKRRRRPSGKMAPSGLKAVVGEKILSGVIRSVKKDGEWKVLIMDHPSMRILSSCCKMSDILAEGITIVEDINKRREPIPSLEAIYLLSPTEKSVQALIKDFQGTPTFTYKAAHIFFTDTCPEPLFSELGRSRLAKVVKTLKEIHLAFLPYEAQVFSLDAPHSTYNLYCPFRAEERTRQLEVLAQQIATLCATLQEYPAIRYRKGPEDTAQLAHAVLAKLNAFKADTPSLGEGPEKTRSQLLIMDRAADPVSPLLHELTFQAMAYDLAGTIRAREPS

SEQ ID NO: 857452 - protein, 93 aa, Homo sapiens
  misc_feature (7)..(7): Xaa can be any naturally occurring amino acid
IRGRVDXLRADDDGGTGRNEMGVKLEIFRMIIYLTFPVAMFWVSNQAEWFEDDVIQRKRELWPPEKLQEIEEFKERLRKRREEKLLRDAQQNS

SEQ ID NO: 857453 - protein, 129 aa, Homo sapiens
MARYEAGWSGWTPVIKDVMEDAVEDRLDRNLWPFVSDPAPTASSQAAVSARFGHWHKNKAGVEARAGPRLIVYVMGGVAMSEMRAAYEVTRATEGKWEVLIGSSHILTPTRFLDDLKALDKKLEDIALP

SEQ ID NO: 857454 - protein, 248 aa, Homo sapiens
  misc_feature (138)..(138): Xaa can be any naturally occurring amino acid
MERHHKNKHTNKEGEGGAPKNTIPQEGAPTTAAHPLPRRQAAPHTGAAPHKTPRRDARRPKQPPTPENGEHTTPPRAGHTGTTDRPHNSEGGTSNDIVGRQQPPPQRRIFSPRSSARAHNIPHLPLDGETNTLRGRDXTQHPHTRSTTSCGAEVNKPRILRHSPRERKRSYYPSHKTTHIIITTTPARTRCSKCTNTTISRPLEHTQLTETTDRQQSHSHSERRKQISPIRLSLPPVTTKPHIQNQPN

SEQ ID NO: 857455 - protein, 105 aa, Homo sapiens
MEPTYQLSRWTPVIKDVMEDAVEDRLDRNLWPFVSDPAPTASSQAAVSARFGHWHKNKAGVEARAGPRLIVYVMGGVAMSEMRAAYEVTRATEGKWEVLIRLQQH

SEQ ID NO: 857456 - protein, 89 aa, Homo sapiens
GTSSCRIGTRLTGRNEMGVKLEIFRMIIYLTFPVAMFWVSNQAEWFEDDVIQRKRELWPPEKLQEIEEFKERLRKRREEKLLRDAQQNS

SEQ ID NO: 857457 - protein, 924 aa, Homo sapiens
PTLGHTRKRRRRPSGKMAPSGLKAVVGEKILSGVIRSVKKDGEWKVLIMDHPSMRILSSCCKMSDILAEGITIVEDINKRREPIPSLEAIYLLSPTEKSVQALIKDFQGTPTFTYKAAHIFFTDTCPEPLFSELGRSRLAKVVKTLKEIHLAFLPYEAQVFSLDAPHSTYNLYCPFRAEERTRQLEVLAQQIATLCATLQEYPAIRYRKGPEDTAQLAHAVLAKLNAFKADTPSLGEGPEKTRSQLLIMDRAADPVSPLLHELTFQAMAYDLLDIEQDTYRYETTGLSEAREKAVLLDEDDDLWVELRHMHIADVSKKVTELLRTFCESKRLTTDKANIKDLSQILKKMPQYQKELNKYSTHLHLADDCMKHFKGSVEKLCSVEQDLAMGSDAEGEKIKDSMKLIVPVLLDAAVPAYDKIRVLLLYILLRNGVSEENLAKLIQHANVQAHSSLIRNLEQLGGTVTNPGVRQERAWGDPGRGCGSQPGLCKADGPSGAQARCGSWRGVVAGRPKAVFRVWSGAQRTLGPLPVPAYTIGRGSETWSLPGWSWQWCSWERVVWVLEAGSRVPSMGATPHCLSGLPGVSEGPPHPSSTHTQPCVCLTLGSASPVSLWPCASPSRVPSPRPHLSPIPHPSRCALFLHISLSHPSLCLPLSLCSLSCSPPLSVPLLSPSSSLCFLLHLLSLSLPSYFVSLLLISLPISASVFVFLWLALSPFGFLSPSLSGSLFLSLAFLLSLALSRSLFHFPIFACHPPPYQPHQAQPLCDQPPSPQSPCCPPCPACEGSGTSSRLEPRERMEPTYQLSRWTPVIKDVMEDAVEDRLDRNLWPFVSDPAPTASSQAAVSARFGHWHKNKAGVEARAGPRLIVYVMGGVAMSEMRAAYEVTRATEGKWEVLIGSSHILTPTRFLDDLKALDKKLEDIALP

SEQ ID NO: 857458 - protein, 644 aa, Homo sapiens
PTLGHTRKRRRRPSGKMAPSGLKAVVGEKILSGVIRSVKKDGEWKVLIMDHPSMRILSSCCKMSDILAEGITIVEDINKRREPIPSLEAIYLLSPTEKSVQALIKDFQGTPTFTYKAAHIFFTDTCPEPLFSELGRSRLAKVVKTLKEIHLAFLPYEAQVFSLDAPHSTYNLYCPFRAEERTRQLEVLAQQIATLCATLQEYPAIRYRKGPEDTAQLAHAVLAKLNAFKADTPSLGEGPEKTRSQLLIMDRAADPVSPLLHELTFQAMAYDLLDIEQDTYRYETTGLSEAREKAVLLDEDDDLWVELRHMHIADVSKKVTELLRTFCESKRLTTDKANIKDLSQILKKMPQYQKELNKYSTHLHLADDCMKHFKGSVEKLCSVEQDLAMGSDAEGEKIKDSMKLIVPVLLDAAVPAYDKIRVLLLYILLRNGVSEENLAKLIQHANVQAHSSLIRNLEQLGGTVTNPGGSGTSSRLEPRERMEPTYQLSRWTPVIKDVMEDAVEDRLDRNLWPFVSDPAPTASSQAAVSEAPGPPPPTPGSVLGGRPGSGEGLLPGLSAPALHSARFGHWHKNKAGVEARAGPRLIVYVMGGVAMSEMRAAYEVTRATEGKWEVLIGSSHILTPTRFLDDLKALDKKLEDIALP

SEQ ID NO: 857459 - protein, 561 aa, Homo sapiens [sequence omitted]

SEQ ID NO: 857460 - protein, 571 aa, Homo sapiens
PPKSNCRQFLCSCPLGLPKLVPDNSLGLEEAIHQFVEDINKRREPIPSLEAIYLLSPTEKSVQALIKDFQGTPTFTYKAAHIFFTDTCPEPLFSELGRSRLAKVVKTLKEIHLAFLPYEAQVFSLDAPHSTYNLYCPFRAEERTRQLEVLAQQIATLCATLQEYPAIRYRKGPEDTAQLAHAVLAKLNAFKADTPSLGEGPEKTRSQLLIMDRAADPVSPLLHELTFQAMAYDLLDIEQDTYRYETTGLSEAREKAVLLDEDDDLWVELRHMHIADVSKKVTELLRTFCESKRLTTDKANIKDLSQILKKMPQYQKELNKYSTHLHLADDCMKHFKGSVEKLCSVEQDLAMGSDAEGEKIKDSMKLIVPVLLDAAVPAYDKIRVLLLYILLRNGVSEENLAKLIQHANVQAHSSLIRNLEQLGGTVTNPGGSGTSSRLEPRERMEPTYQLSRWTPVIKDVMEDAVEDRLDRNLWPFVSDPAPTASSQAAVSARFGHWHKNKAGVEARAGPRLIVYVMGGVAMSEMRAAYEVTRATEGKWEVLIGSSHILTPTRFLDDLKALDKKLEDIALP

SEQ ID NO: 857461 - protein, 559 aa, Homo sapiens
PTLGHTRKRRRRPSGKMAPSGLKAVVGEKILSGVIRSVKKDGEWKVLIMDHPSMRILSSCCKMSDILAEGITIVEDINKRREPIPSLEAIYLLSPTEKSVQALIKDFQGTPTFTYKAAHIFFTDTCPEPLFSELGRSRLAKVVKTLKEIHLAFLPYEAQVFSLDAPHSTYNLYCPFRAEERTRQLEVLAQQIATLCATLQEYPAIRYRKGPEDTAQLAHAVLAKLNAFKADTPSLGEGPEKTRSQLLIMDRAADPVSPLLHELTFQAMAYDLLDIEQDTYRYETTGLSEAREKAVLLDEDDDLWVELRHMHIADVSKKVTELLRTFCESKRLTTDKANIKDLSQILKKMPQYQKELNKYSTHLHLADDCMKHFKGSVEKLCSVEQDLAMGSDAEGEKIKDSMKLIVPVLLDAAVPAYDKIRVLLLYILLRNGVSEENLAKLIQHANVQAHSSLIRNLEQLGGTVTNPGVRQERAWGDPGRGCGSQPGLCKADGPSGAQARCGSWRGVVAGRPKAVFRVWSGAQRTLGPLPVPAYTIGRGSETWSLPGWSWQWCSWERVV

SEQ ID NO: 857462 - protein, 361 aa, Homo sapiens [sequence omitted]

SEQ ID NO: 857463 - protein, 346 aa, Homo sapiens
SVLEVPRKGDIEGGHEYRYETTGLSEAREKAVLLDEDDDLWVELRHMHIADVSKKVTELLRTFCESKRLTTDKANIKDLSQILKKMPQYQKELNKYSTHLHLADDCMKHFKGSVEKLCSVEQDLAMGSDAEGEKIKDSMKLIVPVLLDAAVPAYDKIRVLLLYILLRNGVSEENLAKLIQHANVQAHSSLIRNLEQLGGTVTNPGGSGTSSRLEPRERMEPTYQLSRWTPVIKDVMEDAVEDRLDRNLWPFVSDPAPTASSQAAVSARFGHWHKNKAGVEARAGPRLIVYVMGGVAMSEMRAAYEVTRATEGKWEVLIGSSHILTPTRFLDDLKALDKKLEDIALP

SEQ ID NO: 857464 - protein, 85 aa, Homo sapiens
MSSSALLSLRNEMGVKLEIFRMIIYLTFPVAMFWVSNQAEWFEDDVIQRKRELWPPEKLQEIEEFKERLRKRREEKLLRDAQQNS

SEQ ID NO: 857465 - protein, 536 aa, Homo sapiens
MGSDAEGEKIKDSMKLIVPVLLDAAVPAYDKIRVLLLYILLRNGVSEENLAKLIQHANVQAHSSLIRNLEQLGGTVTNPGVRQERAWGDPGRGCGSQPGLCKADGPSGAQARCGSWRGVVAGRPKAVFRVWSGAQRTLGPLPVPAYTIGRGSETWSLPGWSWQWCSWERVVWVLEAGSRVPSMGATPHCLSGLPGVSEGPPHPSSTHTQPCVCLTLGSASPVSLWPCASPSRVPSPRPHLSPIPHPSRCALFLHISLSHPSLCLPLSLCSLSCSPPLSVPLLSPSSSLCFLLHLLSLSLPSYFVSLLLISLPISASVFVFLWLALSPFGFLSPSLSGSLFLSLAFLLSLALSRSLFHFPIFACHPPPYQPHQAQPLCDQPPSPQSPCCPPCPACEGSGTSSRLEPRERMEPTYQLSRWTPVIKDVMEDAVEDRLDRNLWPFVSDPAPTASSQAAVSARFGHWHKNKAGVEARAGPRLIVYVMGGVAMSEMRAAYEVTRATEGKWEVLIGSSHILTPTRFLDDLKALDKKLEDIALP

SEQ ID NO: 857466 - protein, 248 aa, Homo sapiens; identical to SEQ ID NO: 857454
  misc_feature (138)..(138): Xaa can be any naturally occurring amino acid

SEQ ID NO: 857467 - protein, 68 aa, Homo sapiens
MSSSALLSLRNEMGVKLEIFRMIIYLTFPVAMFWVSNQAEWFEDDVIQRKRELWPPEKAMSKEPRAEE

SEQ ID NO: 857468 - protein, 80 aa, Homo sapiens
MSSSALLSLRNEMGVKLEIFRMIIYLTFPVAMFWVSNQAEWFEDDVIQRKRELWPPEKVSDLFFLPEGWRRLDSCIRDGF

SEQ ID NO: 857469 - protein, 609 aa, Homo sapiens
PTLGHTRKRRRRPSGKMAPSGLKAVVGEKILSGVIRSVKKDGEWKVLIMDHPSMRILSSCCKMSDILAEGITIVEDINKRREPIPSLEAIYLLSPTEKSVQALIKDFQGTPTFTYKAAHIFFTDTCPEPLFSELGRSRLAKVVKTLKEIHLAFLPYEAQVFSLDAPHSTYNLYCPFRAEERTRQLEVLAQQIATLCATLQEYPAIRYRKGPEDTAQLAHAVLAKLNAFKADTPSLGEGPEKTRSQLLIMDRAADPVSPLLHELTFQAMAYDLLDIEQDTYRYETTGLSEAREKAVLLDEDDDLWVELRHMHIADVSKKVTELLRTFCESKRLTTDKANIKDLSQILKKMPQYQKELNKYSTHLHLADDCMKHFKGSVEKLCSVEQDLAMGSDAEGEKIKDSMKLIVPVLLDAAVPAYDKIRVLLLYILLRNGVSEENLAKLIQHANVQAHSSLIRNLEQLGGTVTNPGGSGTSSRLEPRERMEPTYQLSRWTPVIKDVMEDAVEDRLDRNLWPFVSDPAPTASSQAAVSARFGHWHKNKAGVEARAGPRLIVYVMGGVAMSEMRAAYEVTRATEGKWEVLIGSSHILTPTRFLDDLKALDKKLEDIALP

SEQ ID NO: 857470 - protein, 89 aa, Homo sapiens
EGRLWAELALLTGRNEMGVKLEIFRMIIYLTFPVAMFWVSNQAEWFEDDVIQRKRELWPPEKLQEIEEFKERLRKRREEKLLRDAQQNS

SEQ ID NO: 857471 - protein, 89 aa, Homo sapiens; identical to SEQ ID NO: 857470

SEQ ID NO: 857472 - protein, 68 aa, Homo sapiens
PHLGTHPEAAAAPLGEDGALGAEGGGGGKNSERSYSECQEGWGVEGAYHGSPKHAHLVFLLQNVRYPG

SEQ ID NO: 857473 - protein, 93 aa, Homo sapiens; identical to SEQ ID NO: 857452
  misc_feature (7)..(7): Xaa can be any naturally occurring amino acid

SEQ ID NO: 857474 - protein, 619 aa, Homo sapiens
PTLGHTRKRRRRPSGKMAPSGLKAVVGEKILSGVIRSVKKDGEWKVLIMDHPSMRILSSCCKMSDILAEGITIVEDINKRREPIPSLEAIYLLSPTEKSVQALIKDFQGTPTFTYKAAHIFFTDTCPEPLFSELGRSRLAKVVKTLKEIHLAFLPYEAQVFSLDAPHSTYNLYCPFRAEERTRQLEVLAQQIATLCATLQEYPAIRYRKGPEDTAQLAHAVLAKLNAFKADTPSLGEGPEKTRSQLLIMDRAADPVSPLLHELTFQAMAYDLLDIEQDTYRYETTGLSEAREKAVLLDEDDDLWVELRHMHIADVSKKVTELLRTFCESKRLTTDKANIKDLSQILKKMPQYQKELNKYSTHLHLADDCMKHFKGSVEKLCSVEQDLAMGSDAEGEKIKDSMKLIVPVLLDAAVPAYDKIRVLLLYILLRNGVSEENLAKLIQHANVQAHSSLIRNLEQLGGTVTNPGGSGTSSRLEPRERMEPTYQLSRWTPVIKDVMEDAVEDRLDRNLWPFVSDPAPTASSQAAVSARFGHWHKNKAGVEARAGPRLIVYVMGGVAMSEMRAAYEVTRATEGKWEVLIGKSPGLGPWALGLGFPGPGLVPSRCLDSRVLGVRDLVC

SEQ ID NO: 857475 - protein, 542 aa, Homo sapiens
PTLGHTRKRRRRPSGKMAPSGLKAVVGEKILSGVIRSVKKDGEWKVLIMDHPSMRILSSCCKMSDILAEGITIVEDINKRREPIPSLEAIYLLSPTEKSVQALIKDFQGTPTFTYKAAHIFFTDTCPEPLFSELGRSRLAKVVKTLKEIHLAFLPYEAQVFSLDAPHSTYNLYCPFRAEERTRQLEVLAQQIATLCATLQEYPAIRYRKGPEDTAQLAHAVLAKLNAFKADTPSLGEGPEKTRSQLLIMDRAADPVSPLLHELTFQAMAYDLLDIEQDTYRYETTGLSEAREKAVLLDEDDDLWVELRHMHIADVSKKVTELLRTFCESKRLTTDKANIKDLSQILKKMPQYQKELNKYSTHLHLADDCMKHFKGSVEKLCSVEQDLAMGSDAEGEKIKDSMKLIVPVLLDAAVPAYDKIRVLLLYILLRNGVSEENLAKLIQHANVQAHSSLIRNLEQLGGTVTNPGGSGTSSRLEPRERMEPTYQLSRWTPVIKDVMEDAVEDRLDRNLWPFVSDPAPTASSQAAVAPHTSSPRPASWMT

SEQ ID NO: 857476 - protein, 718 aa, Homo sapiens
MRVHVHVCVCLHACDCMCACVYVCMCPCVCVCMCVHVCVHLCMHVCACLHVCLCMCLCACACVCVCVCICVCVCMRVCMRLCMCVCVCVRISVCMCVYVCMYVCARICVCACVYVCVCISVCACVYVCVHLCVCACVHACVCVCACVHLCVCACAHVGATLVCICTYTCPRPSMFAHGGRWGVAGRPRQPMSLGVQAQAQRVIHLPQSVQALIKDFQGTPTFTYKAAHIFFTDTCPEPLFSELGRSRLAKVVKTLKEIHLAFLPYEAQVFSLDAPHSTYNLYCPFRAEERTRQLEVLAQQIATLCATLQEYPAIRYRKGPEDTAQLAHAVLAKLNAFKADTPSLGEGPEKTRSQLLIMDRAADPVSPLLHELTFQAMAYDLLDIEQDTYRYETTGLSEAREKAVLLDEDDDLWVELRHMHIADVSKKVTELLRTFCESKRLTTDKANIKDLSQILKKMPQYQKELNKYSTHLHLADDCMKHFKGSVEKLCSVEQDLAMGSDAEGEKIKDSMKLIVPVLLDAAVPAYDKIRVLLLYILLRNGVSEENLAKLIQHANVQAHSSLIRNLEQLGGTVTNPGGSGTSSRLEPRERMEPTYQLSRWTPVIKDVMEDAVEDRLDRNLWPFVSDPAPTASSQAAVSARFGHWHKNKAGVEARAGPRLIVYVMGGVAMSEMRAAYEVTRATEGKWEVLIGSSHILTPTRFLDDLKALDKKLEDIALP

SEQ ID NO: 857477 - protein, 478 aa, Homo sapiens
YRLGTRLCGDIGRGLKEIHLAFLPYEAQVFSLDAPHSTYNLYCPFRAEERTRQLEVLAQQIATLCATLQEYPAIRYRKGPEDTAQLAHAVLAKLNAFKADTPSLGEGPEKTRSQLLIMDRAADPVSPLLHELTFQAMAYDLLDIEQDTYRYETTGLSEAREKAVLLDEDDDLWVELRHMHIADVSKKVTELLRTFCESKRLTTDKANIKDLSQILKKMPQYQKELNKYSTHLHLADDCMKHFKGSVEKLCSVEQDLAMGSDAEGEKIKDSMKLIVPVLLDAAVPAYDKIRVLLLYILLRNGVSEENLAKLIQHANVQAHSSLIRNLEQLGGTVTNPGGSGTSSRLEPRERMEPTYQLSRWTPVIKDVMEDAVEDRLDRNLWPFVSDPAPTASSQAAVSARFGHWHKNKAGVEARAGPRLIVYVMGGVAMSEMRAAYEVTRATEGKWEVLIGSSHILTPTRFLDDLKALDKKLEDIALP

SEQ ID NO: 857478 - protein, 410 aa, Homo sapiens
MSPVSDLPARGPEDTAQLAHAVLAKLNAFKADTPSLGEGPEKTRSQLLIMDRAADPVSPLLHELTFQAMAYDLLDIEQDTYRYETTGLSEAREKAVLLDEDDDLWVELRHMHIADVSKKVTELLRTFCESKRLTTDKANIKDLSQILKKMPQYQKELNKYSTHLHLADDCMKHFKGSVEKLCSVEQDLAMGSDAEGEKIKDSMKLIVPVLLDAAVPAYDKIRVLLLYILLRNGVSEENLAKLIQHANVQAHSSLIRNLEQLGGTVTNPGGSGTSSRLEPRERMEPTYQLSRWTPVIKDVMEDAVEDRLDRNLWPFVSDPAPTASSQAAVSARFGHWHKNKAGVEARAGPRLIVYVMGGVAMSEMRAAYEVTRATEGKWEVLIGSSHILTPTRFLDDLKALDKKLEDIALP

SEQ ID NO: 857479 - protein, 221 aa, Homo sapiens [sequence omitted]

SEQ ID NO: 857480 - protein, 144 aa, Homo sapiens
FLSARILAPEYPVGGTPDPGPHAWGSSPNLPLGRQDAVEDRLDRNLWPFVSDPAPTASSQAAVSARFGHWHKNKAGVEARAGPRLIVYVMGGVAMSEMRAAYEVTRATEGKWEVLIGSSHILTPTRFLDDLKALDKKLEDIALP

SEQ ID NO: 857481 - protein, 89 aa, Homo sapiens; identical to SEQ ID NO: 857470

SEQ ID NO: 857482 - protein, 248 aa, Homo sapiens; identical to SEQ ID NO: 857454
  misc_feature (138)..(138): Xaa can be any naturally occurring amino acid

SEQ ID NO: 857483 - protein, 500 aa, Homo sapiens
MPSGLRAPLPGPGVPDDARAADAGGGEEAGQVRDFNPEPRPSGVQNRSLGPGCVREEGSSCLVAYKKTPPPVPPRTTSKPFISVTVQSSTESAQDTYLDSQDHKSEVTSQSGLSNSSDSLDSSTRPPSVTRGGVAPAPEAPEPPPKHAALKSEQGTLTSSESHPEAAPKRKLSSIGIQVDCIQPVPKEEPSPATKFQSIGVQVEDDWRSSVPSHSMSSRRDTDSDTQDANDSSCKSSERSLPDCTPHPNSISIDAGPRQAPKIAQIKRNLSYGDNSDPALEASSLPPPDPWLETSSSSPAEPAQPGACRRDGYWFLKLLQAETERLEGWCCQMDKETKENNLSEEVLGKVLSAVGSAQLLMSQKFQQFRGLCEQNLNPDANPRPTAQDLAGFWDLLQLSIEDISMKFDELYHLKANSWQLVETPEKRKEEKKPPPPVPKKPAKSKPAVSRDKASDASDKQRQEARKRLLAAKRAASVRQNSATESADSIEIYVPEAQTRL

SEQ ID NO: 857484 - protein, 453 aa, Homo sapiens
MALCLELLKQCSSCLVAYKKTPPPVPPRTTSKPFISVTVQSSTESAQDTYLDSQDHKSEVTSQSGLSNSSDSLDSSTRPPSVTRGGVAPAPEAPEPPPKHAALKSEQGTLTSSESHPEAAPKRKLSSIGIQVDCIQPVPKEEPSPATKFQSIGVQVEDDWRSSVPSHSMSSRRDTDSDTQDANDSSCKSSERSLPDCTPHPNSISIDAGPRQAPKIAQIKRNLSYGDNSDPALEASSLPPPDPWLETSSSSPAEPAQPGACRRDGYWFLKLLQAETERLEGWCCQMDKETKENNLSEEVLGKVLSAVGSAQLLMSQKFQQFRGLCEQNLNPDANPRPTAQDLAGFWDLLQLSIEDISMKFDELYHLKANSWQLVETPEKRKEEKKPPPPVPKKPAKSKPAVSRDKASDASDKQRQEARKRLLAAKRAASVRQNSATESADSIEIYVPEAQTRL

SEQ ID NO: 857485 - protein, 453 aa, Homo sapiens; identical to SEQ ID NO: 857484

SEQ ID NO: 857486 - protein, 628 aa, Homo sapiens
MALCLELLKQCSSCLVAYKKTPPPVPPRTTSKPFISVTVQSSTESAQDTYLDSQDHKSEVTSQSGLSNSSDSLDSSTRPPSVTRGGVAPAPEAPEPPPKHAALKSEQGTLTSSESHPEAAPKRKLSSIGIQVDCIQPVPKEEPSPATKFQSIGVQVEDDWRVSRTEVAAASPLSSPSLRSHLSCSPYPTSPCWISNNQAGFGLRVVAQAWEAGQGRAGGQMSICSVRPVTHGGHGWARNMASAALMLVVFLAPLQYTGNLMTLSSCVCACGLGRDGARAEPRMRWGLWDPLQAHGEQMMHPSSLSPVCPGQGGLWSLALLVTHSFLSPPHPPPTHRSSVPSHSMSSRRDTDSDTQDANDSSCKSSERSLPDCTPHPNSISIDAGPRQAPKIAQIKRNLSYGDNSDPALEASSLPPPDPWLETSSSSPAEPAQPGACRRDGYWFLKLLQAETERLEGWCCQMDKETKENNLSEEVLGKVLSAVGSAQLLMSQKFQQFRGLCEQNLNPDANPRPTAQDLAGFWDLLQLSIEDISMKFDELYHLKANSWQLVETPEKRKEEKKPPPPVPKKPAKSKPAVSRDKASDASDKQRQEARKRLLAAKRAASVRQNSATESADSIEIYVPEAQTRL

SEQ ID NO: 857487 - protein, 992 aa, Homo sapiens
MKGLGDSRPRHLSDSLDPPHEPLFAGTDRNPYLLSPTEAFAREARFPGQNTLPGDGLFPLNNQLPPPSSTFPRIHYNSHFEVPEESPFPSHAQATKINRLPANLLDQFEKQLPIHRDGFSTLQFPRGEAKARGESPGRIRHLVHSVQRLFFTKAPSLEGTAGKVGGNGSKKGGMEDGKGRRAKSKERAKAGEPKRRSRSNISGWWSSDDNLDGEAGAFRSSGPASGLMILGRQAERSQPRYFMHAYNTISGHMLKTTKNNTTELTAPPPPPAPPATCPSLGVGTDTNYVKRGSWSTLTLSHAHEVCQKTSATLDKSLLKSKSCHQGLAYHYLQVPGGGGEWSTTLLSPRETDAAAEGPIPCRRMRSGSYIKAMGDEDSDESGGSPKPSPKTAARRQSYLRATQQSLGEQSNPRRSLDRLDSVDMLLPSKCPSWEEDYTPVSDSLNDSSCISQIFGQASLIPQLFGHEQQVREAELSDQYEAACESACSEAESTAAETLDLPLPSYFRSRSHSYLRAIQAGCSQEEDSVSLQSLSPPPSTGSLSNSRTLPSSSCLVAYKKTPPPVPPRTTSKPFISVTVQSSTESAQDTYLDSQDHKSEVTSQSGLSNSSDSLDSSTRPPSVTRGGVAPAPEAPEPPPKHAALKSEQGTLTSSESHPEAAPKRKLSSIGIQVDCIQPVPKEEPSPATKFQSIGVQVEDDWRSSVPSHSMSSRRDTDSDTQDANDSSCKSSERSLPDCTPHPNSISIDAGPRQAPKIAQIKRNLSYGDNSDPALEASSLPPPDPWLETSSSSPAEPAQPGACRRDGYWFLKLLQAETERLEGWCCQMDKETKENNLSEEVLGKVLSAVGSAQLLMSQKFQQFRGLCEQNLNPDANPRPTAQDLAGFWDLLQLSIEDISMKFDELYHLKANSWQLVETPEKRKEEKKPPPPVPKKPAKSKPAVSRDKASDASDKQRQEARKRLLAAKRAASVRQNSATESADSIEIYVPEAQTRL

SEQ ID NO: 857488 - protein, 451 aa, Homo sapiens
QWSSPCFTGSSCLVAYKKTPPPVPPRTTSKPFISVTVQSSTESAQDTYLDSQDHKSEVTSQSGLSNSSDSLDSSTRPPSVTRGGVAPAPEAPEPPPKHAALKSEQGTLTSSESHPEAAPKRKLSSIGIQVDCIQPVPKEEPSPATKFQSIGVQVEDDWRSSVPSHSMSSRRDTDSDTQDANDSSCKSSERSLPDCTPHPNSISIDAGPRQAPKIAQIKRNLSYGDNSDPALEASSLPPPDPWLETSSSSPAEPAQPGACRRDGYWFLKLLQAETERLEGWCCQMDKETKENNLSEEVLGKVLSAVGSAQLLMSQKFQQFRGLCEQNLNPDANPRPTAQDLAGFWDLLQLSIEDISMKFDELYHLKANSWQLVETPEKRKEEKKPPPPVPKKPAKSKPAVSRDKASDASDKQRQEARKRLLAAKRAASVRQNSATESADSIEIYVPEAQTRL

SEQ ID NO: 857489 - protein, 285 aa, Homo sapiens
MSSRRDTDSDTQDANDSSCKSSERSLPDCTPHPNSISIDAGPRQAPKIAQIKRNLSYGDNSDPALEASSLPPPDPWLETSSSSPAEPAQPGACRRDGYWFLKLLQAETERLEGWCCQMDKETKENNLSEEVLGKVLSAVGSAQLLMSQKFQQFRGLCEQNLNPDANPRPTAQDLAGFWDLLQLSIEDISMKFDELYHLKANSWQLVETPEKRKEEKKPPPPVPKKPAKSKPAVSRDKASDASDKQRQEARKRLLAAKRAASVRQNSATESADSIEIYVPEAQTRL

SEQ ID NO: 857490 - protein, 323 aa, Homo sapiens
MRVKERTRRNGSHLSEDNGPKAIDVMAPSSESSVPSHSMSSRRDTDSDTQDANDSSCKSSERSLPDCTPHPNSISIDAGPRQAPKIAQIKRNLSYGDNSDPALEASSLPPPDPWLETSSSSPAEPAQPGACRRDGYWFLKLLQAETERLEGWCCQMDKETKENNLSEEVLGKVLSAVGSAQLLMSQKFQQFRGLCEQNLNPDANPRPTAQDLAGFWDLLQLSIEDISMKFDELYHLKANSWQLVETPEKRKEEKKPPPPVPKKPAKSKPAVSRDKASDASDKQRQEARKRLLAAKRAASVRQNSATESADSIEIYVPEAQTRL

SEQ ID NO: 857491 - protein, 281 aa, Homo sapiens
LKFHVRGLGSVVHSLYLVVDYLPDCTPHPNSISIDAGPRQAPKIAQIKRNLSYGDNSDPALEASSLPPPDPWLETSSSSPAEPAQPGACRRDGYWFLKLLQAETERLEGWCCQMDKETKENNLSEEVLGKVLSAVGSAQLLMSQKFQQFRGLCEQNLNPDANPRPTAQDLAGFWDLLQLSIEDISMKFDELYHLKANSWQLVETPEKRKEEKKPPPPVPKKPAKSKPAVSRDKASDASDKQRQEARKRLLAAKRAASVRQNSATESADSIEIYVPEAQTRL

SEQ ID NO: 857492 - protein, 453 aa, Homo sapiens; identical to SEQ ID NO: 857484

SEQ ID NO: 857493 - protein, 245 aa, Homo sapiens
PPARPPARASVLSSRQSSSPCPRSARFVSPRLAVSLSLPSRSSAAPPSLPISGPLLRALFSPQSRPFWATPLFGTPPQSAPRSFGVPLENTFHSPQGLPVSFLHILWGFCTPSRWGLASSEPPLPLGFPSSGCSPYPLGAPRSQVGVFLLGTPQYVLSSLTSGAPLCFPLVCPLSLSLLVLSQVSEHPHFSGSGSPALLSLPLCAPTSVSVVSPLCATLMPTHAPQPRTWQGSGTCYSCPSRISA

SEQ ID NO: 857494 - protein, 245 aa, Homo sapiens; identical to SEQ ID NO: 857493

SEQ ID NO: 857495 - protein, 159 aa, Homo sapiens
  misc_feature (30)..(30): Xaa can be any naturally occurring amino acid
PEPSSLGETAPGDMTCGSWKWDREAQPHSXPGPREISGNRLGKSPPTGTPTPPSLTRTHTHADGGASLGGAPPALGSVRQDSLTAEQMREVLVLAGGNETKPQLSHSRLLPFYFLQPLLPSAKSRTPEWLPGGRQSSAAPVSGARGAGGGVCMYVYICT

SEQ ID NO: 857496 - protein, 186 aa, Homo sapiens
MALCLELLKQCSSCLVAYKKTPPPVPPRTTSKPFISVTVQSSTESAQDTYLDSQDHKSEVTSQSGLSNSSDSLDSSTRPPSVTRGGVAPAPEAPEPPPKHAALKSEQGTLTSSESHPEAAPKRKLSSIGIQVDCIQPVPKEEPSPATKFQSIGVQVEDDWRVSRTEVAAASPLSSPSLRSHLSCSP

SEQ ID NO: 857497 - protein, 196 aa, Homo sapiens
MALCLELLKQCSSCLVAYKKTPPPVPPRTTSKPFISVTVQSSTESAQDTYLDSQDHKSEVTSQSGLSNSSDSLDSSTRPPSVTRGGVAPAPEAPEPPPKHAALKSEQGTLTSSESHPEAAPKRKLSSIGIQVDCIQPVPKEEPSPATKFQSIGVQVEDDWRGKQGPSSKMFSGGTRLGSPEPRSREALRGSPEDLT

SEQ ID NO: 857498 - protein, 989 aa, Homo sapiens
MKGLGDSRPRHLSDSLDPPHEPLFAGTDRNPYLLSPTEAFAREARFPGQNTLPGDGLFPLNNQLPPPSSTFPRIHYNSHFEVPEESPFPSHAQATKINRLPANLLDQFEKQLPIHRDGFSTLQFPRGEAKARGESPGRIRHLVHSVQRLFFTKAPSLEGTAGKVGGNGSKKGGMEDGKGRRAKSKERAKAGEPKRRSRSNISGWWSSDDNLDGEAGAFRSSGPASGLMILGRQAERSQPRYFMHAYNTISGHMLKTTKNNTTELTAPPPPPAPPATCPSLGVGTDTNYVKRGSWSTLTLSHAHEVCQKTSATLDKSLLKSKSCHQGLAYHYLQVPGGGGEWSTTLLSPRETDAAAEGPIPCRRMRSGSYIKAMGDEDSDESGGSPKPSPKTAARRQSYLRATQQSLGEQSNPRRSLDRLDSVDMLLPSKCPSWEEDYTPVSDSLNDSSCISQIFGQASLIPQLFGHEQQVREAELSDQYEAACESACSEAESTAAETLDLPLPSYFRSRSHSYLRAIQAGCSQEEDSVSLQSLSPPPSTGSLSNSRTLPSSSCLVAYKKTPPPVPPRTTSKPFISVTVQSSTESAQDTYLDSQDHKSEVTSQSGLSNSSDSLDSSTRPPSVTRGGVAPAPEAPEPPPKHAALKSEQGTLTSSESHPEAAPKRKLSSIGIQERTRRNGSHLSEDNGPKAIDVMAPSSESSVPSHSMSSRRDTDSDTQDANDSSCKSSERSLPDCTPHPNSISIDAGPRQAPKIAQIKRNLSYGDNSDPALEASSLPPPDPWLETSSSSPAEPAQPGACRRDGYWFLKLLQAETERLEGWCCQMDKETKENNLSEEVLGKVLSAVGSAQLLMSQKFQQFRGLCEQNLNPDANPRPTAQDLAGFWDLLQLSIEDISMKFDELYHLKANSWQLVETPEKRKEEKKPPPPVPKKPAKSKPAVSRDKASDASDKQRQEARKRLLAAKRAASVRQNSATESADSIEIYVPEAQTRL

SEQ ID NO: 857499 - protein, 453 aa, Homo sapiens; identical to SEQ ID NO: 857484

SEQ ID NO: 857500 - protein, 453 aa, Homo sapiens; identical to SEQ ID NO: 857484

SEQ ID NO: 857501 - protein, 464 aa, Homo sapiens
MALCLELLKQCSSCLVAYKKTPPPVPPRTTSKPFISVTVQSSTESAQDTYLDSQDHKSEVTSQSGLSNSSDSLDSSTRPPSVTRGGVAPAPEAPEPPPKHAALKSEQGTLTSSESHPEAAPKRKLSSIGIQVDCIQPVPKEEPSPATKFQSIGVQVEDDWRSSVPSHSMSSRRDTDSDTQDANDSSCKSSERSLPDCTPHPNSISIDAGPRQAPKIAQIKRNLSYGDNSDPALEASSLPPPDPWLETSSSSPAEPAQPGACRRDGYWFLKLLQAETERLGAREGGPFFGGEGWCCQMDKETKENNLSEEVLGKVLSAVGSAQLLMSQKFQQFRGLCEQNLNPDANPRPTAQDLAGFWDLLQLSIEDISMKFDELYHLKANSWQLVETPEKRKEEKKPPPPVPKKPAKSKPAVSRDKASDASDKQRQEARKRLLAAKRAASVRQNSATESADSIEIYVPEAQTRL

SEQ ID NO: 857502 - protein, 285 aa, Homo sapiens; identical to SEQ ID NO: 857489

SEQ ID NO: 857503 - protein, 285 aa, Homo sapiens; identical to SEQ ID NO: 857489

SEQ ID NO: 857504 - protein, 285 aa, Homo sapiens; identical to SEQ ID NO: 857489

SEQ ID NO: 857505 - protein, 331 aa, Homo sapiens
QWSSPCFTGSSCLVAYKKTPPPVPPRTTSKPFISVTVQSSTESAQDTYLDSQDHKSEVTSQSGLSNSSDSLDSSTRPPSNSISIDAGPRQAPKIAQIKRNLSYGDNSDPALEASSLPPPDPWLETSSSSPAEPAQPGACRRDGYWFLKLLQAETERLEGWCCQMDKETKENNLSEEVLGKVLSAVGSAQLLMSQKFQQFRGLCEQNLNPDANPRPTAQDLAGFWDLLQLSIEDISMKFDELYHLKANSWQLVETPEKRKEEKKPPPPVPKKPAKSKPAVSRDKASDASDKQRQEARKRLLAAKRAASVRQNSATESADSIEIYVPEAQTRL

SEQ ID NO: 857506 - protein, 156 aa, Homo sapiens
NGICPSPLLERSRSLGLLSAPVPSALPTVSHRFSWLPDSKCVLLVPDAGRLGWRLQLPAYGGGSATQNVAPLFYFCSLLTVSLKEEKKPPPPVPKKPAKSKPAVSRDKASDASDKQRQEARKRLLAAKRAASVRQNSATESADSIEIYVPEAQTRL

SEQ ID NO: 857507 - protein, 101 aa, Homo sapiens
  misc_feature (8)..(8): Xaa can be any naturally occurring amino acid
  misc_feature (13)..(13): Xaa can be any naturally occurring amino acid
  misc_feature (16)..(16): Xaa can be any naturally occurring amino acid
FFFCTVAXEKPLXRSXLVFSLFPSELTQWSPLWQAAFWVSALSAVEGPEDREMDMRPLPPPAKCSHTTSRAHTHTQMEAPHWEVPRQPWAVSGRTHSPLSR

SEQ ID NO: 857508 - protein, 365 aa, Homo sapiens
MALCLELLKQCSSCLVAYKKTPPPVPPRTTSKPFISVTVQSSTESAQDTYLDSQDHKSEVTSQSGLSNSSDSLDSSTRPPSVTRGGVAPAPEAPEPPPKHAALKSEQGTLTSSESHPEAAPKRKLSSIGIQVDCIQPVPKEEPSPATKFQSIGVQVEDDWRSSVPSHSMSSRRDTDSDTQDANDSSCKSSERSLPDCTPHPNSISIDAGPRQAPKIAQIKRNLSYGDNSDPALEASSLPPPDPWLETSSSSPAEPAQPGACRRDGYWFLKLLQAETERLEGWCCQMDKETKENNLSEEVLRTQSSVLWAVPSYWMSQKIPARSRASVDKIEPDANKRTRPGPGRGLGLHTRGPRLYGKVSSTPPP

SEQ ID NO: 857509 - protein, 190 aa, Homo sapiens
MALCLELLKQCSSCLVAYKKTPPPVPPRTTSKPFISVTVQSSTESAQDTYLDSQDHKSEVTSQSGLSNSSDSLDSSTRPPSVTRGGVAPAPEAPEPPPKHAALKSEQGTLTSSESHPEAAPKRKLSSIGIQDGFSRGQKRRPAVNNPGTGPVEADWEAGSLFKDVLRRDQTRFPSAKIKGDTERKPGGPH

SEQ ID NO: 857510 - protein, 295 aa, Homo sapiens
MQPEGAEKGKSFKQRLVLKSSLAKETLSEFLGTFILIVLGCGCVAQAILSRGRFGGVITINVGFSMAVAMAIYVAGGVSGGHINPAVSLAMCLFGRMKWFKLPFYVGAQFLGAFVGAATVFGIYYDGLMSFAGGKLLIVGENATAHIFATYPAPYLSLANAFADQVVATMILLIIVFAIFDSRNLGAPRGLEPIAIGLLIIVIASSLGLNSGCAMNPARDLSPRLFTALAGWGFEVFRAGNNFWWIPVVGPLVGAVIGGLIYVLVIEIHHPEPDSVFKAEQSEDKPEKYELSVIM

SEQ ID NO: 857511 - protein, 216 aa, Homo sapiens
MQPEGAEKGKSFKQRLVLKSSLAKETLSEFLGTFILIVLGCGCVAQAILSRGRFGGVITINVGFSMAVAMAIYVAGGVSGGHINPAVSLAMCLFGRMKWFKLPFYVGAQFLGAFVGAATVFGIYYDGLMSFAGGKLLIVGENATAHIFATYPAPYLSLANAFADQKLGSPQRPRAHCHRPPDYCHCFLPGTEQWLCHEPSSRPESQTFHCLGRLGV

SEQ ID NO: 857512 - protein, 216 aa, Homo sapiens; identical to SEQ ID NO: 857511

SEQ ID NO: 857513 - protein, 216 aa, Homo sapiens; identical to SEQ ID NO: 857511

SEQ ID NO: 857514 - protein, 216 aa, Homo sapiens; identical to SEQ ID NO: 857511

SEQ ID NO: 857515 - protein, 159 aa, Homo sapiens
MQRRLVQQWSVAVFLLSYAVPSCGRSVEGLSRRLKRAVSEHQLLHDKGKSIQDLRRRFFLHHLIAEIHTAEIHPVRFGSDDEGRYLTQETNKVETYKEQPLKTPGKKKKGKPGKRKEQEKKKRRTRSAWLDSGVTGSGLEGDHLSDTSTTSLELDSRRH

SEQ ID NO: 857516 - protein, 175 aa, Homo sapiens
MQRRLVQQWSVAVFLLSYAVPSCGRSVEGLSRRLKRAVSEHQLLHDKGKSIQDLRRRFFLHHLIAEIHTAEIRATSEVSPNSKPSPNTKNHPVRFGSDDEGRYLTQETNKVETYKEQPLKTPGKKKKGKPGKRKEQEKKKRRTRSAWLDSGVTGSGLEGDHLSDTSTTSLELDSR

SEQ ID NO: 857517 - protein, 175 aa, Homo sapiens; identical to SEQ ID NO: 857516

SEQ ID NO: 857518 - protein, 177 aa, Homo sapiens
MQRRLVQQWSVAVFLLSYAVPSCGRSVEGLSRRLKRAVSEHQLLHDKGKSIQDLRRRFFLHHLIAEIHTAEIRATSEVSPNSKPSPNTKNHPVRFGSDDEGRYLTQETNKVETYKEQPLKTPGKKKKGKPGKRKEQEKKKRRTRSAWLDSGVTGSGLEGDHLSDTSTTSLELDSRRH

SEQ ID NO: 857519 - protein, 177 aa, Homo sapiens; identical to SEQ ID NO: 857518

SEQ ID NO: 857520 - protein, 177 aa, Homo sapiens; identical to SEQ ID NO: 857518

SEQ ID NO: 857521 - protein, 175 aa, Homo sapiens; identical to SEQ ID NO: 857516

SEQ ID NO: 857522 - protein, 209 aa, Homo sapiens
MQRRLVQQWSVAVFLLSYAVPSCGRSVEGLSRRLKRAVSEHQLLHDKGKSIQDLRRRFFLHHLIAEIHTAEIRATSEVSPNSKPSPNTKNHPVRFGSDDEGRYLTQETNKVETYKEQPLKTPGKKKKGKPGKRKEQEKKKRRTRSAWLDSGVTGSGLEGDHLSDTSTTSLELDSRTALLWGLKKKKENNRRTHHMQLMISLFKSPLLLL

SEQ ID NO: 857523 - protein, 374 aa, Homo sapiens
MVLWESPRQCSSWTLCEGFCWLLLLPVMLLIVARPVKLAAFPTSLSDCQTPTGWNCSGYDDRENDLFLCDTNTCKFDGECLRIGDTVTCVCQFKCNNDYVPVCGSNGESYQNECYLRQAACKQQSEILVVSEGSCATDAGSGSGDGVHEGSGETSQKETSTCDICQFGAECDEDAEDVWCVCNIDCSQTNFNPLCASDGKSYDNACQIKEASCQKQEKIEVMSLGRCQDNTTTTTKSEDGHYARTDYAENANKLEESAREHHIPCPEHYNGFCMHGKCEHSINMQEPSCRCDAGYTGQHCEKKDYSVLYVVPGPVRFQYVLIAAVIGTIQIAVICVVVLCITRKCPRSNRIHRQKQNTGHYSSDNTTRASTRLI

SEQ ID NO: 857524 - protein, 374 aa, Homo sapiens; identical to SEQ ID NO: 857523

SEQ ID NO: 857525 - protein, 368 aa, Homo sapiens [sequence omitted]

SEQ ID NO: 857526 - protein, 245 aa, Homo sapiens
MVLWESPRQCSSWTLCEGFCWLLLLPVMLLIVARPVKLAAFPTSLSDCQTPTGWNCSGYDDRENDLFLCDTNTCKFDGECLRIGDTVTCVCQFKCNNDYVPVCGSNGESYQNECYLRQAACKQQSEILVVSEGSCATESMKALEKLVKRRHPPVIFASLVQNVTKMPRMSGVCVILTVLKPTSIPSALLMGNLMIMHAKSKKHRVRNRRKLKSCLWVDVKITQLQLLSLKMGIMQEQIMQRMLTN

SEQ ID NO: 857527 - protein, 346 aa, Homo sapiens
MVLWESPRQCSSWTLCEGFCWLLLLPVMLLIVARPVKLAAFPTSLSDCQTPTGWNCSGYDDRENDLFLCDTNTCKFDGECLRIGDTVTCVCQFKCNNDYVPVCGSNGESYQNECYLRQAACKQQSEILVVSEGSCATDAGSGSGDGVHEGSGETSQKETSTCDICQFGAECDEDAEDVWCVCNIDCSQTNFNPLCASDGKSYDNACQIKEASCQKQEKIEVMSLGRCQDNTTTTTKSEDGHYARTDYAENANKLEESAREHHIPCPEHYNGFCMHGKCEHSINMQEPSCRCDAGYTGQHCEKKDYSVLYVVPGPVRFQYVLIAAVIGTIQIAVICVVVLCITRAKL

SEQ ID NO: 857528 - protein, 374 aa, Homo sapiens; identical to SEQ ID NO: 857523

SEQ ID NO: 857529 - protein, 387 aa, Homo sapiens
SGKRQRDAGGRAREAAAGLRGALTLPPPCLLGLHSSAPGLPSPPVLRLPRLAAFPTSLSDCQTPTGWNCSGYDDRENDLFLCDTNTCKFDGECLRIGDTVTCVCQFKCNNDYVPVCGSNGESYQNECYLRQAACKQQSEILVVSEGSCATDAGSGSGDGVHEGSGETSQKETSTCDICQFGAECDEDAEDVWCVCNIDCSQTNFNPLCASDGKSYDNACQIKEASCQKQEKIEVMSLGRCQDNTTTTTKSEDGHYARTDYAENANKLEESAREHHIPCPEHYNGFCMHGKCEHSINMQEPSCRCDAGYTGQHCEKKDYSVLYVVPGPVRFQYVLIAAVIGTIQIAVICVVVLCITRKCPRSNRIHRQKQNTGHYSSDNTTRASTRLI

SEQ ID NO: 857530 - protein, 329 aa, Homo sapiens
NQLDLANDEIFTNDRRWESADLQEVMFTALIKDRPKFVRLFLENGLNLRKFLTHDVLTELFSNHFSTLVYRNLQIAKNSYNDALLTFVWKLVANFRRGFRKEDRNGRDEMDIELHDVSPITRHPLQALFIWAILQNKKELSKVIWEQTRGCTLAALGASKLLKTLAKVKNDINAAGESEELANEYETRAVELFTECYSSDEDLAEQLLVYSCEAWGGSNCLELAVEATDQHFIAQPGVQNFLSKQWYGEISRDTKNWKIILCLFIIPLVGCGFVSFRKKPVDKHKKLLWYYVAFFTSPFVVFSWNVVFYIAFLLLFAYVLLMDFHSVPH

SEQ ID NO: 857531 - protein, 326 aa, Homo sapiens
NQLDLANDEIFTNDRRWESADLQEVMFTALIKDRPKFVRLFLENGLNLRKFLTHDVLTELFSNHFSTLVYRNLQIAKNSYNDALLTFVWKLVANFRRGFRKEDRNGRDEMDIELHDVSPITRHPLQALFIWAILQNKKELSKVIWEQTRGCTLAALGASKLLKTLAKVKNDINAAGESEELANEYETRAVELFTECYSSDEDLAEQLLVYSCEAWGGSNCLELAVEATDQHFIAQPGVQNFLSKHGWRDFREQEWKIPGCGYYTLGVGRSLENCGSQTRWLLGFPPGVRRGLSSRVAGSIFGAPGSRCSRHPGITGGVRACLAVSA

SEQ ID NO: 857532 - protein, 303 aa, Homo sapiens
NQLDLANDEIFTNDRRWESADLQEVMFTALIKDRPKFVRLFLENGLNLRKFLTHDVLTELFSNHFSTLVYRNLQIAKNSYNDALLTFVWKLVANFRRGFRKEDRNGRDEMDIELHDVSPITRHPLQALFIWAILQNKKELSKVIWEQTRGCTLAALGASKLLKTLAKVKNDINAAGESEELANEYETRAVELFTECYSSDEDLAEQLLVYSCEAWGGSNCLELAVEATDQHFIAQPGVQNFLSKQWYGEISRDTKNWKIILCLFIIPLVGCGFVSFRYKPRHIIVCECVCQCVYMHPHMCALM

SEQ ID NO: 857533 - protein, 1196 aa, Homo sapiens
MPTAESEAKVKTKVRFEELLKTHSDLMREKKKLKKKLVRSEENISPDTIRSNLHYMKETTSDDPDTIRSNLPHIKETTSDDVSAANTNNLKKSTRVTKNKLRNTQLATENPNGDASVEEDKQGKPNKKVIKTVPQLTTQDLKPETPENKVDSTHQKTHTKPQPGVDHQKSEKANEGREETDLEEDEELMQAYQCHVTEEMAKEIKRKIRKKLKEQLTYFPSDTLFHDDKLSSEKRKKKKEVPVFSKAETSTLTISGDTVEGEQKKESSVRSVSSDSHQDDEISSMEQSTEDSMQDDTKPKPKKTKKKTKAVADNNEDVDGDGVHEITSRDSPVYPKCLLDDDLVLGVYIHRTDRLKSDFMISHPMVKIHVVDEHTGQYVKKDDSGRPVSSYYEKENVDYILPIMTQPYDFKQLKSRLPEWEEQIVFNENFPYLLRGSDESPKVILFFEILDFLSVDEIKNNSEVQNQECGFRKIAWAFLKLLGANGNANINSKLRLQLYYPPTKPRSPLSVVEAFEWWSKCPRNHYPSTLYVTVRGLKVPDCIKPSYRSMMALQEEKGKPVHCERHHESSSVDTEPGLEESKEVIKWKRLPGQACRIPNKHLFSLNAGERGCFCLDFSHNGRILAAACASRDGYPIILYEIPSGRFMRELCGHLNIIYDLSWSKDDHYILTSSSDGTARIWKNEINNTNTFRVLPHPSFVYTAKFHPAVRELVVTGCYDSMIRIWKVEMREDSAILVRQFDVHKSFINSLCFDTEGHHMYSGDCTGVIVVWNTYVKINDLEHSVHHWTINKEIKETEFKGIPISYLEIHPNGKRLLIHTKDSTLRIMDLRILVARKFVGAANYREKIHSTLTPCGTFLFAGSEDGIVYVWNPETGEQVAMYSDLPFKSPIRDISYHPFENMVAFCAFGQNEPILLYIYDFHVAQQEAEMFKRYNGTFPLPGIHQSQDALCTCPKLPHQGSFQIDEFVHTESSSTKMQLVKQRLETVTEVIRSCAAKVNKNLSFTSPPAVSSQQSKLKQSNMLTAQEILHQFGFTQTGIISIERKPCNHQVDTAPTVVALYDYTANRSDELTIHRGDIIRVFFKDNEDWWYGSIGKGQEGYFPANHVASETLYQELPPEIKERSPPLSPEEKTKIEKSPAPQKQSINKNKSQDFRLGSESMTHSEMRKEQSHEDQGHIMDTRMRKNKQAGRKVTLIE

SEQ ID NO: 857534 - protein, 1196 aa, Homo sapiens; identical to SEQ ID NO: 857533

SEQ ID NO: 857535 - protein, 1144 aa, Homo sapiens
MPTAESEAKVKTKVRFEELLKTHSDLMREKKKLKKKLVRSEENISPDTIRSNLHYMKETTSDDPDTIRSNLPHIKETTSDDVSAANTNNLKKSTRVTKNKLRNTQLATENPNGDASVEEDKQGKPNKKVIKTVPQLTTQDLKPETPENKVDSTHQKTHTKPQPGVDHQKSEKANEGREETDLEEDEELMQAYQCHVTEEMAKEIKRKIRKKLKEQLTYFPSDTLFHDDKLSSEKRKKKKEVPVFSKAETSTLTISGDTVEGEQKKESSVRSVSSDSHQDDEISSMEQSTEDSMQDDTKPKPKKTKKKTKAVADNNEDVDGDGVHEITSRDSPVYPKCLLDDDLVLGVYIHRTDRLKSDFMISHPMVKIHVVDEHTGQYVKKDDSGRPVSSYYEKENVDYILPIMTQPYDFKQLKSRLPEWEEQIVFNENFPYLLRGSDESPKVILFFEILDFLSVDEIKNNSEVQNQECGFRKIAWAFLKLLGANGNANINSKLRLQLYYPPTKPRSPLSVVEAFEWWSKCPRNHYPSTLYVTVRGLKVPDCIKPSYRSMMALQEEKGKPVHCERHHESSSVDTEPGLEESKEVIKWKRLPGQACRIPNKHLFSLNAGERGCFCLDFSHNGRILAAACASRDGYPIILYEIPSGRFMRELCGHLNIIYDLSWSKDDHYILTSSSDGTARIWKNEINNTNTFRVLPHPSFVYTAKFHPAVRELVVTGCYDSMIRIWKVEMREDSAILVRQFDVHKSFINSLCFDTEGHHMYSGDCTGVIVVWNTYVKINDLEHSVHHWTINKEIKETEFKGIPISYLEIHPNGKRLLIHTKDSTLRIMDLRILVARKFVGAANYREKIHSTLTPCGTFLFAGSEDGIVYVWNPETGEQVAMYSDLPFKSPIRDISYHPFENMVAFCAFGQNEPILLYIYDFHVAQQEAEMFKRYNGTFPLPGIHQSQDALCTCPKLPHQGSFQIDEFVHTESSSTKMQLVKQRLETVTEVIRSCAAKVNKNLSFTSPPAVSSQQSKLKQSNMLTAQEILHQFGFTQTGIISIERKPCNHQVDTAPTVVALYDYTANRSDELTIHRGDIIRVFFKDNEDWWYGSIGKGQEGYFPANHVASETLYQELPPEIKERSPPLSPEEKTKIEKSPAPQKVK

SEQ ID NO: 857536 - protein, 1168 aa, Homo sapiens
MPTAESEAKVKTKVRFEELLKTHSDLMREKKKLKKKLVRSEENISPDTIRSNLHYMKETTSDDPDTIRSNLPHIKETTSDDVSAANTNNLKKSTRVTKNKLRNTQLATENPNGDASVEEDKQGKPNKKVIKTVPQLTTQDLKPETPENKVDSTHQKTHTKPQPGVDHQKSEKANEGREETDLEEDEELMQAYQCHVTEEMAKEIKRKIRKKLKEQLTYFPSDTLFHDDKLSSEKRKKKKEVPVFSKAETSTLTISGDTVEGEQKKESSVRSVSSDSHQDDEISSMEQSTEDSMQDDTKPKPKKTKKKTKAVADNNEDVDGDGVHEITSRDSPVYPKCLLDDDLVLGVYIHRTDRLKSDFMISHPMVKIHVVDEHTGQYVKKDDSGRPVSSYYEKENVDYILPIMTQPYDFKQLKSRLPEWEEQIVFNENFPYLLRGSDESPKVILFFEILDFLSVDEIKNNSEVQNQECGFRKIAWAFLKLLGANGNANINSKLRLQLYYPPTKPRSPLSVVEAFEWWSKCPRNHYPSTLYVTVRGLKVPDCIKPSYRSMMALQEEKGKPVHCERHHESSSVDTEPGLEESKEVIKWKRLPGQACRIPNKHLFSLNAGERGCFCLDFSHNGRILAAACASRDGYPIILYEIPSGRFMRELCGHLNIIYDLSWSKDDHYILTSSSDGTARIWKNEINNTNTFRVLPHPSFVYTAKFHPAVRELVVTGCYDSMIRIWKVEMREDSAILVRQFDVHKSFINSLCFDTEGHHMYSGDCTGVIVVWNTYVKINDLEHSVHHWTINKEIKETEFKGIPISYLEIHPNGKRLLIHTKDSTLRIMDLRILVARKFVGAANYREKIHSTLTPCGTFLFAGSEDGIVYVWNPETGEQVAMYSDLPFKSPIRDISYHPFENMVAFCAFGQNEPILLYIYDFHVAQQEAEMFKRYNGTFPLPGIHQSQDALCTCPKLPHQGSFQIDEFVHTESSSTKMQLVKQRLETVTEVIRSCAAKVNKNLSFTSPPAVSSQQSKLKQSNMLTAQEILHQFGFTQTGIISIERKPCNHQVDTAPTVVALYDYTANRSDELTIHRGDIIRVFFKDNEDWWYGSIGKGQEGYFPANHVASETLYQELPPEIKERSPPLSPEEKTKIEKSPAPQKQSINKNKSQDFRLGSESMTHKELKKS

SEQ ID NO: 857537 - protein, 1079 aa, Homo sapiens
LLLLLNSRPRRPTSDDVSAANTNNLKKSTRVTKNKLRNTQLATENPNGDASVEEDKQGKPNKKVIKTVPQLTTQDLKPETPENKVDSTHQKTHTKPQPGVDHQKSEKANEGREETDLEEDEELMQAYQCHVTEEMAKEIKRKIRKKLKEQLTYFPSDTLFHDDKLSSEKRKKKKEVPVFSKAETSTLTISGDTVEGEQKKESSVRSVSSDSHQDDEISSMEQSTEDSMQDDTKPKPKKTKKKTKAVADNNEDVDGDGVHEITSRDSPVYPKCLLDDDLVLGVYIHRTDRLKSDFMISHPMVKIHVVDEHTGQYVKKDDSGRPVSSYYEKENVDYILPIMTQPYDFKQLKSRLPEWEEQIVFNENFPYLLRGSDESPKVILFFEILDFLSVDEIKNNSEVQNQECGFRKIAWAFLKLLGANGNANINSKLRLQLYYPPTKPRSPLSVVEAFEWWSKCPRNHYPSTLYVTVRGLKVPDCIKPSYRSMMALQEEKGKPVHCERHHESSSVDTEPGLEESKEVIKWKRLPGQACRIPNKHLFSLNAGERGCFCLDFSHNGRILAAACASRDGYPIILYEIPSGRFMRELCGHLNIIYDLSWSKDDHYILTSSSDGTARIWKNEINNTNTFRVLPHPSFVYTAKFHPAVRELVVTGCYDSMIRIWKVEMREDSAILVRQFDVHKSFINSLCFDTEGHHMYSGDCTGVIVVWNTYVKINDLEHSVHHWTINKEIKETEFKGIPISYLEIHPNGKRLLIHTKDSTLRIMDLRILVARKFVGAANYREKIHSTLTPCGTFLFAGSEDGIVYVWNPETGEQVAMYSDLPFKSPIRDISYHPFENMVAFCAFGQNEPILLYIYDFHVAQQEAEMFKRYNGTFPLPGIHQSQDALCTCPKLPHQGSFQIDEFVHTESSSTKMQLVKQRLETVTEVIRSCAAKVNKNLSFTSPPAVSSQQSKLKQSNMLTAQEILHQFGFTQTGIISIERKPCNHQVDTAPTVVALYDYTANRSDELTIHRGDIIRVFFKDNEDWWYGSIGKGQEGYFPANHVASETLYQELPPEIKERSPPLSPEEKTKIEKSPAPQKVK

SEQ ID NO: 857538 - protein, 1144 aa, Homo sapiens; identical to SEQ ID NO: 857535

SEQ ID NO: 857539 - protein, 1053 aa, Homo sapiens
MPTAESEAKVKTKVRFEELLKTHSDLMREKKKLKKKLVRSEENISPDTIRSNLHYMKETTSDDPDTIRSNLPHIKETTSDDVSAANTNNLKKSTRVTKNKLRNTQLATENPNGDASVEEDKQGKPNKKVIKTVPQLTTQDLKPETPENKVDSTHQKTHTKPQPGVDHQKSEKANEGREETDLEEDEELMQAYQCHVTEEMAKEIKRKIRKKLKEQLTYFPSDTLFHDDKLSSEKRKKKKEVPVFSKAETSTLTISGDTVEGEQKKESSVRSVSSDSHQDDEISSMEQSTEDSMQDDTKPKPKKTKKKTKAVADNNEDVDGDGVHEITSRDSPVYPKCLLDDDLVLGVYIHRTDRLKSDFMISHPMVKIHVVDEHTGQYVKKDDSGRPVSSYYEKENVDYILPIMTQPYDFKQLKSRLPEWEEQIVFNENFPYLLRGSDESPKVILFFEILDFLSVDEIKNNSEVQNQECGFRKIAWAFLKLLGANGNANINSKLRLQLYYPPTKPRSPLSVVEAFEWWSKCPRNHYPSTLYVTVRGLKVPDCIKPSYRSMMALQEEKGKPVHCERHHESSSVDTEPGLEESKEVIKWKRLPGQACRIPNKHLFSLNAGERGCFCLDFSHNGRILAAACASRDGYPIILYEIPSGRFMRELCGHLNIIYDLSWSKDDHYILTSSSDGTARIWKNEINNTNTFRVLPHPSFVYTAKFHPAVRELVVTGCYDSMIRIWKVEMREDSAILVRQFDVHKSFINSLCFDTEGHHMYSGDCTGVIVVWNTYVKINDLEHSVHHWTINKEIKETEFKGIPISYLEIHPNGKRLLIHTKDSTLRIMDLRILVARKFVGAANYREKIHSTLTPCGTFLFAGSEDGIVYVWNPETGEQVAMYSDLPFKSPIRDISYHPFENMVAFCAFGQNEPILLYIYDFHVAQQEAEMFKRYNGTFPLPGIHQSQDALCTCPKLPHQGSFQIDEFVHTESSSTKMQLVKQRLETVTEVIRSCAAKVNKNLSFTSPPAVSSQQSKLKQSNMLTAQEILHQFGFTQTDSHFAEFNTCILWWKKH

SEQ ID NO: 857540 - protein, 1144 aa, Homo sapiens; identical to SEQ ID NO: 857535

SEQ ID NO: 857541 - protein, 1024 aa, Homo sapiens
  misc_feature (1020)..(1020): Xaa can be any naturally occurring amino acid
MPTAESEAKVKTKVRFEELLKTHSDLMREKKKLKKKLVRSEENISPDTIRSNLHYMKETTSDDPDTIRSNLPHIKETTSDDVSAANTNNLKKSTRVTKNKLRNTQLATENPNGDASVEEDKQGKPNKKVIKTVPQLTTQDLKPETPENKVDSTHQKTHTKPQPGVDHQKSEKANEGREETDLEEDEELMQAYQCHVTEEMAKEIKRKIRKKLKEQLTYFPSDTLFHDDKLSSEKRKKKKEVPVFSKAETSTLTISGDTVEGEQKKESSVRSVSSDSHQDDEISSMEQSTEDSMQDDTKPKPKKTKKKTKAVADNNEDVDGDGVHEITSRDSPVYPKCLLDDDLVLGVYIHRTDRLKSDFMISHPMVKIHVVDEHTGQYVKKDDSGRPVSSYYEKENVDYILPIMTQPYDFKQLKSRLPEWEEQIVFNENFPYLLRGSDESPKVILFFEILDFLSVDEIKNNSEVQNQECGFRKIAWAFLKLLGANGNANINSKLRLQLYYPPTKPRSPLSVVEAFEWWSKCPRNHYPSTLYVTVRGLKVPDCIKPSYRSMMALQEEKGKPVHCERHHESSSVDTEPGLEESKEVIKWKRLPGQACRIPNKHLFSLNAGERGCFCLDFSHNGRILAAACASRDGYPIILYEIPSGRFMRELCGHLNIIYDLSWSKDDHYILTSSSDGTARIWKNEINNTNTFRVLPHPSFVYTAKFHPAVRELVVTGCYDSMIRIWKVEMREDSAILVRQFDVHKSFINSLCFDTEGHHMYSGDCTGVIVVWNTYVKINDLEHSVHHWTINKEIKETEFKGIPISYLEIHPNGKRLLIHTKDSTLRIMDLRILVARKFVGAANYREKIHSTLTPCGTFLFAGSEDGIVYVWNPETGEQVAMYSDLPFKSPIRDISYHPFENMVAFCAFGQNEPILLYIYDFHVAQQEAEMFKRYNGTFPLPGIHQSQDALCTCPKLPNTGLSNDELTTEDLPDSSTNQAQRSEEPPVAKYKPNKPANKEEEVRRQGRGTDHPAKQQYRGHXPPRA

SEQ ID NO: 857542 - protein, 1062 aa, Homo sapiens [sequence omitted]

SEQ ID NO: 857543 - protein, 1196 aa, Homo sapiens; identical to SEQ ID NO: 857533

SEQ ID NO: 857544 - protein, 1147 aa, Homo sapiens
MAVSFVAESEAKVKTKVRFEELLKTHSDLMREKKKLKKKLVRSEENISPDTIRSNLHYMKETTSDDPDTIRSNLPHIKETTSDDVSAANTNNLKKSTRVTKNKLRNTQLATENPNGDASVEEDKQGKPNKKVIKTVPQLTTQDLKPETPENKVDSTHQKTHTKPQPGVDHQKSEKANEGREETDLEEDEELMQAYQCHVTEEMAKEIKRKIRKKLKEQLTYFPSDTLFHDDKLSSEKRKKKKEVPVFSKAETSTLTISGDTVEGEQKKESSVRSVSSDSHQDDEISSMEQSTEDSMQDDTKPKPKKTKKKTKAVADNNEDVDGDGVHEITSRDSPVYPKCLLDDDLVLGVYIHRTDRLKSDFMISHPMVKIHVVDEHTGQYVKKDDSGRPVSSYYEKENVDYILPIMTQPYDFKQLKSRLPEWEEQIVFNENFPYLLRGSDESPKVILFFEILDFLSVDEIKNNSEVQNQECGFRKIAWAFLKLLGANGNANINSKLRLQLYYPPTKPRSPLSVVEAFEWWSKCPRNHYPSTLYVTVRGLKVPDCIKPSYRSMMALQEEKGKPVHCERHHESSSVDTEPGLEESKEVIKWKRLPGQACRIPNKHLFSLNAGERGCFCLDFSHNGRILAAACASRDGYPIILYEIPSGRFMRELCGHLNIIYDLSWSKDDHYILTSSSDGTARIWKNEINNTNTFRVLPHPSFVYTAKFHPAVRELVVTGCYDSMIRIWKVEMREDSAILVRQFDVHKSFINSLCFDTEGHHMYSGDCTGVIVVWNTYVKINDLEHSVHHWTINKEIKETEFKGIPISYLEIHPNGKRLLIHTKDSTLRIMDLRILVARKFVGAANYREKIHSTLTPCGTFLFAGSEDGIVYVWNPETGEQVAMYSDLPFKSPIRDISYHPFENMVAFCAFGQNEPILLYIYDFHVAQQEAEMFKRYNGTFPLPGIHQSQDALCTCPKLPHQGSFQIDEFVHTESSSTKMQLVKQRLETVTEVIRSCAAKVNKNLSFTSPPAVSSQQSKLKQSNMLTAQEILHQFGFTQTGIISIERKPCNHQVDTAPTVVALYDYTANRSDELTIHRGDIIRVFFKDNEDWWYGSIGKGQEGYFPANHVASETLYQELPPEIKERSPPLSPEEKTKIEKSPAPQKVK

SEQ ID NO: 857545 - protein, 1123 aa, Homo sapiens
QIDHSDTLFHDDKLSSEKRKKKKKFQSSLKLKQGIFALINVKYPLRKTLLFSGFEYYLWFNKENSYAFIKKSTRVTKNKLRNTQLATENPNGDASVEEDKQGKPNKKVIKTVPQLTTQDLKPETPENKVDSTHQKTHTKPQPGVDHQKSEKANEGREETDLEEDEELMQAYQCHVTEEMAKEIKRKIRKKLKEQLTYFPSDTLFHDDKLSSEKRKKKKEVPVFSKAETSTLTISGDTVEGEQKKESSVRSVSSDSHQDDEISSMEQSTEDSMQDDTKPKPKKTKKKTKAVADNNEDVDGDGVHEITSRDSPVYPKCLLDDDLVLGVYIHRTDRLKSDFMISHPMVKIHVVDEHTGQYVKKDDSGRPVSSYYEKENVDYILPIMTQPYDFKQLKSRLPEWEEQIVFNENFPYLLRGSDESPKVILFFEILDFLSVDEIKNNSEVQNQECGFRKIAWAFLKLLGANGNANINSKLRLQLYYPPTKPRSPLSVVEAFEWWSKCPRNHYPSTLYVTVRGLKVPDCIKPSYRSMMALQEEKGKPVHCERHHESSSVDTEPGLEESKEVIKWKRLPGQACRIPNKHLFSLNAGERGCFCLDFSHNGRILAAACASRDGYPIILYEIPSGRFMRELCGHLNIIYDLSWSKDDHYILTSSSDGTARIWKNEINNTNTFRVLPHPSFVYTAKFHPAVRELVVTGCYDSMIRIWKVEMREDSAILVRQFDVHKSFINSLCFDTEGHHMYSGDCTGVIVVWNTYVKINDLEHSVHHWTINKEIKETEFKGIPISYLEIHPNGKRLLIHTKDSTLRIMDLRILVARKFVGAANYREKIHSTLTPCGTFLFAGSEDGIVYVWNPETGEQVAMYSDLPFKSPIRDISYHPFENMVAFCAFGQNEPILLYIYDFHVAQQEAEMFKRYNGTFPLPGIHQSQDALCTCPKLPHQGSFQIDEFVHTESSSTKMQLVKQRLETVTEVIRSCAAKVNKNLSFTSPPAVSSQQSKLKQSNMLTAQEILHQFGFTQTGIISIERKPCNHQVDTAPTVVALYDYTANRSDELTIHRGDIIRVFFKDNEDWWYGSIGKGQEGYFPANHVASETLYQELPPEIKERSPPLSPEEKTKIEKSPAPQKVK

SEQ ID NO: 857546 - protein, 581 aa, Homo sapiens
MPTAESEAKVKTKVRFEELLKTHSDLMREKKKLKKKLVRSEENISPDTIRSNLHYMKETTSDDPDTIRSNLPHIKETTSDDVSAANTNNLKKSTRVTKNKLRNTQLATENPNGDASVEEDKQGKPNKKVIKTVPQLTTQDLKPETPENKVDSTHQKTHTKPQPGVDHQKSEKANEGREETDLEEDEELMQAYQCHVTEEMAKEIKRKIRKKLKEQLTYFPSDTLFHDDKLSSEKRKKKKEVPVFSKAETSTLTISGDTVEGEQKKESSVRSVSSDSHQDDEISSMEQSTEDSMQDDTKPKPKKTKKKTKAVADNNEDVDGDGVHEITSRDSPVYPKCLLDDDLVLGVYIHRTDRLKSDFMISHPMVKIHVVDEHTGQYVKKDDSGRPVSSYYEKENVDYILPIMTQPYDFKQLKSRLPEWEEQIVFNENFPYLLRGSDESPKVILFFEILDFLSVDEIKNNSEVQNQECGFRKIAWAFLKLLGANGNANINSKLRLQLYYPPTKPRSPLSVVEAFEWWSKCPRNHYPSTLYVTVRGLKVPDCIKPSYRSMMALQEEKGKPVHCERHHESSSVDTEPGLVKN

SEQ ID NO: 857547 - protein, 996 aa, Homo sapiens
MPTAESEAKVKTKVRFEELLKTHSDLMREKKKLKKKLVRSEENISPDTIRSNLHYMKETTSDDPDTIRSNLPHIKETTSDDVSAANTNNLKKSTRVTKNKLRNTQLATENPNGDASVEEDKQGKPNKKVIKTVPQLTTQDLKPETPENKVDSTHQKTHTKPQPGVDHQKSEKANEGREETDLEEDEELMQAYQCHVTEEMAKEIKRKIRKKLKEQLTYFPSDTLFHDDKLSSEKRKKKKEVPVFSKAETSTLTISGDTVEGEQKKESSVRSVSSDSHQDDEISSMEQSTEDSMQDDTKPKPKKTKKKTKAVADNNEDVDGDGVHEITSRDSPVYPKCLLDDDLVLGVYIHRTDRLKSDFMISHPMVKIHVVDEHTGQYVKKDDSGRPVSSYYEKENVDYILPIMTQPYDFKQLKSRLPEWEEQIVFNENFPYLLRGSDESPKVILFFEILDFLSVDEIKNNSEVQNQECGFRKIAWAFLKLLGANGNANINSKLRLQLYYPPTKPRSPLSVVEAFEWWSKCPRNHYPSTLYVTVRGLKVPDCIKPSYRSMMALQEEKGKPVHCERHHESSSVDTEPGLEESKEVIKWKRLPGQACRIPNKHLFSLNAGERGCFCLDFSHNGRILAAACASRDGYPIILYEIPSGRFMRELCGHLNIIYDLSWSKDDHYILTSSSDGTARIWKNEINNTNTFRVLPHPSFVYTAKFHPAVRELVVTGCYDSMIRIWKVEMREDSAILVRQFDVHKSFINSLCFDTEGHHMYSGDCTGVIVVWNTYVKINDLEHSVHHWTINKEIKETEFKGIPISYLEIHPNGKRLLIHTKDSTLRIMDLRILVARKFVGAANYREKIHSTLTPCGTFLFAGSEDGIVYVWNPETGEQVAMYSDLPFKSPIRDISYHPFENMVAFCAFGQNEPILLYIYDFHVAQQEAEMFKRYNGTFPLPGIHQSQDALCTCPKLPHQGSFQIDEFVHTESSSTKMQLVIKCPAQIEQGFMENSLY

SEQ ID NO: 857548 - protein, 393 aa, Homo sapiens
MAAVGAGGSTAAPGPGAVSAGALEPGTASAAHRRLKYISLAVLVVQNASLILSIRYARTLPGDRFFATTAVVMAEVLKGLTCLLLLFAQKRGNVKHLVLFLHEAVLVQYVDTLKLAVPSLIYTLQNNLQYVAISNLPAATFQVTYQLKILTTALFSVLMLNRSLSRLQWASLLLLFTGVAIVQAQQAGGGGPRPLDQNPGAGLAAVVASCLSSGFAGVYFEKILKGSSGSVWLRNLQLGLFGTALGLVGLWWAEGTAVATRGFFFGYTPAVWGVVLNQAFGGLLVAVVVKYADNILKGFATSLSIVLSTVASIRLFGFHVDPLFALGAGLVIGAVYLYSLPRGAAKAIASASASASGPCVHQQPPGQPPPPQLSSHRGDLITEPFLPKSVLVK

SEQ ID NO: 857549 - protein, 393 aa, Homo sapiens; identical to SEQ ID NO: 857548

SEQ ID NO: 857550 - protein, 352 aa, Homo sapiens [sequence omitted]

SEQ ID NO: 857551 - protein, 321 aa, Homo sapiens
MAEVLKGLTCLLLLFAQKRGNVKHLVLFLHEAVLVQYVDTLKLAVPSLIYTLQNNLQYVAISNLPAATFQVTYQLKILTTALFSVLMLNRSLSRLQWASLLLLFTGVAIVQAQQAGGGGPRPLDQNPGAGLAAVVASCLSSGFAGVYFEKILKGSSGSVWLRNLQLGLFGTALGLVGLWWAEGTAVATRGFFFGYTPAVWGVVLNQAFGGLLVAVVVKYADNILKGFATSLSIVLSTVASIRLFGFHVDPLFALGAGLVIGAVYLYSLPRGAAKAIASASASASGPCVHQQPPGQPPPPQLSSHRGDLITEPFLPKSVLVK

SEQ ID NO: 857552 - protein, 321 aa, Homo sapiens; identical to SEQ ID NO: 857551

SEQ ID NO: 857553 - protein, 396 aa, Homo sapiens
MAAVGAGGSTAAPGPGAVSAGALEPGTASAAHRRLKYISLAVLVVQNASLILSIRYARTLPGDRFFATTAVVMAEVLKGLTCLLLLFAQKRGNVKHLVLFLHEAVLVQYVDTLKLAVPSLIYTLQNNLQYVAISNLPAATFQVTYQLKILTTALFSVLMLNRSLSRLQWASLLLLFTGVAIVQAQQAGGGGPRPLDQNPGAGLAAVVASCLSSGFAGVYFEKILKGSSGSVWLRNLQLGLFGTALGLVGLWWAEGTAVATRGFFFGYTPAVWGVVLNQAFGGLLVAVVVKYADNILKGFATSLSIVLSTVASIRLFGFHVDPLFALGAGLVIGAVYLYSLPRGAAKAIASASASASGPCVHQQPPGQPPPPQLSSHRGDLITEPFLPKLLTKVKGS

SEQ ID NO: 857554 - protein, 200 aa, Homo sapiens
FFVPSSPPCSAFSFFPRLRCGVLFPPLVLFFRRSPPSGCSGCWCVLCDTAGSSARQLRCLLFAASSAASWPFLFVFVPPRALSVALVLLYMSRPLSLVCVPAPLSSHIHTTLGRALCARSMSFRPRPVAAVGRRVGLPPSSLFFFLFFVFLVVLSFFLFLFLSLSFVFFVLFSFFSFFFCFFFFFGQIKMLYLFSPRVAF

SEQ ID NO: 857555 - protein, 393 aa, Homo sapiens; identical to SEQ ID NO: 857548

SEQ ID NO: 857556 - protein, 242 aa, Homo sapiens
MAAVGAGGSTAAPGPGAVSAGALEPGTASAAHRRLKYISLAVLVVQNASLILSIRYARTLPGDRFFATTAVVMAEVLKGLTCLLLLFAQKRGNVKHLVLFLHEAVLVQYVDTLKLAVPSLIYTLQNNLQYVAISNLPAATFQPSPRCSQSHSLCLCLRLRALRSPAASRAATTTAAVFPPWRPHHGALSAKVSAGEVRAGSNGGTQGRGTGVEGVGHLQDPSRHPPGPGSSGFGRWSFLPGH

SEQ ID NO: 857557 - protein, 218 aa, Homo sapiens
MKLCRDAHRRLKYISLAVLVVQNASLILSIRYARTLPGDRFFATTAVVMAEVLKGLTCLLLLFAQKRGNVKHLVLFLHEAVLVQYVDTLKLAVPSLIYTLQNNLQYVAISNLPAATFQPSPRCSQSHSLCLCLRLRALRSPAASRAATTTAAVFPPWRPHHGALSAKVSAGEVRAGSNGGTQGRGTGVEGVGHLQDPSRHPPGPGSSGFGRWSFLPGH

SEQ ID NO: 857558 - protein, 224 aa, Homo sapiens
MAAVGAGGSTAAPGPGAVSAGALEPGTASAAHRRLKYISLAVLVVQNASLILSIRYARTLPGDRFFATTAVVMAEVLKGLTCLLLLFAQKRGNVKHLVLFLHEAVLVQYVDTLKLAVPSLIYTLQNNLQYVAISNLPAATFQPSPRCSQSHSLCLCLRLRALRSPAASRAATTTAAVFPPWRPHHGALSAKVAHQGEGFLAAGIEDIGLASFSLLALGPAGTKL

SEQ ID NO: 857559 - protein, 106 aa, Homo sapiens [sequence omitted]

SEQ ID NO: 857560 - protein, 161 aa, Homo sapiens
MKADLTALFLPRQPPMSLAEAEQLMEEWNEDLDGMEGFVLEGKKFARLPEEEFGHFYTQDCYVFLCRYWVPVEYEEEEKKEDKEEKAEGKEGEEATAEAEEKQPEEDFQCIVYFWQGREASNMGWLTFTFSLQKKFESLFPGKLEVCLAAPRARGQAEGCG

SEQ ID NO: 857561 - protein, 1114 aa, Homo sapiens
DRARSLVIHRHPPQMRRLVHLQTLVLNGNPLLHAQLRQLPAMTALQTLHLRSTQRTQSNLPTSLEGLSNLADVDLSCNDLTRVPECLYTLPSLRRLNLSSNQITELSLCIDQWVHVETLNLSRNQLTSLPSAICKLSKLKKLYLNSNKLDFDGLPSGIGKLTNLEEFMAANNNLELVPESLCRCPKLRKLVLNKNHLVTLPEAIHFLTEIEVLDVRENPNLVMPPKPADRAAEWYNIDFSLQNQLRLAGASPATVAAAAAAGSGPKDPMARKMRLRRRKDSAQDDQAKQVLKGMSDVAQEKNKKQEESADARAPSGKVRRWDQGLEKPRLDYSEFFTEDVGQLPGLTIWQIENFVPVLVEEAFHGKFYEADCYIVLKTFLDDSGSLNWEIYYWIGGEATLDKKACSAIHAVNLRNYLGAECRTVREEMGDESEEFLQVFDNDISYIEGGTASGFYTVEDTHYVTRMYRVYGKKNIKLEPVPLKGTSLDPRFVFLLDRGLDIYVWRGAQATLSSTTKARLFAEKINKNERKGKAEITLLVQGQELPEFWEALGGEPSEIKKHVPEDFWPPQPKLYKVGLGLGYLELPQINYKLSVEHKQRPKVELMPRMRLLQSLLDTRCVYILDCWSDVFIWLGRKSPRLVRAAALKLGQELCGMLHRPRHATVSRSLEGTEAQVFKAKFKNWDDVLTVDYTRNAEAVLQSPGLSGKVKRDAEKKDQMKADLTALFLPRQPPMSLAEAEQLMEEWNEDLDGMEGFVLEGKKFARLPEEEFGHFYTQDCYVFLCRYWVPVEYEEEEKKEDKEEKAEGKEGEEATAEAEEKQPEEDFQCIVYFWQGREASNMGWLTFTFSLQKKFESLFPGKLEVVRMTQQQENPKFLSHFKRKFIIHRGKRKAVQGAQQPSLYQIRTNGSALCTRCIQINTDSSLLNSEFCFILKVPFESEDNQGIVYAWVGRASDPDEAKLAEDILNTMFDTSYSKQVINEGEEPENFFWVGIGAQKPYDDDAEYMKHTRLFRCSNEKGYFAVTEKCSDFCQDDLADDDIMLLDNGQEVYMWVGTQTSQVEIKLSLKACQVYIQHMRSKEHERPRRLRLVRKGNEQHAFTRCFHAWSAFCKALA

SEQ ID NO: 857562 - protein, 1414 aa, Homo sapiens
QPAAPPSALAPALPSPARPGSESGAMEATGVLPFVRGVDLSGNDFKGGYFPENVKAMTSLRWLKLNRTGLCYLPEELAALQKLEHLSVSHNNLTTLHGELSSLPSLRAIVARANSLKNSGVPDDIFKLDDLSVLDLSHNQLTECPRELENAKNMLVLNLSHNSIDTIPNQLFINLTDLLYLDLSENRLESLPPQMRRLVHLQTLVLNGNPLLHAQLRQLPAMTALQTLHLRSTQRTQSNLPTSLEGLSNLAGQAAPGAPLSSGPLWALLLPWVEGVEPCSSDQYPEGQGWSYVTVTFAIMMMPNTDFMPRKLPRNPHVREFVQMEKLGRTAVVTVPKPHSSEVAELGFTLGLAALAPGVWAPADATPPCTPDVDLSCNDLTRVPECLYTLPSLRRLNLSSNQITELSLCIDQWVHVETLNLSRNQLTSLPSAICKLSKLKKLYLNSNKLDFDGLPSGIGKLTNLEEFMAANNNLELVPESLCRCPKLRKLVLNKNHLVTLPEAIHFLTEIEVLDVRENPNLVMPPKPADRAAEWYNIDFSLQNQLRLAGASPATVAAAAAAGSGPKDPMARKMRLRRRKDSAQDDQAKQVLKGMSDVAQEKNKKQEESADARAPSGKVRRWDQGLEKPRLDYSEFFTEDVGQLPGLTIWQIENFVPVLVEEAFHGKFYEADCYIVLKTFLDDSGSLNWEIYYWIGGEATLDKKACSAIHAVNLRNYLGAECRTVREEMGDESEEFLQVFDNDISYIEGGTASGFYTVEDTHYVTRMYRVYGKKNIKLEPVPLKGTSLDPRFVFLLDRGLDIYVWRGAQATLSSTTKARLFAEKINKNERKGKAEITLLVQGQELPEFWEALGGEPSEIKKHVPEDFWPPQPKLYKVGLGLGYLELPQINYKLSVEHKQRPKVELMPRMRLLQSLLDTRCVYILDCWSDVFIWLGRKSPRLVRAAALKLGQELCGMLHRPRHATVSRSLEGTEAQVFKAKFKNWDDVLTVDYTRNAEAVLQSPGLSGKVKRDAEKKDQMKADLTALFLPRQPPMSLAEAEQLMEEWNEDLDGMEGFVLEGKKFARLPEEEFGHFYTQDCYVFLCRYWVPVEYEEEEKKEDKEEKAEGKEGEEATAEAEEKQPEEDFQCIVYFWQGREASNMGWLTFTFSLQKKFESLFPGKLEVVRMTQQQENPKFLSHFKRKFIIHRGKRKAVQGAQQPSLYQIRTNGSALCTRCIQINTDSSLLNSEFCFILKVPFESEDNQGIVYAWVGRASDPDEAKLAEDILNTMFDTSYSKQVINEGEEPENFFWVGIGAQKPYDDDAEYMKHTRLFRCSNEKGYFAVTEKCSDFCQDDLADDDIMLLDNGQEVYMWVGTQTSQVEIKLSLKACQVYIQHMRSKEHERPRRLRLVRKGNEQHAFTRCFHAWSAFCKALA

SEQ ID NO: 857563 - protein, 687 aa, Homo sapiens
YRVYGKKNILVTECVSSTDVEATGCSTLNVGDTHYVTRMYRVYGKKNIKLEPVPLKGTSLDPRFVFLLDRGLDIYVWRGAQATLSSTTKARLFAEKINKNERKGKAEITLLVQGQELPEFWEALGGEPSEIKKHVPEDFWPPQPKLYKVGLGLGYLELPQINYKLSVEHKQRPKVELMPRMRLLQSLLDTRCVYILDCWSDVFIWLGRKSPRLVRAAALKLGQELCGMLHRPRHATVSRSLEGTEAQVFKAKFKNWDDVLTVDYTRNAEAVLQSPGLSGKVKRDAEKKDQMKADLTALFLPRQPPMSLAEAEQLMEEWNEDLDGMEGFVLEGKKFARLPEEEFGHFYTQDCYVFLCRYWVPVEYEEEEKKEDKEEKAEGKEGEEATAEAEEKQPEEDFQCIVYFWQGREASNMGWLTFTFSLQKKFESLFPGKLEVVRMTQQQENPKFLSHFKRKFIIHRGKRKAVQGAQQPSLYQIRTNGSALCTRCIQINTDSSLLNSEFCFILKVPFESEDNQGIVYAWVGRASDPDEAKLAEDILNTMFDTSYSKQVINEGEEPENFFWVGIGAQKPYDDDAEYMKHTRLFRCSNEKGYFAVTEKCSDFCQDDLADDDIMLLDNGQEVYMWVGTQTSQVEIKLSLKACQVYIQHMRSKEHERPRRLRLVRKGNEQHAFTRCFHAWSAFCKALA

SEQ ID NO: 857564 - protein, 1442 aa, Homo sapiens
QPAAPPSALAPALPSPARPGSESGAMEATGVLPFVRGVDLSGNDFKGGYFPENVKAMTSLRWLKLNRTGLCYLPEELAALQKLEHLSVSHNNLTTLHGELSSLPSLRAIVARANSLKNSGVPDDIFKLDDLSVLDLSHNQLTECPRELENAKNMLVLNLSHNSIDTIPNQLFINLTDLLYLDLSENRLESLPPQMRRLVHLQTLVLNGNPLLHAQLRQLPAMTALQTLHLRSTQRTQSNLPTSLEGLSNLAGQAAPGAPLSSGPLWALLLPWVEGVEPCSSDQYPEGQGWSYVTVTFAIMMMPNTDFMPRKLPRNPHVREFVQMEKLGRTAVVTVPKPHSSEVAELGFTLGLAALAPGVWAPADATPPCTPDVDLSCNDLTRVPECLYTLPSLRRLNLSSNQITELSLCIDQWVHVETLNLSRNQLTSLPSAICKLSKLKKLYLNSNKLDFDGLPSGIGKLTNLEEFMAANNNLELVPESLCRCPKLRKLVLNKNHLVTLPEAIHFLTEIEVLDVRENPNLVMPPKPADRAAEWYNIDFSLQNQLRLAGASPATVAAAAAAGSGPKDPMARKMRLRRRKDSAQDDQAKQVLKGMSDVAQEKNKKQEESADARAPSGKVRRWDQGLEKPRLDYSEFFTEDVGQLPGLTIWQIENFVPVLVEEAFHGKFYEADCYIVLKTFLDDSGSLNWEIYYWIGGEATLDKKACSAIHAVNLRNYLGAECRTVREEMGDESEEFLQVFDNDISYIEGGTASGFYTVEDTHYVTRMYRVYGKKNIKLEPVPLKGTSLDPRFVFLLDRGLDIYVWRGAQATLSSTTKARLFAEKINKNERKGKAEITLLVQGQELPEFWEALGGEPSEIKKHVPEDFWPPQPKLYKVGLGLGYLELPQINYKLSVEHKQRPKVELMPRMRLLQSLLDTRCVYILDCWSDVFIWLGRKSPRLVRAAALKLGQELCGMLHRPRHATVSRSLEGTEAQVFKAKFKNWDDVLTVDYTRNAEAVLQSPGLSGKVKRDAEKKDQMKADLTALFLPRQPPMSLAEAEQLMEEWNEDLDGMEGFVLEGKKFARLPEEEFGHFYTQDCYVFLCRYWVPVEYEEEEKKEDKEEKAEGKEGEEATAEAEEKQPEEDFQCIVYFWQGREASNMGWLTFTFSLQKKFESLFPGKLEVVRMTQQQENPKFLSHFKRKFIIHRGKRKAVQGAQQPSLYQIRTNGSALCTRCLAGGGRMASKRQGARPESLLMPHPFHRCIQINTDSSLLNSEFCFILKVPFESEDNQGIVYAWVGRASDPDEAKLAEDILNTMFDTSYSKQVINEGEEPENFFWVGIGAQKPYDDDAEYMKHTRLFRCSNEKGYFAVTEKCSDFCQDDLADDDIMLLDNGQEVYMWVGTQTSQVEIKLSLKACQVYIQHMRSKEHERPRRLRLVRKGNEQHAFTRCFHAWSAFCKALA

SEQ ID NO: 857565 - protein, 1441 aa, Homo sapiens
QPAAPPSALAPALPSPARPGSESGAMEATGVLPFVRGVDLSGNDFKGGYFPENVKAMTSLRWLKLNRTGLCYLPEELAALQKLEHLSVSHNNLTTLHGELSSLPSLRAIVARANSLKNSGVPDDIFKLDDLSVLDLSHNQLTECPRELENAKNMLVLNLSHNSIDTIPNQLFINLTDLLYLDLSENRLESLPPQMRRLVHLQTLVLNGNPLLHAQLRQLPAMTALQTLHLRSTQRTQSNLPTSLEGLSNLAGQAAPGAPLSSGPLWALLLPWVEGVEPCSSDQYPEGQGWSYVTVTFAIMMMPNTDFMPRKLPRNPHVREFVQMEKLGRTAVVTVPKPHSSEVAELGFTLGLAALAPGVWAPADATPPCTPDVDLSCNDLTRVPECLYTLPSLRRLNLSSNQITELSLCIDQWVHVETLNLSRNQLTSLPSAICKLSKLKKLYLNSNKLDFDGLPSGIGKLTNLEEFMAANNNLELVPESLCRCPKLRKLVLNKNHLVTLPEAIHFLTEIEVLDVRENPNLVMPPKPADRAAEWYNIDFSLQNQLRLAGASPATVAAAAAAGSGPKDPMARKMRLRRRKDSAQDDQAKQVLKGMSDVAQEKNKKQEESADARAPSGKVRRWDQGLEKPRLDYSEFFTEDVGQLPGLTIWQIENFVPVLVEEAFHGKFYEADCYIVLKTFLDDSGSLNWEIYYWIGGEATLDKKACSAIHAVNLRNYLGAECRTVREEMGDESEEFLQVFDNDISYIEGGTASGFYTVEDTHYVTRMYRVYGKKNIKLEPVPLKGTSLDPRFVFLLDRGLDIYVWRGAQATLSSTTKARLFAEKINKNERKGKAEITLLVQGQELPEFWEALGGEPSEIKKHVPEDFWPPQPKLYKVGLGLGYLELPQINYKLSVEHKQRPKVELMPRMRLLQSLLDTRCVYILDCWSDVFIWLGRKSPRLVRAAALKLGQELCGMLHRPRHATVSRSLEGTEAQVFKAKFKNWDDVLTVDYTRNAEAVLQSPGLSGKVKRDAEKKDQMKADLTALFLPRQPPMSLAEAEQLMEEWNEDLDGMEGFVLEGKKFARLPEEEFGHFYTQDCYVFLCRYWVPVEYEEEEKKEDKEEKAEGKEGEEATAEAEEKQPEEDFQCIVYFWQGREASNMGWLTFTFSLQKKFESLFPGKLEVVRMTQQQENPKFLSHFKRKFIIHRGKRKAVQGAQQPSLYQIRTNGSALCTRCIQINTDSSLLNSEFCFILKVPFESEDNQGIVYAWVGRASDPDEAKLAEDILNTMFDTSYSKQVINEGEEPENFFWVGIGAQKPYDDDAEYMKHTRLFRCSNEKGYFAVTEKCSDFCQDDLADDDIMLLDNGQEVYMWVGTQTSQVEIKLSLKACQVIWVEGGPRWACGQGRVITQGSLSPCQVYIQHMRSKEHERPRRLRLVRKGNEQHAFTRCFHAWSAFCKALA

SEQ ID NO: 857566 - protein, 405 aa, Homo sapiens
DPRCSDPRFRADLTALFLPRQPPMSLAEAEQLMEEWNEDLDGMEGFVLEGKKFARLPEEEFGHFYTQDCYVFLCRYWVPVEYEEEEKKEDKEEKAEGKEGEEATAEAEEKQPEEDFQCIVYFWQGREASNMGWLTFTFSLQKKFESLFPGKLEVVRMTQQQENPKFLSHFKRKFIIHRGKRKAVQGAQQPSLYQIRTNGSALCTRCIQINTDSSLLNSEFCFILKVPFESEDNQGIVYAWVGRASDPDEAKLAEDILNTMFDTSYSKQVINEGEEPENFFWVGIGAQKPYDDDAEYMKHTRLFRCSNEKGYFAVTEKCSDFCQDDLADDDIMLLDNGQEVYMWVGTQTSQVEIKLSLKACQVYIQHMRSKEHERPRRLRLVRKGNEQHAFTRCFHAWSAFCKALA

SEQ ID NO: 857567 - protein, 1349 aa, Homo sapiens
QPAAPPSALAPALPSPARPGSESGAMEATGVLPFVRGVDLSGNDFKGGYFPENVKAMTSLRWLKLNRTGLCYLPEELAALQKLEHLSVSHNNLTTLHGELSSLPSLRAIVARANSLKNSGVPDDIFKLDDLSVLDLSHNQLTECPRELENAKNMLVLNLSHNSIDTIPNQLFINLTDLLYLDLSENRLESLPPQMRRLVHLQTLVLNGNPLLHAQLRQLPAMTALQTLHLRSTQRTQSNLPTSLEGLSNLAGQAAPGAPLSSGPLWALLLPWVEGVEPCSSDQYPEGQGWSYVTVTFAIMMMPNTDFMPRKLPRNPHVREFVQMEKLGRTAVVTVPKPHSSEVAELGFTLGLAALAPGVWAPADATPPCTPDVDLSCNDLTRVPECLYTLPSLRRLNLSSNQITELSLCIDQWVHVETLNLSRNQLTSLPSAICKLSKLKKLYLNSNKLDFDGLPSGIGKLTNLEEFMAANNNLELVPESLCRCPKLRKLVLNKNHLVTLPEAIHFLTEIEVLDVRENPNLVMPPKPADRAAEWYNIDFSLQNQLRLAGASPATVAAAAAAGSGPKDPMARKMRLRRRKDSAQDDQAKQVLKGMSDVAQEKNKKQEESADARAPSGKVRRWDQGLEKPRLDYSEFFTEDVGQLPGLTIWQIENFVPVLVEEAFHGKFYEADCYIVLKTFLDDSGSLNWEIYYWIGGEATLDKKACSAIHAVNLRNYLGAECRTVREEMGDESEEFLQVFDNDISYIEGGTASGFYTVEDTHYVTRMYRVYGKKNIKLEPVPLKGTSLDPRFVFLLDRGLDIYVWRGAQATLSSTTKARLFAEKINKNERKGKAEITLLVQGQELPEFWEALGGEPSEIKKHVPEDFWPPQPKLYKVGLGLGYLELPQINYKLSVEHKQRPKVELMPRMRLLQSLLDTRCVYILDCWSDVFIWLGRKSPRLVRAAALKLGQELCGMLHRPRHATVSRSLEGTEAQVFKAKFKNWDDVLTVDYTRNAEAVLQSPGLSGKVKRDAEKKDQMKADLTALFLPRQPPMSLAEAEQLMEEWNEDLDGMEGFVLEGKKFARLPEEEFGHFYTQDCYVFLCRYWVPVEYEEEEKKEDKEEKAEGKEGEEATAEAEEKQPEEDFQCIVYFWQGREASNMGWLTFTFSLQKKFESLFPGKLEVVRMTQQQENPKFLSHFKRKFIIHRGKRKAVQGAQQPSLYQIRTNGSALCTRCIQINTDSSLLNSEFCFILKVPFESEDNQGIVYAWVGRASDPDEAKLAEDILNTMFDTSYSKQVINEGEEPENFFWVGIGAQKPYDDDAEYMKHTRLFRCSNEKGYFAVTEKCSDFCQDDLADDDIMLLDNGQEV

SEQ ID NO: 857568 - protein, 357 aa, Homo sapiens
MLGTIRRVCVEEFGHFYTQDCYVFLCRYWVPVEYEEEEKKEDKEEKAEGKEGEEATAEAEEKQPEEDFQCIVYFWQGREASNMGWLTFTFSLQKKFESLFPGKLEVVRMTQQQENPKFLSHFKRKFIIHRGKRKAVQGAQQPSLYQIRTNGSALCTRCIQINTDSSLLNSEFCFILKVPFESEDNQGIVYAWVGRASDPDEAKLAEDILNTMFDTSYSKQVINEGEEPENFFWVGIGAQKPYDDDAEYMKHTRLFRCSNEKGYFAVTEKCSDFCQDDLADDDIMLLDNGQEVYMWVGTQTSQVEIKLSLKACQVYIQHMRSKEHERPRRLRLVRKGNEQHAFTRCFHAWSAFCKALA

SEQ ID NO: 857569 - protein, 1270 aa, Homo sapiens
QPAAPPSALAPALPSPARPGSESGAMEATGVLPFVRGVDLSGNDFKGGYFPENVKAMTSLRWLKLNRTGLCYLPEELAALQKLEHLSVSHNNLTTLHGELSSLPSLRAIVARANSLKNSGVPDDIFKLDDLSVLDLSHNQLTECPRELENAKNMLVLNLSHNSIDTIPNQLFINLTDLLYLDLSENRLESLPPQMRRLVHLQTLVLNGNPLLHAQLRQLPAMTALQTLHLRSTQRTQSNLPTSLEGLSNLAGQAAPGAPLSSGPLWALLLPWVEGVEPCSSDQYPEGQGWSYVTVTFAIMMMPNTDFMPRKLPRNPHVREFVQMEKLGRTAVVTVPKPHSSEVAELGFTLGLAALAPGVWAPADATPPCTPDVDLSCNDLTRVPECLYTLPSLRRLNLSSNQITELSLCIDQWVHVETLNLSRNQLTSLPSAICKLSKLKKLYLNSNKLDFDGLPSGIGKLTNLEEFMAANNNLELVPESLCRCPKLRKLVLNKNHLVTLPEAIHFLTEIEVLDVRENPNLVMPPKPADRAAEWYNIDFSLQNQLRLAGASPATVAAAAAAGSGPKDPMARKMRLRRRKDSAQDDQAKQVLKGMSDVAQEKNKKQEESADARAPSGKVRRWDQGLEKPRLDYSEFFTEDVGQLPGLTIWQIENFVPVLVEEAFHGKFYEADCYIVLKTFLDDSGSLNWEIYYWIGGEATLDKKACSAIHAVNLRNYLGAECRTVREEMGDESEEFLQVFDNDISYIEGGTASGFYTVEDTHYVTRMYRVYGKKNIKLEPVPLKGTSLDPRFVFLLDRGLDIYVWRGAQATLSSTTKARLFAEKINKNERKGKAEITLLVQGQELPEFWEALGGEPSEIKKHVPEDFWPPQPKLYKVGLGLGYLELPQINYKLSVEHKQRPKVELMPRMRLLQSLLDTRCVYILDCWSDVFIWLGRKSPRLVRAAALKLGQELCGMLHRPRHATVSRSLEGTEAQVFKAKFKNWDDVLTVDYTRNAEAVLQSPGLSGKVKRDAEKKDQMKADLTALFLPRQPPMSLAEAEQLMEEWNEDLDGMEGFVLEGKKFARLPEEEFGHFYTQDCYVFLCRYWVPVEYEEEEKKEDKEEKAEGKEGEEATAEAEEKQPEEDFQCIVYFWQGREASNMGWLTFTFSLQKKFESLFPGKLEVVRMTQQQENPKFLSHFKRKFIIHRGKRKAVQGAQQPSLYQIRTNGSALCTRCIQINTDSSLLNSEFCFILKGGVVGVSQDSVDQGVGCLGAESAANTPTPAHSPGSL

SEQ ID NO: 857570 - protein, 348 aa, Homo sapiens
EELTARYEASGVESLICRYWVPVEYEEEEKKEDKEEKAEGKEGEEATAEAEEKQPEEDFQCIVYFWQGREASNMGWLTFTFSLQKKFESLFPGKLEVVRMTQQQENPKFLSHFKRKFIIHRGKRKAVQGAQQPSLYQIRTNGSALCTRCIQINTDSSLLNSEFCFILKVPFESEDNQGIVYAWVGRASDPDEAKLAEDILNTMFDTSYSKQVINEGEEPENFFWVGIGAQKPYDDDAEYMKHTRLFRCSNEKGYFAVTEKCSDFCQDDLADDDIMLLDNGQEVYMWVGTQTSQVEIKLSLKACQVYIQHMRSKEHERPRRLRLVRKGNEQHAFTRCFHAWSAFCKALA

SEQ ID NO: 857571 - protein, 1334 aa, Homo sapiens
QPAAPPSALAPALPSPARPGSESGAMEATGVLPFVRGVDLSGNDFKGGYFPENVKAMTSLRWLKLNRTGLCYLPEELAALQKLEHLSVSHNNLTTLHGELSSLPSLRAIVARANSLKNSGVPDDIFKLDDLSVLDLSHNQLTECPRELENAKNMLVLNLSHNSIDTIPNQLFINLTDLLYLDLSENRLESLPPQMRRLVHLQTLVLNGNPLLHAQLRQLPAMTALQTLHLRSTQRTQSNLPTSLEGLSNLAGQAAPGAPLSSGPLWALLLPWVEGVEPCSSDQYPEGQGWSYVTVTFAIMMMPNTDFMPRKLPRNPHVREFVQMEKLGRTAVVTVPKPHSSEVAELGFTLGLAALAPGVWAPADATPPCTPDVDLSCNDLTRVPECLYTLPSLRRLNLSSNQITELSLCIDQWVHVETLNLSRNQLTSLPSAICKLSKLKKLYLNSNKLDFDGLPSGIGKLTNLEEFMAANNNLELVPESLCRCPKLRKLVLNKNHLVTLPEAIHFLTEIEVLDVRENPNLVMPPKPADRAAEWYNIDFSLQNQLRLAGASPATVAAAAAAGSGPKDPMARKMRLRRRKDSAQDDQAKQVLKGMSDVAQEKNKKQEESADARAPSGKVRRWDQGLEKPRLDYSEFFTEDVGQLPGLTIWQIENFVPVLVEEAFHGKFYEADCYIVLKTFLDDSGSLNWEIYYWIGGEATLDKKACSAIHAVNLRNYLGAECRTVREEMGDESEEFLQVFDNDISYIEGGTASGFYTVEDTHYVTRMYRVYGKKNIKLEPVPLKGTSLDPRFVFLLDRGLDIYVWRGAQATLSSTTKARLFAEKINKNERKGKAEITLLVQGQELPEFWEALGGEPSEIKKHVPEDFWPPQPKLYKVGLGLGYLELPQINYKLSVEHKQRPKVELMPRMRLLQSLLDTRCVYILDCWSDVFIWLGRKSPRLVRAAALKLGQELCGMLHRPRHATVSRSLEGTEAQVFKAKFKNWDDVLTVDYTRNAEAVLQSPGLSGKVKRDAEKKDQMKADLTALFLPRQPPMSLAEAEQLMEEWNEDLDGMEGFVLEGKKFARLPEEEFGHFYTQDCYVFLCRYWVPVEYEEEEKKEDKEEKAEGKEGEEATAEAEEKQPEEDFQCIVYFWQGREASNMGWLTFTFSLQKKFESLFPGKLEVVRMTQQQENPKFLSHFKRKFIIHRGKRKAVQGAQQPSLYQIRTNGSALCTRCIQINTDSSLLNSEFCFILKVPFESEDNQGIVYAWVGRASDPDEAKLAEDILNTMFDTSYSKQVRRRAGRRAHTEEPGQAGALGWTGLSRRLLSTKVRSLRTSSGWALGHRSPMMTMPST

SEQ ID NO: 857572 - protein, 1405 aa, Homo sapiens
QPAAPPSALAPALPSPARPGSESGAMEATGVLPFVRGVDLSGNDFKGGYFPENVKAMTSLRWLKLNRTGLCYLPEELAALQKLEHLSVSHNNLTTLHGELSSLPSLRAIVARANSLKNSGVPDDIFKLDDLSVLDLSHNQLTECPRELENAKNMLVLNLSHNSIDTIPNQLFINLTDLLYLDLSENRLESLPPQMRRLVHLQTLVLNGNPLLHAQLRQLPAMTALQTLHLRSTQRTQSNLPTSLEGLSNLAGQAAPGAPLSSGPLWALLLPWVEGVEPCSSDQYPEGQGWSYVTVTFAIMMMPNTDFMPRKLPRNPHVREFVQMEKLGRTAVVTVPKPHSSEVAELGFTLGLAALAPGVWAPADATPPCTPDVDLSCNDLTRVPECLYTLPSLRRLNLSSNQITELSLCIDQWVHVETLNLSRNQLTSLPSAICKLSKLKKLYLNSNKLDFDGLPSGIGKLTNLEEFMAANNNLELVPESLCRCPKLRKLVLNKNHLVTLPEAIHFLTEIEVLDVRENPNLVMPPKPADRAAEWYNIDFSLQNQLRLAGASPATVAAAAAAGSGPKDPMARKMRLRRRKDSAQDDQAKQVLKGMSDVAQEKNKKQEESADARAPSGKVRRWDQGLEKPRLDYSEFFTEDVGQLPGLTIWQIENFVPVLVEEAFHGKFYEADCYIVLKTFLDDSGSLNWEIYYWIGGEATLDKKACSAIHAVNLRNYLGAECRTVREEMGDESEEFLQVFDNDISYIEGGTASGFYTVEDTHYVTRMYRVYGKKNIKLEPVPLKGTSLDPRFVFLLDRGLDIYVWRGAQATLSSTTKARLFAEKINKNERKGKAEITLLVQGQELPEFWEALGGEPSEIKKHVPEDFWPPQPKLYKVGLGLGYLELPQINYKLSVEHKQRPKVELMPRMRLLQSLLDTRCVYILDCWSDVFIWLGRKSPRLVRAAALKLGQELCGMLHRPRHATVSRSLEGTEAQVFKAKFKNWDDVLTVDYTRNAEAVLQSPGLSGKVKRDAEKKDQMKADLTALFLPRQPPMSLAEAEQLMEEWNEDLDGMEGFVLEGKKFARLPEEEFGHFYTQDCYVFLCRYWVPVEYEEEEKKEDKEEKAEGKEGEEATAEAEEKQPEEDFQCIVYFWQGREASNMGWLTFTFSLQKKFESLFPGKLEVVRMTQQQENPKFLSHFKRKFIIHRGKRKAVQGAQQPSLYQIRTNGSALCTRCIQINTDSSLLNSEFCFILKVPFESEDNQGIVYAWVGRASDPDEAKLAEDILNTMFDTSYSKQVINEGEEPENFFWVGIGAQKPYDDDAEYMKHTRLFRCSNEKGYFAVTEKCSDFCQDDLADDDIMLLDNGQEVYMRVSPSSLTAPCASLPKLRARSKRTTIPDRGGPVFGQGYTSSCAPLLEPPNKLSR

SEQ ID NO: 857573 - protein, 1470 aa, Homo sapiens
QPAAPPSALAPALPSPARPGSESGAMEATGVLPFVRGVDLSGNDFKGGYFPENVKAMTSLRWLKLNRTGLCYLPEELAALQKLEHLSVSHNNLTTLHGELSSLPSLRAIVARANSLKNSGVPDDIFKLDDLSVLDLSHNQLTECPRELENAKNMLVLNLSHNSIDTIPNQLFINLTDLLYLDLSENRLESLPPQMRRLVHLQTLVLNGNPLLHAQLRQLPAMTALQTLHLRSTQRTQSNLPTSLEGLSNLAGQAAPGAPLSSGPLWALLLPWVEGVEPCSSDQYPEGQGWSYVTVTFAIMMMPNTDFMPRKLPRNPHVREFVQMEKLGRTAVVTVPKPHSSEVAELGFTLGLAALAPGVWAPADATPPCTPDVDLSCNDLTRVPECLYTLPSLRRLNLSSNQITELSLCIDQWVHVETLNLSRNQLTSLPSAICKLSKLKKLYLNSNKLDFDGLPSGIGKLTNLEEFMAANNNLELVPESLCRCPKLRKLVLNKNHLVTLPEAIHFLTEIEVLDVRENPNLVMPPKPADRAAEWYNIDFSLQNQLRLAGASPATVAAAAAAGSGPKDPMARKMRLRRRKDSAQDDQAKQVLKGMSDVAQEKNKKQEESADARAPSGKVRRWDQGLEKPRLDYSEFFTEDVGQLPGLTIWQIENFVPVLVEEAFHGKFYEADCYIVLKTFLDDSGSLNWEIYYWIGGEATLDKKACSAIHAVNLRNYLGAECRTVREEMGDESEEFLQVFDNDISYIEGGTASGFYTVEDTHYVTRMYRVYGKKNIKLEPVPLKGTSLDPRFVFLLDRGLDIYVWRGAQATLSSTTKARLFAEKINKNERKGKAEITLLVQGQELPEFWEALGGEPSEIKKHVPEDFWPPQPKLYKVGLGLGYLELPQINYKLSVEHKQRPKVELMPRMRLLQSLLDTRCVYILDCWSDVFIWLGRKSPRLVRAAALKLGQELCGMLHRPRHATVSRSLEGTEAQVFKAKFKNWDDVLTVDYTRNAEAVLQSPGLSGKVKRDAEKKDQMKADLTALFLPRQPPMSLAEAEQLMEEWNEDLDGMEGFVLEGKKFARLPEEEFGHFYTQDCYVFLCRYWVPVEYEEEEKKEDKEEKAEGKEGEEATAEAEEKQPEEDFQCIVYFWQGREASNMGWLTFTFSLQKKFESLFPGKLEVVRMTQQQENPKFLSHFKRKFIIHRGKRKAVQGAQQPSLYQIRTNGSALCTRCIQINTDSSLLNSEFCFILKVPFESEDNQGIVYAWVGRASDPDEAKLAEDILNTMFDTSYSKQVRRRAGRRAHTEEPGQAGALELDWPFPQVVINEGEEPENFFWVGIGAQKPYDDDAEYMKHTRLFRCSNEKGYFAVTEKCSDFCQDDLADDDIMLLDNGQEVYMWVGTQTSQVEIKLSLKACQVIWVEGGPRWACGQGRVITQGSLSPCQVYIQHMRSKEHERPRRLRLVRKGNEQHAFTRCFHAWSAFCKALA

SEQ ID NO: 857574 - protein, 1248 aa, Homo sapiens
QPAAPPSALAPALPSPARPGSESGAMEATGVLPFVRGVDLSGNDFKGGYFPENVKAMTSLRWLKLNRTGLCYLPEELAALQKLEHLSVSHNNLTTLHGELSSLPSLRAIVARANSLKNSGVPDDIFKLDDLSVLDLSHNQLTECPRELENAKNMLVLNLSHNSIDTIPNQLFINLTDLLYLDLSENRLESLPPQMRRLVHLQTLVLNGNPLLHAQLRQLPAMTALQTLHLRSTQRTQSNLPTSLEGLSNLAGQAAPGAPLSSGPLWALLLPWVEGVEPCSSDQYPEGQGWSYVTVTFAIMMMPNTDFMPRKLPRNPHVREFVQMEKLGRTAVVTVPKPHSSEVAELGFTLGLAALAPGVWAPADATPPCTPDVDLSCNDLTRVPECLYTLPSLRRLNLSSNQITELSLCIDQWVHVETLNLSRNQLTSLPSAICKLSKLKKLYLNSNKLDFDGLPSGIGKLTNLEEFMAANNNLELVPESLCRCPKLRKLVLNKNHLVTLPEAIHFLTEIEVLDVRENPNLVMPPKPADRAAEWYNIDFSLQNQLRLAGASPATVAAAAAAGSGPKDPMARKMRLRRRKDSAQDDQAKQVLKGMSDVAQEKNKKQEESADARAPSGKVRRWDQGLEKPRLDYSEFFTEDVGQLPGLTIWQIENFVPVLVEEAFHGKFYEADCYIVLKTFLDDSGSLNWEIYYWIGGEATLDKKACSAIHAVNLRNYLGAECRTVREEMGDESEEFLQVFDNDISYIEGGTASGFYTVEDTHYVTRMYRVYGKKNIKLEPVPLKGTSLDPRFVFLLDRGLDIYVWRGAQATLSSTTKARLFAEKINKNERKGKAEITLLVQGQELPEFWEALGGEPSEIKKHVPEDFWPPQPKLYKVGLGLGYLELPQINYKLSVEHKQRPKVELMPRMRLLQSLLDTRCVYILDCWSDVFIWLGRKSPRLVRAAALKLGQELCGMLHRPRHATVSRSLEGTEAQVFKAKFKNWDDVLTVDYTRNAEAVLQSPGLSGKVKRDAEKKDQMKADLTALFLPRQPPMSLAEAEQLMEEWNEDLDGMEGFVLEGKKFARLPEEEFGHFYTQDCYVFLCRYWVPVEYEEEEKKEDKEEKAEGKEGEEATAEAEEKQPEEDFQCIVYFWQGREASNMGWLTFTFSLQKKFESLFPGKLEVVRMTQQQENPKFLSHFKRKFIIHRGKRKAVQGAQQPSLYQIRTNGSALCTRCIQINTDSSLLNSEFCFILKPHSSARDKADVDAL

SEQ ID NO: 857575 - protein, 1165 aa, Homo sapiens
QPAAPPSALAPALPSPARPGSESGAMEATGVLPFVRGVDLSGNDFKGGYFPENVKAMTSLRWLKLNRTGLCYLPEELAALQKLEHLSVSHNNLTTLHGELSSLPSLRAIVARANSLKNSGVPDDIFKLDDLSVLDLSHNQLTECPRELENAKNMLVLNLSHNSIDTIPNQLFINLTDLLYLDLSENRLESLPPQMRRLVHLQTLVLNGNPLLHAQLRQLPAMTALQTLHLRSTQRTQSNLPTSLEGLSNLAGQAAPGAPLSSGPLWALLLPWVEGVEPCSSDQYPEGQGWSYVTVTFAIMMMPNTDFMPRKLPRNPHVREFVQMEKLGRTAVVTVPKPHSSEVAELGFTLGLAALAPGVWAPADATPPCTPDVDLSCNDLTRVPECLYTLPSLRRLNLSSNQITELSLCIDQWVHVETLNLSRNQLTSLPSAICKLSKLKKLYLNSNKLDFDGLPSGIGKLTNLEEFMAANNNLELVPESLCRCPKLRKLVLNKNHLVTLPEAIHFLTEIEVLDVRENPNLVMPPKPADRAAEWYNIDFSLQNQLRLAGASPATVAAAAAAGSGPKDPMARKMRLRRRKDSAQDDQAKQVLKGMSDVAQEKNKKQEESADARAPSGKVRRWDQGLEKPRLDYSEFFTEDVGQLPGLTIWQIENFVPVLVEEAFHGKFYEADCYIVLKTFLDDSGSLNWEIYYWIGGEATLDKKACSAIHAVNLRNYLGAECRTVREEMGDESEEFLQVFDNDISYIEGGTASGFYTVEDTHYVTRMYRVYGKKNIKLEPVPLKGTSLDPRFVFLLDRGLDIYVWRGAQATLSSTTKARLFAEKINKNERKGKAEITLLVQGQELPEFWEALGGEPSEIKKHVPEDFWPPQPKLYKVGLGLGYLELPQINYKLSVEHKQRPKVELMPRMRLLQSLLDTRCVYILDCWSDVFIWLGRKSPRLVRAAALKLGQELCGMLHRPRHATVSRSLEGTEAQVFKAKFKNWDDVLTVDYTRNAEAVLQSPGLSGKVKRDAEKKDQMKADLTALFLPRQPPMSLAEAEQLMEEWNEDLDGMEGFVLEGKKFARLPEEEFGHFYTQDCYVFLCRYWVPVEYEEEEKKEDKEEKAEGKEGEEATAEAEEKQPEEDFQCIVYFWQGREASNMGWLTFTFSLQKKFESLFPGKLEWYA

SEQ ID NO: 857576 - protein, 943 aa, Homo sapiens
QPAAPPSALAPALPSPARPGSESGAMEATGVLPFVRGVDLSGNDFKGGYFPENVKAMTSLRWLKLNRTGLCYLPEELAALQKLEHLSVSHNNLTTLHGELSSLPSLRAIVARANSLKNSGVPDDIFKLDDLSVLDLSHNQLTECPRELENAKNMLVLNLSHNSIDTIPNQLFINLTDLLYLDLSENRLESLPPQMRRLVHLQTLVLNGNPLLHAQLRQLPAMTALQTLHLRSTQRTQSNLPTSLEGLSNLAGQAAPGAPLSSGPLWALLLPWVEGVEPCSSDQYPEGQGWSYVTVTFAIMMMPNTDFMPRKLPRNPHVREFVQMEKLGRTAVVTVPKPHSSEVAELGFTLGLAALAPGVWAPADATPPCTPDVDLSCNDLTRVPECLYTLPSLRRLNLSSNQITELSLCIDQWVHVETLNLSRNQLTSLPSAICKLSKLKKLYLNSNKLDFDGLPSGIGKLTNLEEFMAANNNLELVPESLCRCPKLRKLVLNKNHLVTLPEAIHFLTEIEVLDVRENPNLVMPPKPADRAAEWYNIDFSLQNQLRLAGASPATVAAAAAAGSGPKDPMARKMRLRRRKDSAQDDQAKQVLKGMSDVAQEKNKKQEESADARAPSGKVRRWDQGLEKPRLDYSEFFTEDVGQLPGLTIWQIENFVPVLVEEAFHGKFYEADCYIVLKTFLDDSGSLNWEIYYWIGGEATLDKKACSAIHAVNLRNYLGAECRTVREEMGDESEEFLQVFDNDISYIEGGTASGFYTVEDTHYVTRMYRVYGKKNIKLEPVPLKGTSLDPRFVFLLDRGLDIYVWRGAQATLSSTTKARLFAEKINKNERKGKAEITLLVQGQELPEFWEALGGEPSEIKKHVPEDFWPPQPKLYKVSPAAEAHLERLLQGPGLRQAGTAPGLVRKRKGPHPLSASKECTQVTPPAPATSSATVPSSLKQHQWG

SEQ ID NO: 857577 - protein, 741 aa, Homo sapiens
QPAAPPSALAPALPSPARPGSESGAMEATGVLPFVRGVDLSGNDFKGGYFPENVKAMTSLRWLKLNRTGLCYLPEELAALQKLEHLSVSHNNLTTLHGELSSLPSLRAIVARANSLKNSGVPDDIFKLDDLSVLDLSHNQLTECPRELENAKNMLVLNLSHNSIDTIPNQLFINLTDLLYLDLSENRLESLPPQMRRLVHLQTLVLNGNPLLHAQLRQLPAMTALQTLHLRSTQRTQSNLPTSLEGLSNLAGQAAPGAPLSSGPLWALLLPWVEGVEPCSSDQYPEGQGWSYVTVTFAIMMMPNTDFMPRKLPRNPHVREFVQMEKLGRTAVVTVPKPHSSEVAELGFTLGLAALAPGVWAPADATPPCTPDVDLSCNDLTRVPECLYTLPSLRRLNLSSNQITELSLCIDQWVHVETLNLSRNQLTSLPSAICKLSKLKKLYLNSNKLDFDGLPSGIGKLTNLEEFMAANNNLELVPESLCRCPKLRKLVLNKNHLVTLPEAIHFLTEIEVLDVRENPNLVMPPKPADRAAEWYNIDFSLQNQLRLAGASPATVAAAAAAGSGPKDPMARKMRLRRRKDSAQDDQAKQVLKGMSDVAQEKNKKQEESADARAPSGKVRRWDQGLEKPRLDYSEFFTEDVGQLPGLTIWQIENFVPVLVEEAFHGKFYEADCYIVLKTFLDDSGSLNWEIYYWIGGEATLDKKACSAIHAVNLRNYLGAECRTVREEMGDESEEFLQVPAR

SEQ ID NO: 857578 - protein, 128 aa, Homo sapiens
MVFRMSSANLASSGSDAEYMKHTRLFRCSNEKGYFAVTEKCSDFCQDDLADDDIMLLDNGQEVYMWVGTQTSQVEIKLSLKACQVYIQHMRSKEHERPRRLRLVRKGNEQHAFTRCFHAWSAFCKALA

SEQ ID NO: 857579 - protein, 657 aa, Homo sapiens
QPAAPPSALAPALPSPARPGSESGAMEATGVLPFVRGVDLSGNDFKGGYFPENVKAMTSLRWLKLNRTGLCYLPEELAALQKLEHLSVSHNNLTTLHGELSSLPSLRAIVARANSLKNSGVPDDIFKLDDLSVLDLSHNQLTECPRELENAKNMLVLNLSHNSIDTIPNQLFINLTDLLYLDLSENRLESLPPQMRRLVHLQTLVLNGNPLLHAQLRQLPAMTALQTLHLRSTQRTQSNLPTSLEGLSNLAGQAAPGAPLSSGPLWALLLPWVEGVEPCSSDQYPEGQGWSYVTVTFAIMMMPNTDFMPRKLPRNPHVREFVQMEKLGRTAVVTVPKPHSSEVAELGFTLGLAALAPGVWAPADATPPCTPDVDLSCNDLTRVPECLYTLPSLRRLNLSSNQITELSLCIDQWVHVETLNLSRNQLTSLPSAICKLSKLKKLYLNSNKLDFDGLPSGIGKLTNLEEFMAANNNLELVPESLCRCPKLRKLVLNKNHLVTLPEAIHFLTEIEVLDVRENPNLVMPPKPADRAAEWYNIDFSLQNQLRLAGASPATVAAAAAARELRPNGPIWHRNDCRHGEKAAKGTSKPQRMEPRAEGKGCPGKRGNGHSNWPSPTKRTANPANPQPTRKATRGTGQAKATGPQEIGPQQVTRHTPP

SEQ ID NO: 857580 - protein, 113 aa, Homo sapiens [sequence omitted]

SEQ ID NO: 857581 - protein, 1294 aa, Homo sapiens
QPAAPPSALAPALPSPARPGSESGAMEATGVLPFVRGVDLSGNDFKGGYFPENVKAMTSLRWLKLNRTGLCYLPEELAALQKLEHLSVSHNNLTTLHGELSSLPSLRAIVARANSLKNSGVPDDIFKLDDLSVLDLSHNQLTECPRELENAKNMLVLNLSHNSIDTIPNQLFINLTDLLYLDLSENRLESLPPQMRRLVHLQTLVLNGNPLLHAQLRQLPAMTALQTLHLRSTQRTQSNLPTSLEGLSNLADVDLSCNDLTRVPECLYTLPSLRRLNLSSNQITELSLCIDQWVHVETLNLSRNQLTSLPSAICKLSKLKKLYLNSNKLDFDGLPSGIGKLTNLEEFMAANNNLELVPESLCRCPKLRKLVLNKNHLVTLPEAIHFLTEIEVLDVRENPNLVMPPKPADRAAEWYNIDFSLQNQLRLAGASPATVAAAAAAGSGPKDPMARKMRLRRRKDSAQDDQAKQVLKGMSDVAQEKNKKQEESADARAPSGKVRRWDQGLEKPRLDYSEFFTEDVGQLPGLTIWQIENFVPVLVEEAFHGKFYEADCYIVLKTFLDDSGSLNWEIYYWIGGEATLDKKACSAIHAVNLRNYLGAECRTVREEMGDESEEFLQVFDNDISYIEGGTASGFYTVEDTHYVTRMYRVYGKKNIKLEPVPLKGTSLDPRFVFLLDRGLDIYVWRGAQATLSSTTKARLFAEKINKNERKGKAEITLLVQGQELPEFWEALGGEPSEIKKHVPEDFWPPQPKLYKVGLGLGYLELPQINYKLSVEHKQRPKVELMPRMRLLQSLLDTRCVYILDCWSDVFIWLGRKSPRLVRAAALKLGQELCGMLHRPRHATVSRSLEGTEAQVFKAKFKNWDDVLTVDYTRNAEAVLQSPGLSGKVKRDAEKKDQMKADLTALFLPRQPPMSLAEAEQLMEEWNEDLDGMEGFVLEGKKFARLPEEEFGHFYTQDCYVFLCRYWVPVEYEEEEKKEDKEEKAEGKEGEEATAEAEEKQPEEDFQCIVYFWQGREASNMGWLTFTFSLQKKFESLFPGKLEVVRMTQQQENPKFLSHFKRKFIIHRGKRKAVQGAQQPSLYQIRTNGSALCTRCIQINTDSSLLNSEFCFILKVPFESEDNQGIVYAWVGRASDPDEAKLAEDILNTMFDTSYSKQVINEGEEPENFFWVGIGAQKPYDDDAEYMKHTRLFRCSNEKGYFAVTEKCSDFCQDDLADDDIMLLDNGQEVYMWVGTQTSQVEIKLSLKACQVYIQHMRSKEHERPRRLRLVRKGNEQHAFTRCFHAWSAFCKALA

SEQ ID NO: 857582 - protein, 1414 aa, Homo sapiens; identical to SEQ ID NO: 857562

SEQ ID NO: 857583 - protein, 1442 aa, Homo sapiens
QPAAPPSALAPALPSPARPGSESGAMEATGVLPFVRGVDLSGNDFKGGYFPENVKAMTSLRWLKLNRTGLCYLPEELAALQKLEHLSVSHNNLTTLHGELSSLPSLRAIVARANSLKNSGVPDDIFKLDDLSVLDLSHNQLTECPRELENAKNMLVLNLSHNSIDTIPNQLFINLTDLLYLDLSENRLESLPPQMRRLVHLQTLVLNGNPLLHAQLRQLPAMTALQTLHLRSTQRTQSNLPTSLEGLSNLAGQAAPGAPLSSGPLWALLLPWVEGVEPCSSDQYPEGQGWSYVTVTFAIMMMPNTDFMPRKLPRNPHVREFVQMEKLGRTAVVTVPKPHSSEVAELGFTLGLAALAPGVWAPADATPPCTPDVDLSCNDLTRVPECLYTLPSLRRLNLSSNQITELSLCIDQWVHVETLNLSRNQLTSLPVRLRPSEGDGRKAVSLALTSHPCPFPLQSAICKLSKLKKLYLNSNKLDFDGLPSGIGKLTNLEEFMAANNNLELVPESLCRCPKLRKLVLNKNHLVTLPEAIHFLTEIEVLDVRENPNLVMPPKPADRAAEWYNIDFSLQNQLRLAGASPATVAAAAAAGSGPKDPMARKMRLRRRKDSAQDDQAKQVLKGMSDVAQEKNKKQEESADARAPSGKVRRWDQGLEKPRLDYSEFFTEDVGQLPGLTIWQIENFVPVLVEEAFHGKFYEADCYIVLKTFLDDSGSLNWEIYYWIGGEATLDKKACSAIHAVNLRNYLGAECRTVREEMGDESEEFLQVFDNDISYIEGGTASGFYTVEDTHYVTRMYRVYGKKNIKLEPVPLKGTSLDPRFVFLLDRGLDIYVWRGAQATLSSTTKARLFAEKINKNERKGKAEITLLVQGQELPEFWEALGGEPSEIKKHVPEDFWPPQPKLYKVGLGLGYLELPQINYKLSVEHKQRPKVELMPRMRLLQSLLDTRCVYILDCWSDVFIWLGRKSPRLVRAAALKLGQELCGMLHRPRHATVSRSLEGTEAQVFKAKFKNWDDVLTVDYTRNAEAVLQSPGLSGKVKRDAEKKDQMKADLTALFLPRQPPMSLAEAEQLMEEWNEDLDGMEGFVLEGKKFARLPEEEFGHFYTQDCYVFLCRYWVPVEYEEEEKKEDKEEKAEGKEGEEATAEAEEKQPEEDFQCIVYFWQGREASNMGWLTFTFSLQKKFESLFPGKLEVVRMTQQQENPKFLSHFKRKFIIHRGKRKAVQGAQQPSLYQIRTNGSALCTRCIQINTDSSLLNSEFCFILKVPFESEDNQGIVYAWVGRASDPDEAKLAEDILNTMFDTSYSKQVINEGEEPENFFWVGIGAQKPYDDDAEYMKHTRLFRCSNEKGYFAVTEKCSDFCQDDLADDDIMLLDNGQEVYMWVGTQTSQVEIKLSLKACQVYIQHMRSKEHERPRRLRLVRKGNEQHAFTRCFHAWSAFCKALA

SEQ ID NO: 857584 - protein, 1137 aa, Homo sapiens
GWYGPGVRHGTRLELCYSDFCDYDDALTLTLCLENSPEPPCEGVCPNGETWAHSSCHLPKPHSSEVAELGFTLGLAALAPGVWAPADATPPCTPDVDLSCNDLTRVPECLYTLPSLRRLNLSSNQITELSLCIDQWVHVETLNLSRNQLTSLPSAICKLSKLKKLYLNSNKLDFDGLPSGIGKLTNLEEFMAANNNLELVPESLCRCPKLRKLVLNKNHLVTLPEAIHFLTEIEVLDVRENPNLVMPPKPADRAAEWYNIDFSLQNQLRLAGASPATVAAAAAAGSGPKDPMARKMRLRRRKDSAQDDQAKQVLKGMSDVAQEKNKKQEESADARAPSGKVRRWDQGLEKPRLDYSEFFTEDVGQLPGLTIWQIENFVPVLVEEAFHGKFYEADCYIVLKTFLDDSGSLNWEIYYWIGGEATLDKKACSAIHAVNLRNYLGAECRTVREEMGDESEEFLQVFDNDISYIEGGTASGFYTVEDTHYVTRMYRVYGKKNIKLEPVPLKGTSLDPRFVFLLDRGLDIYVWRGAQATLSSTTKARLFAEKINKNERKGKAEITLLVQGQELPEFWEALGGEPSEIKKHVPEDFWPPQPKLYKVGLGLGYLELPQINYKLSVEHKQRPKVELMPRMRLLQSLLDTRCVYILDCWSDVFIWLGRKSPRLVRAAALKLGQELCGMLHRPRHATVSRSLEGTEAQVFKAKFKNWDDVLTVDYTRNAEAVLQSPGLSGKVKRDAEKKDQMKADLTALFLPRQPPMSLAEAEQLMEEWNEDLDGMEGFVLEGKKFARLPEEEFGHFYTQDCYVFLCRYWVPVEYEEEEKKEDKEEKAEGKEGEEATAEAEEKQPEEDFQCIVYFWQGREASNMGWLTFTFSLQKKFESLFPGKLEVVRMTQQQENPKFLSHFKRKFIIHRGKRKAVQGAQQPSLYQIRTNGSALCTRCIQINTDSSLLNSEFCFILKVPFESEDNQGIVYAWVGRASDPDEAKLAEDILNTMFDTSYSKQVINEGEEPENFFWVGIGAQKPYDDDAEYMKHTRLFRCSNEKGYFAVTEKCSDFCQDDLADDDIMLLDNGQEVYMWVGTQTSQVEIKLSLKACQVYIQHMRSKEHERPRRLRLVRKGNEQHAFTRCFHAWSAFCKALA

SEQ ID NO: 857585 - protein, 1497 aa, Homo sapiens
QPAAPPSALAPALPSPARPGSESGAMEATGVLPFVRGVDLSGNDFKGGYFPENVKAMTSLRWLKLNRTGLCYLPEELAALQKLEHLSVSHNNLTTLHGELSSLPSLRAIVARANSLKNSGVPDDIFKLDDLSVLDLSHNQLTECPRELENAKNMLVLNLSHNSIDTIPNQLFINLTDLLYLDLSENRLESLPPQMRRLVHLQTLVLNGNPLLHAQLRQLPAMTALQTLHLRSTQRTQSNLPTSLEGLSNLAGQAAPGAPLSSGPLWALLLPWVEGVEPCSSDQYPEGQGWSYVTVTFAIMMMPNTDFMPRKLPRNPHVREFVQMEKLGRTAVVTVPKPHSSEVAELGFTLGLAALAPGVWAPADATPPCTPDVDLSCNDLTRVPECLYTLPSLRRLNLSSNQITELSLCIDQWVHVETLNLSRNQLTSLPSAICKLSKLKKLYLNSNKLDFDGLPSGIGKLTNLEEFMAANNNLELVPESLCRCPKLRKLVLNKNHLVTLPEAIHFLTEIEVLDVRENPNLVMPPKPADRAAEWYNIDFSLQNQLRLAGASPATVAAAAAAGSGPKDPMARKMRLRRRKDSAQDDQAKQVLKGMSDVAQEKNKKQEESADARAPSGKVRRWDQGLEKPRLDYSEFFTEDVGQLPGLTIWQIENFVPVLVEEAFHGKFYEADCYIVLKVRAGHAVRGHVAQYLPLRWLSPQLQSFVQGGQVGGGQAAGGGPGTGAVQSPWGWEACAVQSGVSGVAEKTRMKADVAVCLGFQTFLDDSGSLNWEIYYWIGGEATLDKKACSAIHAVNLRNYLGAECRTVREEMGDESEEFLQVFDNDISYIEGGTASGFYTVEDTHYVTRMYRVYGKKNIKLEPVPLKGTSLDPRFVFLLDRGLDIYVWRGAQATLSSTTKARLFAEKINKNERKGKAEITLLVQGQELPEFWEALGGEPSEIKKHVPEDFWPPQPKLYKVGLGLGYLELPQINYKLSVEHKQRPKVELMPRMRLLQSLLDTRCVYILDCWSDVFIWLGRKSPRLVRAAALKLGQELCGMLHRPRHATVSRSLEGTEAQVFKAKFKNWDDVLTVDYTRNAEAVLQSPGLSGKVKRDAEKKDQMKADLTALFLPRQPPMSLAEAEQLMEEWNEDLDGMEGFVLEGKKFARLPEEEFGHFYTQDCYVFLCRYWVPVEYEEEEKKEDKEEKAEGKEGEEATAEAEEKQPEEDFQCIVYFWQGREASNMGWLTFTFSLQKKFESLFPGKLEVVRMTQQQENPKFLSHFKRKFIIHRGKRKAVQGAQQPSLYQIRTNGSALCTRCIQINTDSSLLNSEFCFILKVPFESEDNQGIVYAWVGRASDPDEAKLAEDILNTMFDTSYSKQVINEGEEPENFFWVGIGAQKPYDDDAEYMKHTRLFRCSNEKGYFAVTEKCSDFCQDDLADDDIMLLDNGQEVYMWVGTQTSQVEIKLSLKACQVYIQHMRSKEHERPRRLRLVRKGNEQHAFTRCFHAWSAFCKALA

SEQ ID NO: 857586 - protein, 1313 aa, Homo sapiens
QPAAPPSALAPALPSPARPGSESGAMEATGVLPFVRGVDLSGNDFKGGYFPENVKAMTSLRWLKLNRTGLCYLPEELAALQKLEHLSVSHNNLTTLHGELSSLPSLRAIVARANSLKNSGVPDDIFKLDDLSVLDLSHNQLTECPRELENAKNMLVLNLSHNSIDTIPNQLFINLTDLLYLDLSENRLESLPPQMRRLVHLQTLVLNGNPLLHAQLRQLPAMTALQTLHLRSTQRTQSNLPTSLEGLSNLAGQAAPGAPLSSGPLWALLLPWVEGVEPCSSDQYPEGQGWSYVTVTFAIMMMPNTDFMPRKLPRNPHVREFVQMEKLGRTAVVTVPKPHSSEVAELGFTLGLAALAPGVWAPADATPPCTPDVDLSCNDLTRVPECLYTLPSLRRLNLSSNQITELSLCIDQWVHVETLNLSRNQLTSLPSAICKLSKLKKLYLNSNKLDFDGLPSGIGKLTNLEEFMAANNNLELVPESLCRCPKLRKLVLNKNHLVTLPEAIHFLTEIEVLDVRENPNLVMPPKPADRAAEWYNIDFSLQNQLRLAGASPATVAAAAAAGSGPKDPMARKMRLRRRKDSAQDDQAKQVLKGMSDVAQEKNKKQEESADARAPSGKVRRWDQGLEKPRLDYSEFFTEDVGQLPGLTIWQIENFVPVLVEEAFHGKFYEADCYIVLKTFLDDSGSLNWEIYYWIGGEATLDKKACSAIHAVNLRNYLGAECRTVREEMGDESEEFLQVFDNDISYIEGGTASGFYTVEDTHYVTRMYRVYGKKNIKLEPVPLKGTSLDPRFVFLLDRGLDIYVWRGAQATLSSTTKARLFAEKINKNERKGKAEITLLVQGQELPEFWEALGGEPSEIKKHVPEDFWPPQPKLYKVGLGLGYLELPQINYKLSVEHKQRPKVELMPRMRLLQSLLDTRCVYILDCWSDVFIWLGRKSPRLVRAAALKLGQELCGMLHRPRHATVSRSLEGTEAQVFKAKFKNWDDVLTVDYTRNAEAVLQSPGLSGKVKRDAEKKDQMKADLTALFLPRQPPMSLAEAEQLMEEWNEDLDGMEGFVLEGKKFARLPEEEFGHFYTQDCYVFLCRYWVPVEYEEEEKKEDKEEKAEGKEGEEATAEAEEKQPEEDFQCIVYFWQGREASNMGWLTFTFSLQKKFESLFPGKLEVVRMTQQQENPKFLSHFKRKFIIHRGKRKAVQGAQQPSLYQIRTNGSALCTRCIQINTDSSLLNSEFCFILKVPFESEDNQGIVYAWVGRASDPDEAKLAEDILNTMFDTSYSKQVINEGEEPENFFWVGIGAQKPYDDDAEYMKHTRLFR

SEQ ID NO: 857587 - protein, 1334 aa, Homo sapiens; identical to SEQ ID NO: 857571

SEQ ID NO: 857588 - protein, 1433 aa, Homo sapiens
QPAAPPSALAPALPSPARPGSESGAMEATGVLPFVRGVDLSGNDFKGGYFPENVKAMTSLRWLKLNRTGLCYLPEELAALQKLEHLSVSHNNLTTLHGELSSLPSLRAIVARANSLKNSGVPDDIFKLDDLSVLDLSHNQLTECPRELENAKNMLVLNLSHNSIDTIPNQLFINLTDLLYLDLSENRLESLPPQMRRLVHLQTLVLNGNPLLHAQLRQLPAMTALQTLHLRSTQRTQSNLPTSLEGLSNLADVDLSCNDLTRVPECLYTLPSLRRLNLSSNQITELSLCIDQWVHVETLNLSRNQLTSLPVRLRPSVGGWEEGREPGPDLPPLPFPLQSAICKLSKLKKLYLNSNKLDFDGLPSGIGKLTNLEEFMAANNNLELVPESLCRCPKLRKLVLNKNHLVTLPEAIHFLTEIEVLDVRENPNLVMPPKPADRAAEWYNIDFSLQNQLRLAGASPATVAAAAAAGSGPKDPMARKMRLRRRKDSAQDDQAKQVLKGMSDVAQEKNKKQEESADARAPSGKVRRWDQGLEKPRLDYSEFFTEDVGQLPGLTIWQIENFVPVLVEEAFHGKFYEADCYIVLKVRAGHAVRGHVAQYLPLRWLSPQLQSFVQGGQVGGGQAAGGGPGTGAVQSPWGWEACAVQSGVSGVAWKTRMKADVAVCLGFQTFLDDSGSLNWEIYYWIGGEATLDKKACSAIHAVNLRNYLGAECRTVREEMGDESEEFLQVFDNDISYIEGGTASGFYTVEDTHYVTRMYRVYGKKNIKLEPVPLKGTSLDPRFVFLLDRGLDIYVWRGAQATLSSTTKARLFAEKINKNERKGKAEITLLVQGQELPEFWEALGGEPSEIKKHVPEDFWPPQPKLYKVGLGLGYLELPQINYKLSVEHKQRPKVELMPRMRLLQSLLDTRCVYILDCWSDVFIWLGRKSPRLVRAAALKLGQELCGMLHRPRHATVSRSLEGTEAQVFKAKFKNWDDVLTVDYTRNAEAVLQSPGLSGKVKRDAEKKDQMKADLTALFLPRQPPMSLAEAEQLMEEWNEDLDGMEGFVLEGKKFARLPEEEFGHFYTQDCYVFLCRYWVPVEYEEEEKKEDKEEKAEGKEGEEATAEAEEKQPEEDFQCIVYFWQGREASNMGWLTFTFSLQKKFESLFPGKLEVVRMTQQQENPKFLSHFKRKFIIHRGKRKAVQGAQQPSLYQIRTNGSALCTRCLAGGGRSGEQAQGARPESLLMPHPFHRCIQINTDSSLLNSEFCFILKVPFESEDNQGIVYAWVGRASDPDEAKLAEDILNTMFDTSYSKQVINEGEEPENFFWVGIGAQKPYDDDAEYMKHTRLFRCSNEKGYFAVTEKCSDFCQDDLADDDIMLLDNGQEVYMWVGTQTSQVEIKLSLKACQVYIQHMRSKEHERPRRLRLVRKGNEQHAFTRCFHAWSAFCKALA

SEQ ID NO: 857589 - protein, 1443 aa, Homo sapiens
QPAAPPSALAPALPSPARPGSESGAMEATGVLPFVRGVDLSGNDFKGGYFPENVKAMTSLRWLKLNRTGLCYLPEELAALQKLEHLSVSHNNLTTLHGELSSLPSLRAIVARANSLKNSGVPDDIFKLDDLSVLDLSHNQLTECPRELENAKNMLVLNLSHNSIDTIPNQLFINLTDLLYLDLSENRLESLPPQMRRLVHLQTLVLNGNPLLHAQLRQLPAMTALQTLHLRSTQRTQSNLPTSLEGLSNLAGQAAPGAPLSSGPLWALLLPWVEGVEPCSSDQYPEGQGWSYVTVTFAIMMMPNTDFMPRKLPRNPHVREFVQMEKLGRTAVVTVPKPHSSEVAELGFTLGLAALAPGVWAPADATPPCTPDVDLSCNDLTRVPECLYTLPSLRRLNLSSNQITELSLCIDQWVHVETLNLSRNQLTSLPSAICKLSKLKKLYLNSNKLDFDGLPSGIGKLTNLEEFMAANNNLELVPESLCRCPKLRKLVLNKNHLVTLPEAIHFLTEIEVLDVRENPNLVMPPKPADRAAEWYNIDFSLQNQLRLAGASPATVAAAAAAGSGPKDPMARKMRLRRRKDSAQDDQAKQVLKGMSDVAQEKNKKQEESADARAPSGKVRRWDQGLEKPRLDYSEFFTEDVGQLPGLTIWQIENFVPVLVEEAFHGKFYEADCYIVLKTFLDDSGSLNWEIYYWIGGEATLDKKACSAIHAVNLRNYLGAECRTVREEMGDESEEFLQVFDNDISYIEGGTASGFYTVEDTHYVTRMYRVYGKKNIKLEPVPLKGTSLDPRFVFLLDRGLDIYVWRGAQATLSSTTKARLFAEKINKNERKGKAEITLLVQGQELPEFWEALGGEPSEIKKHVPEDFWPPQPKLYKVGLGLGYLELPQINYKLSVEHKQRPKVELMPRMRLLQSLLDTRCVYILDCWSDVFIWLGRKSPRLVRAAALKLGQELCGMLHRPRHATVSRSLEGTEAQVFKAKFKNWDDVLTVDYTRNAEAVLQSPGLSGKVKRDAEKKDQMKADLTALFLPRQPPMSLAEAEQLMEEWNEDLDGMEGFVLEGKKFARLPEEEFGHFYTQDCYVFLCRYWVPVEYEEEEKKEDKEEKAEGKEGEEATAEAEEKQPEEDFQCIVYFWQGREASNMGWLTFTFSLQKKFESLFPGKLEVVRMTQQQENPKFLSHFKRKFIIHRGKRKAVQGAQQPSLYQIRTNGSALCTRCIQINTDSSLLNSEFCFILKVPFESEDNQGIVYAWVGRASDPDEAKLAEDILNTMFDTSYSKQVRRRAGRRAHTEEPGQAGALELDWPFPQVVINEGEEPENFFWVGIGAQKPYDDDAEYMKHTRLFRCSNEKGYFAVTEKCSDFCQDDLADDDIMLLDNGQEVYMWVGTQTSQVEIKLSLKACQVYIQHMRSKEHERPRRLRLVRKGNEQHAFTRCFHAWSAFCKALA

SEQ ID NO: 857590 - protein, 1349 aa, Homo sapiens; identical to SEQ ID NO: 857567

SEQ ID NO: 857591 - protein, 1313 aa, Homo sapiens; identical to SEQ ID NO: 857586

SEQ ID NO: 857592 - protein, 1407 aa, Homo sapiens
QPAAPPSALAPALPSPARPGSESGAMEATGVLPFVRGVDLSGNDFKGGYFPENVKAMTSLRWLKLNRTGLCYLPEELAALQKLEHLSVSHNNLTTLHGELSSLPSLRAIVARANSLKNSGVPDDIFKLDDLSVLDLSHNQLTECPRELENAKNMLVLNLSHNSIDTIPNQLFINLTDLLYLDLSENRLESLPPQMRRLVHLQTLVLNGNPLLHAQLRQLPAMTALQTLHLRSTQRTQSNLPTSLEGLSNLAGQAAPGAPLSSGPLWALLLPWVEGVEPCSSDQYPEGQGWSYVTVTFAIMMMPNTDFMPRKLPRNPHVREFVQMEKLGRTAVVTVPKPHSSEVAELGFTLGLAALAPGVWAPADATPPCTPDVDLSCNDLTRVPECLYTLPSLRRLNLSSNQITELSLCIDQWVHVETLNLSRNQLTSLPSAICKLSKLKKLYLNSNKLDFDGLPSGIGKLTNLEEFMAANNNLELVPESLCRCPKLRKLVLNKNHLVTLPEAIHFLTEIEVLDVRENPNLVMPPKPADRAAEWYNIDFSLQNQLRLAGASPATVAAAAAAGSGPKDPMARKMRLRRRKDSAQDDQAKQVLKGMSDVAQEKNKKQEESADARAPSGKVRRWDQGLEKPRLDYSEFFTEDVGQLPGLTIWQIENFVPVLVEEAFHGKFYEADCYIVLKTFLDDSGSLNWEIYYWIGGEATLDKKACSAIHAVNLRNYLGAECRTVREEMGDESEEFLQVFDNDISYIEGGTASGFYTVEDTHYVTRMYRVYGKKNIKLEPVPLKGTSLDPRFVFLLDRGLDIYVWRGAQATLSSTTKARLFAEKINKNERKGKAEITLLVQGQELPEFWEALGGEPSEIKKHVPEDFWPPQPKLYKVGLGLGYLELPQINYKLSVEHKQRPKVELMPRMRLLQSLLDTRCVYILDCWSDVFIWLGRKSPRLVRAAALKLGQELCGMLHRPRHATVSRSLEGTEAQVFKAKFKNWDDVLTVDYTRNAEAVLQSPGLSGKVKRDAEKKDQMKADLTALFLPRQPPMSLAEAEQLMEEWNEDLDGMEGFVLEGKKFARLPEEEFGHFYTQDCYVFLCRYWVPVEYEEEEKKEDKEEKAEGKEGEEATAEAEEKQPEEDFQCIVYFWQGREASNMGWLTFTFSLQKKFESLFPGKLEVVRMTQQQENPKFLSHFKRKFIIHRGKRKAVQGAQQPSLYQIRTNGSALCTRCIQINTDSSLLNSEFCFILKVPFESEDNQGIVYAWVGRASDPDEAKLAEDILNTMFDTSYSKQVRRRAGRRAHTEEPGQAGALGWTGLSRRLCSNEKGYFAVTEKCSDFCQDDLADDDIMLLDNGQEVYMWVGTQTSQVEIKLSLKACQVYIQHMRSKEHERPRRLRLVRKGNEQHAFTRCFHAWSAFCKALA

SEQ ID NO: 857593 - protein, 342 aa, Homo sapiens
MCCGDSKDPSEVRRTTWKIEEEEKKEDKEEKAEGKEGEEATAEAEEKQPEEDFQCIVYFWQGREASNMGWLTFTFSLQKKFESLFPGKLEVVRMTQQQENPKFLSHFKRKFIIHRGKRKAVQGAQQPSLYQIRTNGSALCTRCIQINTDSSLLNSEFCFILKVPFESEDNQGIVYAWVGRASDPDEAKLAEDILNTMFDTSYSKQVINEGEEPENFFWVGIGAQKPYDDDAEYMKHTRLFRCSNEKGYFAVTEKCSDFCQDDLADDDIMLLDNGQEVYMWVGTQTSQVEIKLSLKACQVYIQHMRSKEHERPRRLRLVRKGNEQHAFTRCFHAWSAFCKALA

SEQ ID NO: 857594 - protein, 1248 aa, Homo sapiens; identical to SEQ ID NO: 857574

SEQ ID NO: 857595 - protein, 259 aa, Homo sapiens
SRGSFGSVVRMTQQQENPKFLSHFKRKFIIHRGKRKAVQGAQQPSLYQIRTNGSALCTRCIQINTDSSLLNSEFCFILKVPFESEDNQGIVYAWVGRASDPDEAKLAEDILNTMFDTSYSKQVINEGEEPENFFWVGIGAQKPYDDDAEYMKHTRLFRCSNEKGYFAVTEKCSDFCQDDLADDDIMLLDNGQEVYMWVGTQTSQVEIKLSLKACQVYIQHMRSKEHERPRRLRLVRKGNEQHAFTRCFHAWSAFCKALA

SEQ ID NO: 857596 - protein, 262 aa, Homo sapiens
LYFLFPGKLEVVRMTQQQENPKFLSHFKRKFIIHRGKRKAVQGAQQPSLYQIRTNGSALCTRCIQINTDSSLLNSEFCFILKVPFESEDNQGIVYAWVGRASDPDEAKLAEDILNTMFDTSYSKQVINEGEEPENFFWVGIGAQKPYDDDAEYMKHTRLFRCSNEKGYFAVTEKCSDFCQDDLADDDIMLLDNGQEVYMWVGTQTSQVEIKLSLKACQVYIQHMRSKEHERPRRLRLVRKGNEQHAFTRCFHAWSAFCKALA

SEQ ID NO: 857597 - protein, 1178 aa, Homo sapiens
QPAAPPSALAPALPSPARPGSESGAMEATGVLPFVRGVDLSGNDFKGGYFPENVKAMTSLRWLKLNRTGLCYLPEELAALQKLEHLSVSHNNLTTLHGELSSLPSLRAIVARANSLKNSGVPDDIFKLDDLSVLDLSHNQLTECPRELENAKNMLVLNLSHNSIDTIPNQLFINLTDLLYLDLSENRLESLPPQMRRLVHLQTLVLNGNPLLHAQLRQLPAMTALQTLHLRSTQRTQSNLPTSLEGLSNLAGQAAPGAPLSSGPLWALLLPWVEGVEPCSSDQYPEGQGWSYVTVTFAIMMMPNTDFMPRKLPRNPHVREFVQMEKLGRTAVVTVPKPHSSEVAELGFTLGLAALAPGVWAPADATPPCTPDVDLSCNDLTRVPECLYTLPSLRRLNLSSNQITELSLCIDQWVHVETLNLSRNQLTSLPSAICKLSKLKKLYLNSNKLDFDGLPSGIGKLTNLEEFMAANNNLELVPESLCRCPKLRKLVLNKNHLVTLPEAIHFLTEIEVLDVRENPNLVMPPKPADRAAEWYNIDFSLQNQLRLAGASPATVAAAAAAGSGPKDPMARKMRLRRRKDSAQDDQAKQVLKGMSDVAQEKNKKQEESADARAPSGKVRRWDQGLEKPRLDYSEFFTEDVGQLPGLTIWQIENFVPVLVEEAFHGKFYEADCYIVLKTFLDDSGSLNWEIYYWIGGEATLDKKACSAIHAVNLRNYLGAECRTVREEMGDESEEFLQVFDNDISYIEGGTASGFYTVEDTHYVTRMYRVYGKKNIKLEPVPLKGTSLDPRFVFLLDRGLDIYVWRGAQATLSSTTKARLFAEKINKNERKGKAEITLLVQGQELPEFWEALGGEPSEIKKHVPEDFWPPQPKLYKVGLGLGYLELPQINYKLSVEHKQRPKVELMPRMRLLQSLLDTRCVYILDCWSDVFIWLGRKSPRLVRAAALKLGQELCGMLHRPRHATVSRSLEGTEAQVFKAKFKNWDDVLTVDYTRNAEAVLQSPGLSGKVKRDAEKKDQMKADLTALFLPRQPPMSLAEAEQLMEEWNEDLDGMEGFVLEGKKFARLPEEEFGHFYTQDCYVFLCRYWVPVEYEEEEKKEDKEEKAEGKEGEEATAEAEEKQPEEDFQCIVYFWQGREASNMGWLTFTFSLQKKFESLFPGKLEVCLAAPRARGQAEGCG

SEQ ID NO: 857598 - protein, 138 aa, Homo sapiens
MVINEGEEPENFFWVGIGAQKPYDDDAEYMKHTRLFRCSNEKGYFAVTEKCSDFCQDDLADDDIMLLDNGQEVYMWVGTQTSQVEIKLSLKACQVYIQHMRSKEHERPRRLRLVRKGNEQHAFTRCFHAWSAFCKALA

SEQ ID NO: 857599 - protein, 88 aa, Homo sapiens
IWTRNDAGQMTDLMYARQLAKKVYMWVGTQTSQVEIKLSLKACQVYIQHMRSKEHERPRRLRLVRKGNEQHAFTRCFHAWSAFCKALA

SEQ ID NO: 857600 - protein, 315 aa, Homo sapiens
PRVRTRQESLLCHPRCQLAHNVAVNFVPVLVEEAFHGKFYEADCYIVLKTFLDDSGSLNWEIYYWIGGEATLDKKACSAIHAVNLRNYLGAECRTVREEMGDESEEFLQVFDNDISYIEGGTASGFYTVEDTHYVTRMYRVYGKKNIKLEPVPLKGTSLDPRFVFLLDRGLDIYVWRGAQATLSSTTKARLFAEKINKNERKGKAEITLLVQGQELPEFWEALGGEPSEIKKHVPEDFWPPQPKLYKVSPAAEAHLERLLQGPGLRQAGTAPGLVRKRKGPHPLSASKECTQVTPPAPATSSATVPSSLKQHQWG

SEQ ID NO: 857601 - protein, 213 aa, Homo sapiens
MEFMRQQIGQSCNSHIHSDAPGALTAPATGQVPDVVARATVVVLTFLLSSCDARIYSQGPWVTRVSLRVSLRLSAYLPRAWGLASKAHCTRISKTQVSVSPIAECLPQHCLWSQLLGSGPALGQVAAQQRSAHAAPTHARIGSCASDCCSLTAAWPEVGCQVSWVLSPGTLRPKCQSVDYGMFGASGRGLRQWLFWSPMVATAGRALLPVNEL

SEQ ID NO: 857602 - protein, 717 aa, Homo sapiens
MSGDGATEQAAEYVPEKVKKAEKKLEENPYDLDAWSILIREAQNQPIDKARKTYERLVAQFPSSGRFWKLYIEAEIKAKNYDKVEKLFQRCLMKVLHIDLWKCYLSYVRETKGKLPSYKEKMAQAYDFALDKIGMEIMSYQIWVDYINFLKGVEAVGSYAENQRITAVRRVYQRGCVNPMINIEQLWRDYNKYEEGINIHLAKKMIEDRSRDYMNARRVAKEYETVMKGLDRNAPSVPPQNTPQEAQQVDMWKKYIQWEKSNPLRTEDQTLITKRVMFAYEQCLLVLGHHPDIWYEAAQYLEQSSKLLAEKGDMNNAKLFSDEAANIYERAISTLLKKNMLLYFAYADYEESRMKYEKVHSIYNRLLAIEDIDPTLVYIQYMKFARRAEGIKSGRMIFKKAREDTRTRHHVYVTAALMEYYCSKDKSVAFKIFELGLKKYGDIPEYVLAYIDYLSHLNEDNNTRVLFERVLTSGSLPPEKSGEIWARFLAFESNIGDLASILKVEKRRFTAFKEEYEGKETALLVDRYKFMDLYPCSASELKALGYKDVSRAKLAAIIPDPVVAPSIVPVLKDEVDRKPEYPKPDTQQMIPFQPRHLAPPGLHPVPGGVFPVPPAAVVLMKLLPPPICFQGPFVQVDELMEIFRRCKIPNTVEEAVRIITGGAPELAVEGNGPVESNAVLTKAVKRPNEDSDEDEEKGAVVPPVHDIYRARQQKRIR

SEQ ID NO: 857603 - protein, 106 aa, Homo sapiens
RTRGELMETDRRREKFPSVGPFVQVDELMEIFRRCKIPNTVEEAVRIITGGAPELAVEGNGPVESNAVLTKAVKRPNEDSDEDEEKGAVVPPVHDIYRARQQKRIR

SEQ ID NO: 857604 - protein, 680 aa, Homo sapiens
MSGDGATEQAAEYVPEKVKKAEKKLEENPYDLDAWSILIREAQNQPIDKARKTYERLVAQFPSSGRFWKLYIEAEIKAKNYDKVEKLFQRCLMKVLHIDLWKCYLSYVRETKGKLPSYKEKMAQAYDFALDKIGMEIMSYQIWVDYINFLKGVEAVGSYAENQRITAVRRVYQRGCVNPMINIEQLWRDYNKYEEGINIHLAKKMIEDRSRDYMNARRVAKEYETVMKGLDRNAPSVPPQNTPQEAQQVDMWKKYIQWEKSNPLRTEDQTLITKRGYENAKLFSDEAANIYERAISTLLKKNMLLYFAYADYEESRMKYEKVHSIYNRLLAIEDIDPTLVYIQYMKFARRAEGIKSGRMIFKKAREDTRTRHHVYVTAALMEYYCSKDKSVAFKIFELGLKKYGDIPEYVLAYIDYLSHLNEDNNTRVLFERVLTSGSLPPEKSGEIWARFLAFESNIGDLASILKVEKRRFTAFKEEYEGKETALLVDRYKFMDLYPCSASELKALGYKDVSRAKLAAIIPDPVVAPSIVPVLKDEVDRKPEYPKPDTQQMIPFQPRHLAPPGLHPVPGGVFPVPPAAVVLMKLLPPPICFQGPFVQVDELMEIFRRCKIPNTVEEAVRIITGGAPELAVEGNGPVESNAVLTKAVKRPNEDSDEDEEKGAVVPPVHDIYRARQQKRIR

SEQ ID NO: 857605 - protein, 749 aa, Homo sapiens
MSGDGATEQVETRSHCVSQAGLELLDLSDPPASAFQTVGLQAAEYVPEKVKKAEKKLEENPYDLDAWSILIREAQNQPIDKARKTYERLVAQFPSSGRFWKLYIEAEIKAKNYDKVEKLFQRCLMKVLHIDLWKCYLSYVRETKGKLPSYKEKMAQAYDFALDKIGMEIMSYQIWVDYINFLKGVEAVGSYAENQRITAVRRVYQRGCVNPMINIEQLWRDYNKYEEGINIHLAKKMIEDRSRDYMNARRVAKEYETVMKGLDRNAPSVPPQNTPQEAQQVDMWKKYIQWEKSNPLRTEDQTLITKRVMFAYEQCLLVLGHHPDIWYEAAQYLEQSSKLLAEKGDMNNAKLFSDEAANIYERAISTLLKKNMLLYFAYADYEESRMKYEKVHSIYNRLLAIEDIDPTLVYIQYMKFARRAEGIKSGRMIFKKAREDTRTRHHVYVTAALMEYYCSKDKSVAFKIFELGLKKYGDIPEYVLAYIDYLSHLNEDNNTRVLFERVLTSGSLPPEKSGEIWARFLAFESNIGDLASILKVEKRRFTAFKEEYEGKETALLVDRYKFMDLYPCSASELKALGYKDVSRAKLAAIIPDPVVAPSIVPVLKDEVDRKPEYPKPDTQQMIPFQPRHLAPPGLHPVPGGVFPVPPAAVVLMKLLPPPICFQGPFVQVDELMEIFRRCKIPNTVEEAVRIITGGAPELAVEGNGPVESNAVLTKAVKRPNEDSDEDEEKGAVVPPVHDIYRARQQKRIR

SEQ ID NO: 857606 - protein, 717 aa, Homo sapiens; identical to SEQ ID NO: 857602

SEQ ID NO: 857607 - protein, 482 aa, Homo sapiens
MSGDGATEQAAEYVPEKVKKAEKKLEENPYDLDAWSILIREAQNQPIDKARKTYERLVAQFPSSGRFWKLYIEAEIKAKNYDKVEKLFQRCLMKVLHIDLWKCYLSYVRETKGKLPSYKEKMAQAYDFALDKIGMEIMSYQIWVDYINFLKGVEAVGSYAENQRITAVRRVYQRGCVNPMINIEQLWRDYNKYEEGINIHLAKKMIEDRSRDYMNARRVAKEYETVMKGLDRNAPSVPPQNTPQEAQQVDMWKKYIQWEKSNPLRTEDQTLITKRVMFAYEQCLLVLGHHPDIWYEAAQYLEQSSKLLAEKGDMNNAKLFSDEAANIYERAISTLLKKNMLLYFAYADYEESRMKYEKVHSIYNRLLAIEDIDPTLVYIQYMKFARRAEGIKSGRMIFKKAREDTRTRHHVYVTAALMEYYCSKDKSVAFKIFELGLKKYGDIPEYVLAYIDYLSHLNEDNNTRVLFERVLTSGSLPPEKSG

SEQ ID NO: 857608 - protein, 103 aa, Homo sapiens
MSGDGATEQAAEYVPEKVKKAEKKLEENPYDLDAWSILIREAQNQPIDKARKTYERLVAQFPSSGRFWKLYIEAEVTILFYFFLYQYCSIHCSDRKQVRNIAN

SEQ ID NO: 857609 - protein, 103 aa, Homo sapiens; identical to SEQ ID NO: 857608

SEQ ID NO: 857610 - protein, 625 aa, Homo sapiens
MKVLHIDLWKCYLSYVRETKGKLPSYKEKMAQAYDFALDKIGMEIMSYQIWVDYINFLKGVEAVGSYAENQRITAVRRVYQRGCVNPMINIEQLWRDYNKYEEGINIHLAKKMIEDRSRDYMNARRVAKEYETVMKGLDRNAPSVPPQNTPQEAQQVDMWKKYIQWEKSNPLRTEDQTLITKRVMFAYEQCLLVLGHHPDIWYEAAQYLEQSSKLLAEKGDMNNAKLFSDEAANIYERAISTLLKKNMLLYFAYADYEESRMKYEKVHSIYNRLLAIEDIDPTLVYIQYMKFARRAEGIKSGRMIFKKAREDTRTRHHVYVTAALMEYYCSKDKSVAFKIFELGLKKYGDIPEYVLAYIDYLSHLNEDNNTRVLFERVLTSGSLPPEKSGEIWARFLAFESNIGDLASILKVEKRRFTAFKEEYEGKETALLVDRYKFMDLYPCSASELKALGYKDVSRAKLAAIIPDPVVAPSIVPVLKDEVDRKPEYPKPDTQQMIPFQPRHLAPPGLHPVPGGVFPVPPAAVVLMKLLPPPICFQGPFVQVDELMEIFRRCKIPNTVEEAVRIITGGAPELAVEGNGPVESNAVLTKAVKRPNEDSDEDEEKGAVVPPVHDIYRARQQKRIR

SEQ ID NO: 857611 - protein, 282 aa, Homo sapiens
MHMKILLHRKSELKKIKIFFNILEDNNTRVLFERVLTSGSLPPEKSGEIWARFLAFESNIGDLASILKVEKRRFTAFKEEYEGKETALLVDRYKFMDLYPCSASELKALGYKDVSRAKLAAIIPDPVVAPSIVPVLKDEVDRKPEYPKPDTQQMIPFQPRHLAPPGLHPVPGGVFPVPPAAVVLMKLLPPPICFQGPFVQVDELMEIFRRCKIPNTVEEAVRIITGGAPELAVEGNGPVESNAVLTKAVKRPNEDSDEDEEKGAVVPPVHDIYRARQQKRIR

SEQ ID NO: 857612 - protein, 717 aa, Homo sapiens; identical to SEQ ID NO: 857602

SEQ ID NO: 857613 - protein, 105 aa, Homo sapiens
  misc_feature (31)..(31): Xaa can be any naturally occurring amino acid
WGGKLVYWVWGTAPVMERGECRAPVSRAHIXYSRGVGVVCAEGGARATRKVGYMRREAARWIGPIGGEQGASRFRFWQKGEVGGKRRRESRGGGEAGARDRGGAR

SEQ ID NO: 857614 - protein, 442 aa, Homo sapiens
PDWLFGAARGLAGASSRSRAESGTMAPRGRRRPRPHRSESARRSKNTLERTHSMKDKAGQKCKPIDVFDFPDNSDVSSIGRLGENEKDEETYETFDPPLHSTAIYADEEEFSKHCGLSLSSTPPGKEAKRSSDTSGNEASEIESVKISAKKPGRKLRPISDDSESIEESDTRRKVKSAEKISTQRHEVIRTTASSELSEKPAESVTSKKTGPLSAQPSVEKENLAIESQSKTQKKGKISHDKRKKSRSKAIGSDTSDIVHIWCPEGMKTSDIKELNIVLPEFEKTHLEHQQRIESKVCKAAIATFYVNVKEQFIKMLKESQMLTNLKRKNAKMISDIEKKRQRMIEVQDELLRLEPQLKQLQTKYDELKERKSSLRNAAYFLSNLKQLYQDYSDVQAQEPNVKETYDSSSLPALLFKARTLLGAESHLRNINHQLEKLLDQG

SEQ ID NO: 857615 - protein, 442 aa, Homo sapiens; identical to SEQ ID NO: 857614

SEQ ID NO: 857616 - protein, 442 aa, Homo sapiens; identical to SEQ ID NO: 857614

SEQ ID NO: 857617 - protein, 344 aa, Homo sapiens
PDWLFGAARGLAGASSRSRAESGTMAPRGRRRPRPHRSESARRSKNTLERTHSMKDKAGQKCKPIDVFDFPDNSDVSSIGRLGENEKDEETYETFDPPLHSTAIYADEEEFSKHCGLSLSSTPPGKEAKRSSDTSGNEASEIESVKISAKKPGRKLRPISDDSESIEESDTRRKVKSAEKISTQRHEVIRTTASSELSEKPAESVTSKKTGPLSAQPSVEKENLAIESQSKTQKKGKISHDKRKKSRSKAIGSDTSDIVHIWCPEGMKTSDIKELNIVLPEFEKTHLEHQQRIESKVCKAAIATFYVNVKEQFIKMLKESQMLTNLKRKNAKVRATAETTTNKI

SEQ ID NO: 857618 - protein, 438 aa, Homo sapiens
REGSRLAADGAQSHTPRRSEENRSSPGPGKAAWRRSARRSKNTLERTHSMKDKAGQKCKPIDVFDFPDNSDVSSIGRLGENEKDEETYETFDPPLHSTAIYADEEEFSKHCGLSLSSTPPGKEAKRSSDTSGNEASEIESVKISAKKPGRKLRPISDDSESIEESDTRRKVKSAEKISTQRHEVIRTTASSELSEKPAESVTSKKTGPLSAQPSVEKENLAIESQSKTQKKGKISHDKRKKSRSKAIGSDTSDIVHIWCPEGMKTSDIKELNIVLPEFEKTHLEHQQRIESKVCKAAIATFYVNVKEQFIKMLKESQMLTNLKRKNAKMISDIEKKRQRMIEVQDELLRLEPQLKQLQTKYDELKERKSSLRNAAYFLSNLKQLYQDYSDVQAQEPNVKETYDSSSLPALLFKARTLLGAESHLRNINHQLEKLLDQG

SEQ ID NO: 857619 - protein, 431 aa, Homo sapiens
PDWLFGAARGLAGASSRSRAESGTMAPRGRRRPRPHRSESARRSKNTLERTHSMKDKAGQKCKPIDVFDFPDNSDVSSIGRLGENEKDEETYETFDPPLHSTAIYADEEEFSKHCGLSLSSTPPGKEAKRSSDTSGNEASEIESVKISAKKPGRKLRPISDDSESIEESDTRRKVKSAEKISTQRHEVIRTTASSELSEKPAESVTSKKTGPLSAQPSVEKENLAIESQSKTQKKGKISHDKRKKSRSKAIGSEGMKTSDIKELNIVLPEFEKTHLEHQQRIESKVCKAAIATFYVNVKEQFIKMLKESQMLTNLKRKNAKMISDIEKKRQRMIEVQDELLRLEPQLKQLQTKYDELKERKSSLRNAAYFLSNLKQLYQDYSDVQAQEPNVKETYDSSSLPALLFKARTLLGAESHLRNINHQLEKLLDQG

SEQ ID NO: 857620 - protein, 442 aa, Homo sapiens; identical to SEQ ID NO: 857614

SEQ ID NO: 857621 - protein, 442 aa, Homo sapiens; identical to SEQ ID NO: 857614

SEQ ID NO: 857622 - protein, 338 aa, Homo sapiens
PDWLFGAARGLAGASSRSRAESGTMAPRGRRRPRPHRSESARRSKNTLERTHSMKDKAGQKCKPIDVFDFPDNSDVSSIGRLGENEKDEETYETFDPPLHSTAIYADEEEFSKHCGLSLSSTPPGKEAKRSSDTSGNEASEIESVKISAKKPGRKLRPISDDSESIEESDTRRKVKSAEKISTQRHEVIRTTASSELSEKPAESVTSKKTGPLSAQPSVEKENLAIESQSKTQKKGKISHDKRKKSRSKAIGSDTSDIVHIWCPEGMKTSDIKELNIVLPEFEKTHLEHQQRIESKVCKAAIATFYVNVKEQFIKMLKESQMLTNLKRKNAKMKKLSH

SEQ ID NO: 857623 - protein, 91 aa, Homo sapiens
PDWLFGAARGLAGASSRSRAESGTMAPRGRRRPRPHRSESARRSKNTLERTHSMKDKAGQKCKPIDVFDFPDNSDVSSIGRLGENEKDEAP

SEQ ID NO: 857624 - protein, 230 aa, Homo sapiens
PDWLFGAARGLAGASSRSRAESGTMAPRGRRRPRPHRSESARRSKNTLERTHSMKDKAGQKCKPIDVFDFPDNSDVSSIGRLGENEKDEETYETFDPPLHSTAIYADEEEFSKHCGLSLSSTPPGKEAKRSSDTSGNEASEIESVKISAKKPGRKLRPISDDSESIEESDTRRKVKSAEKISTQRHEVIRTTASSELSEKPAESVTSKKTGPLSAQPFWGFFWGKQNKFI

SEQ ID NO: 857625 - protein, 442 aa, Homo sapiens; identical to SEQ ID NO: 857614

SEQ ID NO: 857626 - protein, 442 aa, Homo sapiens; identical to SEQ ID NO: 857614

SEQ ID NO: 857627 - protein, 338 aa, Homo sapiens; identical to SEQ ID NO: 857622

SEQ ID NO: 857628 - protein, 243 aa, Homo sapiens
PDWLFGAARGLAGASSRSRAESGTMAPRGRRRPRPHRSESARRSKNTLERTHSMKDKAGQKCKPIDVFDFPDNSDVSSIGRLGENEKDEETYETFDPPLHSTAIYADEEEFSKHCGLSLSSTPPGKEAKRSSDTSGNEASEIESVKISAKKPGRKLRPISDDSESIEESDTRRKVKSAEKISTQRHEVIRTTASSELSEKPAESVTSKKTGPLSAQPSVEKENLAIESQSILLTLCTFGVQKE

SEQ ID NO: 857629 - protein, 298 aa, Homo sapiens
AVFSFTQPGRKLRPISDDSESIEESDTRRKVKSAEKISTQRHEVIRTTASSELSEKPAESVTSKKTGPLSAQPSVEKENLAIESQSKTQKKGKISHDKRKKSRSKAIGSDTSDIVHIWCPEGMKTSDIKELNIVLPEFEKTHLEHQQRIESKVCKAAIATFYVNVKEQFIKMLKESQMLTNLKRKNAKMISDIEKKRQRMIEVQDELLRLEPQLKQLQTKYDELKERKSSLRNAAYFLSNLKQLYQDYSDVQAQEPNVKETYDSSSLPALLFKARTLLGAESHLRNINHQLEKLLDQG

SEQ ID NO: 857630 - protein, 338 aa, Homo sapiens; identical to SEQ ID NO: 857622

SEQ ID NO: 857631 - protein, 312 aa, Homo sapiens
  misc_feature (303)..(303): Xaa can be any naturally occurring amino acid
  misc_feature (306)..(306): Xaa can be any naturally occurring amino acid
MAPRGRRRPRPHRSESARRSKNTLERTHSMKDKAGQKCKPIDVFDFPDNSDVSSIGRLGENEKDEETYETFDPPLHSTAIYADEEEFSKHCGLSLSSTPPGKEAKRSSDTSGNEASEIESVKISAKKPGRKLRPISDDSESIEESDTRRKVKSAEKISTQRHEVIRTTASSELSEKPAESVTSKKTGPLSAQPSVEKENLAIESQSKTQKKGKISHDKRKKSRSKAIGSDTSDIVHIWCPEGMKTSDIKELNIVLPEFEKTHLEHQQRIESKVCKAAIATFYVNVKEQFIKMLKRSQSAAAPXKKXNPPATR

SEQ ID NO: 857632 - protein, 199 aa, Homo sapiens
MAPRGRRRPRPHRSESARRSKNTLERTHSMKDKAGQKCKPIDVFDFPDNSDVSSIGRLGENEKDEETYETFDPPLHSTAIYADEEEFSKHCGLSLSSTPPGKEAKRSSDTSGNEASEIESVKISAKKPGRKLRPISDDSESIEESDTRRKVKSAEKISTQRHEVIRTTASSELSEKPAESVTSKATLAASVKGLHESSN

SEQ ID NO: 857633 - protein, 1047 aa, Homo sapiens
MRSEALLLYFTLLHFAGAGFPEDSEPISISHGNYTKQYPVFVGHKPGRNTTQRHRLDIQMIMIMNGTLYIAARDHIYTVDIDTSHTEEIYCSKKLTWKSRQADVDTCRMKGKHKDECHNFIKVLLKKNDDALFVCGTNAFNPSCRNYKMDTLEPFGDEFSGMARCPYDAKHANVALFADGKLYSATVTDFLAIDAVIYRSLGESPTLRTVKHDSKWLKEPYFVQAVDYGDYIYFFFREIAVEYNTMGKVVFPRVAQVCKNDMGGSQRVLEKQWTSFLKARLNCSVPGDSHFYFNILQAVTDVIRINGRDVVLATFSTPYNSIPGSAVCAYDMLDIASVFTGRFKEQKSPDSTWTPVPDERVPKPRPGCCAGSSSLERYATSNEFPDDTLNFIKTHPLMDEAVPSIFNRPWFLRTMVRYRLTKIAVDTAAGPYQNHTVVFLGSEKGIILKFLARIGNSGFLNDSLFLEEMSVYNSEKCSYDGVEDKRIMGMQLDRASSSLYVAFSTCVIKVPLGRCERHGKCKKTCIASRDPYCGWIKEGGACSHLSPNSRLTFEQDIERGNTDGLGDCHNSFVALNDISTPLPDNEMSYNTVYGHSSSLLPSTTTSDSTAQEGYESRGGMLDWKHLLDSPDSTDPLGAVSSHNHQDKKGVIRESYLKGHDQLVPVTLLAIAVILAFVMGAVFSGITVYCVCDHRRKDVAVVQRKEKELTHSRRGSMSSVTKLSGLFGDTQSKDPKPEAILTPLMHNGKLATPGNTAKMLIKADQHHLDLTALPTPESTPTLQQKRKPSRGSREWERNQNLINACTKDMPPMGSPVIPTDLPLRASPSHIPSVVVLPITQQGYQHEYVDQPKMSEVAQMALEDQAATLEYKTIKEHLSSKSPNHGVNLVENLDSLPPKVPQREASLGPPGASLSQTGLSKRLEMHHSSSYGVDYKRSYPTNSLTRSHQATTLKRNNTNSSNSSHLSRNQSFGRGDNPPPAPQRVDSIQVHSSQPSGQAVTVSRQPSLNAYNSLTRSGLKRTPSLKPDVPPKPSFAPLSTSMKPNDACT

SEQ ID NO: 857634 - protein, 121 aa, Homo sapiens
MHRKENLCAVEGPQATGCRDVHWAHADRSFKKWYLKKIRSTFLRKASLLPSHWFSETQLKAKFPALRACHGIPVSLDIVNISTFGVLFHRHGFNVQNQKVEKWCQITLERIIFLVISPFLK

SEQ ID NO: 857635 - protein, 1030 aa, Homo sapiens
MRSEALLLYFTLLHFAGAGFPEDSEPISISHGNYTKQYPVFVGHKPGRNTTQRHRLDIQMIMIMNGTLYIAARDHIYTVDIDTSHTEEIYCSKKLTWKSRQADVDTCRMKGKHKDECHNFIKVLLKKNDDALFVCGTNAFNPSCRNYKMDTLEPFGDEFSGMARCPYDAKHANVALFADGKLYSATVTDFLAIDAVIYRSLGESPTLRTVKHDSKWLKEPYFVQAVDYGDYIYFFFREIAVEYNTMGKVVFPRVAQVCKNDMGGSQRVLEKQWTSFLKARLNCSVPGDSHFYFNILQAVTDVIRINGRDVVLATFSTPYNSIPGSAVCAYDMLDIASVFTGRFKEQKSPDSTWTPVPDERVPKPRPGCCAGSSSLERYATSNEFPDDTLNFIKTHPLMDEAVPSIFNRPWFLRTMVRYRLTKIAVDTAAGPYQNHTVVFLGSEKGIILKFLARIGNSGFLNDSLFLEEMSVYNSEKCSYDGVEDKRIMGMQLDRASSSLYVAFSTCVIKVPLGRCERHGKCKKTCIASRDPYCGWIKEGGACSHLSPNSRLTFEQDIERGNTDGLGDCHNSFVALNGHSSSLLPSTTTSDSTAQEGYESRGGMLDWKHLLDSPDSTDPLGAVSSHNHQDKKGVIRESYLKGHDQLVPVTLLAIAVILAFVMGAVFSGITVYCVCDHRRKDVAVVQRKEKELTHSRRGSMSSVTKLSGLFGDTQSKDPKPEAILTPLMHNGKLATPGNTAKMLIKADQHHLDLTALPTPESTPTLQQKRKPSRGSREWERNQNLINACTKDMPPMGSPVIPTDLPLRASPSHIPSVVVLPITQQGYQHEYVDQPKMSEVAQMALEDQAATLEYKTIKEHLSSKSPNHGVNLVENLDSLPPKVPQREASLGPPGASLSQTGLSKRLEMHHSSSYGVDYKRSYPTNSLTRSHQATTLKRNNTNSSNSSHLSRNQSFGRGDNPPPAPQRVDSIQVHSSQPSGQAVTVSRQPSLNAYNSLTRSGLKRTPSLKPDVPPKPSFAPLSTSMKPNDACT

SEQ ID NO: 857636 - protein, 1030 aa, Homo sapiens; identical to SEQ ID NO: 857635

SEQ ID NO: 857637 - protein, 827 aa, Homo sapiens
MDTLEPFGDEFSGMARCPYDAKHANVALFADGKLYSATVTDFLAIDAVIYRSLGESPTLRTVKHDSKWLKEPYFVQAVDYGDYIYFFFREIAVEYNTMGKVVFPRVAQVCKNDMGGSQRVLEKQWTSFLKARLNCSVPGDSHFYFNILQAVTDVIRINGRDVVLATFSTPYNSIPGSAVCAYDMLDIASVFTGRFKEQKSPDSTWTPVPDERVPKPRPGCCAGSSSLERYATSNEFPDDTLNFIKTHPLMDEAVPSIFNRPWFLRTMVRYRLTKIAVDTAAGPYQNHTVVFLGSEKGIILKFLARIGNSGFLNDSLFLEEMSVYNSEKCSYDGVEDKRIMGMQLDRASSSLYVAFSTCVIKVPLGRCERHGKCKKTCIASRDPYCGWIKEGGACSHLSPNSRLTFEQDIERGNTDGLGDCHNSFVALNGVIRESYLKGHDQLVPVTLLAIAVILAFVMGAVFSGITVYCVCDHRRKDVAVVQRKEKELTHSRRGSMSSVTKLSGLFGDTQSKDPKPEAILTPLMHNGKLATPGNTAKMLIKADQHHLDLTALPTPESTPTLQQKRKPSRGSREWERNQNLINACTKDMPPMGSPVIPTDLPLRASPSHIPSVVVLPITQQGYQHEYVDQPKMSEVAQMALEDQAATLEYKTIKEHLSSKSPNHGVNLVENLDSLPPKVPQREASLGPPGASLSQTGLSKRLEMHHSSSYGVDYKRSYPTNSLTRSHQATTLKRNNTNSSNSSHLSRNQSFGRGDNPPPAPQRVDSIQVHSSQPSGQAVTVSRQPSLNAYNSLTRSGLKRTPSLKPDVPPKPSFAPLSTSMKPNDACT

SEQ ID NO: 857638 - protein, 1030 aa, Homo sapiens; identical to SEQ ID NO: 857635

SEQ ID NO: 857639 - protein, 715 aa, Homo sapiens
MTPYNSIPGSAVCAYDMLDIASVFTGRFKEQKSPDSTWTPVPDERVPKPRPGCCAGSSSLERYATSNEFPDDTLNFIKTHPLMDEAVPSIFNRPWFLRTMVRYRLTKIAVDTAAGPYQNHTVVFLGSEKGIILKFLARIGNSGFLNDSLFLEEMSVYNSEKCSYDGVEDKRIMGMQLDRASSSLYVAFSTCVIKVPLGRCERHGKCKKTCIASRDPYCGWIKEGGACSHLSPNSRLTFEQDIERGNTDGLGDCHNSFVALNGHSSSLLPSTTTSDSTAQEGYESRGGMLDWKHLLDSPDSTDPLGAVSSHNHQDKKGVIRESYLKGHDQLVPVTLLAIAVILAFVMGAVFSGITVYCVCDHRRKDVAVVQRKEKELTHSRRGSMSSVTKLSGLFGDTQSKDPKPEAILTPLMHNGKLATPGNTAKMLIKADQHHLDLTALPTPESTPTLQQKRKPSRGSREWERNQNLINACTKDMPPMGSPVIPTDLPLRASPSHIPSVVVLPITQQGYQHEYVDQPKMSEVAQMALEDQAATLEYKTIKEHLSSKSPNHGVNLVENLDSLPPKVPQREASLGPPGASLSQTGLSKRLEMHHSSSYGVDYKRSYPTNSLTRSHQATTLKRNNTNSSNSSHLSRNQSFGRGDNPPPAPQRVDSIQVHSSQPSGQAVTVSRQPSLNAYNSLTRSGLKRTPSLKPDVPPKPSFAPLSTSMKPNDACT

SEQ ID NO: 857640 - protein, 1030 aa, Homo sapiens; identical to SEQ ID NO: 857635

SEQ ID NO: 857641 - protein, 864 aa, Homo sapiens
MDTLEPFGDEFSGMARCPYDAKHANVALFADGKLYSATVTDFLAIDAVIYRSLGESPTLRTVKHDSKWLKEPYFVQAVDYGDYIYFFFREIAVEYNTMGKVVFPRVAQVCKNDMGGSQRVLEKQWTSFLKARLNCSVPGDSHFYFNILQAVTDVIRINGRDVVLATFSTPYNSIPGSAVCAYDMLDIASVFTGRFKEQKSPDSTWTPVPDERVPKPRPGCCAGSSSLERYATSNEFPDDTLNFIKTHPLMDEAVPSIFNRPWFLRTMVRYRLTKIAVDTAAGPYQNHTVVFLGSEKGIILKFLARIGNSGFLNDSLFLEEMSVYNSEKCSYDGVEDKRIMGMQLDRASSSLYVAFSTCVIKVPLGRCERHGKCKKTCIASRDPYCGWIKEGGACSHLSPNSRLTFEQDIERGNTDGLGDCHNSFVALNGHSSSLLPSTTTSDSTAQEGYESRGGMLDWKHLLDSPDSTDPLGAVSSHNHQDKKGVIRESYLKGHDQLVPVTLLAIAVILAFVMGAVFSGITVYCVCDHRRKDVAVVQRKEKELTHSRRGSMSSVTKLSGLFGDTQSKDPKPEAILTPLMHNGKLATPGNTAKMLIKADQHHLDLTALPTPESTPTLQQKRKPSRGSREWERNQNLINACTKDMPPMGSPVIPTDLPLRASPSHIPSVVVLPITQQGYQHEYVDQPKMSEVAQMALEDQAATLEYKTIKEHLSSKSPNHGVNLVENLDSLPPKVPQREASLGPPGASLSQTGLSKRLEMHHSSSYGVDYKRSYPTNSLTRSHQATTLFGRGDNPPPAPQRVDSIQVHSSQPSGQAVTVSRQPSLNAYNSLTRSGLKRTPSLKPDVPPKPSFAPLSTSMKPNDACT

SEQ ID NO: 857642 - protein, 457 aa, Homo sapiens
MKTGHSSSLLPSTTTSDSTAQEGYESRGGMLDWKHLLDSPDSTDPLGAVSSHNHQDKKGVIRESYLKGHDQLVPVTLLAIAVILAFVMGAVFSGITVYCVCDHRRKDVAVVQRKEKELTHSRRGSMSSVTKLSGLFGDTQSKDPKPEAILTPLMHNGKLATPGNTAKMLIKADQHHLDLTALPTPESTPTLQQKRKPSRGSREWERNQNLINACTKDMPPMGSPVIPTDLPLRASPSHIPSVVVLPITQQGYQHEYVDQPKMSEVAQMALEDQAATLEYKTIKEHLSSKSPNHGVNLVENLDSLPPKVPQREASLGPPGASLSQTGLSKRLEMHHSSSYGVDYKRSYPTNSLTRSHQATTLKRNNTNSSNSSHLSRNQSFGRGDNPPPAPQRVDSIQVHSSQPSGQAVTVSRQPSLNAYNSLTRSGLKRTPSLKPDVPPKPSFAPLSTSMKPNDACT

SEQ ID NO: 857643 - protein, 403 aa, Homo sapiens [sequence omitted]

SEQ ID NO: 857644 - protein, 1030 aa, Homo sapiens; identical to SEQ ID NO: 857635

SEQ ID NO: 857645 - protein, 882 aa, Homo sapiens
MDTLEPFGDEFSGMARCPYDAKHANVALFADGKLYSATVTDFLAIDAVIYRSLGESPTLRTVKHDSKWLKEPYFVQAVDYGDYIYFFFREIAVEYNTMGKVVFPRVAQVCKNDMGGSQRVLEKQWTSFLKARLNCSVPGDSHFYFNILQAVTDVIRINGRDVVLATFSTPYNSIPGSAVCAYDMLDIASVFTGRFKEQKSPDSTWTPVPDERVPKPRPGCCAGSSSLERYATSNEFPDDTLNFIKTHPLMDEAVPSIFNRPWFLRTMVRYRLTKIAVDTAAGPYQNHTVVFLGSEKGIILKFLARIGNSGFLNDSLFLEEMSVYNSEKCSYDGVEDKRIMGMQLDRASSSLYVAFSTCVIKVPLGRCERHGKCKKTCIASRDPYCGWIKEGGACSHLSPNSRLTFEQDIERGNTDGLGDCHNSFVALNGHSSSLLPSTTTSDSTAQEGYESRGGMLDWKHLLDSPDSTDPLGAVSSHNHQDKKGVIRESYLKGHDQLVPVTLLAIAVILAFVMGAVFSGITVYCVCDHRRKDVAVVQRKEKELTHSRRGSMSSVTKLSGLFGDTQSKDPKPEAILTPLMHNGKLATPGNTAKMLIKADQHHLDLTALPTPESTPTLQQKRKPSRGSREWERNQNLINACTKDMPPMGSPVIPTDLPLRASPSHIPSVVVLPITQQGYQHEYVDQPKMSEVAQMALEDQAATLEYKTIKEHLSSKSPNHGVNLVENLDSLPPKVPQREASLGPPGASLSQTGLSKRLEMHHSSSYGVDYKRSYPTNSLTRSHQATTLKRNNTNSSNSSHLSRNQSFGRGDNPPPAPQRVDSIQVHSSQPSGQAVTVSRQPSLNAYNSLTRSGLKRTPSLKPDVPPKPSFAPLSTSMKPNDACT

SEQ ID NO: 857646 - protein, 769 aa, Homo sapiens
MGGSQRVLEKQWTSFLKARLNCSVPGDSHFYFNILQAVTDVIRINGRDVVLATFSTPYNSIPGSAVCAYDMLDIASVFTGRFKEQKSPDSTWTPVPDERVPKPRPGCCAGSSSLERYATSNEFPDDTLNFIKTHPLMDEAVPSIFNRPWFLRTMVRYRLTKIAVDTAAGPYQNHTVVFLGSEKGIILKFLARIGNSGFLNDSLFLEEMSVYNSEKCSYDGVEDKRIMGMQLDRASSSLYVAFSTCVIKVPLGRCERHGKCKKTCIASRDPYCGWIKEGGACSHLSPNSRLTFEQDIERGNTDGLGDCHNSFVALNGHSSSLLPSTTTSDSTAQEGYESRGGMLDWKHLLDSPDSTDPLGAVSSHNHQDKKGVIRESYLKGHDQLVPVTLLAIAVILAFVMGAVFSGITVYCVCDHRRKDVAVVQRKEKELTHSRRGSMSSVTKLSGLFGDTQSKDPKPEAILTPLMHNGKLATPGNTAKMLIKADQHHLDLTALPTPESTPTLQQKRKPSRGSREWERNQNLINACTKDMPPMGSPVIPTDLPLRASPSHIPSVVVLPITQQGYQHEYVDQPKMSEVAQMALEDQAATLEYKTIKEHLSSKSPNHGVNLVENLDSLPPKVPQREASLGPPGASLSQTGLSKRLEMHHSSSYGVDYKRSYPTNSLTRSHQATTLKRNNTNSSNSSHLSRNQSFGRGDNPPPAPQRVDSIQVHSSQPSGQAVTVSRQPSLNAYNSLTRSGLKRTPSLKPDVPPKPSFAPLSTSMKPNDACT

SEQ ID NO: 857647 - protein, 710 aa, Homo sapiens
MGGSQRVLEKQWTSFLKARLNCSVPGDSHFYFNILQAVTDVIRINGRDVVLATFSTPYNSIPGSAVCAYDMLDIASVFTGRFKEQKSPDSTWTPVPDERVPKPRPGCCAGSSSLERYATSNEFPDDTLNFIKTHPLMDEAVPSIFNRPWFLRTMVRCSYDGVEDKRIMGMQLDRASSSLYVAFSTCVIKVPLGRCERHGKCKKTCIASRDPYCGWIKEGGACSHLSPNSRLTFEQDIERGNTDGLGDCHNSFVALNGHSSSLLPSTTTSDSTAQEGYESRGGMLDWKHLLDSPDSTDPLGAVSSHNHQDKKGVIRESYLKGHDQLVPVTLLAIAVILAFVMGAVFSGITVYCVCDHRRKDVAVVQRKEKELTHSRRGSMSSVTKLSGLFGDTQSKDPKPEAILTPLMHNGKLATPGNTAKMLIKADQHHLDLTALPTPESTPTLQQKRKPSRGSREWERNQNLINACTKDMPPMGSPVIPTDLPLRASPSHIPSVVVLPITQQGYQHEYVDQPKMSEVAQMALEDQAATLEYKTIKEHLSSKSPNHGVNLVENLDSLPPKVPQREASLGPPGASLSQTGLSKRLEMHHSSSYGVDYKRSYPTNSLTRSHQATTLKRNNTNSSNSSHLSRNQSFGRGDNPPPAPQRVDSIQVHSSQPSGQAVTVSRQPSLNAYNSLTRSGLKRTPSLKPDVPPKPSFAPLSTSMKPNDACT

SEQ ID NO: 857648 - protein, 864 aa, Homo sapiens
MDTLEPFGDEFSGMARCPYDAKHANVALFADGKLYSATVTDFLAIDAVIYRSLGESPTLRTVKHDSKWLKEPYFVQAVDYGDYIYFFFREIAVEYNTMGKVVFPRVAQVCKNDMGGSQRVLEKQWTSFLKARLNCSVPGDSHFYFNILQAVTDVIRINGRDVVLATFSTPYNSIPGSAVCAYDMLDIASVFTGRFKEQKSPDSTWTPVPDERVPKPRPGCCAGSSSLERYATSNEFPDDTLNFIKTHPLMDEAVPSIFNRPWFLRTMVRYRLTKIAVDTAAGPYQNHTVVFLGSEKGIILKFLARIGNSGFLNDSLFLEEMSVYNSEKCSYDGVEDKRIMGMQLDRASSSLYVAFSTCVIKVPLGRCERHGKCKKTCIASRDPYCGWIKEGGACSHLSPNSRLTFEQDIERGNTDGLGDCHNSFVALNGHSSSLLPSTTTSDSTAQEGYESRGGMLDWKHLLDSPDSTDPLGAVSSHNHQDKKGVIRESYLKGHDQLVPVTLLAIAVILAFVMGAVFSGITVYCVCDHRRKDVAVVQRKEKELTHSRRGSMSSVTKLSGLFGDTQSKDPKPEAILTPLMHNGKLATPGNTAKMLIKADQHHLDLTALPTPESTPTLQQKRKPSRGSREWERNQNLINACTKDMPPMGSPVIPTDLPLRASPSHIPSVVVLPITQQGYQHEYVDQPYKTIKEHLSSKSPNHGVNLVENLDSLPPKVPQREASLGPPGASLSQTGLSKRLEMHHSSSYGVDYKRSYPTNSLTRSHQATTLKRNNTNSSNSSHLSRNQSFGRGDNPPPAPQRVDSIQVHSSQPSGQAVTVSRQPSLNAYNSLTRSGLKRTPSLKPDVPPKPSFAPLSTSMKPNDACT

SEQ ID NO: 857649 - protein, 917 aa, Homo sapiens
MDTLEPFGDEFSGMARCPYDAKHANVALFADGKLYSATVTDFLAIDAVIYRSLGESPTLRTVKHDSKWLKEPYFVQAVDYGDYIYFFFREIAVEYNTMGKVVFPRVAQVCKNDMGGSQRVLEKQWTSFLKARLNCSVPGDSHFYFNILQAVTDVIRINGRDVVLATFSTPYNSIPGSAVCAYDMLDIASVFTGRFKEQKSPDSTWTPVPDERVPKPRPGCCAGSSSLERYATSNEFPDDTLNFIKTHPLMDEAVPSIFNRPWFLRTMVRYRLTKIAVDTAAGPYQNHTVVFLGSEKGIILKFLARIGNSGFLNDSLFLEEMSVYNSEKCSYDGVEDKRIMGMQLDRASSSLYVAFSTCVIKVPLGRCERHGKCKKTCIASRDPYCGWIKEGGACSHLSPNSRLTFEQDIERGNTDGLGDCHNSFVALNGHSSSLLPSTTTSDSTAQEGYESRGGMLDWKHLLDSPDSTDPLGAVSSHNHQDKKGVIRESYLKGHDQLVPVTLLAIAVILAFVMGAVFSGITVYCVCDHRRKDVAVVQRKEKELTHSRRGSMSSVTKLSGLFGDTQSKDPKPEAILTPLMHNGKLATPGNTAKMLIKADQHHLDLTALPTPESTPTLQQKRKPSRGSREWERNQNLINACTKDMPPMGSPVIPTDLPLRASPSHIPSVVVLPITQQGYQHEYVDQPKMSEVAQMALEDQAATLEYKTIKEHLSSKSPNHGVNLVENLDSLPPKVPQREASLGPPGASLSQTGLSKRLEMHHSSSYGVDYKRSYPTNSLTRSHQATTLKRNNTNSSNSSHLSRNQSFGRGDNPPPAPQRVDSIQVHSSQPSGQAVTVSRQPSLNAYNSLTRSGLKRTPSLKPDVPPKPSFAPLSTHTHAHNTYTHTHRGEQKLKHFVHNFTGRGQTGFAFQPAKHKYIF

SEQ ID NO: 857650 - protein, 846 aa, Homo sapiens
MDTLEPFGDEFSGMARCPYDAKHANVALFADGKLYSATVTDFLAIDAVIYRSLGESPTLRTVKHDSKWLKEPYFVQAVDYGDYIYFFFREIAVEYNTMGKVVFPRVAQVCKNDMGGSQRVLEKQWTSFLKARLNCSVPGDSHFYFNILQAVTDVIRINGRDVVLATFSTPYNSIPGSAVCAYDMLDIASVFTGRFKEQKSPDSTWTPVPDERVPKPRPGCCAGSSSLERYATSNEFPDDTLNFIKTHPLMDEAVPSIFNRPWFLRTMVRYRLTKIAVDTAAGPYQNHTVVFLGSEKGIILKFLARIGNSGFLNDSLFLEEMSVYNSEKCSYDGVEDKRIMGMQLDRASSSLYVAFSTCVIKVPLGRCERHGKCKKTCIASRDPYCGWIKEGGACSHLSPNSRLTFEQDIERGNTDGLGDCHNSFVALNGHSSSLLPSTTTSDSTAQEGYESRGGMLDWKHLLDSPDSTDPLGAVSSHNHQDKKGVIRESYLKGHDQLVPVTLLAIAVILAFVMGAVFSGITVYCVCDHRRKDVAVVQRKEKELTHSRRGSMSSVTKLSGLFGDTQSKDPKPEAILTPLMHNGKLATPGNTAKMLIKADQHHLDLTALPTPESTPTLQQKRKPSRGSREWERNQNLINACTKDMPPMGSPVIPTDLPLRASPSHIPSVVVLPITQQGYQHEYVDQPKMSEVAQMALEDQAATLEYKTIKEHLSSKSPNHGVNLVENLDSLPPKVPQREASLGPPGASLSQTGLSKRLEMHHSSSYGVDYKRSLQQVGPTKDFSYHHKHEPKAHTYPIPHPPHTHTHAHNTYTHTHRGEQKLKHFVHNFTGRGQTGFAFQPAKHKYIF

SEQ ID NO: 857651 - protein, 116 aa, Homo sapiens [sequence omitted]

SEQ ID NO: 857652 - protein, 237 aa, Homo sapiens
SVSSDLGAKLNFEFKRCHERGKELPLSSLQGPERGSSFCFQNADLYIMLVSLLLIGVAAWGKGLGLVSSIHIIGGVIAVGVFLLLIAVAGLVGAVNHHQVLLFFYMIILGLVFIFQFVISCSCLAINRSKQTDVINASWWVMSNKTRDELERSFDCCGLFNLTTLYQQDYDFCTAICKSQSPTCQMCGEKFLKHSDEALKILGGVGLFFSFTEILGVWLAMRFRNQKDPRANPSAFL

SEQ ID NO: 857653 - protein, 210 aa, Homo sapiens
MVCGGFACSKNALCALNVVYMLVSLLLIGVAAWGKGLGLVSSIHIIGGVIAVGVFLLLIAVAGLVGAVNHHQVLLFFYMIILGLVFIFQFVISCSCLAINRSKQTDVINASWWVMSNKTRDELERSFDCCGLFNLTTLYQQDYDFCTAICKSQSPTCQMCGEKFLKHSDEALKILGGVGLFFSFTEILGVWLAMRFRNQKDPRANPSAFL

SEQ ID NO: 857654 - protein, 632 aa, Homo sapiens
MKALLLLVLPWLSPANYIDNVGNLHFLYSELCKGASHYGLTKDRKRRSQDGCPDGCASLTATAPSPEVSAAATISLMTDEPGLDNPAYVSSAEDGQPAISPVDSGRSNRTRARPFERSTIRSRSFKKINRALSVLRRTKSGSAVANHADQGRENSENTTAPEVFPRLYHLIPDGEITSIKINRVDPSESLSIRLVGGSETPLVHIIIQHIYRDGVIARDGRLLPGDIILKVNGMDISNVPHNYAVRLLRQPCQVLWLTVMREQKFRSRNNGQAPDAYRPRDDSFHVILNKSSPEEQLGIKLVRKVDEPGVFIFNVLDGGVAYRHGQLEENDRVLAINGHDLRYGSPESAAHLIQASERRVHLVVSRQVRQRSPDIFQEAGWNSNGSWSPGPGERSNTPKPLHPTITCHEKVVNIQKDPGESLGMTVAGGASHREWDLPIYVISVEPGGVISRDGRIKTGDILLNVDGVELTEVSRSEAVALLKRTSSSIVLKALEVKEYEPQEDCSSPAALDSNHNMAPPSDWSPSWVMWLELPRCLYNCKDIVLRRNTAGSLGFCIVGGYEEYNGNKPFFIKSIVEGTPAYNDGRIRCGDILLAVNGRSTSGMIHACLARLLKELKGRITLTIVSWPGTFL

SEQ ID NO: 857655 - protein, 728 aa, Homo sapiens
MNQPESANDPEPLCAVCGQAHSLEENHFYSYPEEVDDDLICHICLQALLDPLDTPCGHTYCTLCLTNFLVEKDFCPMDRKPLVLQHCKKSSILVNKLLNKLLVTCPFREHCTQVLQRCDLEHHFQTSCKGASHYGLTKDRKRRSQDGCPDGCASLTATAPSPEVSAAATISLMTDEPGLDNPAYVSSAEDGQPAISPVDSGRSNRTRARPFERSTIRSRSFKKINRALSVLRRTKSGSAVANHADQGRENSENTTAPEVFPRLYHLIPDGEITSIKINRVDPSESLSIRLVGGSETPLVHIIIQHIYRDGVIARDGRLLPGDIILKVNGMDISNVPHNYAVRLLRQPCQVLWLTVMREQKFRSRNNGQAPDAYRPRDDSFHVILNKSSPEEQLGIKLVRKVDEPGVFIFNVLDGGVAYRHGQLEENDRVLAINGHDLRYGSPESAAHLIQASERRVHLVVSRQVRQRSPDIFQEAGWNSNGSWSPGPGERSNTPKPLHPTITCHEKVVNIQKDPGESLGMTVAGGASHREWDLPIYVISVEPGGVISRDGRIKTGDILLNVDGVELTEVSRSEAVALLKRTSSSIVLKALEVKEYEPQEDCSSPAALDSNHNMAPPSDWSPSWVMWLELPRCLYNCKDIVLRRNTAGSLGFCIVGGYEEYNGNKPFFIKSIVEGTPAYNDGRIRCGDILLAVNGRSTSGMIHACLARLLKELKGRITLTIVSWPGTFL

SEQ ID NO: 857656 - protein, 156 aa, Homo sapiens
MNQPESANDPEPLCAVCGQAHSLEENHFYSYPEEVDDDLICHICLQALLDPLDTPCGHTYCTLCLTNFLVEKDFCPMDRKPLVLQHCKKSSILVNKLLNKLLVTCPFREHCTQVLQRCDLEHHFQTSQAWRHAPVVPATWEAEAGGLLEPRSSPLQ

SEQ ID NO: 857657 - protein, 632 aa, Homo sapiens; identical to SEQ ID NO: 857654

SEQ ID NO: 857658 - protein, 530 aa, Homo sapiens
IGLPVSLHLSTTLQKEQSTLPTGLLVAELQVLTQIRLFEKQRARKTQAQRPCHFCGLRSLLAQAPASLGKATMNRGVPFRHLLLVLQLALLPAATQGKKVVLGKKGDTVELTCTASQKKSIQFHWKNSNQIKILGNQGSFLTKGPSKLNDRADSRRSLWDQGNFPLIIKNLKIEDSDTYICEVEDQKEEVQLLVFGLTANSDTHLLQGQSLTLTLESPPGSSPSVQCRSPRGKNIQGGKTLSVSQLELQDSGTWTCTVLQNQKKVEFKIDIVVLAFQKASSIVYKKEGEQVEFSFPLAFTVEKLTGSGELWWQAERASSSKSWITFDLKNKEVSVKRVTQDPKLQMGKKLPLHLTLPQALPQYAGSGNLTLALEAKTGKLHQEVNLVVMRATQLQKNLTCEVWGPTSPKLMLSLKLENKEAKVSKREKAVWVLNPEAGMWQCLLSDSGQVLLESNIKVLPTWSTPVQPMALIVLGGVAGLLLFIGLGIFFCVRCRHRRRQAERMSQIKRLLSEKKTCQCPHRFQKTCSPI

SEQ ID NO: 857659 - protein, 237 aa, Homo sapiens
IGLPVSLHLSTTLQKEQSTLPTGLLVAELQVLTQIRLFEKQRARKTQAQRPCHFCGLRSLLAQAPASLGKATMNRGVPFRHLLLVLQLALLPAATQGKKVVLGKKGDTVELTCTASQKKSIQFHWKNSNQIKILGNQGSFLTKGPSKLNDRADSRRSLWDQGNFPLIIKNLKIEDSDTYICEVEDQKEEVQLLVFGSACGPDECSRSQASGLLFASSTICHCFSWVRPRLHWLSVAL

SEQ ID NO: 857660 - protein, 530 aa, Homo sapiens; identical to SEQ ID NO: 857658

SEQ ID NO: 857661 - protein, 80 aa, Homo sapiens
  misc_feature (17)..(17): Xaa can be any naturally occurring amino acid
  misc_feature (20)..(21): Xaa can be any naturally occurring amino acid
  misc_feature (74)..(74): Xaa can be any naturally occurring amino acid
GVGRDITGGGGGAEEKXEGXXSTEVVRWDYVRPRCCVWSYGLSEDIGREEVARDQRRPRIALESVRTKEMELAXRGLEGA

SEQ ID NO: 857662 - protein, 530 aa, Homo sapiens; identical to SEQ ID NO: 857658

SEQ ID NO: 857663 - protein, 76 aa, Homo sapiens
PGKALLESHWSCAALERPLEVLERKGVAVGTDLLPFFFVPAAGFRRHVAPFEARGQADPTCSLPRCLPRVSCLRTR

SEQ ID NO: 857664 - protein, 385 aa, Homo sapiens
MKMLPGVGVFGTGSSARVLVPLLRAEGFTVEALWGKTEEEAKQLAEEMNIAFYTSRTDDILLHQDVDLVCISIPPPLTRQISVKALGIGKNVVCEKAATSVDAFRMVTASRYYPQLMSLVGNVLRFLPAFVRMKQLISEHYVGAVMICDARIYSGSLLSPSYGWICDELMGGGGLHTMGTYIVDLLTHLTGRRAEKVHGLLKTFVRQNAAIRGIRHVTSDDFCFFQMLMGGGVCSTVTLNFNMPGAFVHEVMVVGSAGRLVARGADLYGQKNSATQEELLLRDSLAVGAGLPEQGPQDVPLLYLKGMVYMVQALRQSFQGQGDRRTWDRTPVSMAASFEDGLYMQSVVDAIKRSSRSGEWEAVEVLTEEPDTNQNLCEALQRNNL

SEQ ID NO: 857665 - protein, 385 aa, Homo sapiens; identical to SEQ ID NO: 857664

SEQ ID NO: 857666 - protein, 253 aa, Homo sapiens [sequence omitted]

SEQ ID NO: 857667 - protein, 104 aa, Homo sapiens
SSRLRPLPAQAHPRYGACAVLLPSRPSLSRAPSSLETRRRVPGGGALDSRARASPPAFLKADGWPPRPRRTHGFQCSAEWAMPACQEPCLTRTFGRSYPCQRLL

SEQ ID NO: 857668 - protein, 112 aa, Homo sapiens
MKMLPGVGVFGTGSSARVLVPLLRAEGFTVEALWGKTEEEAKQLAEEMNIAFYTSRTDDILLHQDVDLVCISIPPPLTRQISVKALGTPGRPQQGQIMSLPLGSPLRVTPLL

SEQ ID NO: 857669 - protein, 104 aa, Homo sapiens; identical to SEQ ID NO: 857667

SEQ ID NO: 857670 - protein, 280 aa, Homo sapiens
MVTASRYYPQLMSLVGNVLRFLPAFVRMKQLISEHYVGAVMICDARIYSGSLLSPSYGWICDELMGGGGLHTMGTYIVDLLTHLTGRRAEKVHGLLKTFVRQNAAIRGIRHVTSDDFCFFQMLMGGGVCSTVTLNFNMPGAFVHEVMVVGSAGRLVARGADLYGQKNSATQEELLLRDSLAVGAGLPEQGPQDVPLLYLKGMVYMVQALRQSFQGQGDRRTWDRTPVSMAASFEDGLYMQSVVDAIKRSSRSGEWEAVEVLTEEPDTNQNLCEALQRNNL

SEQ ID NO: 857671 - protein, 280 aa, Homo sapiens; identical to SEQ ID NO: 857670

SEQ ID NO: 857672 - protein, 112 aa, Homo sapiens; identical to SEQ ID NO: 857668

SEQ ID NO: 857673 - protein, 165 aa, Homo sapiens
MKMLPGVGVFGTGSSARVLVPLLRAEGFTVEALWGKTEEEAKQLAEEMNIAFYTSRTDDILLHQDVDLVCISIPPPLTRQISVKALGIGKNVVCEKAATSVDAFRMVTASRYYPQLMSLVGNVLRFLPAFVRMKQLISEHYVGAVMICDASESDQERLTLGSPSA

SEQ ID NO: 857674 - protein, 173 aa, Homo sapiens
MAAMASLGALALLLLSSLSRCSAEACLEPQITPSYYTTSDAVISTETVFIVEISLTCKNRVQNMALYADVGGKQFPVTRGQDVGRYQVSWSLDHKSAHAGTYEVRFFDEESYSLLRKAQRNNEDISIIPPLFTVSVDHRGTWNGPWVSTEVLAAAIGLVIYYLAFSAKSHIQA

SEQ ID NO: 857675 - protein, 135 aa, Homo sapiens
LLLNSAALDCGDLPDMQEQGNMALYADVGGKQFPVTRGQDVGRYQVSWSLDHKSAHAGTYEVRFFDEESYSLLRKAQRNNEDISIIPPLFTVSVDHRGTWNGPWVSTEVLAAAIGLVIYYLAFSAKSHIQACDVY

SEQ ID NO: 857676 - protein, 173 aa, Homo sapiens; identical to SEQ ID NO: 857674

SEQ ID NO: 857677 - protein, 186 aa, Homo sapiens
MGPQLIRAMRQGRAILPSDRDTRAGLPRHLSLFPAAEACLEPQITPSYYTTSDAVISTETVFIVEISLTCKNRVQNMALYADVGGKQFPVTRGQDVGRYQVSWSLDHKSAHAGTYEVRFFDEESYSLLRKAQRNNEDISIIPPLFTVSVDHRGTWNGPWVSTEVLAAAIGLVIYYLAFSAKSHIQA

SEQ ID NO: 857678 - protein, 110 aa, Homo sapiens
MALYADVGGKQFPVTRGQDVGRYQVSWSLDHKSAHAGTYEVRFFDEESYSLLRKAQRNNEDISIIPPLFTVSVDHRGTWNGPWVSTEVLAAAIGLVIYYLAFSAKSHIQA

SEQ ID NO: 857679 - protein, 110 aa, Homo sapiens; identical to SEQ ID NO: 857678

SEQ ID NO: 857680 - protein, 173 aa, Homo sapiens; identical to SEQ ID NO: 857674

SEQ ID NO: 857681 - protein, 173 aa, Homo sapiens; identical to SEQ ID NO: 857674

SEQ ID NO: 857682 - protein, 173 aa, Homo sapiens; identical to SEQ ID NO: 857674

SEQ ID NO: 857683 - protein, 173 aa, Homo sapiens; identical to SEQ ID NO: 857674

SEQ ID NO: 857684 - protein, 154 aa, Homo sapiens
MAAMASLGALALLLLSSLSRCSAEACLEPQITPSYYTTSDAVISTETVFIVEISLTCKNRVQNMALYADVGGKQFPVTRGQDVGRYQVSWSLDHKSAHAGTYEVRFFDEESYSLLRKAQRNNEDISIIPPLFTVSVDHRVSGLVPPPFWGCWAE

SEQ ID NO: 857685 - protein, 128 aa, Homo sapiens
GRLLLLLLEFKLLTMYGNMALYADVGGKQFPVTRGQDVGRYQVSWSLDHKSAHAGTYEVRFFDEESYSLLRKAQRNNEDISIIPPLFTVSVDHRGTWNGPWVSTEVLAAAIGLVIYYLAFSAKSHIQA

SEQ ID NO: 857686 - protein, 66 aa, Homo sapiens
PLTRRSSSFAPRVHGSSFSFPLGQRRGDGGDGISRRPGAAPAVQPLPLLSRGLPGAPDHPFLLHHF

SEQ ID NO: 857687 - protein, 161 aa, Homo sapiens
MGPQLIRAMRQGRAILPSDRDTRAGLPRHLSLFPAAEACLEPQITPSYYTTSDAVISTETVFIVEISLTCKNRVQVSWSLDHKSAHAGTYEVRFFDEESYSLLRKAQRNNEDISIIPPLFTVSVDHRGTWNGPWVSTEVLAAAIGLVIYYLAFSAKSHIQA

SEQ ID NO: 857688 - protein, 328 aa, Homo sapiens
MPAQPFAEKRRWRRWHLSAPWRCSCCPASPAAQVAAQPGLLSCEPLTHGRWCWGQEGCGGPAFQGPSLRAGPSPERQAALGRGDQSTSRTFTGSQAFPCLPIRRGVPEPPWCARPPSCSTERDTCPGSRSLRGRTGAKLCSAERSRPKTGLEEPHKLGRDLSEEREQERGELDGEPEAEACLEPQITPSYYTTSDAVISTETVFIVEISLTCKNRVQNMALYADVGGKQFPVTRGQDVGRYQVSWSLDHKSAHAGTYEVRFFDEESYSLLRKAQRNNEDISIIPPLFTVSVDHRGTWNGPWVSTEVLAAAIGLVIYYLAFSAKSHIQA

SEQ ID NO: 857689 - protein, 148 aa, Homo sapiens
MAAMASLGALALLLLSSLSRCSAEACLEPQITPSYYTTSDAVISTETVFIVEISLTCKNRVQVSWSLDHKSAHAGTYEVRFFDEESYSLLRKAQRNNEDISIIPPLFTVSVDHRGTWNGPWVSTEVLAAAIGLVIYYLAFSAKSHIQA

SEQ ID NO: 857690 - protein, 217 aa, Homo sapiens
MPAQPFAEKRRWRRWHLSAPWRCSCCPASPAAQVAAQPGLLSCEPLTHGRWCWGQEGCGGPAFQGPSLRAGPSPERQAALGRGDQSTSRTFTGSQAFPCLPIRRGVPEPPWCARPPSCSTERDTCPGSRSLRGRTGAKLCSAERSRPKTGLEEPHKLGRDLSEEREQERGELDGEPKVRRALSARPKTGFSGGPCLTLTRVFGRADQGSRRFAFVRG

SEQ ID NO: 857691 - protein, 173 aa, Homo sapiens; identical to SEQ ID NO: 857674

SEQ ID NO: 857692 - protein, 120 aa, Homo sapiens
PWALAAGVLQCRHWWSGWPLRVHSAHTLLNTQPRVSWSLDHKSAHAGTYEVRFFDEESYSLLRKAQRNNEDISIIPPLFTVSVDHRGTWNGPWVSTEVLAAAIGLVIYYLAFSAKSHIQA

SEQ ID NO: 857693 - protein, 173 aa, Homo sapiens; identical to SEQ ID NO: 857674

SEQ ID NO: 857694 - protein, 186 aa, Homo sapiens; identical to SEQ ID NO: 857677

SEQ ID NO: 857695 - protein, 186 aa, Homo sapiens; identical to SEQ ID NO: 857677

SEQ ID NO: 857696 - protein, 186 aa, Homo sapiens; identical to SEQ ID NO: 857677

SEQ ID NO: 857697 - protein, 110 aa, Homo sapiens; identical to SEQ ID NO: 857678

SEQ ID NO: 857698 - protein, 110 aa, Homo sapiens; identical to SEQ ID NO: 857678

SEQ ID NO: 857699 - protein, 173 aa, Homo sapiens; identical to SEQ ID NO: 857674

SEQ ID NO: 857700 - protein, 75 aa, Homo sapiens
RDTRAGLPRHLSLFPAAEACLEPQITPSYYTTSDAVISTETVFIVEISLTCKNRVQVRQWGFRQEGGWGVLLTAS

SEQ ID NO: 857701 - protein, 232 aa, Homo sapiens
GNGRAISAHVCRCGSRLVKSPMGSSFIRRWANRAMIGSGLAGSGGAGGPSSTVTWCALFSNHVAATQASLLLSFVWMPALLPVASRLLLLPRVLLTMASGSPPTQPSPASDSGSGYVPGSVSAAFVTCPNEKVAKEIARAVVEKRLAACVNLIPQITSIYEWKGKIEEDSEVLMMIKTQSSLVPALTDFVRSVHPYEVAEVIALPVEQGNFPYLQWVRQVTESVSDSITVLP

SEQ ID NO: 857702 - protein, 232 aa, Homo sapiens; identical to SEQ ID NO: 857701

SEQ ID NO: 857703 - protein, 156 aa, Homo sapiens
MPALLPVASRLLLLPRVLLTMASGSPPTQPSPASDSGSGYVPGSVSAAFVTCPNEKVAKEIARAVVEKRLAACVNLIPQITSIYEWKGKIEEDSEVLMMIKTQSSLVPALTDFVRSVHPYEVAEVIALPVEQGNFPYLQWVRQVTESVSDSITVLP

SEQ ID NO: 857704 - protein, 156 aa, Homo sapiens; identical to SEQ ID NO: 857703

SEQ ID NO: 857705 - protein, 156 aa, Homo sapiens; identical to SEQ ID NO: 857703

SEQ ID NO: 857706 - protein, 156 aa, Homo sapiens; identical to SEQ ID NO: 857703

SEQ ID NO: 857707 - protein, 156 aa, Homo sapiens; identical to SEQ ID NO: 857703

SEQ ID NO: 857708 - protein, 156 aa, Homo sapiens; identical to SEQ ID NO: 857703

SEQ ID NO: 857709 - protein, 156 aa, Homo sapiens; identical to SEQ ID NO: 857703

SEQ ID NO: 857710 - protein, 149 aa, Homo sapiens
MSGGRAPAVLLGGVASLLLSFVWMPALLPVASRLLLSVSAAFVTCPNEKVAKEIARAVVEKRLAACVNLIPQITSIYEWKGKIEEDSEVLMMIKTQSSLVPALTDFVRSVHPYEVAEVIALPVEQGNFPYLQWVRQVTESVSDSITVLP

SEQ ID NO: 857711 - protein, 106 aa, Homo sapiens
MGYSRMGLSLHSRAVVEKRLAACVNLIPQITSIYEWKGKIEEDSEVLMMIKTQSSLVPALTDFVRSVHPYEVAEVIALPVEQGNFPYLQWVRQVTESVSDSITVLP

SEQ ID NO: 857712 - protein, 102 aa, Homo sapiens [sequence omitted]

SEQ ID NO: 857713 - protein, 87 aa, Homo sapiens
GNGRAISAHVCRCGSRLVKSPMGSSFIRRWANRAMIGSGLAGSGGAGGPSSTVTWCALFSNHVAATQYPGKKRPLFLGLFLRVTCGL

SEQ ID NO: 857714 - protein, 132 aa, Homo sapiens
MPALLPVASRLLLLPRVLLTMASGSPPTQPSPASDSGSGYVPGSVSAAFVTCPNEKVAKEIARAVVEKRLAACVNLIPQITSIYEWKGKIEEDSEVLMFCAPLRSGRGNCIACGTGELSVPAVGAPGHRVSF

SEQ ID NO: 857715 - protein, 132 aa, Homo sapiens; identical to SEQ ID NO: 857714

SEQ ID NO: 857716 - protein, 135 aa, Homo sapiens
MPALLPVASRLLLLPRVLLTMASGSPPTQPSPASDSGSGYVPGSVSAAFVTCPNEKVAKEIARAVVEKRLAACVNLIPQITSIYEWKGKIEEDSEVLMMIKTQSSLVPALTDFVRSVHPYEVAESCHDEPCSCSS

SEQ ID NO: 857717 - protein, 126 aa, Homo sapiens
MPALLPVASRLLLSVSAAFVTCPNEKVAKEIARAVVEKRLAACVNLIPQITSIYEWKGKIEEDSEVLMMIKTQSSLVPALTDFVRLCTLTKGPRVMQWLLNQGTFRNFHWLRKVQKQVFDSIQFWQ

SEQ ID NO: 857718 - protein, 227 aa, Homo sapiens
IVKMVRLYYCTVLRAWCSNHLSCRPRLSESLSSVTCECSDVLAAHGEHSLAHVCVALPSEVCHLTTLVRTERSTARIPTTHCFRGGGYTLCSCTTIARVSQMSCNDLWNNLYPSMKVSGSGDQPWTAMNIPAHTLCMQFKPTITLMDTVTIYGVERYGNNLRKDSEVLMMIKTQSSLVPALTDFVRSVHPYEVAEVIALPVEQGNFPYLQWVRQVTESVSDSITVLP

SEQ ID NO: 857719 - protein, 156 aa, Homo sapiens; identical to SEQ ID NO: 857703

SEQ ID NO: 857720 - protein, 156 aa, Homo sapiens; identical to SEQ ID NO: 857703

SEQ ID NO: 857721 - protein, 156 aa, Homo sapiens; identical to SEQ ID NO: 857703

SEQ ID NO: 857722 - protein, 156 aa, Homo sapiens; identical to SEQ ID NO: 857703

SEQ ID NO: 857723 - protein, 156 aa, Homo sapiens; identical to SEQ ID NO: 857703

SEQ ID NO: 857724 - protein, 156 aa, Homo sapiens; identical to SEQ ID NO: 857703

SEQ ID NO: 857725 - protein, 156 aa, Homo sapiens; identical to SEQ ID NO: 857703

SEQ ID NO: 857726 - protein, 194 aa, Homo sapiens
MPALLPVASRLLLLPRVLLTMASGSPPTQPSPASDSGSGYVPGSVSAAFVTCPNEKVAKEIARAVVEKRLAACVNLIPQITSIYEWKGKIEEDSEVLMMIKTQSSLVPALTDFVRSVHPYEVAEVIALPVEQGNFPYLQWVRQVTESVSDSITGGHDLARSAHHKIREKKPLITVGPPVWPTTHPTHNLIHATP

SEQ ID NO: 857727 - protein, 115 aa, Homo sapiens
MPALLPVASRLLLLPRVLLTMASGSPPTQPSPASDSGSGYVPGSVSAAFVTCPNEKVAKEIARAVVEKRLAACVNLIPQITSIYEWKGKIEEDSEVLMMIKTQSSLVPALTDFVR

SEQ ID NO: 857728 - protein, 102 aa, Homo sapiens [sequence omitted]

SEQ ID NO: 857729 - protein, 87 aa, Homo sapiens; identical to SEQ ID NO: 857713

SEQ ID NO: 857730 - protein, 208 aa, Homo sapiens
GNGRAISAHVCRCGSRLVKSPMGSSFIRRWANRAMIGSGLAGSGGAGGPSSTVTWCALFSNHVAATQASLLLSFVWMPALLPVASRLLLLPRVLLTMASGSPPTQPSPASDSGSGYVPGSVSAAFVTCPNEKVAKEIARAVVEKRLAACVNLIPQITSIYEWKGKIEEDSEVLMFCAPLRSGRGNCIACGTGELSVPAVGAPGHRVSF

SEQ ID NO: 857731 - protein, 501 aa, Homo sapiens
SSRAPLLGECRSGRGLASSRSRRRTTMTQSVVVQVGQCGNQIGCCFWDLALREHAAVNQKGIYDEAISSFFRNVDTRVVGDGGSISKGKICSLKARAVLIDMEEGVVNEILQGPLRDVFDTKQLITDISGSGNNWAVGHKVFGSLYQDQILEKFRKSAEHCDCLQCFFIIHSMGGGTGSGLGTFLLKVLEDEFPEVYRFVTSIYPSGEDDVITSPYNSILAMKELNEHADCVLPIDNQSLFDIISKIDLMVNSGKLGTTVKPKSLVTSSSGALKKQHKKPFDAMNNIVANLLLNLTSSARFEGSLNMDLNEISMNLVPFPQLHYLVSSLTPLYTLTDVNIPPRRLDQMFSDAFSKDHQLLRADPKHSLYLACALMVRGNVQISDLRRNIERLKPSLQFVSWNQEGWKTSLCSVPPVGHSHSLLALANNTCVKPTFMELKERFMRLYKKKAHLHHYLQVEGMEESCFTEAVSSLSALIQEYDQLDATKNMPVQDLPRLSIAM

SEQ ID NO: 857732 - protein, 545 aa, Homo sapiens
MTQSVVVQVGQCGNQIGCCFWDLALREHAAVNQKGIYDEAISSFFRNVDTRVVGDGGSISKGKICSLKARAVLIDMEEGVVNEILQGPLRDVFDTKQLITDISGSGNNWAVGHKVFGSLYQDQILEKFRKSAEHCDCLQCFFIIHSMGGGTGSGLGTFLLKVLEDEFPEVYRFVTSIYPSGEDDVITSPYNSILAMKELNEHADCVLPIDNQVRNDIGTYEYNVIYIQSCIMYVCLYETFSSLFSLLREKISLNCFSFSFLVEYHLHPLFLIASLPMFFPQKSLFDIISKIDLMVNSGKLGTTVKPKSLVTSSSGALKKQHKKPFDAMNNIVANLLLNLTSSARFEGSLNMDLNEISMNLVPFPQLHYLVSSLTPLYTLTDVNIPPRRLDQMFSDAFSKDHQLLRADPKHSLYLACALMVRGNVQISDLRRNIERLKPSLQFVSWNQEGWKTSLCSVPPVGHSHSLLALANNTCVKPTFMELKERFMRLYKKKAHLHHYLQVEGMEESCFTEAVSSLSALIQEYDQLDATKNMPVQDLPRLSIAM

SEQ ID NO: 857733 - protein, 400 aa, Homo sapiens
MEEGVVNEILQGPLRDVFDTKQLITDISGSGNNWAVGHKVFGSLYQDQILEKFRKSAEHCDCLQCFFIIHSMGGGTGSGLGTFLLKVLEDEFPEVYRFVTSIYPSGEDDVITSPYNSILAMKELNEHADCVLPIDNQSLFDIISKIDLMVNSGKLGTTVKPKSLVTSSSGALKKQHKKPFDAMNNIVANLLLNLTSSARFEGSLNMDLNEISMNLVPFPQLHYLVSSLTPLYTLTDVNIPPRRLDQMFSDAFSKDHQLLRADPKHSLYLACALMVRGNVQISDLRRNIERLKPSLQFVSWNQEGWKTSLCSVPPVGHSHSLLALANNTCVKPTFMELKERFMRLYKKKAHLHHYLQVEGMEESCFTEAVSSLSALIQEYDQLDATKNMPVQDLPRLSIAM

SEQ ID NO: 857734 - protein, 484 aa, Homo sapiens
MASWSGAHTLTQSVVVQVGQCGNQIGCCFWDLALREHAAVNQKGIYDEAISSFFRNVDTRVVGDGGSISKGKICSLKARAVLIDMEEGVVNEILQGPLRDVFDTKQLITDISGSGNNWAVGHKVFGSLYQDQILEKFRKSAEHCDCLQCFFIIHSMGGGTGSGLGTFLLKVLEDEFPEVYRFVTSIYPSGEDDVITSPYNSILAMKELNEHADCVLPIDNQSLFDIISKIDLMVNSGKLGTTVKPKSLVTSSSGALKKQHKKPFDAMNNIVANLLLNLTSSARFEGSLNMDLNEISMNLVPFPQLHYLVSSLTPLYTLTDVNIPPRRLDQMFSDAFSKDHQLLRADPKHSLYLACALMVRGNVQISDLRRNIERLKPSLQFVSWNQEGWKTSLCSVPPVGHSHSLLALANNTCVKPTFMELKERFMRLYKKKAHLHHYLQVEGMEESCFTEAVSSLSALIQEYDQLDATKNMPVQDLPRLSIAM

SEQ ID NO: 857735 - protein, 106 aa, Homo sapiens
SSRAPLLGECRSGRGLASSRSRRRTTMTQSVVVQGKLRRAGRDLVAAESSGHVSCLMSYSLSFLSSGRSRPVRKPDRLLLLGPGTKGARRGQPGTRPPPRAPSPVS

SEQ ID NO: 857736 - protein, 189 aa, Homo sapiens
SSRAPLLGECRSGRGLASSRSRRRTTMTQSVVVQVGQCGNQIGCCFWDLALREHAAVNQKGIYDEAISSFFRNVDTRVVGDGGSISKGKICSLKARAVLIDMEEGVVNEILQGPLRDVFDTKQLITDISGSGNNWAVGHKVFGSLYQDQILEKFRKSAEHCDCLQCFFIIHSMGGGKIFHSFACNSVKG

SEQ ID NO: 857737 - protein, 79 aa, Homo sapiens
SSRAPLLGECRSGRGLASSRSRRRTTMTQSVVVQVGQCGNQIGCCFWDLALREHAAVNQKGIYDEAISSFFRNVDTRQS

SEQ ID NO: 857738 - protein, 501 aa, Homo sapiens; identical to SEQ ID NO: 857731

SEQ ID NO: 857739 - protein, 501 aa, Homo sapiens; identical to SEQ ID NO: 857731

SEQ ID NO: 857740 - protein, 106 aa, Homo sapiens; identical to SEQ ID NO: 857735

SEQ ID NO: 857741 - protein, 435 aa, Homo sapiens
CLVTMESDQRKVVGDGGSISKGKICSLKARAVLIDMEEGVVNEILQGPLRDVFDTKQLITDISGSGNNWAVGHKVFGSLYQDQILEKFRKSAEHCDCLQCFFIIHSMGGGTGSGLGTFLLKVLEDEFPEVYRFVTSIYPSGEDDVITSPYNSILAMKELNEHADCVLPIDNQSLFDIISKIDLMVNSGKLGTTVKPKSLVTSSSGALKKQHKKPFDAMNNIVANLLLNLTSSARFEGSLNMDLNEISMNLVPFPQLHYLVSSLTPLYTLTDVNIPPRRLDQMFSDAFSKDHQLLRADPKHSLYLACALMVRGNVQISDLRRNIERLKPSLQFVSWNQEGWKTSLCSVPPVGHSHSLLALANNTCVKPTFMELKERFMRLYKKKAHLHHYLQVEGMEESCFTEAVSSLSALIQEYDQLDATKNMPVQDLPRLSIAM

SEQ ID NO: 857742 - protein, 106 aa, Homo sapiens; identical to SEQ ID NO: 857735

SEQ ID NO: 857743 - protein, 118 aa, Homo sapiens
MKTFVNVYLWLLWIKQLKLHRLITIMSIITIMGHQHLGSSELSENQQPGAPNAPTHPAPPGLHHHHKHKGQHRQGHPENRDMPASEDLQDLQKKLCRKRCINQLLCKLPTDSELAPRS

SEQ ID NO: 857744 - protein, 129 aa, Homo sapiens
YVYKEQDIEINNKEVYCDVTTMLLSVSVNLTTLSASATCNMCSGLDAVAHACNPSTLGGQGRRITRTTPAMWRSLGLALALCLLPSGGTESQDQSSLCKQPPAWSIRDQDPMLNSIRRPASKTEERRIF

SEQ ID NO: 857745 - protein, 128 aa, Homo sapiens
YVYKEQDIEINNKEVYCDVTTMLLSVSVNLTTLSASATCNMCSGLDAVAHACNPSTLGGQGRRITRTTPAMWRSLGLALALCLLPSGGTESQDQSSLCKQPPAWSIRDQDPMLNSNGSVTVVALLQAS

SEQ ID NO: 857746 - protein, 128 aa, Homo sapiens; identical to SEQ ID NO: 857745

SEQ ID NO: 857747 - protein, 128 aa, Homo sapiens; identical to SEQ ID NO: 857745

SEQ ID NO: 857748 - protein, 128 aa, Homo sapiens; identical to SEQ ID NO: 857745

SEQ ID NO: 857749 - protein, 128 aa, Homo sapiens; identical to SEQ ID NO: 857745

SEQ ID NO: 857750 - protein, 128 aa, Homo sapiens; identical to SEQ ID NO: 857745

SEQ ID NO: 857751 - protein, 128 aa, Homo sapiens; identical to SEQ ID NO: 857745

SEQ ID NO: 857752 - protein, 128 aa, Homo sapiens; identical to SEQ ID NO: 857745

SEQ ID NO: 857753 - protein, 128 aa, Homo sapiens; identical to SEQ ID NO: 857745

SEQ ID NO: 857754 - protein, 128 aa, Homo sapiens; identical to SEQ ID NO: 857745

SEQ ID NO: 857755 - protein, 128 aa, Homo sapiens; identical to SEQ ID NO: 857745

SEQ ID NO: 857756 - protein, 128 aa, Homo sapiens; identical to SEQ ID NO: 857745

SEQ ID NO: 857757 - protein, 128 aa, Homo sapiens; identical to SEQ ID NO: 857745

SEQ ID NO: 857758 - protein, 128 aa, Homo sapiens; identical to SEQ ID NO: 857745

SEQ ID NO: 857759 - protein, 128 aa, Homo sapiens; identical to SEQ ID NO: 857745

SEQ ID NO: 857760 - protein, 128 aa, Homo sapiens; identical to SEQ ID NO: 857745

SEQ ID NO: 857761 - protein, 128 aa, Homo sapiens; identical to SEQ ID NO: 857745

SEQ ID NO: 857762 - protein, 128 aa, Homo sapiens; identical to SEQ ID NO: 857745

SEQ ID NO: 857763 - protein, 128 aa, Homo sapiens; identical to SEQ ID NO: 857745

SEQ ID NO: 857764 - protein, 128 aa, Homo sapiens; identical to SEQ ID NO: 857745

SEQ ID NO: 857765 - protein, 128 aa, Homo sapiens; identical to SEQ ID NO: 857745

SEQ ID NO: 857766 - protein, 521 aa, Homo sapiens
MAAEPNKTEIQTLFKRLRAVPTNKACFDCGAKNPSWASITYGVFLCIDCSGVHRSLGVHLSFIRSTELDSNWNWFQLRCMQVGGNANATAFFRQHGCTANDANTKYNSRAAQMYREKIRQLGSAALARHGTDLWIDNMSSAVPNHSPEKKDSDFFTEHTQPPAWDAPATEPSGTQQPAPSTESSGLAQPEHGPNTDLLGTSPKASLELKSSIIGKKKPAAAKKGLGAKKGLGAQKVSSQSFSEIERQAQVAEKLREQQAADAKKQAEESMVASMRLAYQELQIDRKKEEKKLQNLEGKKREQAERLGMGLVSRSSVSHSVLSEMQVIEQETPVSAKSSRSQLDLFDDVGTFASGPPKYKDNPFSLGESFGSRWDTDAAWGMDRVEEKEPEVTISSIRPISERATNRREVESRSSGLESSEARQKFAGAKAISSDMFFGREVDAEYEARSRLQQLSGSSAISSSDLFGDMDGAHGAGSVSLGNVLPTADIAQFKQGVKSVAGKMAVLANGVMNSLQDRYGSY

SEQ ID NO: 857767 - protein, 521 aa, Homo sapiens; identical to SEQ ID NO: 857766

SEQ ID NO: 857768 - protein, 512 aa, Homo sapiens
MAAEPNKTEIQTLFKRLRAVPTNKACFDCGAKNPSWASITYGVFLCIDCSGVHRSLGVHLSFIRSTELDSNWNWFQLRCMQVGGNANATAFFRQHGCTANDANTKYNSRAAQMYREKIRQLGSAALARHGTDLWIDNMSSAVPNHSPEKKDSDFFTEHTQPPAWDAPATEPSGTQQPAPSTESSGLAQPEHGPNTDLLGTSPKASLELKSSIIGKKKPAAAKKGLGAKKGLGAQKVSSQSFSEIERQAQVAEKLREQQAADAKKQAEESMVASMRLAYQELQIDRKKEEKKLQNLEGKKREQAESSVSHSVLSEMQVIEQETPVSAKSSRSQLDLFDDVGTFASGPPKYKDNPFSLGESFGSRWDTDAAWGMDRVEEKEPEVTISSIRPISERATNRREVESRSSGLESSEARQKFAGAKAISSDMFFGREVDAEYEARSRLQQLSGSSAISSSDLFGDMDGAHGAGSVSLGNVLPTADIAQFKQGVKSVAGKMAVLANGVMNSLQDRYGSY

SEQ ID NO: 857769 - protein, 442 aa, Homo sapiens [sequence omitted]

SEQ ID NO: 857770 - protein, 514 aa, Homo sapiens
MAAEPNKTEIQTLFKRLRAVPTNKACFDCGAKNPSWASITYGVFLCIDCSGVHRSLGVHLSFIRSTELDSNWNWFQLRCMQTAFFRQHGCTANDANTKYNSRAAQMYREKIRQLGSAALARHGTDLWIDNMSSAVPNHSPEKKDSDFFTEHTQPPAWDAPATEPSGTQQPAPSTESSGLAQPEHGPNTDLLGTSPKASLELKSSIIGKKKPAAAKKGLGAKKGLGAQKVSSQSFSEIERQAQVAEKLREQQAADAKKQAEESMVASMRLAYQELQIDRKKEEKKLQNLEGKKREQAERLGMGLVSRSSVSHSVLSEMQVIEQETPVSAKSSRSQLDLFDDVGTFASGPPKYKDNPFSLGESFGSRWDTDAAWGMDRVEEKEPEVTISSIRPISERATNRREVESRSSGLESSEARQKFAGAKAISSDMFFGREVDAEYEARSRLQQLSGSSAISSSDLFGDMDGAHGAGSVSLGNVLPTADIAQFKQGVKSVAGKMAVLANGVMNSLQDRYGSY

SEQ ID NO: 857771 - protein, 442 aa, Homo sapiens [sequence omitted]

SEQ ID NO: 857772 - protein, 535 aa, Homo sapiens
MAAEPNKTEIQTLFKRLRAVPTNKACFDCGAKNPSWASITYGVFLCIDCSGVHRSLGVHLSFIRSTELDSNWNWFQLRCMQVGGNANATAFFRQHGCTANDANTKYNSRAAQMYREKIRQLGSAALARHGTDLWIDNMSSAVPNHSPEKKDSDFFTEHTQEWLTEASVIWPPFQPPAWDAPATEPSGTQQPAPSTESSGLAQPEHGPNTDLLGTSPKASLELKSSIIGKKKPAAAKKGLGAKKGLGAQKVSSQSFSEIERQAQVAEKLREQQAADAKKQAEESMVASMRLAYQELQIDRKKEEKKLQNLEGKKREQAERLGMGLVSRSSVSHSVLSEMQVIEQETPVSAKSSRSQLDLFDDVGTFASGPPKYKDNPFSLGESFGSRWDTDAAWGMDRVEEKEPEVTISSIRPISERATNRREVESRSSGLESSEARQKFAGAKAISSDMFFGREVDAEYEARSRLQQLSGSSAISSSDLFGDMDGAHGAGSVSLGNVLPTADIAQFKQGVKSVAGKMAVLANGVMNSLQDRYGSY

SEQ ID NO: 857773 - protein, 414 aa, Homo sapiens
TCKEFVTEHYYGLGTSWWESAEVRRHVCGTVCFQERARIEKAYAQQLADWARKWRGTVEKGPQYGTLEKAWHAFFTAAERLSALHLEVREKLQGQDSERVRAWQRGAFHRPVLGGFRESRAAEDGFRKAQKPWLKRLKEVEASKKSYHAARKDEKTAQTRESHAKADSAVSQEQLRKLQERVERCAKEAEKTKAQYEQTLAELHRYTPRYMEDMEQAFETCQAAERQRLLFFKDMLLTLHQHLDLSSSEKFHELHRDLHQGIEAASDEEDLRWWRSTHGPGMAMNWPQFEEWSLDTQRTISRKEKGGRSPDEVTLTSIVPTRDGTAPPPQSPGSPGTGQDEEWSDEESPRKAATGVRVRALYDYAGQEADELSFRAGEELLKMSEEDEQGWCQGQLQSGRIGLYPANYVECVGA

SEQ ID NO: 857774 - protein, 414 aa, Homo sapiens; identical to SEQ ID NO: 857773

SEQ ID NO: 857775 - protein, 521 aa, Homo sapiens; identical to SEQ ID NO: 857766

SEQ ID NO: 857776 - protein, 521 aa, Homo sapiens; identical to SEQ ID NO: 857766

SEQ ID NO: 857777 - protein, 414 aa, Homo sapiens; identical to SEQ ID NO: 857773

SEQ ID NO: 857778 - protein, 386 aa, Homo sapiens
MAAEPNKTEIQTLFKRLRAVPTNKACFDCGAKNPSWASITYGVFLCIDCSGVHRSLGVHLSFIRSTELDSNWNWFQLRCMQVGGNANATAFFRQHGCTANDANTKYNSRAAQMYREKIRQLGSAALARHGTDLWIDNMSSAVPNHSPEKKDSDFFTEHTQPPAWDAPATEPSGTQQPAPSTESSGLAQPEHGPNTDLLGTSPKASLELKSSIIGKKKPAAAKKGLGAKKGLGAQKVSSQSFSEIERQAQVAEKLREQQAADAKKQAEESMVASMRLAYQELQIDRKKEEKKLQNLEGKKREQAERLGMGLVSRSSVSHSVLSEMQVIEQETPVSAKSSRSQLDLFDDVGTFASGPPKGNGQCPFLRVRCSLPDSTTTCPALARRSV

SEQ ID NO: 857779 - protein, 414 aa, Homo sapiens; identical to SEQ ID NO: 857773

SEQ ID NO: 857780 - protein, 414 aa, Homo sapiens; identical to SEQ ID NO: 857773

SEQ ID NO: 857781 - protein, 101 aa, Homo sapiens
PKSRLFLRGFAQFQPTRCVSRGRAESLVPLGPEGGRRAEVGYVSGVSVPGLYSGPLTIRSSPPPPRPVSTAAPRIRVGPASRTVFSCALTVPGCTAPWASI

SEQ ID NO: 857782 - protein, 424 aa, Homo sapiens [sequence omitted]

SEQ ID NO: 857783 - protein, 521 aa, Homo sapiens; identical to SEQ ID NO: 857766

SEQ ID NO: 857784 - protein, 521 aa, Homo sapiens; identical to SEQ ID NO: 857766

SEQ ID NO: 857785 - protein, 535 aa, Homo sapiens
MAAEPNKTEIQTLFKRLRAVPTNKACFDCGAKNPSWASITYGVFLCIDCSGVHRSLGVHLSFIRSTELDSNWNWFQLRCMQVGGNANATAFFRQHGCTANDANTKYNSRAAQMYREKIRQLGSAALARHGTDLWIDNMSSAVPNHSPEKKDSDFFTEHTQPPAWDAPATEPSGTQQPAPSTESSGLAQPEHGPNTDLLGTSPKASLESVYLSAKGALPARELKSSIIGKKKPAAAKKGLGAKKGLGAQKVSSQSFSEIERQAQVAEKLREQQAADAKKQAEESMVASMRLAYQELQIDRKKEEKKLQNLEGKKREQAERLGMGLVSRSSVSHSVLSEMQVIEQETPVSAKSSRSQLDLFDDVGTFASGPPKYKDNPFSLGESFGSRWDTDAAWGMDRVEEKEPEVTISSIRPISERATNRREVESRSSGLESSEARQKFAGAKAISSDMFFGREVDAEYEARSRLQQLSGSSAISSSDLFGDMDGAHGAGSVSLGNVLPTADIAQFKQGVKSVAGKMAVLANGVMNSLQDRYGSY

SEQ ID NO: 857786 - protein, 500 aa, Homo sapiens
MAAEPNKTEIQTLFKRLRAVPTNKACFDCGAKNPSWASITYGVFLCIDCSGVHRSLGVHLSFIRSTELDSNWNWFQLRCMQVGGNANATAFFRQHGCTANDANTKYNSRAAQMYREKIRQLGSAALARHGTDLWIDNMSSAVPNHSPEKKDSDFFTEHTQPPAWDAPATEPSGTQQPAPSTESSGLAQPEHGPNTDLLGTSPKASLELKSSIIGKKNQSFSEIERQAQVAEKLREQQAADAKKQAEESMVASMRLAYQELQIDRKKEEKKLQNLEGKKREQAERLGMGLVSRSSVSHSVLSEMQVIEQETPVSAKSSRSQLDLFDDVGTFASGPPKYKDNPFSLGESFGSRWDTDAAWGMDRVEEKEPEVTISSIRPISERATNRREVESRSSGLESSEARQKFAGAKAISSDMFFGREVDAEYEARSRLQQLSGSSAISSSDLFGDMDGAHGAGSVSLGNVLPTADIAQFKQGVKSVAGKMAVLANGVMNSLQDRYGSY

SEQ ID NO: 857787 - protein, 521 aa, Homo sapiens; identical to SEQ ID NO: 857766

SEQ ID NO: 857788 - protein, 521 aa, Homo sapiens; identical to SEQ ID NO: 857766

SEQ ID NO: 857789 - protein, 414 aa, Homo sapiens; identical to SEQ ID NO: 857773

SEQ ID NO: 857790 - protein, 414 aa, Homo sapiens; identical to SEQ ID NO: 857773

SEQ ID NO: 857791 - protein, 379 aa, Homo sapiens
  misc_feature (378)..(379): Xaa can be any naturally occurring amino acid
TCKEFVTEHYYGLGTSWWESAEVRRHVCGTVCFQERARIEKAYAQQLADWARKWRGTVEKGPQYGTLEKAWHAFFTAAERLSALHLEVREKLQGQDSERVRAWQRGAFHRPVLGGFRESRAAEDGFRKAQKPWLKRLKEVEASKKSYHAARKDEKTAQTRESHAKADSAVSQEQLRKLQERVERCAKEAEKTKAQYEQTLAELHRYTPRYMEDMEQAFETCQAAERQRLLFFKDMLLTLHQHLDLSSSEKFHELHRDLHQGIEAASDEEDLRWWRSTHGPGMAMNWPQFEEWSLDTQRTISRKEKGGRSPDEVTLTSIVPTRDGTAPPPQSPGSPGTGQDEEWSDEESPRKAATGVRVRALYDYAGQEADELSFRAGXX

SEQ ID NO: 857792 - protein, 81 aa, Homo sapiens
TGYTFLPYYPSLVPLVSMPKMTAAAALALNCMSLNDSHGQDADTPWLWDGPQLAGIMPSLEACSLNSPPGLVAAHQPALIH

SEQ ID NO: 857793 - protein, 1427 aa, Homo sapiens
RLKIFQIICTCTEHVQIFPCHYFLKIQFDNYLYSIYIELGIISNLEMISSIWEDVHRLDANMQILCHLISDWSIHGVWYLGGAGTNSLQILRDDFTCKYTKHRNVWKMCLFACPGEMGSAWESALGSDITLPLNCVIKPPPNATSSGKLVIKDHDEPIVLRTRHILIDNGGELHAGSALCPFQGNFTIILYGRADEGIQPDPYYGLKYIGVGKGGALELHGQKKLSWTFLNKTLHPGGMAEGGYFFERSWGHRGVIVHVIDPKSGTVIHSDRFDTYRSKKESERLVQYLNAVPDGRILSVAVNDEGSRNLDDMARKAMTKLGSKHFLHLGFRHPWSFLTVKGNPSSSVEDHIEYHGHRGSAAARVFKLFQTEHGEYFNVSLSSEWVQDVEWTEWFDHDKVSQTKGGEKISDLWKAHPGKICNRPIDIQATTMDGVNLSTEVVYKKGQDYRFACYDRGRACRSYRVRFLCGKPVRPKLTVTIDTNVNSTILNLEDNVQSWKPGDTLVIASTDYSMYQAEEFQVLPCRSCAPNQVKVAGKPMYLHIGEEIDGVDMRAEVGLLSRNIIVMGEMEDKCYPYRNHICNFFDFDTFGGHIKFALGFKAAHLEGTELKHMGQQLVGQYPIHFHLAGDVDERGGYDPPTYIRDLSIHHTFSRCVTVHGSNGLLIKDVVGYNSLGHCFFTEDGPEERNTFDHCLGLLVKSGTLLPSDRDSKMCKMITEDSYPGYIPKPRQDCNAVSTFWMANPNNNLINCAAAGSEETGFWFIFHHVPTGPSVGMYSPGYSEHIPLGKFYNNRAHSNYRAGMIIDNGVKTTEASAKDKRPFLSIISARYSPHQDADPLKPREPAIIRHFIAYKNQDHGAWLRGGDVWLDSCRFADNGIGLTLASGGTFPYDDGSKQEIKNSLFVGESGNVGTEMMDNRIWGPGGLDHSGRTLPIGQNFPIRGIQLYDGPINIQNCTFRKFVALEGRHTSALAFRLNNAWQSCPHNNVTGIAFEDVPITSRVFFGEPGPWFNQLDMDGDKTSVFHDVDGSVSEYPGSYLTKNDNWLVRHPDCINVPDWRGAICSGCYAQMYIQAYKTSNLRMKIIKNDFPSHPLYLEGALTRSTHYQQYQPVVTLQKGYTIHWDQTAPAELAIWLINFNKGDWIRVGLCYPRGTTFSILSDVHNRLLKQTSKTGVFVRTLQMDKVEQSYPGRSHYYWDEDSGLLFLKLKAQNEREKFAFCSMKGCERIKIKALIPKNAGVSDCTATAYPKFTERAVVDVPMPKKLFGSQLKTKDHFLEVKMESSKQHFFHLWNDFAYIEVDGKKYPSSEDGIQVVVIDGNQGRVVSHTSFRNSILQGIPWQLFNYVATIPDNSIVLMASKGRYVSRGPWTRVLEKLGADRGLKLKEQMAFVGFKGSFRPIWVTLDTEDHKAKIFQVVPIPVVKKKKL

SEQ ID NO: 857794 - protein, 914 aa, Homo sapiens
MYQAEEFQVLPCRSCAPNQVKVAGKPMYLHIGEEIDGVDMRAEVGLLSRNIIVMGEMEDKCYPYRNHICNFFDFDTFGGHIKFALGFKAAHLEGTELKHMGQQLVGQYPIHFHLAGDVDERGGYDPPTYIRDLSIHHTFSRCVTVHGSNGLLIKDVVGYNSLGHCFFTEDGPEERNTFDHCLGLLVKSGTLLPSDRDSKMCKMITEDSYPGYIPKPRQDCNAVSTFWMANPNNNLINCAAAGSEETGFWFIFHHVPTGPSVGMYSPGYSEHIPLGKFYNNRAHSNYRAGMIIDNGVKTTEASAKDKRPFLSIISARYSPHQDADPLKPREPAIIRHFIAYKNQDHGAWLRGGDVWLDSCRFADNGIGLTLASGGTFPYDDGSKQEIKNSLFVGESGNVGTEMMDNRIWGPGGLDHSGRTLPIGQNFPIRGIQLYDGPINIQNCTFRKFVALEGRHTSALAFRLNNAWQSCPHNNVTGIAFEDVPITSRVFFGEPGPWFNQLDMDGDKTSVFHDVDGSVSEYPGSYLTKNDNWLVRHPDCINVPDWRGAICSGCYAQMYIQAYKTSNLRMKIIKNDFPSHPLYLEGALTRSTHYQQYQPVVTLQKGYTIHWDQTAPAELAIWLINFNKGDWIRVGLCYPRGTTFSILSDVHNRLLKQTSKTGVFVRTLQMDKVEQSYPGRSHYYWDEDSGLLFLKLKAQNEREKFAFCSMKGCERIKIKALIPKNAGVSDCTATAYPKFTERAVVDVPMPKKLFGSQLKTKDHFLEVKMESSKQHFFHLWNDFAYIEVDGKKYPSSEDGIQVVVIDGNQGRVVSHTSFRNSILQGIPWQLFNYVATIPDNSIVLMASKGRYVSRGPWTRVLEKLGADRGLKLKEQMAFVGFKGSFRPIWVTLDTEDHKAKIFQVVPIPVVKKKKL

SEQ ID NO: 857795 - protein, 846 aa, Homo sapiens
MYQAEEFQVLPCRSCAPNQVKVAGKPMYLHIGEEIDGVDMRAEVGLLSRNIIVMGEMEDKCYPYRNHICNFFDFDTFGGHIKFALGFKAAHLEGTELKHMGQQLVGQYPIHFHLAGDVDERGGYDPPTYIRDLSIHHTFSRCVTVHGSNGLLIKDVVGYNSLGHCFFTEDGPEERNTFDHCLGLLVKSGTLLPSDRDSKMCKMITEDSYPGYIPKPRQDCNAVSTFWMANPNNNLINCAAAGSEETGFWFIFHHVPTGPSVGMYSPGYSEHIPLGKFYNNRAHSNYRAGMIIDNGVKTTEASAKDKRPFLSIISARYSPHQDADPLKPREPAIIRHFIAYKNQDHGAWLRGGDVWLDSCRFADNGIGLTLASGGTFPYDDGSKQEIKNSLFVGESGNVGTEMMDNRIWGPGGLDHSGRTLPIGQNFPIRGIQLYDGPINIQNCTFRKFVALEGRHTSALAFRLNNAWQSCPHNNVTGIAFEDVPITSRVFFGEPGPWFNQLDMDGDKTSVFHDVDGSVSEYPGSYLTKNDNWLVRHPDCINVPDWRGAICSGCYAQMYIQAYKTSNLRMKIIKNDFPSHPLYLEGALTRSTHYQQYQPVVTLQKGYTIHWDQTAPAELAIWLINFNKGDWIRVGLCYPRGTTFSILSDVHNRLLKQTSKTGVFVRTLQMDKVEQSYPGRSHYYWDEDSGKQRTISWRCKMESSKQHFFHLWNDFAYIEVDGKKYPSSEDGIQVVVIDGNQGRVVSHTSFRNSILQGIPWQLFNYVATIPDNSIVLMASKGRYVSRGPWTRVLEKLGADRGLKLKEQMAFVGFKGSFRPIWVTLDTEDHKAKIFQVVPIPVVKKKKL

SEQ ID NO: 857796 - protein, 914 aa, Homo sapiens; identical to SEQ ID NO: 857794

SEQ ID NO: 857797 - protein, 914 aa, Homo sapiens; identical to SEQ ID NO: 857794

SEQ ID NO: 857798 - protein, 146 aa, Homo sapiens
MGAAGRQDFLFKAMLTISWLTLTCFPGATSTVAAGCPDQSPELQPWNPGHDQDHHVHIGQGKTLLLTSSATVYSIHISEGGKPISLCCSLFPPLPQSLADRMQVAMSSDGQNKHHMLWVHVGIWLSEITISSELLGMACRRSNLSE

SEQ ID NO: 857799 - protein, 86 aa, Homo sapiens
HMNNWMLGETPLSSPLQIKDVVGYNSLGHCFFTEDGPEERNTFDHCLGLLVKSGTLLPSDRDSKMCKMITEDSYPGYIPKPRQDCK

SEQ ID NO: 857800 - protein, 822 aa, Homo sapiens
MGAAGRQDFLFKAMLTISWLTLTCFPGATSTVAAGCPDQSPELQPWNPGHDQDHHVHIGQGKTLLLTSSATVYSIHISEGGKLVIKDHDEPIVLRTRHILIDNGGELHAGSALCPFQGNFTIILYGRADEGIQPDPYYGLKYIGVGKGGALELHGQKKLSWTFLNKTLHPGGMAEGGYFFERSWGHRGVIVHVIDPKSGTVIHSDRFDTYRSKKESERLVQYLNAVPDGRILSVAVNDEGSRNLDDMARKAMTKLGSKHFLHLGFRHPWSFLTVKGNPSSSVEDHIEYHGHRGSAAARVFKLFQTEHGEYFNVSLSSEWVQDVEWTEWFDHDKVSQTKGGEKISDLWKAHPGKICNRPIDIQATTMDGVNLSTEVVYKKGQDYRFACYDRGRACRSYRVRFLCGKPVRPKLTVTIDTNVNSTILNLEDNVQSWKPGDTLVIASTDYSMYQAEEFQVLPCRSCAPNQVKVAGKPMYLHIGEEIDGVDMRAEVGLLSRNIIVMGEMEDKCYPYRNHICNFFDFDTFGGHIKFALGFKAAHLEGTELKHMGQQLVGQYPIHFHLAGDVDERGGYDPPTYIRDLSIHHTFSRCVTVHGSNGLLIKDVVGYNSLGHCFFTEDGPEERNTFDHCLGLLVKSGTLLPSDRDSKMCKMITEDSYPGYIPKPRQDCNAVSTFWMANPNNNLINCAAAGSEETGFWFIFHHVPTGPSVGMYSPGYSEHIPLGKFYNNRAHSNYRAGMIIDNGVKTTEASAKDKRPFLSIISARYSPHQDADPLKPREPAIIRHFIAYKNQDHGAWLRGGDVWLDSCRAISEGRLRKASCLQE

SEQ ID NO: 857801 - protein, 1361 aa, Homo sapiens
MGAAGRQDFLFKAMLTISWLTLTCFPGATSTVAAGCPDQSPELQPWNPGHDQDHHVHIGQGKTLLLTSSATVYSIHISEGGKLVIKDHDEPIVLRTRHILIDNGGELHAGSALCPFQGNFTIILYGRADEGIQPDPYYGLKYIGVGKGGALELHGQKKLSWTFLNKTLHPGGMAEGGYFFERSWGHRGVIVHVIDPKSGTVIHSDRFDTYRSKKESERLVQYLNAVPDGRILSVAVNDEGSRNLDDMARKAMTKLGSKHFLHLGFRHPWSFLTVKGNPSSSVEDHIEYHGHRGSAAARVFKLFQTEHGEYFNVSLSSEWVQDVEWTEWFDHDKVSQTKGGEKISDLWKAHPGKICNRPIDIQATTMDGVNLSTEVVYKKGQDYRFACYDRGRACRSYRVRFLCGKPVRPKLTVTIDTNVNSTILNLEDNVQSWKPGDTLVIASTDYSMYQAEEFQVLPCRSCAPNQVKVAGKPMYLHIGEEIDGVDMRAEVGLLSRNIIVMGEMEDKCYPYRNHICNFFDFDTFGGHIKFALGFKAAHLEGTELKHMGQQLVGQYPIHFHLAGDVDERGGYDPPTYIRDLSIHHTFSRCVTVHGSNGLLIKDVVGYNSLGHCFFTEDGPEERNTFDHCLGLLVKSGTLLPSDRDSKMCKMITEDSYPGYIPKPRQDCNAVSTFWMANPNNNLINCAAAGSEETGFWFIFHHVPTGPSVGMYSPGYSEHIPLGKFYNNRAHSNYRAGMIIDNGVKTTEASAKDKRPFLSIISARYSPHQDADPLKPREPAIIRHFIAYKNQDHGAWLRGGDVWLDSCRFADNGIGLTLASGGTFPYDDGSKQEIKNSLFVGESGNVGTEMMDNRIWGPGGLDHSGRTLPIGQNFPIRGIQLYDGPINIQNCTFRKFVALEGRHTSALAFRLNNAWQSCPHNNVTGIAFEDVPITSRVFFGEPGPWFNQLDMDGDKTSVFHDVDGSVSEYPGSYLTKNDNWLVRHPDCINVPDWRGAICSGCYAQMYIQAYKTSNLRMKIIKNDFPSHPLYLEGALTRSTHYQQYQPVVTLQKGYTIHWDQTAPAELAIWLINFNKGDWIRVGLCYPRGTTFSILSDVHNRLLKQTSKTGVFVRTLQMDKVEQSYPGRSHYYWDEDSGLLFLKLKAQNEREKFAFCSMKGCERIKIKALIPKNAGVSDCTATAYPKFTERAVVDVPMPKKLFGSQLKTKDHFLEVKMESSKQHFFHLWNDFAYIEVDGKKYPSSEDGIQVVVIDGNQGRVVSHTSFRNSILQGIPWQLFNYVATIPDNSIVLMASKGRYVSRGPWTRVLEKLGADRGLKLKEQMAFVGFKGSFRPIWVTLDTEDHKAKIFQVVPIPVVKKKKL

SEQ ID NO: 857802 - protein, 111 aa, Homo sapiens [sequence omitted]

SEQ ID NO: 857803 - protein, 437 aa, Homo sapiens
MYQAEEFQVLPCRSCAPNQVKVAGKPMYLHIGEEIDGVDMRAEVGLLSRNIIVMGEMEDKCYPYRNHICNFFDFDTFGGHIKFALGFKAAHLEGTELKHMGQQLVGQYPIHFHLAGDVDERGGYDPPTYIRDLSIHHTFSRCVTVHGSNGLLIKDVVGYNSLGHCFFTEDGPEERNTFDHCLGLLVKSGTLLPSDRDSKMCKMITEDSYPGYIPKPRQDCNAVSTFWMANPNNNLINCAAAGSEETGFWFIFHHVPTGPSVGMYSPGYSEHIPLGKFYNNRAHSNYRAGMIIDNGVKTTEASAKDKRPFLSIISARYSPHQDADPLKPREPAIIRHFIAYKNQDHGAWLRGGDVWLDSCRFADNGIGLTLASGGTFPYDDGSKQEIKNSLFVGESGNVGTEMMDNRIWGPGEARTLARLGHWRGQDTGEARTLARLG

SEQ ID NO: 857804 - protein, 118 aa, Homo sapiens
LRIELPFSLAFSSMHLFLISPTTCNSVVDMVPFYKAAGSTCYDQLRVNVSVGGRRRGRFECPSKCPAMLLVCRLLFLKLKAQNEREKFAFCSMKGCERIKIKALIPKNAGVSDCTATA

SEQ ID NO: 857805 - protein, 186 aa, Homo sapiens
YRRPTPLGVGNMRLSVAAAISHGRVFRRMGLGPESRIHLLRNLLTGLVRHERIEAPWARVDEMRGYAEKLIDYGKLGDTNERAMRMADFWLTEKDLIPKLFQVLAPRYKDQTGGYTRMLQIPNRSLDRAKMAVIEYKGNCLPPLPLPRRDSHLTLLNQLLQGLRQDLRQSQEASNHSSHTAQTPGI

SEQ ID NO: 857806 - protein, 189 aa, Homo sapiens
LRLRYEAWVVEVGNMRLSVAAAISHGRVFRRMGLGPESRIHLLRNLLTGLVRHERIEAPWARVDEMRGYAEKLIDYGKLGDTNERAMRMADFWLTEKDLIPKLFQVLAPRYKDQTGGYTRMLQIPNRSLDRAKMAVIEYKGNCLPPLPLPRRDSHLTLLNQLLQGLRQDLRQSQEASNHSSHTAQTPGI

SEQ ID NO: 857807 - protein, 187 aa, Homo sapiens
VPASKGRAEVGNMRLSVAAAISHGRVFRRMGLGPESRIHLLRNLLTGLVRHERIEAPWARVDEMRGYAEKLIDYGKLGDTNERAMRMADFWLTEKDLIPKLFQVLAPRYKDQTGGYTRMLQIPNRSLDRAKMAVIEYKGNCLPPLPLPRRDSHLTLLNQLLQGLRQDLRQSQEASNHSSHTAQTPGI

SEQ ID NO: 857808 - protein, 102 aa, Homo sapiens
LRLRYEAWVVEVGNMRLSVAAAISHGRVFRRMGLGPESRIHLLRNLLTGLVRHERIEAPWARVDEMRGYAEKVRSAALLSTLRVWSEGAEPAASGKGPGPTW

SEQ ID NO: 857809 - protein, 178 aa, Homo sapiens
VPASKGRAEVGNMRLSVAAAISHGRVFRRMGLGPESRIHLLRNLLTGLVRHERIEAPWARVDEMRGYAEKLIDYGKLGDTNERAMRMADFWLTEKDLIPKLFQVLAPRYKDQTGGYTRMLQIPNRSLDRAKMAVIEYKGNCLPPLPLPRRDSHLTLLNQLLQGLRQDLRLPFPWVQRL

SEQ ID NO: 857810 - protein, 187 aa, Homo sapiens; identical to SEQ ID NO: 857807

SEQ ID NO: 857811 - protein, 187 aa, Homo sapiens; identical to SEQ ID NO: 857807

SEQ ID NO: 857812 - protein, 187 aa, Homo sapiens; identical to SEQ ID NO: 857807

SEQ ID NO: 857813 - protein, 102 aa, Homo sapiens; identical to SEQ ID NO: 857808

SEQ ID NO: 857814 - protein, 166 aa, Homo sapiens
LRLRYEAWVVEVGNMRLSVAAAISHGRVFRRMGLGPESRIHLLRNLLTGLVRHERIEAPWARVDEMRGYAEKEKDLIPKLFQVLAPRYKDQTGGYTRMLQIPNRSLDRAKMAVIEYKGNCLPPLPLPRRDSHLTLLNQLLQGLRQDLRQSQEASNHSSHTAQTPGI

SEQ ID NO: 857815 - protein, 91 aa, Homo sapiens
VGNMRLSVAAAISHGRVFRRMGLGPESRIHLLRNLLTGLVRHERIEAPWARVDEMRGYAEKVRSAALLSTLRVWSEGAEPAASGKGPGPTW

SEQ ID NO: 857816 - protein, 359 aa, Homo sapiens [sequence omitted]

SEQ ID NO: 857817 - protein, 359 aa, Homo sapiens [sequence omitted]

SEQ ID NO: 857818 - protein, 359 aa, Homo sapiens [sequence omitted]

SEQ ID NO: 857819 - protein, 341 aa, Homo sapiens
MILNSSTEDGIMIPTLYSIIFVVGIFGNSLVVIVIYFYMKLKTVASVFLLNLALADLCFLLTLPLWAVYTAMEYRWPFGNYLCKIASASVSFNLYASVFLLTCLSIDRYLAIVHPMKSRLRRTMLVAKVTCIIIWLLAGLASLPAIIHRNVFFIENTNITVCAFHYESQNSTLPIGLGLTKNILGFLFPFLIILTSYTLIWKALKKAYEIQKNKPRNDDIFKIIMAIVLFFFFSWIPHQIFTFLDVLIQLGIIRDCRIADIVDTAMPITICIAYFNNCLNPLFYGFLGKKFKRYFLQLLKYIPPKAKSHSNLSTKMSTLSYRPSDNVSSSTKKPAPCFEVE

SEQ ID NO: 857820 - protein, 359 aa, Homo sapiens [sequence omitted]

SEQ ID NO: 857821 - protein, 359 aa, Homo sapiens [sequence omitted]

SEQ ID NO: 857822 - protein, 341 aa, Homo sapiens
MILNSSTEDGIKRIQDDCPKAGRHNYIFVMIPTLYSIIFVVGIFGNSLVVIVIYFYMKLKTVASVFLLNLALADLCFLLTLPLWAVYTAMEYRWPFGNYLCKIASASVSFNLYASVFLLTCLSIDRYLAIVHPMKSRLRRTMLVAKVTCIIIWLLAGLASLPAIIHRNVFFIENTNITVCAFHYESQNSTLPIGLGLTKNILGFLFPFLIILTSYTLIWKALKKAYEIQKNKPRNDDIFKIIMAIVLFFFFSWIPHQIFTFLDVLIQLGIIRDCRIADIVDTAMPITICIAYFNNCLNPLFYGFLGKKFKRYFLQLLKYIPPKAKSHSNLSTKPAPCFEVE

SEQ ID NO: 857823 - protein, 412 aa, Homo sapiens
MAENLKGCSVCCKSSWNQLQDLCRLAKLSCPALGISKRNLYDFEVEYLCDYKKIREQEYYLVKWRGYPDSESTWEPRQNLKCVRILKQFHKDLERELLRRHHRSKTPRHLDPSLANYLVQKAKQRRALRRWEQELNAKRSHLGRITVENEVDLDGPPRAFVYINEYRVGEGITLNQVAVGCECQDCLWAPTGGCCPGASLHKFAYNDQGQVRLRAGLPIYECNSRCRCGYDCPNRVVQKGIRYDLCIFRTDDGRGWGVRTLEKIRKNSFVMEYVGEIITSEEAERRGQIYDRQGATYLFDLDYVEDVYTVDAAYYGNISHFVNHSCDPNLQVYNVFIDNLDERLPRIAFFATRTIRAGEELTFDYNMQVDPVDMESTRMDSNFGLAGLPGSPKKRVRIECKCGTESCRKYLF

SEQ ID NO: 857824 - protein, 356 aa, Homo sapiens
MAENLKGCSVCCKSSWNQLQDLCRLAKLSCPALGISKRNLYDFEVEYLCDYKKIREQEYYLVKWRGYPDSESTWEPRQNLKCVRILKQFHKDLERELLRRHHRSKTPRHLDPSLANYLVQKAKQRRALRRWEQELNAKRSHLGRITVENEVDLDGPPRAFVYINEYRVGEGITLNQVAVGCECQDCLWAPTGGCCPGASLHKFAYNDQGQVRLRAGLPIYECNSRCRCGYDCPNRVVQKGIRYDLCIFRTDDGRGWGVRTLEKIRKNSFVMEYVGEIITSEEADGCPASLSLPQEPSGQARSSPLITTCKWTPWTWRAPAWTPTLAWLGSLAPLRSGSVLNASVGLSPAANTSSSP

SEQ ID NO: 857825 - protein, 412 aa, Homo sapiens; identical to SEQ ID NO: 857823

SEQ ID NO: 857826 - protein, 412 aa, Homo sapiens; identical to SEQ ID NO: 857823

SEQ ID NO: 857827 - protein, 460 aa, Homo sapiens
QAATGPAADSKKTCNTRCSLSVGQPVCHFSGDSSPPLVKSVSSDALKLRFYQGRQSVTTYSHRVRQLCRFCCLAKLSCPALGISKRNLYDFEVEYLCDYKKIREQEYYLVKWRGYPDSESTWEPRQNLKCVRILKQFHKDLERELLRRHHRSKTPRHLDPSLANYLVQKAKQRRALRRWEQELNAKRSHLGRITVENEVDLDGPPRAFVYINEYRVGEGITLNQVAVGCECQDCLWAPTGGCCPGASLHKFAYNDQGQVRLRAGLPIYECNSRCRCGYDCPNRVVQKGIRYDLCIFRTDDGRGWGVRTLEKIRKNSFVMEYVGEIITSEEAERRGQIYDRQGATYLFDLDYVEDVYTVDAAYYGNISHFVNHSCDPNLQVYNVFIDNLDERLPRIAFFATRTIRAGEELTFDYNMQVDPVDMESTRMDSNFGLAGLPGSPKKRVRIECKCGTESCRKYLF

SEQ ID NO: 857828 - protein, 412 aa, Homo sapiens; identical to SEQ ID NO: 857823

SEQ ID NO: 857829 - protein, 167 aa, Homo sapiens
DRGQAAKPGSRIKVNSSPHVSPVCCALFLAEIITSEEAERRGQIYDRQGATYLFDLDYVEDVYTVDAAYYGNISHFVNHSCDPNLQVYNVFIDNLDERLPRIAFFATRTIRAGEELTFDYNMQVDPVDMESTRMDSNFGLAGLPGSPKKRVRIECKCGTESCRKYLF

SEQ ID NO: 857830 - protein, 141 aa, Homo sapiens
MELAMDNSYAFNQRSTCNGIPSEKKNNFLVSEDHGQKILSVLQNFREQNVFYDFKIIMKDEIIPCHRCVLAACSDFFRAMFEVNMKERDDGSVTITNLSSKAVKAFLDYAYTGKTKITDDNVEMFFQLSSFSVLLSSCVLL

SEQ ID NO: 857831 - protein, 83 aa, Homo sapiens
SRTVWQGKPYTESGPRRYLGPDGADANVAPPPSSRRPCAGDGPSLRRLAHRQPSQPAPDSATSSRRKQLGAETEISPALCGIV

SEQ ID NO: 857832 - protein, 526 aa, Homo sapiens
MELAMDNSYAFNQRSTCNGIPSEKKNNFLVSEDHGQKILSVLQNFREQNVFYDFKIIMKDEIIPCHRCVLAACSDFFRAMFEVNMKERDDGSVTITNLSSKAVKAFLDYAYTGKTKITDDNVEMFFQLSSFLQVSFLSKACSDFLIKSINLVNCLQLLSISDSYGSTSLFDHALHFVQHHFSLLFKSSDFLEMNFGVLQKCLESDELNVPEEEMVLKVVLSWTKHNLESRQKYLPHLIEKVRLHQLSEETLQDCLFNEESLLKSTNCFDIIMDAIKCVQGSGGLFPDARPSTTEKYIFIHKTEENGENQYTFCYNIKSDSWKILPQSHLIDLPGSSLSSYGEKIFLTGGCKGKCCRTVRLHIAESYHDATDQTWCYCPVKNDFFLVSTMKTPRTMHTSVMALDRLFVIGGKTRGSRDIKSLLDVESYNPLSKEWISVSPLPRGIYYPEASTCQNVIYVLGSEVEITDAFNPSLDCFFKYNATTDQWSELVAEFGQFFHATLIKAVPVNCTLYICDLSTYKVYSFCP

SEQ ID NO: 857833 - protein, 447 aa, Homo sapiens
MFEVNMKERDDGSVTITNLSSKAVKAFLDYAYTGKTKITDDNVEMFFQLSSFLQVSFLSKACSDFLIKSINLVNCLQLLSISDSYGSTSLFDHALHFVQHHFSLLFKSSDFLEMNFGVLQKCLESDELNVPEEEMVLKVVLSWTKHNLESRQKYLPHLIEKVRLHQLSEETLQDCLFNEESLLKSTNCFDIIMDAIKCVQGSGGLFPDARPSTTEKYIFIHKTEENGENQYTFCYNIKSDSWKILPQSHLIDLPGSSLSSYGEKIFLTGGCKGKCCRTVRLHIAESYHDATDQTWCYCPVKNDFFLVSTMKTPRTMHTSVMALDRLFVIGGKTRGSRDIKSLLDVESYNPLSKEWISVSPLPRGIYYPEASTCQNVIYVLGSEVEITDAFNPSLDCFFKYNATTDQWSELVAEFGQFFHATLIKAVPVNCTLYICDLSTYKVYSFCP

SEQ ID NO: 857834 - protein, 447 aa, Homo sapiens; identical to SEQ ID NO: 857833

SEQ ID NO: 857835 - protein, 234 aa, Homo sapiens
MEGQDEVSAREQHFHSQVRESTICFLLFAILYVVSYFIITRYKRKSDEQEDEDAIVNRISLFLSTFTLAVSAGAVLLLPFSIISNEILLSFPQNYYIQWLNGSLIHGLWNLASLFSNLCLFVLMPFAFFFLESEGFAGLKKGIRARILETLVMLLLLALLILGIVWVASALIDNDAASMESLYDLWEFYLPYLYSCISLMGCLLLLWLHKLHLPNTSRDSETAKPSVNGHQKAL

SEQ ID NO: 857836 - protein, 41 aa, Homo sapiens
MEGQDEVSAREQHFHSQVRESTVRGDRGSPDSPACPPGPSV

SEQ ID NO: 857837 - protein, 490 aa, Homo sapiens
MEGQDEVSAREQHFHSQVRESTICFLLFAILYVVSYFIITRYKRKSDEQEDEDAIVNRISLFLSTFTLAVSAGAVLLLPFSIISNEILLSFPQNYYIQWLNGSLIHGLWNLASLFSNLCLFVLMPFAFFFLESEGFAGLKKGIRARILETLVMLLLLALLILGIVWVASALIDNDAASMESLYDLWEFYLPYLYSCISLMGCLLLLLCTPVGLSRMFTVMGQLLVKPTILEDLDEQIYIITLEEEALQRRLNGLSSSVEYNIMELEQELENVKTLKTKLERRKKASAWERNLVYPAVMVLLLIETSISVLLVACNILCLLVDETAMPKGTRGPGIGNASLSTFGFVGAALEIILIFYLMVSSVVGFYSLRFFGNFTPKKDDTTMTKIIGNCVSILVLSSALPVMSRTLGITRFDLLGDFGRFNWLGNFYIVLSYNLLFAIVTTLCLVRKFTSAVREELFKALGLHKLHLPNTSRDSETAKPSVNGHQKAL

SEQ ID NO: 857838 - protein, 490 aa, Homo sapiens; identical to SEQ ID NO: 857837

SEQ ID NO: 857839 - protein, 490 aa, Homo sapiens; identical to SEQ ID NO: 857837

SEQ ID NO: 857840 - protein, 367 aa, Homo sapiens
MPFAFFFLESEGFAGLKKGIRARILETLVMLLLLALLILGIVWVASALIDNDAASMESLYDLWEFYLPYLYSCISLMGCLLLLLCTPVGLSRMFTVMGQLLVKPTILEDLDEQIYIITLEEEALQRRLNGLSSSVEYNIMELEQELENVKTLKTKLERRKKASAWERNLVYPAVMVLLLIETSISVLLVACNILCLLVDETAMPKGTRGPGIGNASLSTFGFVGAALEIILIFYLMVSSVVGFYSLRFFGNFTPKKDDTTMTKIIGNCVSILVLSSALPVMSRTLGITRFDLLGDFGRFNWLGNFYIVLSYNLLFAIVTTLCLVRKFTSAVREELFKALGLHKLHLPNTSRDSETAKPSVNGHQKAL

SEQ ID NO: 857841 - protein, 338 aa, Homo sapiens
MLLLLALLILGIVWVASALIDNDAASMESLYDLWEFYLPYLYSCISLMGCLLLLLCTPVGLSRMFTVMGQLLVKPTILEDLDEQIYIITLEEEALQRRLNGLSSSVEYNIMELEQELENVKTLKTKLERRKKASAWERNLVYPAVMVLLLIETSISVLLVACNILCLLVDETAMPKGTRGPGIGNASLSTFGFVGAALEIILIFYLMVSSVVGFYSLRFFGNFTPKKDDTTMTKIIGNCVSILVLSSALPVMSRTLGITRFDLLGDFGRFNWLGNFYIVLSYNLLFAIVTTLCLVRKFTSAVREELFKALGLHKLHLPNTSRDSETAKPSVNGHQKAL

SEQ ID NO: 857842 - protein, 397 aa, Homo sapiens
MNKKMKMPSSTGFRLWNLASLFSNLCLFVLMPFAFFFLESEGFAGLKKGIRARILETLVMLLLLALLILGIVWVASALIDNDAASMESLYDLWEFYLPYLYSCISLMGCLLLLLCTPVGLSRMFTVMGQLLVKPTILEDLDEQIYIITLEEEALQRRLNGLSSSVEYNIMELEQELENVKTLKTKLERRKKASAWERNLVYPAVMVLLLIETSISVLLVACNILCLLVDETAMPKGTRGPGIGNASLSTFGFVGAALEIILIFYLMVSSVVGFYSLRFFGNFTPKKDDTTMTKIIGNCVSILVLSSALPVMSRTLGITRFDLLGDFGRFNWLGNFYIVLSYNLLFAIVTTLCLVRKFTSAVREELFKALGLHKLHLPNTSRDSETAKPSVNGHQKAL

SEQ ID NO: 857843 - protein, 242 aa, Homo sapiens
MTIIMTKYERRSGQASYQQVLDNVKTLKTKLERRKKASAWERNLVYPAVMVLLLIETSISVLLVACNILCLLVDETAMPKGTRGPGIGNASLSTFGFVGAALEIILIFYLMVSSVVGFYSLRFFGNFTPKKDDTTMTKIIGNCVSILVLSSALPVMSRTLGITRFDLLGDFGRFNWLGNFYIVLSYNLLFAIVTTLCLVRKFTSAVREELFKALGLHKLHLPNTSRDSETAKPSVNGHQKAL

SEQ ID NO: 857844 - protein, 234 aa, Homo sapiens; identical to SEQ ID NO: 857835

SEQ ID NO: 857845 - protein, 490 aa, Homo sapiens; identical to SEQ ID NO: 857837

SEQ ID NO: 857846 - protein, 70 aa, Homo sapiens
LWIHDHPFPFIDVLFHLEVKIGATYVGSCCKELKDILLLHLQDIKGSGHCENFPLSYDGNPEQRRMDPSS

SEQ ID NO: 857847 - protein, 490 aa, Homo sapiens; identical to SEQ ID NO: 857837

SEQ ID NO: 857848 - protein, 121 aa, Homo sapiens
MEGQDEVSAREQHFHSQVRESTICFLLFAILYVVSYFIITRYKRKSDEQEDEDAIVNRISLFLSTFTLAVSAGAVLLLPFSIISNEILLSFPQNYYIQWLNGSLIHVETGFTVLARMVSIS

SEQ ID NO: 857849 - protein, 490 aa, Homo sapiens; identical to SEQ ID NO: 857837

SEQ ID NO: 857850 - protein, 490 aa, Homo sapiens; identical to SEQ ID NO: 857837

SEQ ID NO: 857851 - protein, 490 aa, Homo sapiens; identical to SEQ ID NO: 857837

SEQ ID NO: 857852 - protein, 367 aa, Homo sapiens; identical to SEQ ID NO: 857840

SEQ ID NO: 857853 - protein, 487 aa, Homo sapiens
MEGQDEVSAREQHFHSQVRESTICFLLFAILYVVSYFIITRYKRKSDEQEDEDAIVNRISLFLSTFTLAVSAGAVLLLPFSIISNEILLSFPQNYYIQWLNGSLIHGLWNLASLFSNLCLFVLMPFAFFFLESEGFAGLKKGIRARILETLVMLLLLALLILGIVWVASALIDNDAASMESLYDLWEFYLPYLYSCISLMGCLLLLLCTPVGLSRMFTVMGQLLVKPTILEDLDEQIYIITLEEEALQRRLNGLSSSVEYNIMELEQELENVKTLKTKLERRKKASAWERNLVYPAVMVLLLIETSISVLLVACNILCLLVDETAMPKGTRGPGIGNASLSTFGFVGAALEIILIFYLMVSSVVGFYSLRFFGNFTPKKDDTTMTKIIGNCVSILVLSSALPVMSRTLGITRFDLLGDFGRFNWLGNFYIVLSYNLLFAIVTTLCLVRKFTSAVREELFKALGLHKLHLPNTSRDPRTPDSRHSCPM

SEQ ID NO: 857854 - protein, 490 aa, Homo sapiens; identical to SEQ ID NO: 857837

SEQ ID NO: 857855 - protein, 490 aa, Homo sapiens; identical to SEQ ID NO: 857837

SEQ ID NO: 857856 - protein, 175 aa, Homo sapiens
KGHLCPAAHTLPACPSHMLSRAALCLDRGSRERHGSSIWVQGASPQTFPPYFKHLTPHFTLSPLPLFAFFFLALILENCNKIFYYLSLPSSLQEACPAAGANHPSGLHMHLDRHAGWVLTPGPLHLCLPRGAGQHTLYNEGSQSTQLQVPVHESSSHRLFMQLSLIYILLSTYPM

SEQ ID NO: 857857 - protein, 138 aa, Homo sapiens
MYKLASCCLLFIGFLNPLLSLPLLDSREISFQLSAPHEDARLTPEELERASLLQILPEMLGAERGDILRKADSSTNIFNPRGNLRKFQDFSGQDPNILLSHLLARIWKPYKKQRRKLRQDLRLWKKEPGLRIFKNYVC

SEQ ID NO: 857858 - protein, 139 aa, Homo sapiens
METNVFHLMLCVTSARTHKSTSLCFGHFNSYPSLPLIHDLLLEISFQLSAPHEDARLTPEELERASLLQILPEMLGAERGDILRKADSSTNIFNPRGNLRKFQDFSGQDPNILLSHLLARIWKPYKKRETPDCFWKYCV

SEQ ID NO: 857859 - protein, 124 aa, Homo sapiens
MYKLASCCLLFIGFLNPLLSLPLLDSREISFQLSAPHEDARLTPEELERASLLQILPEMLGAERGDILRKADSSTNIFNPRGNLRKFQDFSGQDPNILLSHLLARIWKPYKKRETPDCFWKYCV

SEQ ID NO: 857860 - protein, 134 aa, Homo sapiens
PSPRRPPVAPKMPIEISPRRLFKILLPKSKHFFTFWVCCSKNCPGMTKGRALYSLEGFLLLRAAVHVEYYISLFAKGWGCASQYKPAGRMWLLAAGNAAGPKGEVLEVKCTLALEDLVQAKEGKNSELILFMVF

SEQ ID NO: 857861 - protein, 692 aa, Homo sapiens
MSQQDAVAALSERLLVAAYKGQTENVVQLINKGARVAVTKHGRTPLHLAANKGHLPVVQILLKAGCDLDVQDDGDQTALHRATVVGNTEIIAALIHEGCALDRQDKDGNTALHEASWHGFSQSAKLLVKAGANVLAKNKAGNTALHLACQNSHSQSTRVLLLAGSRADLKNNAGDTCLHVAARYNHLSIIRLLLTAFCSVHEKNQAGDTALHVAAALNHKKVAKILLEAGADTTIVNNAGQTPLETARYHNNPEVALLLTKAPQGSVSAGDTPSSEQAVARKEEAREEFLSASPEPRAKDDRRRKSRPKVSAFSDPTPPADQQPGHQKNLHAHNHPKKRNRHRCSSPPPPHEFRAYQLYTLYRGKDGKVMQAPINGCRCEPLINKLENQLEATVEEIKAELGSVQDKMNTKLGQMENKTQHQMRVLDKLMVERLSAERTECLNRLQQHSDTEKHEGEKRQISLVDELKTWCMLKIQNLEQKLSGDSRACRAKSTPSTCESSTGVDQLVVTAGPAAASDSSPPVVRPKEKALNSTATQRLQQELSSSDCTGSRLRNVKVQTALLPMNEAARSDQQAGPCVNRGTQTKKSGKSGPTRHRAQQPAASSTCGQPPPATGSEQTGPHIRDTSQALELTQYFFEAVSTQMEKWYERKIEEARSQANQKAQQDKATLKEHIKSLEEELAKLRTRVQKEN

SEQ ID NO: 857862 - protein, 727 aa, Homo sapiens [sequence omitted]

SEQ ID NO: 857863 - protein, 727 aa, Homo sapiens [sequence omitted]

SEQ ID NO: 857864 - protein, 727 aa, Homo sapiens [sequence omitted]

SEQ ID NO: 857865 - protein, 661 aa, Homo sapiens
MSQQDAVAALSERLLVAAYKGQTENVVQLINKGARVAVTKHGRTPLHLAANKGHLPVVQILLKAGCDLDVQDDGDQTALHRATVVGNTEIIAALIHEGCALDRQDKDGNTALHEASWHGFSQSAKLLVKAGANVLAKNKAGDTALHVAAALNHKKVAKILLEAGADTTIVNNAGQTPLETARYHNNPEVALLLTKAPQVLRFSRGRSLRKKRERLKEERRAQSVPRDEVAQSKGSVSAGDTPSSEQAVARKEEAREEFLSASPEPRAKDDRRRKSRPKVSAFSDPTPPADQQPGHQKNLHAHNHPKKRNRHRCSSPPPPHEFRAYQLYTLYRGKDGKVMQAPINGCRCEPLINKLENQLEATVEEIKAELGSVQDKMNTKLGQMENKTQHQMRVLDKLMVERLSAERTECLNRLQQHSDTEKHEGEKRQISLVDELKTWCMLKIQNLEQKLSGDSRACRAKSTPSTCESSTGVDQLVVTAGPAAASDSSPPVVRPKEKALNSTATQRLQQELSSSDCTGSRLRNVKVQTALLPMNEAARSDQQAGPCVNRGTQTKKSGKSGPTRHRAQQPAASSTCGQPPPATGSEQTGPHIRDTSQALELTQYFFEAVSTQMEKWYERKIEEARSQANQKAQQDKATLKEHIKSLEEELAKLRTRVQKEN

SEQ ID NO: 857866 - protein, 586 aa, Homo sapiens
MSQQDAVAALSERLLVAAYKGQTENVVQLINKGARVAVTKHGRTPLHLAANKGHLPVVQILLKAGCDLDVQDDGDQTALHRATVVGNTEIIAALIHEGCALDRQDKDGNTALHEASWHGFSQSAKLLVKAGANVLAKNKAGDTALHVAAALNHKKVAKILLEAGADTTIVNNAGQTPLETARYHNNPEVALLLTKAPQVLRFSRGRSLRKKRERLKEERRAQSVPRDEVAQSKGSVSAGDTPSSEQAVARKEEAREEFLSASPEPRAKDDRRRKSRPKVSAFSDPTPPADQQPGHQKNLHAHNHPKKRNRHRCSSPPPPHEFRAYQLYTLYRGKDGKVMQAPINGCRCEPLINKLENQLEATVEEIKAELGSVQDKMNTKLGQMENKTQHQMRVLDKLMVERLSAERTECLNRLQQHSDTEKHEGEKRQISLVDELKTWCMLKIQNLEQKLSGDSRACRAKSTPSTCESSTGVDQLVVTAGPAAASDSSPPVVRPKEKALNSTATQRLQQELSSSDCTGSRLRNVKVQTALLPMNEAARSDQQAGPCVNRGTVWTLSTVWTLGTVWTLSTVWTLGTVWTLSTVWTL

SEQ ID NO: 857867 - protein, 509 aa, Homo sapiens
MSQQDAVAALSERLLVAAYKGQTENVVQLINKGARVAVTKHGRTPLHLAANKGHLPVVQILLKAGCDLDVQDDGDQTALHRATVVGNTEIIAALIHEGCALDRQDKDGNTALHEASWHGFSQSAKLLVKAGANVLAKNKAGDTALHVAAALNHKKVAKILLEAGADTTIVNNAGQTPLETARYHNNPEVALLLTKAPQVLRFSRGRSLRKKRERLKEERRAQSVPRDEVAQSKGSVSAGDTPSSEQAVARKEEAREEFLSASPEPRAKDDRRRKSRPKVSAFSDPTPPADQQPGHQKNLHAHNHPKKRNRHRCSSPPPPHEFRAYQLYTLYRGKDGKVMQAPINGCRCEPLINKLENQLEATVEEIKAELGSVQDKMNTKLGQMENKTQHQMRVLDKLMVERLSAERTECLNRLQQHSDTEKHEGEKRQISLVDELKTWCMLKIQNLEQKLSGDSRACRAKSTPSTCESSTGNPHTESPFVQKEHDQQLLYSPALKGSTYARAVGNTGW

SEQ ID NO: 857868 - protein, 307 aa, Homo sapiens [sequence omitted]

SEQ ID NO: 857869 - protein, 692 aa, Homo sapiens; identical to SEQ ID NO: 857861

SEQ ID NO: 857870 - protein, 610 aa, Homo sapiens
MSQQDAVAALSERLLVAAYKGQTENVVQLINKGARVAVTKHGRTPLHLAANKGHLPVVQILLKAGCDLDVQDDGDQTALHRATVVGNTEIIAALIHEGCALDRQDKDGNTALHEASWHGFSQSAKLLVKAGANVLAKNKAGDTALHVAAALNHKKVAKILLEAGADTTIVNNAGQTPLETARYHNNPEVALLLTKAPQVLRFSRGRSLRKKRERLKEERRAQSVPRDEVAQSKGSVSAGDTPSSEQAVARKEEAREEFLSASPEPRAKDDRRRKSRPKVSAFSDPTPPADQQPGHQKNLHAHNHPKKRNRHRCSSPPPPHEFRAYQLYTLYRGKDGKVMQMRVLDKLMVERLSAERTECLNRLQQHSDTEKHEGEKRQISLVDELKTWCMLKIQNLEQKLSGDSRACRAKSTPSTCESSTGVDQLVVTAGPAAASDSSPPVVRPKEKALNSTATQRLQQELSSSDCTGSRLRNVKVQTALLPMNEAARSDQQAGPCVNRGTQTKKSGKSGPTRHRAQQPAASSTCGQPPPATGSEQTGPHIRDTSQALELTQYFFEAVSTQMEKWYERKIEEARSQANQKAQQDKATLKEHIKSLEEELAKLRTRVQKEN

SEQ ID NO: 857871 - protein, 661 aa, Homo sapiens; identical to SEQ ID NO: 857865

SEQ ID NO: 857872 - protein, 446 aa, Homo sapiens
  misc_feature (434)..(434): Xaa can be any naturally occurring amino acid
  misc_feature (436)..(436): Xaa can be any naturally occurring amino acid
MSQQDAVAALSERLLVAAYKGQTENVVQLINKGARVAVTKHGRTPLHLAANKGHLPVVQILLKAGCDLDVQDDGDQTALHRATVVGNTEIIAALIHEGCALDRQDKDGNTALHEASWHGFSQSAKLLVKAGANVLAKNKAGDTALHVAAALNHKKVAKILLEAGADTTIVNNAGQTPLETARYHNNPEVALLLTKAPQVLRFSRGRSLRKKRERLKEERRAQSVPRDEVAQSKGSVSAGDTPSSEQAVARKEEAREEFLSASPEPRAKDDRRRKSRPKVSAFSDPTPPADQQPGHQKNLHAHNHPKKRNRHRCSSPPPPHEFRAYQLYTLYRGKDGKVMQAPINGCRCEPLINKLENQLEATVEEIKAELGSVQDKMNTKLGQMENKTQHQMRVLDKLMVERLSAERTECLNRLQQHSDTEKHEGEKRQILGDXLXCKIRLTFVRL

SEQ ID NO: 857873 - protein, 191 aa, Homo sapiens
MAGAAEDARALFRAGVCAALEAWPALQIAVENGFGGVHSQEKAKWLGGAVEDYFMRNADLELDEVEDFLGELLTNEFDTVVEDGSLPQVSQQLQTMFHHFQRGDGAALREMASCITQRKCKVTATALKTARETDEDEDDVDSVEEMEVTATNDGAATDGVCPQPEPSDPDAQTIKEEDIVEDGWTIVRRKK

SEQ ID NO: 857874 - protein, 191 aa, Homo sapiens; identical to SEQ ID NO: 857873

SEQ ID NO: 857875 - protein, 191 aa, Homo sapiens; identical to SEQ ID NO: 857873

SEQ ID NO: 857876 - protein, 191 aa, Homo sapiens; identical to SEQ ID NO: 857873

SEQ ID NO: 857877 - protein, 191 aa, Homo sapiens; identical to SEQ ID NO: 857873

SEQ ID NO: 857878 - protein, 191 aa, Homo sapiens; identical to SEQ ID NO: 857873

SEQ ID NO: 857879 - protein, 175 aa, Homo sapiens
GGEKNYRLGRGWVDNGGRCRRCASSFPGWGLRGPGGLAGLAADLELDEVEDFLGELLTNEFDTVVEDGSLPQVSQQLQTMFHHFQRGDGAALREMASCITQRKCKVTATALKTARETDEDEDDVDSVEEMEVTATNDGAATDGVCPQPEPSDPDAQTIKEEDIVEDGWTIVRRKK

SEQ ID NO: 857880 - protein, 108 aa, Homo sapiens
VHIRTLLEQQIGPKAISNHPHSFSSPALQIAVENGFGGVTATALKTARETDEDEDDVDSVEEMEVTATNDGAATDGVCPQPEPSDPDAQTIKEEDIVEDGWTIVRRKK

SEQ ID NO: 857881 - protein, 201 aa, Homo sapiens
PGRHVDWGRIMAGAAEDARALFRAGVCAALEAWPALQIAVENGFGGVHSQEKAKWLGGAVEDYFMRNADLELDEVEDFLGELLTNEFDTVVEDGSLPQVSQQLQTMFHHFQRGDGAALREMASCITQRKCKVTATALKTARETDEDEDDVDSVEEMEVTATNDGAATDGVCPQPEPSDPDAQTIKEEDIVEDGWTIVRRKK

SEQ ID NO: 857882 - protein, 191 aa, Homo sapiens; identical to SEQ ID NO: 857873

SEQ ID NO: 857883 - protein, 191 aa, Homo sapiens; identical to SEQ ID NO: 857873

SEQ ID NO: 857884 - protein, 208 aa, Homo sapiens
MLHKVELLFSISVTGRVCRVLHRDARALFRAGVCAALEAWPALQIAVENGFGGVHSQEKAKWLGGAVEDYFMRNADLELDEVEDFLGELLTNEFDTVVEDGSLPQVSQQLQTMFHHFQRGDGAALREMASCITQRKCKVTATALKTARETDEDEDDVDSVEEMEVTATNDGAATDGVCPQPEPSDPDAQTIKEEDIVEDGWTIVRRKK

SEQ ID NO: 857885 - protein, 201 aa, Homo sapiens; identical to SEQ ID NO: 857881

SEQ ID NO: 857886 - protein, 644 aa, Homo sapiens
MAKPSHSSYVLQQLNNQREWGFLCDCCIAIDDIYFQAHKAVLAACSSYFRMFFMNHQHSTAQLNLSNMKISAECFDLILQFMYLGKIMTAPSSFEQFKVAMNYLQLYNVPDCLEDIQDADCSSSKCSSSASSKQNSKMIFGVRMYEDTVARNGNEANRWCAEPSSTVNTPHNREADEESLQLGNFPEPLFDVCKKSSVSKLSTPKERVSRRFGRSFTCDSCGFGFSCEKLLDEHVLTCTNRHLYQNTRSYHRIVDIRDGKDSNIKAEFGEKDSSKTFSAQTDKYRGDTSQAADDSASTTGSRKSSTVESEIASEEKSRAAERKRIIIKMEPEDIPTDELKDFNIIKVTDKDCNESTDNDELEDEPEEPFYRYYVEEDVSIKKSGRKTLKPRMSVSADERGGLENMRPPNNSSPVQEDAENASCELCGLTITEEDLSSHYLAKHIENICACGKCGQILVKGRQLQEHAQRCGEPQDLTMNGLGNTEEKMDLEENPDEQSEIRDMFVEMLDDFRDNHYQINSIQKKQLFKHSACPFRCPNCGQRFETENLVVEHMSSCLDQDMFKSAIMEENERDHRRKHFCNLCGKGFYQRCHLREHYTVHTKEKQFVCQTCGKQFLRERQLRLHNDMHKGMASGEIGPSKPVEK

SEQ ID NO: 857887 - protein, 619 aa, Homo sapiens
MAKPSHSSYVLQQLNNQREWGFLCDCCIAIDDIYFQAHKAVLAACSSYFRMFFMNHQHSTAQLNLSNMKISAECFDLILQFMYLGKIMTAPSSFEQFKVAMNYLQLYNVPDCLEDIQDADCSSSKCSSSASSKQNSKMIFGVRMYEDTVARNGNEANRWCAEPSSTVNTPHNREADEESLQFISAQTDKYRGDTSQAADDSASTTGSRKSSTVESEIASEEKSRAAERKRIIIKMEPEDIPTDELKDFNIIKVTDKDCNESTDNDELEDEPEEPFYRYYVEEDVSIKKSGRKTLKPRMSVSADERGGLENMRPPNNSSPVQEDAENASCELCGLTITEEDLSSHYLAKHIENICACGKCGQILVKGRQLQEHAQRCGEPQDLTMNGLGNTEEKMDLEENPDEQSEIRDMFVEMLDDFRDNHYQINSIQKKQLFKHSACPFRCPNCGQRFETENLVVEHMSSCLDQDMFKSAIMEENERDHRRKHFCNLCGKGFYQRCHLREHYTVHTKEKQFVCQTCGKQFLRERQLRLHNDMHKGMARYVCSICDQGNFRKHDHVRHMISHLSAGETICQVCFQIFPNNEQLEQHMDVHLYTCGICGAKFNLRKDMRSHYNAKHLKRT

SEQ ID NO: 857888 - protein, 713 aa, Homo sapiens
MAKPSHSSYVLQQLNNQREWGFLCDCCIAIDDIYFQAHKAVLAACSSYFRMFFMNHQHSTAQLNLSNMKISAECFDLILQFMYLGKIMTAPSSFEQFKVAMNYLQLYNVPDCLEDIQDADCSSSKCSSSASSKQNSKMIFGVRMYEDTVARNGNEANRWCAEPSSTVNTPHNREADEESLQLGNFPEPLFDVCKKSSVSKLSTPKERVSRRFGRSFTCDSCGFGFSCEKLLDEHVLTCTNRHLYQNTRSYHRIVDIRDGKDSNIKAEFGEKDSSKTFSAQTDKYRGDTSQAADDSASTTGSRKSSTVESEIASEEKSRAAERKRIIIKMEPEDIPTDELKDFNIIKVTDKDCNESTDNDELEDEPEEPFYRYYVEEDVSIKKSGRKTLKPRMSVSADERGGLENMRPPNNSSPVQEDAENASCELCGLTITEEDLSSHYLAKHIENICACGKCGQILVKGRQLQEHAQRCGEPQDLTMNGLGNTEEKMDLEENPDEQSEIRDMFVEMLDDFRDNHYQINSIQKKQLFKHSACPFRCPNCGQRFETENLVVEHMSSCLDQDMFKSAIMEENERDHRRKHFCNLCGKGFYQRCHLREHYTVHTKEKQFVCQTCGKQFLRERQLRLHNDMHKGMARYVCSICDQGNFRKHDHVRHMISHLSAGETICQVCFQIFPNNEQLEQHMDVHLYTCGICGAKFNLRKDMRSHYNAKHLKRT

SEQ ID NO: 857889 - protein, 695 aa, Homo sapiens
MAKPSHSSYVLQQLNNQREWGFLCDCCIAIDDIYFQAHKAVLAACSSYFRMFFMNHQHSTAQLNLSNMKISAECFDLILQFMYLGKIMTAPSSFEQFKVAMNYLQLYNVPDCLEDIQDADCSSSKCSSSASSKQNSKMIFGVRMYEDTVARNGNEANRWCAEPSSTVNTPHNREADEESLQLGNFPEPLFDVCKKSSVSKLSTPKERVSRRFGRSFTCDSCGFGFSCEKLLDEHVLTCTNRHLYQNTRSYHRIVDIRDGKDSNIKAEFGEKDSSKTFSAQTDKYRGDTSQAADDSASTTGSRKSSTVESEIASEEKSRAAERKRIIIKMEPEDIPTDELKDFNIIKVTDKDCNESTDNDELEDEPEEPFYRYYVEEDVSIKKSGRKTLKPRMSVSADERGGLENMRPPNNSSPVQEDAENASCELCGLTITEEDLSSHYLAKHIVQEHAQRCGEPQDLTMNGLGNTEEKMDLEENPDEQSEIRDMFVEMLDDFRDNHYQINSIQKKQLFKHSACPFRCPNCGQRFETENLVVEHMSSCLDQDMFKSAIMEENERDHRRKHFCNLCGKGFYQRCHLREHYTVHTKEKQFVCQTCGKQFLRERQLRLHNDMHKGMARYVCSICDQGNFRKHDHVRHMISHLSAGETICQVCFQIFPNNEQLEQHMDVHLYTCGICGAKFNLRKDMRSHYNAKHLKRT

SEQ ID NO: 857890 - protein, 324 aa, Homo sapiens
  misc_feature (1)..(1): Xaa can be any naturally occurring amino acid
  misc_feature (3)..(3): Xaa can be any naturally occurring amino acid
XVXSYNDLIIFPDDCEFKRVPQCPSGRVYVLKFKAGSKRLFFWMQEPKTDQDEEHCRKVNEYLNNPPMPGALGASGSSGHELSALGGEGGLQSLLGNMSHSQLMQLIGPAGLGGLGGLGALTGPGLASLLGSSGPPGSSSSSSSRSQSAAVTPSSTTSSTRATPAPSAPAAASATSPSPAPSSGNGASTAASPTQPIQLSDLQSILATMNVPAGPAGGQQVDLASVLTPEIMAPILANADVQERLLPYLPSGESLPQTADEIQNTLTSPQFQQALGMFSAALASGQLGPLMCQFGLPAEAVEAANKGDVEAFANSHAVNTARGE

SEQ ID NO: 857891 - protein, 69 aa, Homo sapiens
SDAAVFYEDPGTIVRSFPELGAGLGLVAEAAAEGDVEAFAKAMQNNAKPEQKEGDTKDKKDEEEDMSLD

SEQ ID NO: 857892 - protein, 389 aa, Homo sapiens
MTTSGALFPSLVPGSRGASNKYLVEFRAGKMSLKGTTVTPDKRKGLVYIQQTDDSLIHFCWKDRTSGNVEDDLIIFPDDCEFKRVPQCPSGRVYVLKFKAGSKRLFFWMQEPKTDQDEEHCRKVNEYLNNPPMPGALGASGSSGHELSALGGEGGLQSLLGNMSHSQLMQLIGPAGLGGLGGLGALTGPGLASLLGSSGPPGSSSSSSSRSQSAAVTPSSTTSSTRATPAPSAPAAASATSPSPAPSSGNGASTAASPTQPIQLSDLQSILATMNVPAGPAGGQQVDLASVLTPEIMAPILANADVQERLLPYLPSGESLPQTADEIQNTLTSPQFQQALGMFSAALASGQLGPLMCQFGLPAEAVEAANKGDVEAFANSHAVNTARGE

SEQ ID NO: 857893 - protein, 436 aa, Homo sapiens
MTTSGALFPSLVPGSRGASNKYLVEFRAGKMSLKGTTVTPDKRKGLVYIQQTDDSLIHFCWKDRTSGNVEDDLIIFPDDCEFKRVPQCPSGRVYVLKFKAGSKRLFFWMQEPKTDQDEEHCRKVNEYLNNPPMPGALGASGSSGHELSALGGEGGLQSLLGNMSHSQLMQLIGPAGLGGLGGLGALTGPGLASLLGSSGPPGSSSSSSSRSQSAAVTPSSTTSSTRATPAPSAPAAASATSPSPAPSSGNGASTAASPTQPIQLSDLQSILATMNVPAGPAGGQQVDLASVLTPEIMAPILANADVQERLLPYLPSGESLPQTADEIQNTLTSPQFQQVEAGPRVSSTVCSGSGQGGGGGPAPPSPWPVLHVPDPQSWQLSSVALGCSPGWSSALAWLFLQALGMFSAALASGQLGPLMCQFGLPAEAVEAANKGG

SEQ ID NO: 857894 - protein, 379 aa, Homo sapiens
ISREEEHRESRSSVTVMLSVQPERLLDYSTFCCLDRKYAFVEDDLIIFPDDCEFKRVPQCPSGRVYVLKFKAGSKRLFFWMQEPKTDQDEEHCRKVNEYLNNPPMPGALGASGSSGHELSALGGEGGLQSLLGNMSHSQLMQLIGPAGLGGLGGLGALTGPGLASLLGSSGPPGSSSSSSSRSQSAAVTPSSTTSSTRATPAPSAPAAASATSPSPAPSSGNGASTAASPTQPIQLSDLQSILATMNVPAGPAGGQQVDLASVLTPEIMAPILANADVQERLLPYLPSGESLPQTADEIQNTLTSPQFQQALGMFSAALASGQLGPLMCQFGLPAEAVEAANKGDVEAFAKAMQNNAKPEQKEGDTKDKKDEEEDMSLD

SEQ ID NO: 857895 - protein, 337 aa, Homo sapiens
  misc_feature (6)..(6): Xaa can be any naturally occurring amino acid
FSKIYXSFKKSRLYRPEFPDAEVYVLKFKAGSKRLFFWMQEPKTDQDEEHCRKVNEYLNNPPMPGALGASGSSGHELSALGGEGGLQSLLGNMSHSQLMQLIGPAGLGGLGGLGALTGPGLASLLGSSGPPGSSSSSSSRSQSAAVTPSSTTSSTRATPAPSAPAAASATSPSPAPSSGNGASTAASPTQPIQLSDLQSILATMNVPAGPAGGQQVDLASVLTPEIMAPILANADVQERLLPYLPSGESLPQTADEIQNTLTSPQFQQALGMFSAALASGQLGPLMCQFGLPAEAVEAANKGDVEAFAKAMQNNAKPEQKEGDTKDKKDEEEDMSLD

SEQ ID NO: 857896 - protein, 368 aa, Homo sapiens
MTTSGALFPSLVPGSRGASNKYLVEFRAGKMSLKGTTVTPDKRKGLVYIQQTDDSLIHFCWKDRTSGNVEDEPKTDQDEEHCRKVNEYLNNPPMPGALGASGSSGHELSALGGEGGLQSLLGNMSHSQLMQLIGPAGLGGLGGLGALTGPGLASLLGSSGPPGSSSSSSSRSQSAAVTPSSTTSSTRATPAPSAPAAASATSPSPAPSSGNGASTAASPTQPIQLSDLQSILATMNVPAGPAGGQQVDLASVLTPEIMAPILANADVQERLLPYLPSGESLPQTADEIQNTLTSPQFQQALGMFSAALASGQLGPLMCQFGLPAEAVEAANKGDVEAFAKAMQNNAKPEQKEGDTKDKKDEEEDMSLD

SEQ ID NO: 857897 - protein, 294 aa, Homo sapiens
MTTSGALFPSLVPGSRGASNKYLVEFRAGKMSLKGTTVTPDKRKGLVYIQQTDDSLIHFCWKDRTSGNVEDDLIIFPDDCEFKRVPQCPSGRVYVLKFKAGSKRLFFWMQEPKTDQDEEHCRKVNEYLNNPPMPGALGASGSSGHELSALGGEGGLQSLLGNMSHSQLMQLIGPAGLGGLGGLGALTGPGLASLLGSSGPPGSSSSSSSRSQSAAVTPSSTTSSTRATPAPSAPAAASATSPSPAPSSGNGASTAASPTQPIQMWKRLPKPCRTTPSPSRKRATRRTRRTKRRT

SEQ ID NO: 857898 - protein, 414 aa, Homo sapiens
MTTSGALFPSLVPGSRGASNKYLVEFRAGKMSLKGTTVTPDKRKGLVYIQQTDDSLIHFCWKDRTSGNVEDDLIIFPDDCEFKRVPQCPSGRVYVLKFKAGSKRLFFWMQEPKTDQDEEHCRKVNEYLNNPPMPGALGASGSSGHELSALGGEGGLQSLLGNMSHSQLMQLIGPAGLGGLGGLGALTGPGLASLLGSSGPPGSSSSSSGALSLRSSRSQSAAVTPSSTTSSTRATPAPSAPAAASATSPSPAPSSGNGASTAASPTQPIQLSDLQSILATMNVPAGPAGGQQVDLASVLTPEIMAPILANADVQERLLPYLPSGESLPQTADEIQNTLTSPQFQQALGMFSAALASGQLGPLMCQFGLPAEAVEAANKGDVEAFAKAMQNNAKPEQKEGDTKDKKDEEEDMSLD

SEQ ID NO: 857899 - protein, 134 aa, Homo sapiens [sequence omitted]

SEQ ID NO: 857900 - protein, 455 aa, Homo sapiens
MTTSGALFPSLVPGSRGASNKYLVEFRAGKMSLKGTTVTPDKRKGLVYIQQTDDSLIHFCWKDRTSGNVEDDLIIFPDDCEFKRVPQCPSGRVYVLKFKAGSKRLFFWMQEPKTDQDEEHCRKVNEYLNNPPMPGALGASGSSGHELSALGGEGGLQSLLGNMSHSQLMQLIGPAGLGGLEMLVPLGGIWTESSESKHMNCVMGWNRNDLASRTQPQVSTRPMPLLQACGLGALTGPGLASLLGSSGPPGSSSSSSSRSQSAAVTPSSTTSSTRATPAPSAPAAASATSPSPAPSSGNGASTAASPTQPIQLSDLQSILATMNVPAGPAGGQQVDLASVLTPEIMAPILANADVQERLLPYLPSGESLPQTADEIQNTLTSPQFQQALGMFSAALASGQLGPLMCQFGLPAEAVEAANKGDVEAFAKAMQNNAKPEQKEGDTKDKKDEEEDMSLD

SEQ ID NO: 857901 - protein, 134 aa, Homo sapiens [sequence omitted]

SEQ ID NO: 857902 - protein, 134 aa, Homo sapiens [sequence omitted]

SEQ ID NO: 857903 - protein, 254 aa, Homo sapiens
MTTSGALFPSLVPGSRGASNKYLVEFRAGKMSLKGTTVTPDKRKGLVYIQQTDDSLIHFCWKDRTSGNVEDEPKTDQDEEHCRKVNEYLNNPPMPGALGASGSSGHELSALGGEGGLQSLLGNMSHSQLMQLIGPAGLGGLGGLGALTGPGLASLLGSSGPPGSSSSSSSRSQSAAVTPSSTTSSTRATPAPSAPAAASATSPSPAPSSGNGASTAASPTQPIQLSDLQSILATMNVPAGPAGGQQGNVCCRLE

SEQ ID NO: 857904 - protein, 84 aa, Homo sapiens
TAAFLPCGLSHPGVQRVRAGCAAYGAQSAARAAGGAGRTRVSGGARQAPRRKSEPGRRLSNECGREAARNWALAVRCTPSPPTH

SEQ ID NO: 857905 - protein, 69 aa, Homo sapiens; identical to SEQ ID NO: 857891

SEQ ID NO: 857906 - protein, 407 aa, Homo sapiens
MTTSGALFPSLVPGSRGASNKYLVEFRAGKMSLKGTTVTPDKRKGLVYIQQTDDSLIHFCWKDRTSGNVEDDLIIFPDDCEFKRVPQCPSGRVYVLKFKAGSKRLFFWMQEPKTDQDEEHCRKVNEYLNNPPMPGALGASGSSGHELSALGGEGGLQSLLGNMSHSQLMQLIGPAGLGGLGGLGALTGPGLASLLGSSGPPGSSSSSSSRSQSAAVTPSSTTSSTRATPAPSAPAAASATSPSPAPSSGNGASTAASPTQPIQLSDLQSILATMNVPAGPAGGQQVDLASVLTPEIMAPILANADVQERLLPYLPSGESLPQTADEIQNTLTSPQFQQALGMFSAALASGQLGPLMCQFGLPAEAVEAANKGDVEAFAKAMQNNAKPEQKEGDTKDKKDEEEDMSLD

SEQ ID NO: 857907 - protein, 407 aa, Homo sapiens; identical to SEQ ID NO: 857906

SEQ ID NO: 857908 - protein, 369 aa, Homo sapiens
MTTSGALFPSLVPGSRGASNKYLVEFRAGKMSLKGTTVTPDKRKGLVYIQQTDDSLIHFCWKDRTSGNVEDDLIIFPDDCEFKRVPQCPSGRVYVLKFKAGSKRLFFWMQEPKTDQDEEHCRKVNEYLNNPPMPGALGASGSSGHELSALGGEGGLQSLLGNMSHSQLMQLIGPAGLGGLGGLGALTGPGLASLLGSSGPPGSSSSSSSRSQSAAVTPSSTTSSTRATPAPSAPAAASATSPSPAPSSGNGASTAASPTQPIQLSDLQSILATMNVPAGPAGGQQVDLASVLTPEIMAPILANADVQERLLPYLPSGESLPQTADEIQNTLTSPQFQQMWKRLPKPCRTTPSPSRKRATRRTRRTKRRT

SEQ ID NO: 857909 - protein, 363 aa, Homo sapiens
GRVGRRTRGSGRVGRPTRARTSGNVEDDLIIFPDDCEFKRVPQCPSGRVYVLKFKAGSKRLFFWMQEPKTDQDEEHCRKVNEYLNNPPMPGALGASGSSGHELSALGGEGGLQSLLGNMSHSQLMQLIGPAGLGGLGGLGALTGPGLASLLGSSGPPGSSSSSSSRSQSAAVTPSSTTSSTRATPAPSAPAAASATSPSPAPSSGNGASTAASPTQPIQLSDLQSILATMNVPAGPAGGQQVDLASVLTPEIMAPILANADVQERLLPYLPSGESLPQTADEIQNTLTSPQFQQALGMFSAALASGQLGPLMCQFGLPAEAVEAANKGDVEAFAKAMQNNAKPEQKEGDTKDKKDEEEDMSLD

SEQ ID NO: 857910 - protein, 275 aa, Homo sapiens [sequence omitted]

SEQ ID NO: 857911 - protein, 368 aa, Homo sapiens; identical to SEQ ID NO: 857896

SEQ ID NO: 857912 - protein, 442 aa, Homo sapiens
MTTSGALFPSLVPGSRGASNKYLVEFRAGKMSLKGTTVTPDKRKGLVYIQQTDDSLIHFCWKDRTSGNVEDDLIIFPDDCEFKRVPQCPSGRVYVLKFKAGSKRLFFWMQEPKTDQDEEHCRKVNEYLNNPPMPGALGASGSSGHELSALGGFRGSRVRCSAEAQAAGGARVDLAGAGPPELQCFPGEGGLQSLLGNMSHSQLMQLIGPAGLGGLGGLGALTGPGLASLLGSSGPPGSSSSSSSRSQSAAVTPSSTTSSTRATPAPSAPAAASATSPSPAPSSGNGASTAASPTQPIQLSDLQSILATMNVPAGPAGGQQVDLASVLTPEIMAPILANADVQERLLPYLPSGESLPQTADEIQNTLTSPQFQQALGMFSAALASGQLGPLMCQFGLPAEAVEAANKGDVEAFAKAMQNNAKPEQKEGDTKDKKDEEEDMSLD

SEQ ID NO: 857913 - protein, 465 aa, Homo sapiens
MTTSGALFPSLVPGSRGASNKYLVEFRAGKMSLKGTTVTPDKRKGLVYIQQTDDSLIHFCWKDRTSGNVEDDLIIFPDDCEFKRVPQCPSGRVYVLKFKAGSKRLFFWMQEPKTDQDEEHCRKVNEYLNNPPMPGALGASGSSGHELSALGGEGGLQSLLGNMSHSQLMQLIGPAGLGGLGNVLPPGLSGSFCWECFEARSLFPLNFCWLCLRSVGEPVLSASWFPFGNALVCLWLELGGLGALTGPGLASLLGSSGPPGSSSSSSSRSQSAAVTPSSTTSSTRATPAPSAPAAASATSPSPAPSSGNGASTAASPTQPIQLSDLQSILATMNVPAGPAGGQQVDLASVLTPEIMAPILANADVQERLLPYLPSGESLPQTADEIQNTLTSPQFQQALGMFSAALASGQLGPLMCQFGLPAEAVEAANKGDVEAFAKAMQNNAKPEQKEGDTKDKKDEEEDMSLD

SEQ ID NO: 857914 - protein, 245 aa, Homo sapiens
MSHSQLMQLIGPAGLGGLGGLGALTGPGLASLLGSSGPPGSSSSSSSRSQSAAVTPSSTTSSTRATPAPSAPAAASATSPSPAPSSGNGASTAASPTQPIQLSDLQSILATMNVPAGPAGGQQVDLASVLTPEIMAPILANADVQERLLPYLPSGESLPQTADEIQNTLTSPQFQQALGMFSAALASGQLGPLMCQFGLPAEAVEAANKGDVEAFAKAMQNNAKPEQKEGDTKDKKDEEEDMSLD

SEQ ID NO: 857915 - protein, 109 aa, Homo sapiens
RLPPFYPVAFPIQASRGLEPAARLTGLNRRRERQAGRAERGFPAGPGRRRGGRASPDGASRTSVGARQDDDLRRALSKPGARLSGRLQQVLGGVSGGKDVPEGDHRDSG

SEQ ID NO: 857916 - protein, 166 aa, Homo sapiens
MTTSGALFPSLVPGSRGASNKYLVEFRAGKMSLKGTTVTPDKRKGLVYIQQTDDSLIHFCWKDRTSGNVEDDLIIFPDDCEFKRVPQCPSGRVYVLKFKAGSKRLFFWMQEPKTDQDEEHCRKVNEYLNNPPMPGALGASGSSAKPEQKEGDTKDKKDEEEDMSLD

SEQ ID NO: 857917 - protein, 98 aa, Homo sapiens
MTTSGALFPSLVPGSRGASNKYLVEFRAGKMSLKGTTVTPDKRKGLVYIQQTDDSLIHFCWKDRTSGNVEDVSVPEPQQQDRRLLGPSESSLWSSRWG

SEQ ID NO: 857918 - protein, 110 aa, Homo sapiens
WAGRGTLLPLALPERSWLMELLSWEWREPEQEEGTALCRSHAHCSPPASGPQSGLWKLNCFCCWKTYVIIYPGWTRVVQKVSVCLQGLFPGRDVRLCASRWGVDVDGFCM

SEQ ID NO: 857919 - protein, 344 aa, Homo sapiens
MHRTTRIKITELNPHLMCALCGGYFIDATTIVECLHSFCKTCIVRYLETNKYCPMCDVQVHKTRPLLSIRSDKTLQDIVYKLVPGLFKDEMKRRRDFYAAYPLTEVPNGSNEDRGEVLEQEKGALSDDEIVSLSIEFYEGARDRDEKKGPLENGDGDKEKTGVRFLRCPAAMTVMHLAKFLRNKMDVPSKYKVEVLYEDEPLKEYYTLMDIAYIYPWRRNGPLPLKYRVQPACKRLTLATVPTPSEGTNTSGASECESVSDKAPSPATLPATSSSLPSPATPSHGSPSSHGPPATHPTSPTPPSTASGATTAANGGSLNCLQTPSSTSRGRKMTVNGAPVPPLT

SEQ ID NO: 857920 - protein, 344 aa, Homo sapiens; identical to SEQ ID NO: 857919

SEQ ID NO: 857921 - protein, 409 aa, Homo sapiens
PPLPSLPPSHPPLPETHRTPNPAKRAPRLNDLASPSTTTSLCSSPRADPVPRATLPSPPTPDPGIMHRTTRIKITELNPHLMCALCGGYFIDATTIVECLHSFCKTCIVRYLETNKYCPMCDVQVHKTRPLLSIRSDKTLQDIVYKLVPGLFKDEMKRRRDFYAAYPLTEVPNGSNEDRGEVLEQEKGALSDDEIVSLSIEFYEGARDRDEKKGPLENGDGDKEKTGVRFLRCPAAMTVMHLAKFLRNKMDVPSKYKVEVLYEDEPLKEYYTLMDIAYIYPWRRNGPLPLKYRVQPACKRLTLATVPTPSEGTNTSGASECESVSDKAPSPATLPATSSSLPSPATPSHGSPSSHGPPATHPTSPTPPSTASGATTAANGGSLNCLQTPSSTSRGRKMTVNGAPVPPLT

SEQ ID NO: 857922 - protein, 368 aa, Homo sapiens
SGFLIPLPFPRATLPSPPTPDPGIMHRTTRIKITELNPHLMCALCGGYFIDATTIVECLHSFCKTCIVRYLETNKYCPMCDVQVHKTRPLLSIRSDKTLQDIVYKLVPGLFKDEMKRRRDFYAAYPLTEVPNGSNEDRGEVLEQEKGALSDDEIVSLSIEFYEGARDRDEKKGPLENGDGDKEKTGVRFLRCPAAMTVMHLAKFLRNKMDVPSKYKVEVLYEDEPLKEYYTLMDIAYIYPWRRNGPLPLKYRVQPACKRLTLATVPTPSEGTNTSGASECESVSDKAPSPATLPATSSSLPSPATPSHGSPSSHGPPATHPTSPTPPSTASGATTAANGGSLNCLQTPSSTSRGRKMTVNGAPVPPLT

SEQ ID NO: 857923 - protein, 266 aa, Homo sapiens
MHRTTRIKITELNPHLMCALCGGYFIDATTIVECLHSFCKTCIVRYLETNKYCPMCDVQVHKTRPLLSIRSDKTLQDIVYKLVPGLFKDEMKRRRDFYAAYPLTEVPNGSNEDRGEVLEQEKGALSDDEIVSLSIEFYEGARDRDEKKGPLENGDGDKEKTGVRFLRCPAAMTVMHLAKFLRNKMDVPSKYKVEVLYEDEPLKEYYTLMDIAYIYPWRRNGPLPLKYRVQPACKRLTLATVPTPSEGTNTSGASELGPPQLPTGVA

SEQ ID NO: 857924 - protein, 266 aa, Homo sapiens
MHRTTRIKITELNPHLMCALCGGYFIDATTIVECLHSFCKTCIVRYLETNKYCPMCDVQVHKTRPLLSIRSDKTLQDIVYKLVPGLFKDEMKRRRDFYAAYPLTEVPNGSNEDRGEVLEQEKGALSDDEIVSLSIEFYEGARDRDEKKGPLENGDGDKEKTGVRFLRCPAAMTVMHLAKFLRNKMDVPSKYKVEVLYEDEPLKEYYTLMDIAYIYPWRRNGPLPLKYRVQPACNLSTPSTFSGPFFPPLLLSPALPTLGVGGGFYK

SEQ ID NO: 857925 - protein, 344 aa, Homo sapiens; identical to SEQ ID NO: 857919

SEQ ID NO: 857926 - protein, 203 aa, Homo sapiens
MHRTTRIKITELNPHLMCALCGGYFIDATTIVECLHSFCKTCIVRYLETNKYCPMCDVQVHKTRPLLSIRSDKTLQDIVYKLVPGLFKDEMKRRRDFYAAYPLTEVPNGSNEDRGEVLEQEKGALSDDEIVSLSIEFYEGARDRDEKKGPLENGDGDKEKTGVRFLRCPAAMTVMHLAKFLRNKMDVPSKYKAVGFLPEASWR

SEQ ID NO: 857927 - protein, 344 aa, Homo sapiens; identical to SEQ ID NO: 857919

SEQ ID NO: 857928 - protein, 456 aa, Homo sapiens
CLSLSWPVTLWGLGWGPAVLRKPRWEGEALSRSCLRTPRAPSVPSPACPVRLSFSLFSVPFSLSSLPRWPKRAPRLNDLASPSTTTSLCSSPRADPVPRATLPSPPTPDPGIMHRTTRIKITELNPHLMCALCGGYFIDATTIVECLHSFCKTCIVRYLETNKYCPMCDVQVHKTRPLLSIRSDKTLQDIVYKLVPGLFKDEMKRRRDFYAAYPLTEVPNGSNEDRGEVLEQEKGALSDDEIVSLSIEFYEGARDRDEKKGPLENGDGDKEKTGVRFLRCPAAMTVMHLAKFLRNKMDVPSKYKVEVLYEDEPLKEYYTLMDIAYIYPWRRNGPLPLKYRVQPACKRLTLATVPTPSEGTNTSGASECESVSDKAPSPATLPATSSSLPSPATPSHGSPSSHGPPATHPTSPTPPSTASGATTAANGGSLNCLQTPSSTSRGRKMTVNGAPVPPLT

SEQ ID NO: 857929 - protein, 344 aa, Homo sapiens; identical to SEQ ID NO: 857919

SEQ ID NO: 857930 - protein, 344 aa, Homo sapiens; identical to SEQ ID NO: 857919

SEQ ID NO: 857931 - protein, 344 aa, Homo sapiens; identical to SEQ ID NO: 857919

SEQ ID NO: 857932 - protein, 286 aa, Homo sapiens
MHRTTRIKITELNPHLMCALCGGYFIDATTIVECLHSFCKTCIVRYLETNKYCPMCDVQVHKTRPLLSIRSDKTLQDIVYKLVPGLFKDEMKRRRDFYAAYPLTEVPNGSNEDRGEVLEQEKGALSDDEIVSLSIEFYEGARDRDEKKGPLENGDGDKEKTGVRFLRCPAAMTVMHLAKFLRNKMDVPSKYKVEVLYEDEPLKEYYTLMDIAYIYPWRRNGPLPLKYRVQPACKRLTLATVPTPSEGTNTSGASESEARSPGQDRATASKSTRRQKPVSSDPTPTP

SEQ ID NO: 857933 - protein, 144 aa, Homo sapiens
FAIFSLFVLDFPHLCGFISLWSLMLVTFRWGFCVDVLFVDVDTTPFCLLVFLLTVRPLCCRSAGVCWSSTPDPVCLGITSRGCRTAKIAAFSFLWEASSQRGTCQMPAGALVYEVKSNHGVKRRQAEMMQAAPMLEICSLKFSQ

SEQ ID NO: 857934 - protein, 933 aa, Homo sapiens
MEKECMNGCVQRTKAAVEFPQKTSALAVCFCFLHHGFRTTPIPASPLIPRSSRPLHRPLPGIPIGCVLLRLSIRCTSSVHGCPLALCNTCLHLTAYAPVSRTPPRWPSHWLPAPSGPAPAGPAAGAVGAAAAADMARTAPVEPPLRHSAPPSPAAGEPRTSVEAAVAPRRVLFADEALGLPLAQLRRYRPWGGPGAGKMAAAAGQDGGGGGGADEDDDGEDGDEGEEEEEACPEPSPLCPVPAGGGFYLVPTFSLPPAPGRLERLGRVMVELEALLPPPGAVPGGAGVWVPGGRPPVLRGLVRVLNRSFEKAVHVRASHDGWASFCDHPARYVPRSPPWAGAGGTGAGDPILDPGLGLGPGQASASSPDDGGRTDRFAFQLPFAEGAGDGARLDFVVRYETPEGTFWANNHGRNYTVLLRIAPAPTPTDAEGLPQQQQLPQLEPQPECQGPVEAEARQLKSCMKPVRRRPAEEELKTKNMDDNTFAMAEHPDVQESVGPLVAPTPLRPWPQMTLQVSDVPMTGNPAEEGDVPRSSPPVAFTEVLQAPAIRIPPSSPLCGLGGSPRDQASGPDASEGATGPFLEPSQQQAEATWGVSSENGGGLEAVSGSEELLGEDTIDQELEQLYLSHLSRLRAAVAAGGAGGGGEGSTDGGMSPSHPLGILTDRDLILKWPGPERALNSALAEEITLHYARLGRGVELIKDTEDPDDEGEGEEGLSVTPSSPEGDSPKESPPEILSGARSVVATMGDVWLPWAEGSGCDGPVVLGTEGQFIGDPEKGMGKDTSSLHMNRVIAGVTESLGEAGTEAQIEVTSEWAGSLDPISGKEPASPVLLQGQNPTLLSPLGAEVCLSSVARPHVSSQDEKDAGPSLEPPKKSPTLAVPAECVCALPPQLRGPLTQTLGVLAGLVVVPVALNSGVSLLVLALCLSLAWFS

SEQ ID NO: 857935 - protein, 567 aa, Homo sapiens
MEKECMNGCVQRTKAAVEFPQKTSALAVCFCFLHHGFRTTPIPASPLIPRSSRPLHRPLPGIPIGCVLLRLSIRCTSSVHGCPLALCNTCLHLTAYAPVSRTPPRWPSHWLPAPSGPAPAGPAAGAVGAAAAADMARTAPVEPPLRHSAPPSPAAGEPRTSVEAAVAPRRVLFADEALGLPLAQLRRYRPWGGPGAGKMAAAAGQDGGGGGGADEDDDGEDGDEGEEEEEACPEPSPLCPVPAGGGFYLVPTFSLPPAPGRLERLGRVMVELEALLPPPGAVPGGAGVWVPGGRPPVLRGLVRVLNRSFEKAVHVRASHDGWASFCDHPARYVPRSPPWAGAGGTGAGDPILDPGLGLGPGQASASSPDDGGRTDRFAFQLPFAEGAGDGARLDFVVRYETPEGTFWANNHGRNYTVLLRIAPAPTPTDAEGLPQQQQLPQLEPQPECQGPVEAEARQLKSCMKPVRRRPAEEELKTKNMDDNTFAMAEHPDVQESVGPLVAPTPLRPWPQMTLQVCWSLLEFHSRPCLPGYHQQRLQNSKDCCLFLPLGSFVPEGHLPDASRSSCI

SEQ ID NO: 857936 - protein, 545 aa, Homo sapiens
MEKECMNGCVQRTKAAVEFPQKTSALAVCFCFLHHGFRTTPIPASPLIPRSSRPLHRPLPGIPIGCVLLRLSIRCTSSVHGCPLALCNTCLHLTAYAPVSRTPPRWPSHWLPAPSGPAPAGPAAGAVGAAAAADMARTAPVEPPLRHSAPPSPAAGEPRTSVEAAVAPRRVLFADEALGLPLAQLRRYRPWGGPGAGKMAAAAGQDGGGGGGADEDDDGEDGDEGEEEEEACPEPSPLCPVPAGGGFYLVPTFSLPPAPGRLERLGRVMVELEALLPPPGAVPGGAGVWVPGGRPPVLRGLVRVLNRSFEKAVHVRASHDGWASFCDHPARYVPRSPPWAGAGGTGAGDPILDPGLGLGPGQASASSPDDGGRTDRFAFQLPFAEGAGDGARLDFVVRYETPEGTFWANNHGRNYTVLLRIAPAPTPTDAEGLPQQQQLPQLEPQPECQGPVEAEARQLKSCMKPVRRRPAEEELKTKNMDDNTFAMAEHPDVQESVGPLVAPTPLRPWPQMTLQVKSNHGVKRRQAEMMQAAPMLEICSLKFSQ

SEQ ID NO: 857937 - protein, 535 aa, Homo sapiens
MEKECMNGCVQRTKAAVEFPQKTSALAVCFCFLHHGFRTTPIPASPLIPRSSRPLHRPLPGIPIGCVLLRLSIRCTSSVHGCPLALCNTCLHLTAYAPVSRTPPRWPSHWLPAPSGPAPAGPAAGAVGAAAAADMARTAPVEPPLRHSAPPSPAAGEPRTSVEAAVAPRRVLFADEALGLPLAQLRRYRPWGGPGAGKMAAAAGQDGGGGGGADEDDDGEDGDEGEEEEEACPEPSPLCPVPAGGGFYLVPTFSLPPAPGRLERLGRVMVELEALLPPPGAVPGGAGVWVPGGRPPVLRGLVRVLNRSFEKAVHVRASHDGWASFCDHPARYVPRSPPWAGAGGTGAGDPILDPGLGLGPGQASASSPDDGGRTDRFAFQLPFAEGAGDGARLDFVVRYETPEGTFWANNHGRNYTVLLRIAPAPTPTDAEGLPQQQQLPQLEPQPECQGPVEAEARQLKSCMKPVRRRPAEEELKTKNMDDNTFAMAEHPDVQESVGPLVAPTPLRPWPQMTLQVSDVPMTGNPAEEGEKQSRS

SEQ ID NO: 857938 - protein, 546 aa, Homo sapiens
MEKECMNGCVQRTKAAVEFPQKTSALAVCFCFLHHGFRTTPIPASPLIPRSSRPLHRPLPGIPIGCVLLRLSIRCTSSVHGCPLALCNTCLHLTAYAPVSRTPPRWPSHWLPAPSGPAPAGPAAGAVGAAAAADMARTAPVEPPLRHSAPPSPAAGEPRTSVEAAVAPRRVLFADEALGLPLAQLRRYRPWGGPGAGKMAAAAGQDGGGGGGADEDDDGEDGDEGEEEEEACPEPSPLCPVPAGGGFYLVPTFSLPPAPGRLERLGRVMVELEALLPPPGAVPGGAGVWVPGGRPPVLRGLVRVLNRSFEKAVHVRASHDGWASFCDHPARYVPRSPPWAGAGGTGAGDPILDPGLGLGPGQASASSPDDGGRTDRFAFQLPFAEGAGDGARLDFVVRYETPEGTFWANNHGRNYTVLLRIAPAPTPTDAEGLPQQQQLPQLEPQPECQGPVEAEARQLKSCMKPVRRRPAEEELKTKNMDDNTFAMAEHPDVQESVGPLVAPTPLRPWPQMTLQLLEFVGVPLQSLFTSYTRAPAGIWQCPSGTK

SEQ ID NO: 857939 - protein, 217 aa, Homo sapiens
AAAVVGRGGGCLAGTQAEPRIQDGISCSCSSRSCPRRAARDVARFVVRYETPEGTFWANNHGRNYTVLLRIAPAPTPTDAEGLPQQQQLPQLEPQPECQGPVEAEARQLKSCMKPVRRRPAEEELKTKNMDDNTFAMAEHPDVQESVGPLVAPTPLRPWPQMTLQVCWSLLEFHSRPCLPGYHQQRLQNSKDCCLFLPLGSFVPEGHLPDASRSSCI

SEQ ID NO: 857940 - protein, 190 aa, Homo sapiens [sequence omitted]

SEQ ID NO: 857941 - protein, 305 aa, Homo sapiens
DIPPLSGNDSLVWRKTSQSTSVSTKKEDETITRPIPSEETSTGINITTVAIPLVLLVVLVFAGMGIFAAFRKKKKKGSPYGSAEAQKTDCWKQIKYPFARHQSAEFTISYDNEKEMTQKLDLITSDMADYQQPLMIGTGTVTRKGSTFRPMDTDAEEAGVSTDAGGHYDCPQRAGRHEYALPLAPPEPEYATPIVERHVLRAHTFSAQSGYRVPGPQPGHKHSLSSGGFSPVAGVGAQDGDYQRPHSAQPADRGYDRPKAVSALATESGHPDSQKPPTHPGTSDSYSAPRDCLTPLNQTAMTALL

SEQ ID NO: 857942 - protein, 140 aa, Homo sapiens
DIPPLSGNDSLVWRKTSQSTSVSTKKEDETITRPIPSEETSTGINITTVAIPLVLLVVLVFAGMGIFAAFRKKKKKGSPYGSAEAQKTDCWKQIKYPFARHQSAEFTISYDNEKEMTQKLDLITSDMAASPEPVSEPLPP

SEQ ID NO: 857943 - protein, 190 aa, Homo sapiens [sequence omitted]

SEQ ID NO: 857944 - protein, 129 aa, Homo sapiens
DIPPLSGNDSLVWRKTSQSTSVSTKKEDETITRPIPSEETSTGINITTVAIPLVLLVVLVFAGMGIFAAFRKKKKKGSPYGSAEAQKTDCWKQIKYPFARHQSAEFTISYDNEKEMTQKLDLITSDMAG

SEQ ID NO: 857945 - protein, 398 aa, Homo sapiens
MGQAGCKGLCLSLFDYKTEKYVIAKNKKVGLLYRLLQASILAYLVVWVFLIKKGYQDVDTSLQSAVITKVKGVAFTNTSDLGQRIWDVADYVIPAQNEGIPDGACSKDSDCHAGEAVTAGNGVKTGRCLRRENLARGTCEIFAWCPLETSSRPEEPFLKEAEDFTIFIKNHIRFPKFNFSKSNVMDVKDRSFLKSCHFGPKNHYCPIFRLGSVIRWAGSDFQDIALEGGVIGINIEWNCDLDKAASECHPHYSFSRLDNKLSKSVSSGYNFRFARYYRDAAGVEFRTLMKAYGIRFDVMVNGKGAFFCDLVLIYLIKKREFYRDKKYEEVRGLEDSSQEAEDEASGLGLSEQLTSGPGLLGMPEQQELQEPPEAKRGSSSQKGNGSVCPQLLEPHRST

SEQ ID NO: 857946 - protein, 444 aa, Homo sapiens
MGQAGCKGLCLSLFDYKTEKYVIAKNKKVGLLYRLLQASILAYLVVWVFLIKKGYQDVDTSLQSAVITKVKGVAFTNTSDLGQRIWDVADYVIPAQGENVFFVVTNLIVTPNQRQNVCAENEGIPDGACSKDSDCHAGEAVTAGNGVKTGRCLRRENLARGTCEIFAWCPLETSSRPEEPFLKEAEDFTIFIKNHIRFPKFNFSKSNVMDVKDRSFLKSCHFGPKNHYCPIFRLGSVIRWAGSDFQDIALEGGVIGINIEWNCDLDKAASECHPHYSFSRLDNKLSKSVSSGYNFRFARYYRDAAGVEFRTLMKAYGIRFDVMVNGKAGKFSIIPTIINVGSGVALMGAGAFFCDLVLIYLIKKREFYRDKKYEEVRGLEDSSQEAEDEASGLGLSEQLTSGPGLLGMPEQQELQEPPEAKRGSSSQKGNGSVCPQLLEPHRST

SEQ ID NO: 857947 - protein, 348 aa, Homo sapiens
MGQAGCKGLCLSLFDYKTEKYVIAKNKKVGLLYRLLQASILAYLVVWVFLIKKGYQDVDTSLQSAVITKVKGVAFTNTSDLGQRIWDVADYVIPAQGENVFFVVTNLIVTPNQRQNVCAENEGIPDGACSKDSDCHAGEAVTAGNGVKTGRCLRRENLARGTCEIFAWCPLETSSRPEEPFLKEAEDFTIFIKNHIRFPKFNFSNRLDNKLSKSVSSGYNFRFARYYRDAAGVEFRTLMKAYGIRFDVMVNGKGAFFCDLVLIYLIKKREFYRDKKYEEVRGLEDSSQEAEDEASGLGLSEQLTSGPGLLGMPEQQELQEPPEAKRGSSSQKGNGSVCPQLLEPHRST

SEQ ID NO: 857948 - protein, 432 aa, Homo sapiens
MGQAGCKGLCLSLFDYKTEKYVIAKNKKVGLLYRLLQASILAYLVVWVFLIKKGYQDVDTSLQSAVITKVKGVAFTNTSDLGQRIWDVADYVIPAQGENVFFVVTNLIVTPNQRQNVCAENEGIPDGACSKDSDCHAGEAVTAGNGVKTGRCLRRENLARGTCEIFAWCPLETSSRPEEPFLKEAEDFTIFIKNHIRFPKFNFSKSNVMDVKDRSFLKSCHFGPKNHYCPIFRLGSVIRWAGSDFQDIALEGGVIGINIEWNCDLDKAASECHPHYSFSRLDNKLSKSVSSGYNFRFARYYRDAAGVEFRTLMKAYGIRFDVMVNGKGAFFCDLVLIYLIKKREFYRDKKYEEVRGLEDSSQEAEDEASGLGLSEQLTSGPGLLGMPEQQELQEPPEAKRGSSSQKGNGSVCPQLLEPHRLRTPSASPLHQE

SEQ ID NO: 857949 - protein, 422 aa, Homo sapiens
MGQAGCKGLCLSLFDYKTEKYVIAKNKKVGLLYRLLQASILAYLVVWVFLIKKGYQDVDTSLQSAVITKVKGVAFTNTSDLGQRIWDVADYVIPAQGENVFFVVTNLIVTPNQRQNVCAENEGIPDGACSKDSDCHAGEAVTAGNGVKTGRCLRRENLARGTCEIFAWCPLETSSRPEEPFLKEAEDFTIFIKNHIRFPKFNFSKSNVMDVKDRSFLKSCHFGPKNHYCPIFRLGSVIRWAGSDFQDIALEGGVIGINIEWNCDLDKAASECHPHYSFSRLDNKLSKSVSSGYNFRFARYYRDAAGVEFRTLMKAYGIRFDVMVNGKGAFFCDLVLIYLIKKREFYRDKKYEEVRGLEDSSQEAEDEASGLGLSEQLTSGPGLLGMPEQQELQEPPEAKRGSSSQKGNGSVCPQLLEPHRST

SEQ ID NO: 857950 - protein, 178 aa, Homo sapiens
MGQAGCKGLCLSLFDYKTEKYVIAKNKKVGLLYRLLQASILAYLVVWVFLIKKGYQDVDTSLQSAVITKVKGVAFTNTSDLGQRIWDVADYVIPAQGENVFFVVTNLIVTPNQRQNVCAENEGIPDGACSKDSDCHAGEAVTAGNGVKTGRCLRRENLARGTCEIFAWCPLETSSRPE

SEQ ID NO: 857951 - protein, 422 aa, Homo sapiens; identical to SEQ ID NO: 857949

SEQ ID NO: 857952 - protein, 370 aa, Homo sapiens
MGQAGCKGLCLSLFDYKTEKYVIAKNKKVGLLYRLLQASILAYLVVWVFLIKKGYQDVDTSLQSAVITKVKGVAFTNTSDLGQRIWDVADYVIPAQGENVFFVVTNLIVTPNQRQNVCAENEGIPDGACSKDSDCHAGEAVTAGNGVKTGRCLRRENLARGTCEIFAWCPLETSSRPEEPFLKEAEDFTIFIKNHIRFPKFNFSNRLDNKLSKSVSSGYNFRFARYYRDAAGVEFRTLMKAYGIRFDVMVNGKAGKFSIIPTIINVGSGVALMGAGAFFCDLVLIYLIKKREFYRDKKYEEVRGLEDSSQEAEDEASGLGLSEQLTSGPGLLGMPEQQELQEPPEAKRGSSSQKGNGSVCPQLLEPHRST

SEQ ID NO: 857953 - protein, 104 aa, Homo sapiens
RQAVAAGEGGPAKSPAPRDSVFSELAVAHRQAVAAGEGGPAKSPAPRDSVFSELAVAHRQAVAALRPRAVSESQTWHLLCGSESLGHQPKVRQRDPLWHMLAGV

SEQ ID NO: 857954 - protein, 372 aa, Homo sapiens
MSGRSGKKKMSKLSRSARAGVIFPVGRLMRYLKKGTFKYRISVGAPVYMAAVIEYLAAEILELAGNAARDNKKARIAPRHILLAVANDEELNQLLKGVTIASGGVLPRIHPELLAKKRGTKGKSETILSPPPEKRGRKATSGKKGGKKSKAAKPRTSKKSKPKDSDKEGTSNSTSEDGPGDGFTILSSKSLVLGQKLSLTQSDISHIGSMRVEGIVHPTTAEIDLKEDIGKALEKAGGKEFLETVKELRKSQGPLEVAEAAVSQSSGLAAKFVIHCHIPQWGSDKCEEQLEETIKNCLSAAEDKKLKSVAFPPFPSGRNCFPKQTAAQVTLKAISAHFDDSSASSLKNVYFLLFDSESIGIYVQEMAKLDAK

SEQ ID NO: 857955 - protein, 372 aa, Homo sapiens; identical to SEQ ID NO: 857954

SEQ ID NO: 857956 - protein, 178 aa, Homo sapiens [sequence omitted]

SEQ ID NO: 857957 - protein, 372 aa, Homo sapiens; identical to SEQ ID NO: 857954

SEQ ID NO: 857958 - protein, 317 aa, Homo sapiens
MSAEILELAGNAARDNKKARIAPRHILLAVANDEELNQLLKGVTIASGGVLPRIHPELLAKKRGTKGKSETILSPPPEKRGRKATSGKKGGKKSKAAKPRTSKKSKPKDSDKEGTSNSTSEDGPGDGFTILSSKSLVLGQKLSLTQSDISHIGSMRVEGIVHPTTAEIDLKEDIGKALEKAGGKEFLETVKELRKSQGPLEVAEAAVSQSSGLAAKFVIHCHIPQWGSDKCEEQLEETIKNCLSAAEDKKLKSVAFPPFPSGRNCFPKQTAAQVTLKAISAHFDDSSASSLKNVYFLLFDSESIGIYVQEMAKLDAK

SEQ ID NO: 857959 - protein, 372 aa, Homo sapiens; identical to SEQ ID NO: 857954

SEQ ID NO: 857960 - protein, 120 aa, Homo sapiens
MFLSYVPAAVSQSSGLAAKFVIHCHIPQWGSDKCEEQLEETIKNCLSAAEDKKLKSVAFPPFPSGRNCFPKQTAAQVTLKAISAHFDDSSASSLKNVYFLLFDSESIGIYVQEMAKLDAK

SEQ ID NO: 857961 - protein, 372 aa, Homo sapiens; identical to SEQ ID NO: 857954

SEQ ID NO: 857962 - protein, 455 aa, Homo sapiens
NLLGTIQKWRQQVLTLRVHVRQWCDHTCLPYDDPWSSIVPVESRRTSEGRRPRGLRYVPEKSTPEFEVRRRARVYMRSYRSIEVRELSIEYKMSKLSRSARAGVIFPVGRLMRYLKKGTFKYRISVGAPVYMAAVIEYLAAEILELAGNAARDNKKARIAPRHILLAVANDEELNQLLKGVTIASGGVLPRIHPELLAKKRGTKGKSETILSPPPEKRGRKATSGKKGGKKSKAAKPRTSKKSKPKDSDKEGTSNSTSEDGPGDGFTILSSKSLVLGQKLSLTQSDISHIGSMRVEGIVHPTTAEIDLKEDIGKALEKAGGKEFLETVKELRKSQGPLEVAEAAVSQSSGLAAKFVIHCHIPQWGSDKCEEQLEETIKNCLSAAEDKKLKSVAFPPFPSGRNCFPKQTAAQVTLKAISAHFDDSSASSLKNVYFLLFDSESIGIYVQEMAKLDAK

SEQ ID NO: 857963 - protein, 372 aa, Homo sapiens; identical to SEQ ID NO: 857954

SEQ ID NO: 857964 - protein, 285 aa, Homo sapiens
MHFSLQLLKGVTIASGGVLPRIHPELLAKKRGTKGKSETILSPPPEKRGRKATSGKKGGKKSKAAKPRTSKKSKPKDSDKEGTSNSTSEDGPGDGFTILSSKSLVLGQKLSLTQSDISHIGSMRVEGIVHPTTAEIDLKEDIGKALEKAGGKEFLETVKELRKSQGPLEVAEAAVSQSSGLAAKFVIHCHIPQWGSDKCEEQLEETIKNCLSAAEDKKLKSVAFPPFPSGRNCFPKQTAAQVTLKAISAHFDDSSASSLKNVYFLLFDSESIGIYVQEMAKLDAK

SEQ ID NO: 857965 - protein, 358 aa, Homo sapiens
AACELPPTRCGASGSRPPSGSDPANGFGYIFMLGFITRPPHRFLSLLCPGLRIPQLSVLCAQPRPRAMAISSSSCELPLVAVCQVTSTPDKQQNFKTCAELVREAARLGACLAFLPEAFDFIARDPAETLHLSEPLGGKLLEEYTQLARECGLWLSLGGFHERGQDWEQTQKIYNCHVLLNSKGAVVATYRKTHLCDVEIPGQGPMCESNSTMPGPSLESPVSTPAGKIGLAVCYDMRFPELSLALAQAGAEILTYPSAFGSITGPAHWEVLLRARAIETQCYVVAAAQCGRHHEKRASYGHSMVVDPWGTVVARCSEGPGLCLARIDLNYLRQLRRHLPVFQHRRPDLYGNLGHPLS

SEQ ID NO: 857966 - protein, 358 aa, Homo sapiens; identical to SEQ ID NO: 857965

SEQ ID NO: 857967 - protein, 291 aa, Homo sapiens
MAISSSSCELPLVAVCQVTSTPDKQQNFKTCAELVREAARLGACLAFLPEAFDFIARDPAETLHLSEPLGGKLLEEYTQLARECGLWLSLGGFHERGQDWEQTQKIYNCHVLLNSKGAVVATYRKTHLCDVEIPGQGPMCESNSTMPGPSLESPVSTPAGKIGLAVCYDMRFPELSLALAQAGAEILTYPSAFGSITGPAHWEVLLRARAIETQCYVVAAAQCGRHHEKRASYGHSMVVDPWGTVVARCSEGPGLCLARIDLNYLRQLRRHLPVFQHRRPDLYGNLGHPLS

SEQ ID NO: 857968 - protein, 291 aa, Homo sapiens; identical to SEQ ID NO: 857967

SEQ ID NO: 857969 - protein, 291 aa, Homo sapiens; identical to SEQ ID NO: 857967

SEQ ID NO: 857970 - protein, 291 aa, Homo sapiens; identical to SEQ ID NO: 857967

SEQ ID NO: 857971 - protein, 123 aa, Homo sapiens
MAISSSSCELPLVAVCQVTSTPDKQQNFKTCAELVREAARLGACLAFLPEAFDFIARDPAETLHLSEPLGGKLLEEYTQLARECGLWLSLGGFHERGQDWEQTQKIYNCHVLLNSKDWSSCLL

SEQ ID NO: 857972 - protein, 331 aa, Homo sapiens
AACELPPTRCGASGSRPPSGSDPANGFGYIFMLGFITRPPHRFLSLLCPGLRIPQLSVLCAQPRPRAMAISSSSCELPLVAVCQVTSTPDKQQNFKTCAELVREAARLGACLAFLPEAFDFIARDPAETLHLSEPLGGKLLEEYTQLARECGLWLSLGGFHERGQDWEQTQKIYNCHVLLNSKGAVVATYRKTHLCDVEIPGQGPMCESNSTMPGPSLESPVSTPAGKIGLAVCYDMRFPELSLALAQAGAEILTYPSAFGSITGPAHWEVLLRARAIETQCYVVAAAQCGRHHEKRASYGHSMVVDPWGTVVARCSEGPDLYGNLGHPLS

SEQ ID NO: 857973 - protein, 341 aa, Homo sapiens
AACELPPTRCGASGSRPPSGSDPANGFGYIFMLGFITRPPHRFLSLLCPGLRIPQLSVLCAQPRPRAMAISSSSCELPLVAVCQVTSTPDKQQNFKTCAELVREAARLGACLAFLPEAFDFIARDPAETLHLSEPLGGKLLEEYTQLARECGLWLSLGGFHERGQDWEQTQKIYNCHVLLNSKGAVVATYRKTHLCDVEIPGQGPMCESNSTMPGPSLESPVSTPAGKIGLAVCYDMRFPELSLALAQAGAEILTYPSAFGSITGPAHWEVLLRARAIETQCYVVAAAQCGRHHEKRASYGHSMVVDPWGTVVARCSEGPGLCLARIDLNYLRQLRRHLPL

SEQ ID NO: 857974 - protein, 332 aa, Homo sapiens
AACELPPTRCGASGSRPPSGSDPANGFGYIFMLGFITRPPHRFLSLLCPGLRIPQLSVLCAQPRPRAMAISSSSCELPLVAVCQVTSTPDKQQNFKTCAELVREAARLGACLAFLPEAFDFIARDPAETLHLSEPLGGKLLEEYTQLARECGLWLSLGGFHERGQDWEQTQKIYNCHVLLNSKGAVVATYRKTHLCDVEIPGQGPMCESNSTMPGPSLESPVSTPAGKIGLAVCYDMRFPELSLALAQAGAEILTYPSAFGSITGPAHWEVLLRARAIETQCYVVAAAQCGRHHEKRASYGHSMVVDPWGTVVARCSEGPGLCLARIDATMS

SEQ ID NO: 857975 - protein, 163 aa, Homo sapiens
MAISSSSCELPLVAVCQVTSTPDKQQNFKTCAELVREAARLGACLAFLPEAFDFIARDPAETLHLSEPLGGKLLEEYTQLARECGLWLSLGGFHERGQDWEQTQKIYNCHVLLNSKGAVVATYRKTHLCDVEIPGQGPMCESNSTMPGPSLESPVSTPAGMPL

SEQ ID NO: 857976 - protein, 123 aa, Homo sapiens
MAISSSSCELPLVAVCQVTSTPDKQQNFKTCAELVREAARLGACLAFLPEAFDFIARDPAETLHLSEPLGGKLLEEYTQLARECGLWLSLGGFHERGQDWEQTQKIYNCHVLLNSNQASALPE

SEQ ID NO: 857977 - protein, 118 aa, Homo sapiens
MAISSSSCELPLVAVCQVTSTPDKQQNFKTCAELVREAARLGACLAFLPEAFDFIARDPAETLHLSEPLGGKLLEEYTQLARECGLWLSLGGFHERGQDWEQFQKGGILYSHCLFHGN

SEQ ID NO: 857978 - protein, 118 aa, Homo sapiens
SALSGDKFLPRGLYTFAGGVGPIVVPPRTIEGALRRLPPVRLFPLYTRFLNRRALVSCSFKLRASLVRGPPCVHKPTRGAIGPPRGNFFAPPPFFFFFFFFFFFFFFFLYSHCLFHGN

SEQ ID NO: 857979 - protein, 139 aa, Homo sapiens
SGLRVTAHSLRRFWLQTALRIGPCEWFWLYLHVGPTPYPVGRGESHLRCFNLCNRDAASGRGGEGRANWSGRREGGGRGAAWGLGSFAPCPPGRGGRRERVNFPLRDSGERGNMLRVSKAAQVHSQGESLGKTKDSSRR

SEQ ID NO: 857980 - protein, 111 aa, Homo sapiens [sequence omitted]

SEQ ID NO: 857981 - protein, 358 aa, Homo sapiens; identical to SEQ ID NO: 857965

SEQ ID NO: 857982 - protein, 291 aa, Homo sapiens; identical to SEQ ID NO: 857967

SEQ ID NO: 857983 - protein, 327 aa, Homo sapiens
AACELPPTRCGASGSRPPSGSDPANGFGYIFIRPRAMAISSSSCELPLVAVCQVTSTPDKQQNFKTCAELVREAARLGACLAFLPEAFDFIARDPAETLHLSEPLGGKLLEEYTQLARECGLWLSLGGFHERGQDWEQTQKIYNCHVLLNSKGAVVATYRKTHLCDVEIPGQGPMCESNSTMPGPSLESPVSTPAGKIGLAVCYDMRFPELSLALAQAGAEILTYPSAFGSITGPAHWEVLLRARAIETQCYVVAAAQCGRHHEKRASYGHSMVVDPWGTVVARCSEGPGLCLARIDLNYLRQLRRHLPVFQHRRPDLYGNLGHPLS

SEQ ID NO: 857984 - protein, 276 aa, Homo sapiens
MAISSSSCELPLVAVCQVTSTPDKQQNFKTCAELVREAARLGACLAFLPEAFDFIARDPAETLHLSEPLGGKLLEEYTQLARECGLWLSLGGFHERGQDWEGAVVATYRKTHLCDVEIPGQGPMCESNSTMPGPSLESPVSTPAGKIGLAVCYDMRFPELSLALAQAGAEILTYPSAFGSITGPAHWEVLLRARAIETQCYVVAAAQCGRHHEKRASYGHSMVVDPWGTVVARCSEGPGLCLARIDLNYLRQLRRHLPVFQHRRPDLYGNLGHPLS

SEQ ID NO: 857985 - protein, 332 aa, Homo sapiens; identical to SEQ ID NO: 857974

SEQ ID NO: 857986 - protein, 123 aa, Homo sapiens; identical to SEQ ID NO: 857971

SEQ ID NO: 857987 - protein, 274 aa, Homo sapiens
AACELPPTRCGASGSRPPSGSDPANGFGYIFMLGFITRPPHRFLSLLCPGLRIPQLSVLCAQPRPRAMAISSSSCELPLVAVCQVTSTPDKQQNFKTCAELVREAARLGACLAFLPEAFDFIARDPAETLHLSEPLGGKLLEEYTQLARECGLWLSLGGFHERGQDWEQTQKIYNCHVLLNSKGAVVATYRKTHLCDVEIPGQGPMCESNSTMPGPSLESPVSTPAGKIGLAVCYDMRFPELSLALAQAGAEILTYPSAFGSITGPAHWEPVSS

SEQ ID NO: 857988 - protein, 123 aa, Homo sapiens; identical to SEQ ID NO: 857971

SEQ ID NO: 857989 - protein, 139 aa, Homo sapiens; identical to SEQ ID NO: 857979

SEQ ID NO: 857990 - protein, 147 aa, Homo sapiens
MSPWGPLIFLDRSGDHEIKHPRAIPTNTSHPPLASPPLFTIPTDTLYATLVCNICQSHQFTSSTGNTKPTIRMVYLHVPLHPPYPLSPFTTSHPSYHLLTNCTLPPLIRPTPLNIKIHSPPTDHALVSFAHTPPQKTVYLPPIPHHI

SEQ ID NO: 857991 - protein, 187 aa, Homo sapiens
MVCSPVTLRIAPPDRRFSRSAIPEQIISSTLSSPSSNAPDPCAKETVLSALKEKKKKRTVEEEDQIFLDGQENKRSCLVDGLTDASSAFKVPRPGPDTLQFTVDVFHFANDSRNMIYITCHLKVTLAEQDPDELNKACSFSKPSNSWFPVEGPADICQCCNKGDCGTPSHSRRQPRVVSQWSTSASL

SEQ ID NO: 857992 - protein, 135 aa, Homo sapiens
MVQFWLTTPSASQIQAILLPQPPDCLVDGLTDASSAFKVPRPGPDTLQFTVDVFHFANDSRNMIYITCHLKVTLAEQDPDELNKACSFSKPSNSWFPVEGPADICQCCNKGDCGTPSHSRRQPRVVSQWSTSASL

SEQ ID NO: 857993 - protein, 115 aa, Homo sapiens
MVCSPVTLRIAPPDRRFSRSAIPEQIISSTLSSPSSNAPDPCAKETVLSALKEKKKKRTVEEEDQIFLDGQENKRSCLVDGLTDASSAFKVPRPGPDTLQFTVDVFHFANDSRNM

SEQ ID NO: 857994 - protein, 187 aa, Homo sapiens; identical to SEQ ID NO: 857991

SEQ ID NO: 857995 - protein, 187 aa, Homo sapiens; identical to SEQ ID NO: 857991

SEQ ID NO: 857996 - protein, 187 aa, Homo sapiens; identical to SEQ ID NO: 857991

SEQ ID NO: 857997 - protein, 187 aa, Homo sapiens; identical to SEQ ID NO: 857991

SEQ ID NO: 857998 - protein, 132 aa, Homo sapiens
MVCSPVTLRIAPPDRRFSRSAIPEQIISSTLSSPSSNAPDPCAKETVLSALKEKKKKRTVEEEDQIFLDGQENKRSCLVDGLTDASSAFKVPRPGPDTLQFTVDVFHFANDSRNMRRFSRSAIPGRAVGFAF

SEQ ID NO: 857999 - protein, 422 aa, Homo sapiens
NKKEEKLEDMDFLEDVDFPGRSGFGGRPVIAGRLDLLEDLIYWKTWSFLEDMDCPEDMDRLEDVDFLEAQDYLEEHEIDGRLEVAGRPGVVGRPCHRCHRKPWILQTLEDLNVRRSAHWRRWKTWILSQLMEDWVVVGRHEDAGRHRDAGRRGDVGRRADAGSPGDAGRPGDIGRHGFVGRRSLVGRHIFLEDVDFLEDMAWLEDVDFLEDVPLLEDIPLLEDVPLLEDVPLLEDTSRLEDINLMEDMALLEDVDLLEDTDFLEDLDFSEAMDLREDKDFLEDMDSLEDMALLEDVDLLEDTDFLEDPDFLEAIDLREDKDFLEDMDSLEDLRPLEDVDFLEDMAFLEDVDFQEDPNYPEDLDCWEDVDFLEDWRLLEDMDFLEDMDFLEDVDLQEDIYWLEDLDFFRKMWIDWKTWIWWKT

SEQ ID NO: 858000 - protein, 109 aa, Homo sapiens
AESFGGGDRDVEGGDRFTLIREYRLRVRKASRSDLGLWRATRGLVFQVRRFRLDGRQEVTDLSSDVAPPAAALISSASYPSAQLDPPQPRPRPWTLGVPEGAATSSRVK

SEQ ID NO: 858001 - protein, 289 aa, Homo sapiens
MIINWNQVSVLWKCLLKQSASYQDRRQSWRRASMKETNRRKSLHPIHQGITELSRSISVDLAESKRLGCLLLSSFQFSIQKLEPFLRDTKGFSLESFRAKASSLSEELKHFADGLETDGTLQKCFEDSNGKASDFSLEASVAEMKEYITKFSLERQTWDQLLLHYQQEAKEILSRGSTEAKITEVKVEPMTYLGSSQNEVLNTKPDYQKILQNQSKVFDCMELVMDELQGSVKQLQAFMDESTQCFQKVSVQLGKRSMQQLDPSPARKLLKLQLQNPPAIHGSGSGSCQ

SEQ ID NO: 858002 - protein, 336 aa, Homo sapiens
AESFGGGDRDVEGGDRFTLIREYRLRVRKASRSDLGLWRATRGLVFQSLPPRMTSVTRSEIIDEQSASYQDRRQSWRRASMKETNRRKSLHPIHQGITELSRSISVDLAESKRLGCLLLSSFQFSIQKLEPFLRDTKGFSLESFRAKASSLSEELKHFADGLETDGTLQKCFEDSNGKASDFSLEASVAEMKEYITKFSLERQTWDQLLLHYQQEAKEILSRGSTEAKITEVKVEPMTYLGSSQNEVLNTKPDYQKILQNQSKVFDCMELVMDELQGSVKQLQAFMDESTQCFQKVSVQLGKRSMQQLDPSPARKLLKLQLQNPPAIHGSGSGSCQ

SEQ ID NO: 858003 - protein, 340 aa, Homo sapiens
MSKTHDHQLESSLSPVEVFAKTSASLEMNQGVSEERIHLGSSPKKGGNCDLSHQERLQSKSLHLSPQEQSASYQDRRQSWRRASMKETNRRKSLHPIHQGITELSRSISVDLAESKRLGCLLLSSFQFSIQKLEPFLRDTKGFSLESFRAKASSLSEELKHFADGLETDGTLQKCFEDSNGKASDFSLEASVAEMKEYITKFSLERQTWDQLLLHYQQEAKEILSRGSTEAKITEVKVEPMTYLGSSQNEVLNTKPDYQKILQNQSKVFDCMELVMDELQGSVKQLQAFMDESTQCFQKVSVQLGKRSMQQLDPSPARKLLKLQLQNPPAIHGSGSGSCQ

SEQ ID NO: 858004 - protein, 408 aa, Homo sapiens
AESFGGGDRDVEGGDRFTLIREYRLRVRKASRSDLGLWRATRGLVFQSLPPRMTSVTRSEIIDEKGPVMSKTHDHQLESSLSPVEVFAKTSASLEMNQGVSEERIHLGSSPKKGGNCDLSHQERLQSKSLHLSPQEQSASYQDRRQSWRRASMKETNRRKSLHPIHQGITELSRSISVDLAESKRLGCLLLSSFQFSIQKLEPFLRDTKGFSLESFRAKASSLSEELKHFADGLETDGTLQKCFEDSNGKASDFSLEASVAEMKEYITKFSLERQTWDQLLLHYQQEAKEILSRGSTEAKITEVKVEPMTYLGSSQNEVLNTKPDYQKILQNQSKVFDCMELVMDELQGSVKQLQAFMDESTQCFQKVSVQLGKRSMQQLDPSPARKLLKLQLQNPPAIHGSGSGSCQ

SEQ ID NO: 858005 - protein, 146 aa, Homo sapiens
MKEYITKFSLERQTWDQLLLHYQQEAKEILSRGSTEAKITEVKVEPMTYLGSSQNEVLNTKPDYQKILQNQSKVFDCMELVMDELQGSVKQLQAFMDESTQCFQKVSVQLGKRSMQQLDPSPARKLLKLQLQNPPAIHGSGSGSCQ

SEQ ID NO: 858006 - protein, 296 aa, Homo sapiens
AESFGGGDRDVEGGDRFTLIREYRLRVRKASRSDLGLWRATRGLVFQSLPPRMTSVTRSEIIDEKGPVMSKTHDHQLESSLSPVEVFAKTSASLEMNQGVSEERIHLGSSPKKGGNCDLSHQERLQSKSLHLSPQEQSASYQDRRQSWRRASMKETNRRKSLHPIHQGITELSRSISVDLAESKRLGCLLLSSFQFSIQKLEPFLRDTKGFSLESFRAKASSLSEELKHFADGLETDGTLQKCFEDSNGKASDFSLEASVAEMKEYITKFSLERQTWDQLLLHYQQEAKEILSRTS

SEQ ID NO: 858007 - protein, 123 aa, Homo sapiens
SKTHDHQLESSLSPVEVFAKTSASLEMNQGVSEERIHLGSSPKKGGNCDLSHQERLQSKSLHLSPQEQSASYQDRRQSWRRASMKETNRRKSLHPIHQGITGGVLCTQDSEVPAQIRDRFQLR

SEQ ID NO: 858008 - protein, 408 aa, Homo sapiens; identical to SEQ ID NO: 858004

SEQ ID NO: 858009 - protein, 485 aa, Homo sapiens
AESFGGGDRDVEGGDRFTLIREYRLRVRKASRSDLGLWRATRGLVFQSLPPRMTSVTRSEIIDGKYCSEIQYLLPWVQASELYPNLSWLLVDLESHTHYLQRCFLYVSTIYGAYIYFFHFFAQIVVAGLILYFDFFITNTEKGPVMSKTHDHQLESSLSPVEVFAKTSASLEMNQGVSEERIHLGSSPKKGGNCDLSHQERLQSKSLHLSPQEQSASYQDRRQSWRRASMKETNRRKSLHPIHQGITELSRSISVDLAESKRLGCLLLSSFQFSIQKLEPFLRDTKGFSLESFRAKASSLSEELKHFADGLETDGTLQKCFEDSNGKASDFSLEASVAEMKEYITKFSLERQTWDQLLLHYQQEAKEILSRGSTEAKITEVKVEPMTYLGSSQNEVLNTKPDYQKILQNQSKVFDCMELVMDELQGSVKQLQAFMDESTQCFQKVSVQLGKRSMQQLDPSPARKLLKLQLQNPPAIHGSGSGSCQ

SEQ ID NO: 858010 - protein, 301 aa, Homo sapiens
AESFGGGDRDVEGGDRFTLIREYRLRVRKASRSDLGLWRATRGLVFQSLPPRMTSVTRSEIIDELSRSISVDLAESKRLGCLLLSSFQFSIQKLEPFLRDTKGFSLESFRAKASSLSEELKHFADGLETDGTLQKCFEDSNGKASDFSLEASVAEMKEYITKFSLERQTWDQLLLHYQQEAKEILSRGSTEAKITEVKVEPMTYLGSSQNEVLNTKPDYQKILQNQSKVFDCMELVMDELQGSVKQLQAFMDESTQCFQKVSVQLGKRSMQQLDPSPARKLLKLQLQNPPAIHGSGSGSCQ

SEQ ID NO: 858011 - protein, 146 aa, Homo sapiens; identical to SEQ ID NO: 858005

SEQ ID NO: 858012 - protein, 110 aa, Homo sapiens
AESFGGGDRDVEGGDRFTLIREYRLRVRKASRSDLGLWRATRGLVFQSLPPRMTSVTRSEIIDGKYCSEIQYLLPWVQASELYPNLSWLLVDLESHTHYLQRCFLYVSTI

SEQ ID NO: 858013 - protein, 666 aa, Homo sapiens
MEQEPQNGEPAEIKIIREAYKKAFLFVNKGLNTDELGQKEEAKNYYKQGIGHLLRGISISSKESEHTGPGWESARQMQQKMKETLQNVRTRLEILEKGLATSLQNDLQEVPKLYPEFPPKDMCEKLPEPQSFSSAPQHAEVNGNTSTPSAGAVAAPASLSLPSQSCPAEAPPAYTPQAAEGHYTVSYGTDSGEFSSVGEEFYRNHSQPPPLETLGLDADELILIPNGVQIFFVNPAGEVSAPSYPGYLRIVRFLDNSLDTVLNRPPGFLQVCDWLYPLVPDRSPVLKCTAGAYMFPDTMLQAAGCFVGVVLSSELPEDDRELFEDLLRQMSDLRLQANWNRAEEENEFQIPGRTRPSSDQLKEASGTDVKQLDQGNKDVRHKGKRGKRAKDTSSEEVNLSHIVPCEPVPEEKPKELPEWSEKVAHNILSGASWVSWGLVKGAEITGKAIQKGASKLRERIQPEEKPVEVSPAVTKGLYIAKQATGGAAKVSQFLVDGVCTVANCVGKELAPHVKKHGSKLVPESLKKDKDGKSPLDGAMVVAASSVQGFSTVWQGLECAAKCIVNNVSAETVQTVRYKYGYNAGEATHHAVDSAVNVGVTAYNINNIGIKAMVKKTATQTGHTLLEDYQIVDNSQRENQEGAANVNVRGEKDEQTKEVKEAKKKDK

SEQ ID NO: 858014 - protein, 666 aa, Homo sapiens; identical to SEQ ID NO: 858013

SEQ ID NO: 858015 - protein, 666 aa, Homo sapiens; identical to SEQ ID NO: 858013

SEQ ID NO: 858016 - protein, 666 aa, Homo sapiens; identical to SEQ ID NO: 858013

SEQ ID NO: 858017 - protein, 666 aa, Homo sapiens; identical to SEQ ID NO: 858013

SEQ ID NO: 858018 - protein, 176 aa, Homo sapiens [sequence omitted]

SEQ ID NO: 858019 - protein, 96 aa, Homo sapiens
RTRGSTHAYGYNAGEATHHAVDSAVNVGVTAYNINNIGIKAMVKKTATQTGHTLLEDYQIVDNSQRENQEGAANVNVRGEKDEQTKEVKEAKKKDK

SEQ ID NO: 858020 - protein, 541 aa, Homo sapiens
MEQEPQNGEPAEIKIIREAYKKAFLFVNKGLNTDELGQKEEAKNYYKQGIGHLLRGISISSKESEHTGPGWESARQMQQKMKETLQNVRTRLEILEKGLATSLQNDLQEVPKLYPEFPPKDMCEKLPEPQSFSSAPQHAEVNGNTSTPSAGAVAAPASLSLPSQSCPAEAPPAYTPQAAEGHYTVSYGTDSGEFSSVGEEFYRNHSQPPPLETLGLDADELILIPNGVQIFFVNPAGEVSAPSYPGYLRIVRFLDNSLDTVLNRPPGFLQVCDWLYPLVPDRSPVLKCTAGAYMFPDTMLQAAGCFVGVVLSSELPEDDRELFEDLLRQMSDLRLQANWNRAEEENEFQIPGRTRPSSDQLKEASGTDVKQLDQGNKDVRHKGKRGKRAKDTSSEEVNLSHIVPCEPVPEEKPKELPEWSEKVAHNILSGASWVSWGLVKGAEITGKAIQKGASKLRERIQPEEKPVEVSPAVTKGLYIAKQATGGAAKVSQFLVDGVCTVANCVGKELAPHVKKHGSKLVPESLKKDKDGKSPLDGAMGW

SEQ ID NO: 858021 - protein, 66 aa, Homo sapiens
EGIISLYCLSCTVPSAPSSGYKRSLPTLSTRLSGGLGFAGEKEIAQARSSRRGRRGPCLGGSARGR

SEQ ID NO: 858022 - protein, 666 aa, Homo sapiens; identical to SEQ ID NO: 858013

SEQ ID NO: 858023 - protein, 666 aa, Homo sapiens; identical to SEQ ID NO: 858013

SEQ ID NO: 858024 - protein, 666 aa, Homo sapiens; identical to SEQ ID NO: 858013

SEQ ID NO: 858025 - protein, 128 aa, Homo sapiens [sequence omitted]

SEQ ID NO: 858026 - protein, 440 aa, Homo sapiens
MEQEPQNGEPAEIKIIREAYKKAFLFVNKGLNTDELGQKEEAKNYYKQGIGHLLRGISISSKESEHTGPGWESARQMQQKMKETLQNVRTRLEILEKGLATSLQNDLQEVPKLYPEFPPKDMCEKLPEPQSFSSAPQHAEVNGNTSTPSAGAVAAPASLSLPSQSCPAEAPPAYTPQAAEGHYTVSYGTDSGEFSSVGEEFYRNHSQPPPLETLGLDADELILIPNGVQIFFVNPAGEVSAPSYPGYLRIVRFLDNSLDTVLNRPPGFLQVCDWLYPLVPDRSPVLKCTAGAYMFPDTMLQAAGCFVGVVLSSELPEDDRELFEDLLRQMSDLRLQANWNRAEEENEFQIPGRTRPSSDQLKEASGTDVKQLDQGNKDVRHKGKRGKRAKDTSSEEVNLSHIVPCEPVPEEKPKELPEWSEKVAHNILSGITVMLIFFPV

SEQ ID NO: 858027 - protein, 101 aa, Homo sapiens
WKPMCISVQERMVGLVGGAPAKGELIQKHSGICLPLLFQRRFPYIRNSSLRIPIPEAATGYRTGSPPTEKSRGAKQSLISLRFHKPDPHKLRSSSSHCRCG

SEQ ID NO: 858028 - protein, 558 aa, Homo sapiens
MVDSGTEARARGKAEAGLQDGISGPATARVNGKTQAEAVAEAELKTESVTQAKAGDGAMTRTHTVTYREAMAVTREVIKVEDTTKTRVMVETKTKPLAERSIVPQTKSKAMPMSRVSTVTKSEVKVVAVIEANIRSYAKSHDKANTGSRPDRREETSIGMKSSDEDEENICSWFWTGEEPSVGSWFWPEEETSLQVYKPLPKIQEKPKPTHKPTLTIKQKVIAWSRARYIVLVPVEGGEQSLPPEGNWTLVETLIETPLGIRPLTKIPPYHGPYYQTLAEIKKQIRQREKYGPNPKACHCKSRGFSLEPKEFDKLVALLKLTKDPFIHEIATMIMGISPAYPFTQDIIHDVGITVMIENLVNNPNVKEHPGALSMVDDSSESSEEPKSGESYIHQVCKGIISCPLNSPVQLAGLKLLGHLSIKFEDHYVITSYIPDFLTLLNKGSVKTKFYVLKVFSCLSKNHANTRELISAKVLSSLVAPFNKNESKANILNIIEIFENINFQFKTKAKLFTKEKFTKSELISIFQEAKQFGQKLQDLAEHSDPEVRDKVIRLILKL

SEQ ID NO: 858029 - protein, 838 aa, Homo sapiens
MTGAEIEPSAQAKPEKKAGEEVIAGPERENDVPLVVRPKVRTQATTGARPKTETKSVPAARPKTEAQAMSGARPKTEVQVMGGARPKTEAQGITGARPKTDARAVGGARSKTDAKAIPGARPKDEAQAWAQSEFGTEAVSQAEGVSQTNAVAWPLATAESGSVTKSKGLSMDRELVNVDAETFPGTQGQKGIQPWFGPGEETNMGSWCYSRPRAREEASNESGFWSADETSTASSFWTGEETSVRSWPREESNTRSRHRAKHQTNPRSRPRSKQEAYVDSWSGSEDEASNPFSFWVGENTNNLFRPRVREEANIRSKLRTNREDCFESESEDEFYKQSWVLPGEEANSRFRHRDKEDPNTALKLRAQKDVDSDRVKQEPRFEEEVIIGSWFWAEKEASLEGGASAICESEPGTEEGAIGGSAYWAEEKSSLGAVAREEAKPESEEEAIFGSWFWDRDEACFDLNPCPVYKVSDRFRDAAEELNASSRPQTWDEVTVEFKPGLFHGVGFRSTSPFGIPEEASEMLEAKPKNLELSPEGEEQESLLQPDQPSPEFTFQYDPSYRSVREIREHLRARESAESESWSCSCIQCELKIGSEEFEEFLLLMDKIRDPFIHEISKIAMGMRSASQFTRDFIRDSGVVSLIETLLNYPSSRVRTSFLENMIHMAPPYPNLNMIETFICQVCEETLAHSVDSLEQLTGIRMLRHLTMTIDYHTLIANYMSGFLSLLTTANARTKFHVLKMLLNLSENPAVAKKLFSAKALSIFVGLFNIEETNDNIQIVIKMFQNISNIIKSGKMSLIDDDFSLEPLISAFREFEELAKQLQAQIDNQNDPEVGQQS

SEQ ID NO: 858030 - protein, 838 aa, Homo sapiens; identical to SEQ ID NO: 858029

SEQ ID NO: 858031 - protein, 838 aa, Homo sapiens; identical to SEQ ID NO: 858029

SEQ ID NO: 858032 - protein, 838 aa, Homo sapiens; identical to SEQ ID NO: 858029

SEQ ID NO: 858033 - protein, 838 aa, Homo sapiens; identical to SEQ ID NO: 858029

SEQ ID NO: 858034 - protein, 558 aa, Homo sapiens; identical to SEQ ID NO: 858028

SEQ ID NO: 858035 - protein, 558 aa, Homo sapiens; identical to SEQ ID NO: 858028

SEQ ID NO: 858036 - protein, 558 aa, Homo sapiens; identical to SEQ ID NO: 858028

SEQ ID NO: 858037 - protein, 101 aa, Homo sapiens; identical to SEQ ID NO: 858027

SEQ ID NO: 858038 - protein, 101 aa, Homo sapiens; identical to SEQ ID NO: 858027

SEQ ID NO: 858039 - protein, 101 aa, Homo sapiens; identical to SEQ ID NO: 858027

SEQ ID NO: 858040 - protein, 101 aa, Homo sapiens; identical to SEQ ID NO: 858027

SEQ ID NO: 858041 - protein, 135 aa, Homo sapiens
  misc_feature (3)..(3): Xaa can be any naturally occurring amino acid
  misc_feature (47)..(47): Xaa can be any naturally occurring amino acid
  misc_feature (49)..(49): Xaa can be any naturally occurring amino acid
TSXVTLAPLCAAALFPPGRVPRPFSVFPVFCVFVLPLPRALARALLXLXPSLSSLVAPFNKNESKANILNIIEIFENINFQFKTKAKLFTKEKFTKSELISIFQEAKQFGQKLQDLAEHSDPEVRDKVIRLILKL

SEQ ID NO: 858042 - protein, 558 aa, Homo sapiens; identical to SEQ ID NO: 858028

SEQ ID NO: 858043 - protein, 838 aa, Homo sapiens; identical to SEQ ID NO: 858029

SEQ ID NO: 858044 - protein, 838 aa, Homo sapiens; identical to SEQ ID NO: 858029

SEQ ID NO: 858045 - protein, 838 aa, Homo sapiens; identical to SEQ ID NO: 858029

SEQ ID NO: 858046 - protein, 558 aa, Homo sapiens; identical to SEQ ID NO: 858028

SEQ ID NO: 858047 - protein, 709 aa, Homo sapiens
MTGAEIEPSAQAKPEKKAGEEVIAGPERENDVPLVVRPKVRTQATTGARPKTETKSVPAARPKTEAQAMSGARPKTEVQVMGGARPKTEAQGITGARPKTDARAVGGARSKTDAKAIPGARPKDEAQAWAQSEFGTEAVSQAEGVSQTNAVAWPLATAESGSVTKSKGLSMDRELVNVDAETFPGTQGQKGIQPWFGPGEETNMGSWCYSRPRAREEASNESGFWSADETSTASSFWTGEETSVRSWPREESNTRSRHRAKHQTNPRSRPRSKQEAYVDSWSGSEDEASNPFSFWVGENTNNLFRPRVREEANIRSKLRTNREDCFESESEDEFYKQSWVLPGEEANSRFRHRDKEDPNTALKLRAQKDVDSDRVNKNPGLRRKSLLGPGSGQKKRPVWRVELQQSVNLSQESLLQPDQPSPEFTFQYDPSYRSVREIREHLRARESAESESWSCSCIQCELKIGSEEFEEFLLLMDKIRDPFIHEISKIAMGMRSASQFTRDFIRDSGVVSLIETLLNYPSSRVRTSFLENMIHMAPPYPNLNMIETFICQVCEETLAHSVDSLEQLTGIRMLRHLTMTIDYHTLIANYMSGFLSLLTTANARTKFHVLKMLLNLSENPAVAKKLFSAKALSIFVGLFNIEETNDNIQIVIKMFQNISNIIKSGKMSLIDDDFSLEPLISAFREFEELAKQLQAQIDNQNDPEVGQQS

SEQ ID NO: 858048 - protein, 101 aa, Homo sapiens; identical to SEQ ID NO: 858027

SEQ ID NO: 858049 - protein, 101 aa, Homo sapiens; identical to SEQ ID NO: 858027

SEQ ID NO: 858050 - protein, 350 aa, Homo sapiens [sequence omitted]

SEQ ID NO: 858051 - protein, 350 aa, Homo sapiens [sequence omitted]

SEQ ID NO: 858052 - protein, 350 aa, Homo sapiens [sequence omitted]

SEQ ID NO: 858053 - protein, 350 aa, Homo sapiens [sequence omitted]

SEQ ID NO: 858054 - protein, 350 aa, Homo sapiens [sequence omitted]

SEQ ID NO: 858055 - protein, 315 aa, Homo sapiens
MDFADLPALFGATLSQEGLQGFLVEAHPDNACSPIAPPPPAPVNGSVFIALLRRFDCNFDLKVLNAQKAGYGAAVVHNVNSNELLNMVWNSEEIQQQIWIPSVFIGERSSEYLRALFVYEKGARVLLVPDNTFPLGYYLIPFTGIVGLLVLAMGAVMIARCIQHRKRLQRNRLTKEQLKQIPTHDYQKGDQYDVCAICLDEYEDGDKLRVLPCAHAYHSRCVDPWLTQTRKTCPICKQPVHRGPGDEDQEEETQGQEEGDEGEPRDHPASERTPLLGSSPTLPTSFGSLAPAPLVFPGPSTDPPLSPPSSPVILV

SEQ ID NO: 858056 - protein, 350 aa, Homo sapiens [sequence omitted]

SEQ ID NO: 858057 - protein, 350 aa, Homo sapiens [sequence omitted]

SEQ ID NO: 858058 - protein, 243 aa, Homo sapiens
MHPAAFPLPVVVAAVLWGAAPTRGLIRATSDHNASMDFADLPALFGATLSQEGLQGFLVEAHPDNACSPIAPPPPAPVNGSVFIALLRRFDCNFDLKVLNAQKAGYGAAVVHNVNSNELLNMVWNSEEIQQQIWIPSVFIGERSSEYLRALFVYEKGARVLLVPDNTFPLGYYLIPFTGIVGLLVLAMGAVMIARCIQHRKRLQRNRLTKEQLKQIPTHDYQKGEGVRGEEGFSHSLPGSEGL

SEQ ID NO: 858059 - protein, 308 aa, Homo sapiens
MHPAAFPLPVVVAAVLWGAAPTRGLIRATSDHNASMDFADLPALFGATLSQEGLQVLNAQKAGYGAAVVHNVNSNELLNMVWNSEEIQQQIWIPSVFIGERSSEYLRALFVYEKGARVLLVPDNTFPLGYYLIPFTGIVGLLVLAMGAVMIARCIQHRKRLQRNRLTKEQLKQIPTHDYQKGDQYDVCAICLDEYEDGDKLRVLPCAHAYHSRCVDPWLTQTRKTCPICKQPVHRGPGDEDQEEETQGQEEGDEGEPRDHPASERTPLLGSSPTLPTSFGSLAPAPLVFPGPSTDPPLSPPSSPVILV

SEQ ID NO: 858060 - protein, 315 aa, Homo sapiens; identical to SEQ ID NO: 858055

SEQ ID NO: 858061 - protein, 145 aa, Homo sapiens
MHPAAFPLPVVVAAVLWGAAPTRGLIRATSDHNASMDFADLPALFGATLSQEGLQGFLVEAHPDNACSPIAPPPPAPVNGSVFIALLRRFDCNFDLKVLNAQKAGYGAAVVHNVNSNELLNMVWNSEEIQQQIWIPSSSLQSSEG

SEQ ID NO: 858062 - protein, 186 aa, Homo sapiens
CLSLLALNSSMFCPDLILPTCLISSTGFVGEGKFLQGFKSLSPGSLWLSEGLDYFLSVPGDQYDVCAICLDEYEDGDKLRVLPCAHAYHSRCVDPWLTQTRKTCPICKQPVHRGPGDEDQEEETQGQEEGDEGEPRDHPASERTPLLGSSPTLPTSFGSLAPAPLVFPGPSTDPPLSPPSSPVILV

SEQ ID NO: 858063 - protein, 171 aa, Homo sapiens
CLSLLALNSSMFCPDLILPTCLISSTGFVGEGKFLQGFKSLSPGSLWLSEGLDYFLSVPGDQYDVCAICLDEYEDGDKLRVLPCAHAYHSRCVDPWLTQTRKTCPICKQPVHRGPGDEDQEEETQGQEEGDEGEPRDHPASERTPLLGSSPTPLPLPLLSWSNNPPHIHLW

SEQ ID NO: 858064 - protein, 350 aa, Homo sapiens [sequence omitted]

SEQ ID NO: 858065 - protein, 350 aa, Homo sapiens [sequence omitted]

SEQ ID NO: 858066 - protein, 319 aa, Homo sapiens
MHPAAFPLPVVVAAVLWGAAPTRGLIRATSDHNASMDFADLPALFGATLSQEGLQGFLVEAHPDNACSPIAPPPPAPVNGSVFIALLRRFDCNFDLKVLNAQKAGYGAAVVHNVNSNELLNMVWNSEEIQQQIWIPSVFIGERSSEYLRALFVYEKGARVLLVPDNTFPLGYYLIPFTGIVGLLVLAMGAVMIARCIQHRKRLQRNRLTKEQLKQIPTHDYQKGDQYDVCAICLDEYEDGDKLRVLPCAHGEALTACPCPSATSSHQVLHLVPLCSLPQPLRGPLAHSDPEDLPHLQAACSSGSWGRRPRGRNSRARGG

SEQ ID NO: 858067 - protein, 195 aa, Homo sapiens [sequence omitted]

SEQ ID NO: 858068 - protein, 319 aa, Homo sapiens; identical to SEQ ID NO: 858066

SEQ ID NO: 858069 - protein, 335 aa, Homo sapiens
MHPAAFPLPVVVAAVLWGAAPTRGLIRATSDHNASMDFADLPALFGATLSQEGLQGFLVEAHPDNACSPIAPPPPAPVNGSVFIALLRRFDCNFDLKVLNAQKAGYGAAVVHNVNSNELLNMVWNSEEIQQQIWIPSVFIGERSSEYLRALFVYEKGARVLLVPDNTFPLGYYLIPFTGIVGLLVLAMGAVMIARCIQHRKRLQRNRLTKEQLKQIPTHDYQKGDQYDVCAICLDEYEDGDKLRVLPCAHAYHSRCVDPWLTQTRKTCPICKQPVHRGPGDEDQEEETQGQEEGDEGEPRDHPASERTPLLGSSPTPLPLPLLSWSNNPPHIHLW

SEQ ID NO: 858070 - protein, 350 aa, Homo sapiens [sequence omitted]

SEQ ID NO: 858071 - protein, 350 aa, Homo sapiens [sequence omitted]

SEQ ID NO: 858072 - protein, 252 aa, Homo sapiens
MHPAAFPLPVVVAAVLWGAAPTRGLIRATSDHNASMDFADLPALFGATLSQEGLQGFLVEAHPDNACSPIAPPPPAPVNGSVFIALLRRFDCNFDLKVLNAQKAGYGAAVVHNVNSNELLNMVWNSEEIQQQIWIPSVFIGERSSEYLRALFVYEKGARVLLVPDNTFPLGYYLIPFTGIVGLLVLAMGAVMIARCIQHRKRLQRNRLTKEQLKQIPTHDYQKGDQYDVCAICPLPLPLLSWSNNPPHIHLW

SEQ ID NO: 858073 - protein, 350 aa, Homo sapiens [sequence omitted]

SEQ ID NO: 858074 - protein, 315 aa, Homo sapiens; identical to SEQ ID NO: 858055

SEQ ID NO: 858075 - protein, 243 aa, Homo sapiens; identical to SEQ ID NO: 858058

SEQ ID NO: 858076 - protein, 308 aa, Homo sapiens; identical to SEQ ID NO: 858059

SEQ ID NO: 858077 - protein, 212 aa, Homo sapiens
  misc_feature (212)..(212): Xaa can be any naturally occurring amino acid
MHPAAFPLPVVVAAVLWGAAPTRGLIRATSDHNASMDFADLPALFGATLSQEGLQGFLVEAHPDNACSPIAPPPPAPVNGSVFIALLRRFDCNFDLKVLNAQKAGYGAAVVHNVNSNELLNMVWNSEEIQQQIWIPSVFIGERSSEYLRALFVYEKGARVLLVPDNTFPLGYYLIPFTGIVGLLVLAMGAVMIARCIQHRKRLQRAIRDRAX

SEQ ID NO: 858078 - protein, 202 aa, Homo sapiens
LDTGHPFPRARVLLVPDNTFPLGYYLIPFTGIVGLLVLAMGAVMIARCIQHRKRLQRNRLTKEQLKQIPTHDYQKGDQYDVCAICLDEYEDGDKLRVLPCAHAYHSRCVDPWLTQTRKTCPICKQPVHRGPGDEDQEEETQGQEEGDEGEPRDHPASERTPLLGSSPTLPTSFGSLAPAPLVFPGPSTDPPLSPPSSPVILV

SEQ ID NO: 858079 - protein, 126 aa, Homo sapiens
MHPAAFPLPVVVAAVLWGAAPTRGLIRATSDHNASMDFADLPALFGATLSQEGLQGFLVEAHPDNACSPIAPPPPAPVNGSVFIALLRRFDCNFDLKVLNAQKAGYGAAVVHNVNPKLLPYPHLSF

SEQ ID NO: 858080 - protein, 131 aa, Homo sapiens
MTIRRDQYDVCAICLDEYEDGDKLRVLPCAHAYHSRCVDPWLTQTRKTCPICKQPVHRGPGDEDQEEETQGQEEGDEGEPRDHPASERTPLLGSSPTLPTSFGSLAPAPLVFPGPSTDPPLSPPSSPVILV

SEQ ID NO: 858081 - protein, 371 aa, Homo sapiens
TSTIVPAPEKRADDWARGPPQRPLGPAKSQRGCSHFQAPHTKDRLDGKAETRGLGPQTGDSRRLGQGPGLPVTISFVDPGTASRRLPFSPPQRRRWRRRNSTRTDRPPAPAEAEAVARSGPGPWAPRAARVMRTEAEAAGPPLEPGDFVQLPVPVIQQLYHWDCGLACSRMVLRYLGQLDDSEFERALQKLQLTRSIWTIDLAYLMHHFGVRHRFCTQTLGVDKGYKNQSFYRKHFDTEETRVNQLFAQAKACKVLVEKCTVSVKDIQAHLAQGHVAIVLVNSGVLHCDLCSSPVKYCCFTPSGHHCFCRTPDYQGHFIVLRGYNRATGCIFYNNPAYADPGMCSTSISNFEEARTSYGTDEDILFVYLDS

SEQ ID NO: 858082 - protein, 240 aa, Homo sapiens
MRTEAEAAGPPLEPGDFVQLPVPVIQQLYHWDCGLACSRMVLRYLGQLDDSEFERALQKLQLTRSIWTIDLAYLMHHFGVRHRFCTQTLGVDKGYKNQSFYRKHFDTEETRVNQLFAQAKACKVLVEKCTVSVKDIQAHLAQGHVAIVLVNSGVLHCDLCSSPVKYCCFTPSGHHCFCRTPDYQGHFIVLRGYNRATGCIFYNNPAYADPGMCSTSISNFEEARTSYGTDEDILFVYLDS

SEQ ID NO: 858083 - protein, 294 aa, Homo sapiens
  misc_feature (6)..(6): Xaa can be any naturally occurring amino acid
EIFPWXCVPGIVEFRHGWGSSITHRYVSSLCPCLNSEAVARSGPGPWAPRAARVMRTEAEAAGPPLEPGDFVQLPVPVIQQLYHWDCGLACSRMVLRYLGQLDDSEFERALQKLQLTRSIWTIDLAYLMHHFGVRHRFCTQTLGVDKGYKNQSFYRKHFDTEETRVNQLFAQAKACKVLVEKCTVSVKDIQAHLAQGHVAIVLVNSGVLHCDLCSSPVKYCCFTPSGHHCFCRTPDYQGHFIVLRGYNRATGCIFYNNPAYADPGMCSTSISNFEEARTSYGTDEDILFVYLDS

SEQ ID NO: 858084 - protein, 296 aa, Homo sapiens
MTGPGGRRNDPWGRQRAREGAHTSKHPTPRTGWTARRRRGAWALRPGTAGGWAKGQDFPSQFHLLIPAPPGDFVQLPVPVIQQLYHWDCGLACSRMVLRYLGQLDDSEFERALQKLQLTRSIWTIDLAYLMHHFGVRHRFCTQTLGVDKGYKNQSFYRKHFDTEETRVNQLFAQAKACKVLVEKCTVSVKDIQAHLAQGHVAIVLVNSGVLHCDLCSSPVKYCCFTPSGHHCFCRTPDYQGHFIVLRGYNRATGCIFYNNPAYADPGMCSTSISNFEEARTSYGTDEDILFVYLDS

SEQ ID NO: 858085 - protein, 193 aa, Homo sapiens
MTGPGGRRNDPWGRQRAREGAHTSKHPTPRTGWTARRRRGAWALRPGTAGGWAKGQDFPSQFHLLIPAPPGDFVQLPVPVIQQLYHWDCGLACSRMVLRYLGQLDDSEFERALQKLQLTRSIWTIDLAYLMHHFGVRHRFCTQTLGVDKGYKNQSFYRKHFDTEETRVNQLFAQAKACKVLVEKCRNVQHQHQ

SEQ ID NO: 858086 - protein, 268 aa, Homo sapiens
TSTIVPAPEKRADDWARGPPQRPLGPAKSQRGCSHFQAPHTKDRLDGKAETRGLGPQTGDSRRLGQGPGLPVTISFVDPGTASRRLPFSPPQRRRWRRRNSTRTDRPPAPAEAEAVARSGPGPWAPRAARVMRTEAEAAGPPLEPGDFVQLPVPVIQQLYHWDCGLACSRMVLRYLGQLDDSEFERALQKLQLTRSIWTIDLAYLMHHFGVRHRFCTQTLGVDKGYKNQSFYRKHFDTEETRVNQLFAQAKACKVLVEKCRNVQHQHQ

SEQ ID NO: 858087 - protein, 371 aa, Homo sapiens; identical to SEQ ID NO: 858081

SEQ ID NO: 858088 - protein, 371 aa, Homo sapiens; identical to SEQ ID NO: 858081

SEQ ID NO: 858089 - protein, 371 aa, Homo sapiens; identical to SEQ ID NO: 858081

SEQ ID NO: 858090 - protein, 371 aa, Homo sapiens; identical to SEQ ID NO: 858081

SEQ ID NO: 858091 - protein, 371 aa, Homo sapiens; identical to SEQ ID NO: 858081

SEQ ID NO: 858092 - protein, 150 aa, Homo sapiens
HVAIVLVNSGVLHCDLCSSPVKYCCFTPSGHHCFCRTPDYQGHFIVLRGYNRATGCIFYNNPAYADRECWVGWVRQSGPHSLFCMPSAHSSHPFNLVWPGPPSLPFPQSPCSSWALVTVATPQAMQANLPQTVPASSTPWPPLPLTPQAP

SEQ ID NO: 858093 - protein, 328 aa, Homo sapiens
TSTIVPAPEKRADDWARGPPQRPLGPAKSQRGCSHFQAPHTKDRLDGKAETRGLGPQTGDSRRLGQGPGLPVTISFVDPGTASRRLPFSPPQRRRWRRRNSTRTDRPPAPAEAEAVARSGPGPWAPRAARVMRTEAEAAGPPLEPGDFVQLPVPVIQQLYHWDCGLACSRMVLRYLGQLDDSEFERALQKLQLTRSIWTIDLAYLMHHFGVRHRFCTQTLGVDKGYKNQSFYRKHFDTEETRVNQLFAQAKACKVLVEKCGHHCFCRTPDYQGHFIVLRGYNRATGCIFYNNPAYADPGMCSTSISNFEEARTSYGTDEDILFVYLDS

SEQ ID NO: 858094 - protein, 371 aa, Homo sapiens; identical to SEQ ID NO: 858081

SEQ ID NO: 858095 - protein, 168 aa, Homo sapiens
  misc_feature (6)..(6): Xaa can be any naturally occurring amino acid
EIFPWXCVPGIVEFRHGWGSSITHRYVSSLCPCLNSEAVARSGPGPWAPRAARVMRTEAEAAGPPLEPGDFVQLPVPVIQQLYHWDCGLACSRMVLRYLGQLDDSEFERALQKLQLTRSIWTIDLAYLMHHFGVRHRFCTQTLGVDKGYKNQVSDQPPGLPMWGHTEV

SEQ ID NO: 858096 - protein, 107 aa, Homo sapiens
DLQRITLPSINRLRHFTNDTILDVFFYNSPTYCQTIVDTVASEMNRIYTLFLQRNPDFKGGVSIAGHSLGLLNIVMDQGDTPTLEEDLKKLQLSEFFDIFEKEKVDK

SEQ ID NO: 858097 - protein, 711 aa, Homo sapiens
MSSVQSQQEQLSQSDPSPSPNSCSSFELIDMDAGSLYEPVSPHWFYCKIIDSKETWIPFNSEDSQQLEEAYSSGKGCNGRVVPTDGGRYDVHLGERMRYAVYWDELASEVRRCTWFYKGDKDNKYVPYSESFSQVLEETYMLAVTLDEWKKKLESPNREIIILHNPKLMVHYQPVAGSDDWGSTPTEQGRPRTVKRGVENISVDIHCGEPLQIDHLVFVVHGIGPACDLRFRSIVQCVNDFRSVSLNLLQTHFKKAQENQQIGRVEFLPVNWHSPLHSTGVDVDLQRITLPSINRLRHFTNDTILDVFFYNSPTYCQTIVDTVASEMNRIYTLFLQRNPDFKGGVSIAGHSLGSLILFDILTNQKDSLGDIDSEKDSLNIVMDQGDTPTLEEDLKKLQLSEFFDIFEKEKVDKEALALCTDRDLQEIGIPLGPRKKILNYFSTRKNSMGIKRPAPQPASGANIPKESEFCSSSNTRNGDYLDVGIGQVSVKYPRLIYKPEIFFAFGSPIGMFLTVRGLKRIDPNYRFPTCKGFFNIYHPFDPVAYRIEPMVVPGVEFEPMLIPHHKGRKRMHLELREGLTRMSMDLKNNLLGSLRMAWKSFTRAPYPALQASETPEETEAEPESTSEKPSDVNTEETSVAVKEEVLPINVGMLNGGQRIDYVLQEKPIESFNEYLFALQSHLCYWESEDTVLLVLKEIYQTQGIFLDQPLQ

SEQ ID NO: 858098 - protein, 615 aa, Homo sapiens [sequence omitted]

SEQ ID NO: 858099 - protein, 201 aa, Homo sapiens [sequence omitted]

SEQ ID NO: 858100 - protein, 130 aa, Homo sapiens
MSMDLKNNLLGSLRMAWKSFTRAPYPALQASETPEETEAEPESTSEKPSDVNTEETSVAVKEEVLPINVGMLNGGQRIDYVLQEKPIESFNEYLFALQSHLCYWESEDTVLLVLKEIYQTQGIFLDQPLQ

SEQ ID NO: 858101 - protein, 122 aa, Homo sapiens
DTCHFLGSKLRVLMVLLSKSYCGNSYDFNYQPPILRFKLLSLLDVKLQSLCIRLWHSLWLPSSCDCSSSPTFFPRRTLRDPSPENPPVCCCNFPLLSCVISCMLPATYSPLGSLEDNLPLWK

SEQ ID NO: 858102 - protein, 711 aa, Homo sapiens; identical to SEQ ID NO: 858097

SEQ ID NO: 858103 - protein, 675 aa, Homo sapiens
MSSVQSQQEQLSQSDPSPSPNSCSSFELIDMDAGSLYEPVSPHWFYCKIIDSKETWIPFNSEDSQQLEEAYSSGKGCNGRVVPTDGGRYDVHLGERMRYAVYWDELASEVRRCTWFYKGDKDNKYVPYSESFSQVLEETYMLAVTLDEWKKKLESPNREIIILHNPKLMVHYQPVAGSDDWGSTPTEQGRPRTVKRGVENISVDIHCGEPLQIDHLVFVVHGIGPACDLRFRSIVQCVNDFRSVSLNLLQTHFKKAQENQQIGRVEFLPVNWHSPLHSTGVDVDLQRITLPSINRLRHFTNDTILDVFFYNSPTYCQTIVDTVASEMNRIYTLFLQRNPDFKGGVSIAGHSLGSLILFDILTNQKDSLGDIDSEKDSLNIVMDQGDTPTLEEDLKKLQLSEFFDIFEKEKVDKEALALCTDRDLQEIGIPLGPRKKILNYFSTRKNSMGIKRPAPQPASGANIPKESEFCSSSNTRNGDYLDVGIGQVSVKYPRLIYKPEIFFAFGSPIGMFLTVRGLKRIDPNYRFPTCKGFFNIYHPFDPVAYRIEPMVVPGVEFEPMLIPHHKGRKRMHLELREGLTRMSMDLKNNLLGSLRMAWKSFTRAPYPALQASETPEETEAEPESTSEKPSAIESFNEYLFALQSHLCYWESEDTVLLVLKEIYQTQGIFLDQPLQ

SEQ ID NO: 858104 - protein, 227 aa, Homo sapiens
MSSVQSQQEQLSQSDPSPSPNSCSSFELIDMDAGSLYEPVSPHWFYCKIIDSKETWIPFNSEDSQQLEEAYSSGKGCNGRVVPTDGGRYDVHLGERMRYAVYWDELASEVRRCTWFYKGDKDNKYVPYSESFSQVLEETYMLAVTLDEWKKKLESPNREIIILHNPKLMVHYQPVAGSDDWGSTPTEQGRPRTVKRGVENISVDIHCGNVNRLFFLTFGCICLLLKL

SEQ ID NO: 858105 - protein, 179 aa, Homo sapiens
MSSVQSQQEQLSQSDPSPSPNSCSSFELIDMDAGSLYEPVSPHWFYCKIIDSKETWIPFNSEDSQQLEEAYSSGKGCNGRVVPTDGGRYDVHLGERMRYAVYWDELASEVRRCTWFYKGDKDNKYVPYSESFSQVLEETYMLAVTLDEWKKKLESPNREIIILHNPKVKQSISLVGIKS

SEQ ID NO: 858106 - protein, 173 aa, Homo sapiens
RTRGSTHASEPMVVPGVEFEPMLIPHHKGRKRMHLELREGLTRMSMDLKNNLLGSLRMAWKSFTRAPYPALQASETPEETEAEPESTSEKPSDVNTEETSVAVKEEVLPINVGMLNGGQRIDYVLQEKPIESFNEYLFALQSHLCYWESEDTVLLVLKEIYQTQGIFLDQPLQ

SEQ ID NO: 858107 - protein, 724 aa, Homo sapiens
RGRAPRSPPPESEMSSVQSQQEQLSQSDPSPSPNSCSSFELIDMDAGSLYEPVSPHWFYCKIIDSKETWIPFNSEDSQQLEEAYSSGKGCNGRVVPTDGGRYDVHLGERMRYAVYWDELASEVRRCTWFYKGDKDNKYVPYSESFSQVLEETYMLAVTLDEWKKKLESPNREIIILHNPKLMVHYQPVAGSDDWGSTPTEQGRPRTVKRGVENISVDIHCGEPLQIDHLVFVVHGIGPACDLRFRSIVQCVNDFRSVSLNLLQTHFKKAQENQQIGRVEFLPVNWHSPLHSTGVDVDLQRITLPSINRLRHFTNDTILDVFFYNSPTYCQTIVDTVASEMNRIYTLFLQRNPDFKGGVSIAGHSLGSLILFDILTNQKDSLGDIDSEKDSLNIVMDQGDTPTLEEDLKKLQLSEFFDIFEKEKVDKEALALCTDRDLQEIGIPLGPRKKILNYFSTRKNSMGIKRPAPQPASGANIPKESEFCSSSNTRNGDYLDVGIGQVSVKYPRLIYKPEIFFAFGSPIGMFLTVRGLKRIDPNYRFPTCKGFFNIYHPFDPVAYRIEPMVVPGVEFEPMLIPHHKGRKRMHLELREGLTRMSMDLKNNLLGSLRMAWKSFTRAPYPALQASETPEETEAEPESTSEKPSDVNTEETSVAVKEEVLPINVGMLNGGQRIDYVLQEKPIESFNEYLFALQSHLCYWESEDTVLLVLKEIYQTQGIFLDQPLQ

SEQ ID NO: 858108 - protein, 704 aa, Homo sapiens
MFSNILCKWQKGAGSSPPASITFLAFTYVLDLYRKSQILNDFPNSASSIDEARSFLRIKIRVGTCYNKNENKTHLTPVSLPDVDIKEVNHCLWLLQPSRNEEPSTLPFSASHRQLFSFFPRSSGGPAPPSPAQCLRKFPRISSLALTDPVSEALADYQKSYVHFFLQQINMWLKKIPPLAHAALSYFIVGQELKTSHLHSDHIIDLKVNKYQLQTMSEQCLLEYFIGVSQAQCMYTHAHIKDNFLFCIYNLQLKNISNRSTLTLWRCEENSLAPAGLKPLFRPLKNIHGQRLQNYGYLFFLRWSLALSPRLECSDVILAHCNLCLLRNWDYRYVPPCPAPFCIFSRDRVSPCWSGWSQTPDLMICPPRPPKVLGLQVEPLHLAAILFSTLISEMVKNPINHNFFLISAELCYRYENKMWHNEEGCIKILKPKVSVVYRMYPGFHRKVFEIVNSTKSKSKEIRFHVGYCFKNCIWNIKGNPYVSKFKKPNIIYKIKFYMIKPSFSYFLKGHQLYNCSRAKFSVLVSCISCYLEQLYLVTWIAFSILLFLLGPYLINRSTGSPMSHRRINCWSQANGSLGASVKELQCFLQEKIQYNCTFTYKKKRHKTDFHPLSIEELYIDKQMEHSIQLKECGESIYPPYLHKVTRYLRENKCYQVPAIVSSQNSQRKLTFIQANPRLLLSTVLQQCLTLLIIFIQGILEYTYS

SEQ ID NO: 858109 - protein, 232 aa, Homo sapiens [sequence omitted]

SEQ ID NO: 858110 - protein, 711 aa, Homo sapiens; identical to SEQ ID NO: 858097

SEQ ID NO: 858111 - protein, 711 aa, Homo sapiens; identical to SEQ ID NO: 858097

SEQ ID NO: 858112 - protein, 451 aa, Homo sapiens
MSSVQSQQEQLSQSDPSPSPNSCSSFELIDMDAGSLYEPVSPHWFYCKIIDSKETWIPFNSEDSQQLEEAYSSGKGCNGRVVPTDGGRYDVHLGERMRYAVYWDELASEVRRCTWFYKGDKDNKYVPYSESFSQVLEETYMLAVTLDEWKKKLESPNREIIILHNPKLMVHYQPVAGSDDWGSTPTEQGRPRTVKRGVENISVDIHCGEPLQIDHLVFVVHGIGPACDLRFRSIVQCVNDFRSVSLNLLQTHFKKAQENQQIGRVEFLPVNWHSPLHSTGVDVDLQRITLPSINRLRHFTNDTILDVFFYNSPTYCQTIVDTVASEMNRIYTLFLQRNPDFKGGVSIAGHSLGSLILFDILTNQKDSLGDIDSEKDSLNIVMDQGDTPTLEEDLKKLQLSEFFDIFEKEKVDKEALALCTDRDLQEIGIPLGPRKKILNYFSTRKNSMVCA

SEQ ID NO: 858113 - protein, 316 aa, Homo sapiens
MSGDTCLCPASGAKPKLSGFKGGGLGNKYVQLNVGGSLYYTTVRALTRHDTMLKAMFSGRMEVLTDKEGWILIDRCGKHFGTILNYLRDDTITLPQNRQEIKELMAEAKYYLIQGLVNMCQSALQDKKDSYQPVCNIPIITSLKEEERLIESSTKPVVKLLYNRSNNKYSYTSNSDDHLLKNIELFDKLSLRFNGRVLFIKDVIGDEICCWSFYGQGRKLAEVCCTSIVYATEKKQTKVEFPEARIYEETLNVLLYETPRVPDNSLLEATSRSRSQASPSEDEETFELRDRVRRIHVKRYSTYDDRQLGHQSTHRD

SEQ ID NO: 858114 - protein, 93 aa, Homo sapiens
SGRSRSRTREKKQTKVEFPEARIYEETLNVLLYETPRVPDNSLLEATSRSRSQASPSEDEETFELRDRVRRIHVKRYSTYDDRQLGHQSTHRD

SEQ ID NO: 858115 - protein, 316 aa, Homo sapiens; identical to SEQ ID NO: 858113

SEQ ID NO: 858116 - protein, 93 aa, Homo sapiens; identical to SEQ ID NO: 858114

SEQ ID NO: 858117 - protein, 316 aa, Homo sapiens; identical to SEQ ID NO: 858113

SEQ ID NO: 858118 - protein, 203 aa, Homo sapiens
MSGDTCLCPASGAKPKLSGFKGGGLGNKYVQLNVGGSLYYTTVRALTRHDTMLKAMFSGRMEVLTDKEGWILIDRCGKHFGTILNYLRDDTITLPQNRQEIKELMAEAKYYLIQGLVNMCQSALQDKKDSYQPVCNIPIITSLKEEERLIESSTKPVVKLLYNRSNNKYSYTSNSDDHLLKNIELVTGTVKINDWLLSIKKKK

SEQ ID NO: 858119 - protein, 126 aa, Homo sapiens
MSGDTCLCPASGAKPKLSGFKGGGLGNKYVQLNVGGSLYYTTVRALTRHDTMLKAMFSGRMEVLTDKEGWILIDRCGKHFGTILNYLRDDTITLPQNRQEIKELMAEAKYYQLLAVCIFQLQAAQG

SEQ ID NO: 858120 - protein, 316 aa, Homo sapiens; identical to SEQ ID NO: 858113

SEQ ID NO: 858121 - protein, 316 aa, Homo sapiens; identical to SEQ ID NO: 858113

SEQ ID NO: 858122 - protein, 83 aa, Homo sapiens
KGYGQVARPGFNRPRQIMSHGRKTVEPVGTAWCWLACPSAEDSKLPAAPTEVAHAWPHIYSLPTPSMLLVGAGWDGGSAQWCL

SEQ ID NO: 858123 - protein, 189 aa, Homo sapiens
MSGDTCLCPASGAKPKLSGFKGGGLGNKYVQLNVGGSLYYTTVRALTRHDTMLKAMFSGRMEVLTDKEGWILIDRCGKHFGTILNYLRDDTITLPQNRQEIKELMAEAKYYLIQGLVNMCQSALQDKKDSYQPVCNIPIITSLKEEERLIESSTKPVVKLLYNRSNNKYSYTSNSWLCAFFNSKQPRGK

SEQ ID NO: 858124 - protein, 550 aa, Homo sapiens
MPQRGHPSQEGLWALPSLPMAHGPKPETEGLLDLSFLTEEEQEAIAGVLQRDARLRQLEEGRVSKLRASVADPGQLKILTGDWFQEARSQRHHNAHFGSDLVRASMRRKKSTRGDQAPGHDREAEAAVKEKEEGPEPRLTIDEAPQERLRETEASDPEEASQAQEDPGQGDQQVCAEEADPELEPASGGEQEPRPQQAQTKAASQILENGEEAPGPDPSLDRMLSSSSSVSSLNSSTLSGSQMSLSGDAEAVQVRGSVHFALHYEPGAAELRVHVIQCQGLAAARRRRSDPYVKSYLLPDKQSKRKTAVKKRNLNPVFNETLRYSVPQAELQGRVLSLSVWHRESLGRNIFLGEVEVPLDTWDWGSEPTWLPLQPRVPPSPDDLPSRGLLALSLKYVPAGSEGAGLPPSGELHFWVKEARDLLPLRAGSLDTYVQCFVLPDDSRASRQRTRVVRRSLSPVFNHTMVYDGFGPADLRQACAELSLWDHGALANRQLGGTRLSLGTGSSYGLQVPWMDSTPEEKQLWQALLEQPCEWVDGLLPLRTNLAPRT

SEQ ID NO: 858125 - protein, 543 aa, Homo sapiens [sequence omitted]

SEQ ID NO: 858126 - protein, 590 aa, Homo sapiens
MPLSAGQMLSFRSHCGSSVCPAGAQPQLMPQRGHPSQEGLWALPSLPMAHGPKPETEGLLDLSFLTEEEQEAIAGVLQRDARLRQLEEGRVSKLRASVADPGQLKILTGDWFQEARSQRHHNAHFGSDLVRASMRRKKSTRGDQAPGHDREAEAAVKEKEEGPEPRLTIDEAPQERLRETEGPDFPSPSVPLKASDPEEASQAQEDPGQGDQQVCAEEADPELEPASGGEQEPRPQQAQTKAASQILENGEEAPGPDPSLDRMLSSSSSVSSLNSSTLSGSQMSLSGDAEAVQVRGSVHFALHYEPGAAELRVHVIQCQGLAAARRRRSDPYVKSYLLPDKQSKRKTAVKKRNLNPVFNETLRYSVPQAELQGRVLSLSVWHRESLGRNIFLGEVEVPLDTWDWGSEPTWLPLQPRVPPSPDDLPSRGLLALSLKYVPAGSEGAGLPPSGELHFWVKEARDLLPLRAGSLDTYVQCFVLPDDSRASRQRTRVVRRSLSPVFNHTMVYDGFGPADLRQACAELSLWDHGALANRQLGGTRLSLGTGSSYGLQVPWMDSTPEEKQLWQALLEQPCEWVDGLLPLRTNLAPRT

SEQ ID NO: 858127 - protein, 663 aa, Homo sapiens
MPQRGHPSQEGLWALPSLPMAHGPKPETEGLLDLSFLTEEEQEAIAGVLQRDARLRQLEEGRVSKLRASVADPGQLKILTGDWFQEARSQRHHNAHFGSDLVRASMRRKKSTRGDQAPGHDREAEAAVKEKEEGPEPRLTIDEAPQERLRETEGPDFPSPSVPLKASDPEEASQAQEDPGQGDQQVCAEEADPELEPASGGEQEPRPQQAQTKAASQILENGEEAPGPDPSLDRMLSSSSSVSSLNSSTLSGSQMSLSGDAEAVQVRGSVHFALHYEPGAAELRVHVIQCQGLAAARRRRSDPYVKSYLLPDKQSKRKTAVKKRNLNPVFNETLRYSVPQAELQGRVLSLSVWHRESLGRNIFLGEVEVPLDTWDWGSEPTWLPLQPRVRQPGRVGRPAARVSCIYPTRLSRSPLTPRLRQTSPQPLNLMAPGEARPATAPSPRALGPLGSAPAGPAVSSSRTPSGSADPTLLRPLSISPCSTISRLSQVPPSPDDLPSRGLLALSLKYVPAGSEGAGLPPSGELHFWVKEARDLLPLRAGSLDTYVQCFVLPDDSRASRQRTRVVRRSLSPVFNHTMVYDGFGPADLRQACAELSLWDHGALANRQLGGTRLSLGTGSSYGLQVPWMDSTPEEKQLWQALLEQPCEWVDGLLPLRTNLAPRT

SEQ ID NO: 858128 - protein, 423 aa, Homo sapiens
MPQRGHPSQEGLWALPSLPMAHGPKPETEGLLDLSFLTEEEQEAIAGVLQRDARLRQLEEGRVSKLRASVADPGQLKILTGDWFQEARSQRHHNAHFGSDLVRASMRRKKSTRGDQAPGHDREAEAAVKEKEEGPEPRLTIDEAPQERLRETEGPDFPSPSVPLKASDPEEASQAQEDPGQGDQQVCAEEADPELEPASGGEQEPRPQQAQTKAASQILENGEEAPGPDPSLDRMLSSSSSVSSLNSSTLSGSQMSLSGDAEAVQVRGSVHFALHYEPGAAELRVHVIQCQGLAAARRRRSDPECPAGQAGRGCHSPAHHSQGLGLLVLIFKMGTTALLGGVRLSETIPVKRLARGLARVRDGGWGSPQAGEKALGGPLLTSGSHLPSYVKSYLLPDKQSKRKTAVKKRNLNPVFNETLRVRL

SEQ ID NO: 858129 - protein, 647 aa, Homo sapiens
MPQRGHPSQEGLWALPSLPMAHGPKPETEGLLDLSFLTEEEQEAIAGVLQRDARLRQLEEGRVSKLRASVADPGQLKILTGDWFQEARSQRHHNAHFGSDLVRASMRRKKSTRGDQAPGHDREAEAAVKEKEEGPEPRLTIDEAPQERLRETEGPDFPSPSVPLKASDPEEASQAQEDPGQGDQQVCAEEADPELEPASGGEQEPRPQQAQTKAASQILENGEEAPGPDPSLDRMLSSSSSVSSLNSSTLSGSQMSLSGDAEAVQVRGSVHFALHYEPGAAELRVHVIQCQGLAAARRRRSDPECPAGQAGRGCHSPAHHSQGLGLLVLIFKMGTTALLGGVRLSETIPVKRLARGLARVRDGGWGSPQAGEKALGGPLLTSGSHLPSYVKSYLLPDKQSKRKTAVKKRNLNPVFNETLRYSVPQAELQGRVLSLSVWHRESLGRNIFLGEVEVPLDTWDWGSEPTWLPLQPRVPPSPDDLPSRGLLALSLKYVPAGSEGAGLPPSGELHFWVKEARDLLPLRAGSLDTYVQCFVLPDDSRASRQRTRVVRRSLSPVFNHTMVYDGFGPADLRQACAELSLWDHGALANRQLGGTRLSLGTGSSYGLQVPWMDSTPEEKQLWQALLEQPCEWVDGLLPLRTNLAPRT

SEQ ID NO: 858130 - protein, 234 aa, Homo sapiens
MAPGEARPATAPSPRALGPLGSAPAGPAVSSSRTPSGSADPTLLRPLSISPCSTISPPLQVPPSPDDLPSRGLLALSLKYVPAGSEGAGLPPSGELHFWVKEARDLLPLRAGSLDTYVQCFVLPDDSRASRQRTRVVRRSLSPVFNHTMVYDGFGPADLRQACAELSLWDHGALANRQLGGTRLSLGTGSSYGLQVPWMDSTPEEKQLWQALLEQPCEWVDGLLPLRTNLAPRT

SEQ ID NO: 858131 - protein, 225 aa, Homo sapiens
DDTLFVRFDIDATSPRKDPRAPWIEQEGPEYWDRETQISKSNTQTYRAHSPVPPSPDDLPSRGLLALSLKYVPAGSEGAGLPPSGELHFWVKEARDLLPLRAGSLDTYVQCFVLPDDSRASRQRTRVVRRSLSPVFNHTMVYDGFGPADLRQACAELSLWDHGALANRQLGGTRLSLGTGSSYGLQVPWMDSTPEEKQLWQALLEQPCEWVDGLLPLRTNLAPRT

SEQ ID NO: 858132 - protein, 543 aa, Homo sapiens [sequence omitted]

SEQ ID NO: 858133 - protein, 286 aa, Homo sapiens
MQAGTGPEVLGSAARGAGATCEGVLPYWTPTGSSVCPAGAQPQLMPQRGHPSQEGLWALPSLPMAHGPKPETEGLLDLSFLTEEEQEAIAGVLQRDARLRQLEEGRVSKLRASVADPGQLKILTGDWFQEARSQRHHNAHFGSDLVRASMRRKKSTRGDQAPGHDREAEAAVKEKEEGPEPRLTIDEAPQERLRETEGPDFPSPSVPLKASDPEEASQAQEDPGQGDQQVCAEEADPELEPASGGEQEPRPQQAQVGGSGPWLLSTSGADSGRGALLPRAASRPRP

SEQ ID NO: 858134 - protein, 606 aa, Homo sapiens
MQAGTGPEVLGSAARGAGATCEGVLPYWTPTGSSVCPAGAQPQLMPQRGHPSQEGLWALPSLPMAHGPKPETEGLLDLSFLTEEEQEAIAGVLQRDARLRQLEEGRVSKLRASVADPGQLKILTGDWFQEARSQRHHNAHFGSDLVRASMRRKKSTRGDQAPGHDREAEAAVKEKEEGPEPRLTIDEAPQERLRETEGPDFPSPSVPLKASDPEEASQAQEDPGQGDQQVCAEEADPELEPASGGEQEPRPQQAQTKAASQILENGEEAPGPDPSLDRMLSSSSSVSSLNSSTLSGSQMSLSGDAEAVQVRGSVHFALHYEPGAAELRVHVIQCQGLAAARRRRSDPYVKSYLLPDKQSKRKTAVKKRNLNPVFNETLRYSVPQAELQGRVLSLSVWHRESLGRNIFLGEVEVPLDTWDWGSEPTWLPLQPRVPPSPDDLPSRGLLALSLKYVPAGSEGAGLPPSGELHFWVKEARDLLPLRAGSLDTYVQCFVLPDDSRASRQRTRVVRRSLSPVFNHTMVYDGFGPADLRQACAELSLWDHGALANRQLGGTRLSLGTGSSYGLQVPWMDSTPEEKQLWQALLEQPCEWVDGLLPLRTNLAPRT

SEQ ID NO: 858135 - protein, 765 aa, Homo sapiens
MPQRGHPSQEGLWALPSLPMAHGPKPETEGLLDLSFLTEEEQEAIAGVLQRDARLRQLEEGRVSKLRASVADPGQLKILTGDWFQEARSQRHHNAHFGSDLVRASMRRKKSTRGDQAPGHDREAEAAVKEKEEGPEPRLTIDEAPQERLRETEGPDFPSPSVPLKASDPEEASQAQEDPGQGDQQVCAEEADPELEPASGGEQEPRPQQAQTKAASQILENGEEAPGPDPSLDRMLSSSSSVSSLNSSTLSGSQMSLSGDAEAVQVRGSVHFALHYEPGAAELRVHVIQCQGLAAARRRRSDPYVKSYLLPDKQSKRKTAVKKRNLNPVFNETLRVRLRPRCGSPLMNWTPPSCGARWQGQPVTSLPGGSAEGPINSLSSVVSLVVGVVIVQVPINALRGSPEFHHGRNAVGPASANSRSIYAGHQQCSTKLTSCPQYSVPQAELQGRVLSLSVWHRESLGRNIFLGEVEVPLDTWDWGSEPTWLPLQPRVRQPGRVGRPAARVSCIYPTRLSRSPLHPAFDRTSPQPLNLMAPGEARPATAPSPRALGPLGSAPAGPAVSSSRTPSGSADPTLLRPLSISPCSTISRLSQVPPSPDDLPSRGLLALSLKYVPAGSEGAGLPPSGELHFWVKEARDLLPLRAGSLDTYVQCFVLPDDSRASRQRTRVVRRSLSPVFNHTMVYDGFGPADLRQACAELSLWDHGALANRQLGGTRLSLGTGSSYGLQVPWMDSTPEEKQLWQALLEQPCEWVDGLLPLRTNLAPRT

SEQ ID NO: 858136 - protein, 509 aa, Homo sapiens
MPQRGHPSQEGLWALPSLPMAHGPKPETEGLLDLSFLTEEEQEAIAGVLQRDARLRQLEEGRVSKLRASVADPGQLKILTGDWFQEARSQRHHNAHFGSDLVRASMRRKKSTRGDQAPGHDREAEAAVKEKEEGPEPRLTIDEAPQERLRETEGPDFPSPSVPLKASDPEEASQAQEDPGQGDQQVCAEEADPELEPASGGEQEPRPQQAQTKAASQILENGEEAPGPDPSLDRMLSSSSSVSSLNSSTLSGSQMSLSGDAEAVQVRGSVHFALHYEPGAAELRVHVIQCQGLAAARRRRSDPYVKSYLLPDKQSKRKTAVKKRNLNPVFNETLRVPPSPDDLPSRGLLALSLKYVPAGSEGAGLPPSGELHFWVKEARDLLPLRAGSLDTYVQCFVLPDDSRASRQRTRVVRRSLSPVFNHTMVYDGFGPADLRQACAELSLWDHGALANRQLGGTRLSLGTGSSYGLQVPWMDSTPEEKQLWQALLEQPCEWVDGLLPLRTNLAPRT

SEQ ID NO: 858137 - protein, 234 aa, Homo sapiens
MAPGEARPATAPSPRALGPLGSAPAGPAVSSSRTPSGSADPTLLRPLSISPCSTISRLSQVPPSPDDLPSRGLLALSLKYVPAGSEGAGLPPSGELHFWVKEARDLLPLRAGSLDTYVQCFVLPDDSRASRQRTRVVRRSLSPVFNHTMVYDGFGPADLRQACAELSLWDHGALANRQLGGTRLSLGTGSSYGLQVPWMDSTPEEKQLWQALLEQPCEWVDGLLPLRTNLAPRT

SEQ ID NO: 858138 - protein, 64 aa, Homo sapiens
MPGHLPHSFVLPDDSRASRQRTRVVRRSLSPVFNHTMVYDGFGPADLRQACAELSLWDHGALAN

SEQ ID NO: 858139 - protein, 778 aa, Homo sapiens
PEKKAVPGRPAEGPGAGLVTLPGQPITPGFISGPALLPHISPPLVHFARRSGWEHRHFRSWSRHCRRHFVSVEKEASVAAGSGRRSPARRRRFIPEVPPVSSPIPPPRSACGEAGAAREPGRGRGVGREAGYPERLQLQLQRTSEGGRGAMSEQTPAEAGAAGAREDACRDYQSSLEDLTFNSKPHINMLTILAEENLPFAKEIVSLIEAQTAKAPSSEKLPVMYLMDSIVKNVGREYLTAFTKNLVATFICVFEKVDENTRKSLFKLRSTWDEIFPLKKLYALDVRVNSLDPAWPIKPLPPNVNTSSIHVNPKFLNKSPEEPSTPGTVVSSPSISTPPIVPDIQKNLTQEQLIRQQLLAKQKQLLELQQKKLELELEQAKAQLAVSLSVQQETSNLGPGSAPSKLHVSQIPPMAVKAPHQVPVQSEKSRPGPSLQIQDLKGTNRDPRLNRISQHSHGKDQSHRKEFLMNTLNQSDTKTSKTIPSEKLNSSKQEKSKSGEKITKKELDQLDSKSKSKSKSPSPLKNKLSHTKDLKNQESESMRLSDMNKRDPRLKKHLQDKTDGKDDDVKEKRKTAEKKDKDEHMKSSEHRLAGSRNKIINGIVQKQDTITEESEKQGTKPGRSSTRKRSRSRSPKSRSPIIHSPKRRDRRSPKRRQRSMSPTSTPKAGKIRQSGAKQSHMEEFTPPSREDRNAKRSTKQDIRDPRRMKKTEEERPQETTNQHSTKSGTEPKENVENWQSSKSAKRWKSGWEENKSLQQVDEHSKPPHLRHQGELVKH

SEQ ID NO: 858140 - protein, 1705 aa, Homo sapiens
PEKKAVPGRPAEGPGAGLVTLPGQPITPGFISGPALLPHISPPLVHFARRSGWEHRHFRSWSRHCRRHFVSVEKEASVAAGSGRRSPARRRRFIPEVPPVSSPIPPPRSACGEAGAAREPGRGRGVGREAGYPERLQLQLQRTSEGGRGAMSEQTPAEAGAAGAREDACRDYQSSLEDLTFNSKPHINMLTILAEENLPFAKEIVSLIEAQTAKAPSSEKLPVMYLMDSIVKNVGREYLTAFTKNLVATFICVFEKVDENTRKSLFKLRSTWDEIFPLKKLYALDVRVNSLDPAWPIKPLPPNVNTSSIHVNPKFLNKSPEEPSTPGTVVSSPSISTPPIVPDIQKNLTQEQLIRQQLLAKQKQLLELQQKKLELELEQAKAQLAVSLSVQQETSNLGPGSAPSKLHVSQIPPMAVKAPHQVPVQSEKSRPGPSLQIQDLKGTNRDPRLNRISQHSHGKDQSHRKEFLMNTLNQSDTKTSKTIPSEKLNSSKQEKSKSGEKITKKELDQLDSKSKSKSKSPSPLKNKLSHTKDLKNQESESMRLSDMNKRDPRLKKHLQDKTDGKDDDVKEKRKTAEKKDKDEHMKSSEHRLAGSRNKIINGIVQKQDTITEESEKQGTKPGRSSTRKRSRSRSPKSRSPIIHSPKRRDRRSPKRRQRSMSPTSTPKAGKIRQSGAKQSHMEEFTPPSREDRNAKRSTKQDIRDPRRMKKTEEERPQETTNQHSTKSGTEPKENVENWQSSKSAKRWKSGWEENKSLQQVDEHSKPPHLRHRESWSSTKGILSPRAPKQQQHRLSVDANLQIPKELTLASKRELLQKTSERLASGEITQDDFLVVVHQIRQLFQYQEGVREEQRSPFNDRFPLKRPRYEDSDKPFVDSPASRFAGLDTNQRLTALAEDRPLFDGPSRPSVARDGPTKMIFEGPNKLSPRIDGPPTPASLRFDGSPGQMGGGGPLRFEGPQGQLGGGCPLRFEGPPGPVGTPLRFEGPIGQAGGGGFRFEGSPGLRFEGSPGGLRFEGPGGQPVGGLRFEGHRGQPVGGLRFEGPHGQPVGGLRFDNPRGQPVGGLRFEGGHGPSGAAIRFDGPHGQPGGGIRFEGPLLQQGVGMRFEGPHGQSVAGLRFEGQHNQLGGNLRFEGPHGQPGVGIRFEGPLVQQGGGMRFEGPSVPGGGLRIEGPLGQGGPRFEGCHALRFDGQPGQPSLLPRFDGLHGQPGPRFERTPGQPGPQRFDGPPGQQVQPRFDGVPQRFDGPQHQQASRFDIPLGLQGTRFDNHPSQRLESVSFNQTGPYNDPPGNAFNAPSQGLQFQRHEQIFDSPQGPNFNGPHGPGNQSFSNPLNRASGHYFDEKNLQSSQFGNFGNIPAPMTVGNIQASQQVLSGVAQPVAFGQGQQFLPVHPQNPGFVQNPSGALPKAYPDNHLSQVDVNELFSKLLKTGILKLSQTDSATTQVSEVTAQPPPEEEEDQNEDQDVPDLTNFTVEELKQRYDSVINRLYTGIQCYSCGMRFTTSQTDVYADHLDWHYRQNRTEKDVSRKVTHRRWYYSLTDWIEFEEIADLEERAKSQFFEKVHEEVVLKTQEAAKEKEFQSVPAGPAGAVESCEICQEQFEQYWDEEEEEWHLKNAIRVDGKIYHPSCYEDYQNTSSFDCTPSPSKTPVENPLNIMLNIVKNELQEPCDSPKVKEERIDTPPACTEESIATPSEIKTENDTVESV

SEQ ID NO: 858141 - protein, 1705 aa, Homo sapiens; identical to SEQ ID NO: 858140

SEQ ID NO: 858142 - protein, 1705 aa, Homo sapiens; identical to SEQ ID NO: 858140

SEQ ID NO: 858143 - protein, 225 aa, Homo sapiens
PEKKAVPGRPAEGPGAGLVTLPGQPITPGFISGPALLPHISPPLVHFARRSGWEHRHFRSWSRHCRRHFVSVEKEASVAAGSGRRSPARRRRFIPEVPPVSSPIPPPRSACGEAGAAREPGRGRGVGREAGYPERLQLQLQRTSEGGRGAMSEQTPAEAGAAGAREDACRDYQSSLEDLTFNSKPHINMLTILAEENLPFAKEIVSLIEAQTAKVFIHPAASYYF

SEQ ID NO: 858144 - protein, 1705 aa, Homo sapiens; identical to SEQ ID NO: 858140

SEQ ID NO: 858145 - protein, 214 aa, Homo sapiens
PEKKAVPGRPAEGPGAGLVTLPGQPITPGFISGPALLPHISPPLVHFARRSGWEHRHFRSWSRHCRRHFVSVEKEASVAAGSGRRSPARRRRFIPEVPPVSSPIPPPRSACGEAGAAREPGRGRGVGREAGYPERLQLQLQRTSEGGRGAMSEQTPAEAGAAGAREDACRDYQSSLEDLTFNSKPHINMLTILAEECFSLPLDRSGPLPPYISL

SEQ ID NO: 858146 - protein, 1705 aa, Homo sapiens; identical to SEQ ID NO: 858140

SEQ ID NO: 858147 - protein, 987 aa, Homo sapiens
HRCNVRDSPTEENKGGLKKKPLLSDAELTYYEHKAKLKRTQVQHSFPRLDLLDPDIFDYPLTDALLSGIECEPSKSKHASRNSGAQFDRKEQFSERARRLSPISGSRTYAENLSPHEGRRRHDEQVSAKGVREEQRSPFNDRFPLKRPRYEDSDKPFVDSPASRFAGLDTNQRLTALAEDRPLFDGPSRPSVARDGPTKMIFEGPNKLSPRIDGPPTPASLRFDGSPGQMGGGGPLRFEGPQGQLGGGCPLRFEGPPGPVGTPLRFEGPIGQAGGGGFRFEGSPGLRFEGSPGGLRFEGPGGQPVGGLRFEGHRGQPVGGLRFEGPHGQPVGGLRFDNPRGQPVGGLRFEGGHGPSGAAIRFDGPHGQPGGGIRFEGPLLQQGVGMRFEGPHGQSVAGLRFEGQHNQLGGNLRFEGPHGQPGVGIRFEGPLVQQGGGMRFEGPSVPGGGLRIEGPLGQGGPRFEGCHALRFDGQPGQPSLLPRFDGLHGQPGPRFERTPGQPGPQRFDGPPGQQVQPRFDGVPQRFDGPQHQQASRFDIPLGLQGTRFDNHPSQRLESVSFNQTGPYNDPPGNAFNAPSQGLQFQRHEQIFDSPQGPNFNGPHGPGNQSFSNPLNRASGHYFDEKNLQSSQFGNFGNIPAPMTVGNIQASQQVLSGVAQPVAFGQGQQFLPVHPQNPGFVQNPSGALPKAYPDNHLSQVDVNELFSKLLKTGILKLSQTDSATTQVSEVTAQPPPEEEEDQNEDQDVPDLTNFTVEELKQRYDSVINRLYTGIQCYSCGMRFTTSQTDVYADHLDWHYRQNRTEKDVSRKVTHRRWYYSLTDWIEFEEIADLEERAKSQFFEKVHEEVVLKTQEAAKEKEFQSVPAGPAGAVESCEICQEQFEQYWDEEEEEWHLKNAIRVDGKIYHPSCYEDYQNTSSFDCTPSPSKTPVENPLNIMLNIVKNELQEPCDSPKVKEERIDTPPACTEESIATPSEIKTENDTVESV

SEQ ID NO: 858148 - protein, 225 aa, Homo sapiens; identical to SEQ ID NO: 858143

SEQ ID NO: 858149 - protein, 610 aa, Homo sapiens
MQYSHHCEHLLERLNKQREAGFLCDCTIVIGEFQFKAHRNVLASFSEYFGAIYRSTSENNVFLDQSQVKADGFQKLLEFIYTGTLNLDSWNVKEIHQAADYLKVEEVVTKCKIKMEDFAFIANPSSTEISSITGNIELNQQTCLLTLRDYNNREKSEVSTDLIQANPKQGALAKKSSQTKKKKKAFNSPKTGQNKTVQYPSDILENASVELFLDANKLPTPVVEQVAQINDNSELELTSVVENTFPAQDIVHTVTVKRKRGKSQPNCALKEHSMSNIASVKSPYEAENSGEELDQRYSKAKPMCNTCGKVFSEASSLRRHMRIHKGVKPYVCHLCGKAFTQCNQLKTHVRTHTGEKPYKCELCDKGFAQKCQLVFHSRMHHGEEKPYKCDVCNLQFATSSNLKIHARKHSGEKPYVCDRCGQRFAQASTLTYHVRRHTGEKPYVCDTCGKAFAVSSSLITHSRKHTGEKPYICGICGKSFISSGELNKHFRSHTGERPFICELCGNSYTDIKNLKKHKTKVHSGADKTLDSSAEDHTLSEQDSIQKSPLSETMDVKPSDMTLPLALPLGTEDHHMLLPVTDTQSPTSDTLLRSTVNGYSEPQLIFLQQLY

SEQ ID NO: 858150 - protein, 337 aa, Homo sapiens [sequence omitted]

SEQ ID NO: 858151 - protein, 582 aa, Homo sapiens
MQYSHHCEHLLERLNKQREAGFLCDCTIVIGEFQFKAHRNVLASFSEYFGAIYRSTSENNVFLDQSQVKADGFQKLLEFIYTGTLNLDSWNVKEIHQAADYLKVEEVVTKCKIKMEDFAFIANPSSTEISSITGNIELNQQTCLLTLRDYNNREKSEVSTDLIQANPKQGALAKKSSQTKKKKKAFNSPKTGQNKTVQYPSDILENASVELFLDANKLPTPVVEQVAQINDNSELELTSVVENTFPAQDIVHTVTVKRKRGKSQPNCALKEHSMSNIASVKSPYEAENSGEELDQRYSKAKPMCNTCGKVFSEASSLRRHMRIHKGVKPYVCHLCGKAFTQCNQLKTHVRTHTGEKPYKCELCDKGFAQKCQLVFHSRMHHGEEKPYKCDVCNLQFATSSNLKIHARKHSGEKPYVCDRCGQRFAQASTLTYHVRRHTGEKPYVCDTCGKAFAVSSSLITHSRKHTGERPFICELCGNSYTDIKNLKKHKTKVHSGADKTLDSSAEDHTLSEQDSIQKSPLSETMDVKPSDMTLPLALPLGTEDHHMLLPVTDTQSPTSDTLLRSTVNGYSEPQLIFLQQLY

SEQ ID NO: 858152 - protein, 636 aa, Homo sapiens
LGYRGRCDVSPLGCYRSRVKFHSDIKMQYSHHCEHLLERLNKQREAGFLCDCTIVIGEFQFKAHRNVLASFSEYFGAIYRSTSENNVFLDQSQVKADGFQKLLEFIYTGTLNLDSWNVKEIHQAADYLKVEEVVTKCKIKMEDFAFIANPSSTEISSITGNIELNQQTCLLTLRDYNNREKSEVSTDLIQANPKQGALAKKSSQTKKKKKAFNSPKTGQNKTVQYPSDILENASVELFLDANKLPTPVVEQVAQINDNSELELTSVVENTFPAQDIVHTVTVKRKRGKSQPNCALKEHSMSNIASVKSPYEAENSGEELDQRYSKAKPMCNTCGKVFSEASSLRRHMRIHKGVKPYVCHLCGKAFTQCNQLKTHVRTHTGEKPYKCELCDKGFAQKCQLVFHSRMHHGEEKPYKCDVCNLQFATSSNLKIHARKHSGEKPYVCDRCGQRFAQASTLTYHVRRHTGEKPYVCDTCGKAFAVSSSLITHSRKHTGEKPYICGICGKSFISSGELNKHFRSHTGERPFICELCGNSYTDIKNLKKHKTKVHSGADKTLDSSAEDHTLSEQDSIQKSPLSETMDVKPSDMTLPLALPLGTEDHHMLLPVTDTQSPTSDTLLRSTVNGYSEPQLIFLQQLY

SEQ ID NO: 858153 - protein, 337 aa, Homo sapiens [sequence omitted]

SEQ ID NO: 858154 - protein, 610 aa, Homo sapiens; identical to SEQ ID NO: 858149

SEQ ID NO: 858155 - protein, 234 aa, Homo sapiens
MQYSHHCEHLLERLNKQREAGFLCDCTIVIGEFQFKAHRNVLASFSEYFGAIYRSTSENNVFLDQSQVKADGFQKLLEFIYTGTLNLDSWNVKEIHQAADYLKVEEVVTKCKIKKKKKKKEMMLEGAMAPHEKRFSETHMSGEQRGGPSERRGNNVTLGGKPPRGESRGREIHGGVGEIYDTNEKREAAGGEPRTGVWEKQFRERRTSAESTTTGGILSTGGVPRGRARRYQIE

SEQ ID NO: 858156 - protein, 496 aa, Homo sapiens
MEDFAFIANPSSTEISSITGNIELNQQTCLLTLRDYNNREKSEVSTDLIQANPKQGALAKKSSQTKKKKKAFNSPKTGQNKTVQYPSDILENASVELFLDANKLPTPVVEQVAQINDNSELELTSVVENTFPAQDIVHTVTVKRKRGKSQPNCALKEHSMSNIASVKSPYEAENSGEELDQRYSKAKPMCNTCGKVFSEASSLRRHMRIHKGVKPYVCHLCGKAFTQCNQLKTHVRTHTGEKPYKCELCDKGFAQKCQLVFHSRMHHGEEKPYKCDVCNLQFATSSNLKIHARKHSGEKPYVCDRCGQRFAQASTLTYHVRRHTGEKPYVCDTCGKAFAVSSSLITHSRKHTGEKPYICGICGKSFISSGELNKHFRSHTGERPFICELCGNSYTDIKNLKKHKTKVHSGADKTLDSSAEDHTLSEQDSIQKSPLSETMDVKPSDMTLPLALPLGTEDHHMLLPVTDTQSPTSDTLLRSTVNGYSEPQLIFLQQLY

SEQ ID NO: 858157 - protein, 327 aa, Homo sapiens
MKPNFSLRLRIFNLNCWGIPYLSKHRADRMRRLGDFLNQESFDLALLEEVWSEQDFQYLRQKLSPTYPAAHHFRSGIIGSGLCVFSKHPIQELTQHIYTLNGYPYMIHHGDWFSGKAVGLLVLHLSGMVLNAYVTHLHAEYNRQKDIYLAHRVAQAWELAQFIHHTSKKADVVLLCGDLNMHPEDLGCCLLKEWTGLHDAYLETRDFKGSEEGNTMVPKNCYVSQQELKPFPFGVRIDYVLYKAVSGFYISCKSFETTTGFDPHSGTPLSDHEALMATLFCEAQPPTAEPQLYPRTSREVAVDVCAKGGLDGAGSGHGSGSLVGHLR

SEQ ID NO: 858158 - protein, 465 aa, Homo sapiens [sequence omitted]

SEQ ID NO: 858159 - protein, 546 aa, Homo sapiens
MKPNFSLRLRIFNLNCWGIPYLSKHRADRMRRLGDFLNQESFDLALLEEVWSEQDFQYLRQKLSPTYPAAHHFRSGIIGSGLCVFSKHPIQELTQHIYTLNGYPYMIHHGDWFSGKAVGLLVLHLSGMVLNAYVTHVVKLAVPRAGTCSPVLGQRDGTSLALIPGDEVWGQDLIRKQWARLIHCIPNTMPSDRHRLDSDITPGTLSLICCDLIYLAQLHAEYNRQKDIYLAHRVAQAWELAQFIQCVSLGLKWEVGWDPGAEGEQGPSHGEELVMEELPPHQPGSPSHTSKKADVVLLCGDLNMHPEDLGCCLLKEWTGLHDAYLETRDFKGSEEGNTMVPKNCYVSQQELKPFPFGVRIDYVLYKAVSGFYISCKSFETTTGFDPHSGTPLSDHEALMATLFVRHSPPQQNPSSTHGPAERSPLMCVLKEAWTELGLGMAQARWWATFASYVIGLGLLLLALLCVLAAGGGAGEAAILLWTPSVGLVLWAGAFYLFHVQEVNGLYRAQAELQHVLGRAREAQDLGPEPQPALLLGQQEGDRTKEQ

SEQ ID NO: 858160 - protein, 423 aa, Homo sapiens [sequence omitted]

SEQ ID NO: 858161 - protein, 138 aa, Homo sapiens
MCHSRSCHPTMTILQAPTPAPSTIPGPRRGSGPEIFTFDPLPEPAAAPAGRPSASRGHRKRSRRVLYPRVVSIAEVGIRGVRCPGVTGERPDSRGLDLTCLLFCLPLGPAPAASRGTEPSQKASLSAAHHRLLPDPDG

SEQ ID NO: 858162 - protein, 117 aa, Homo sapiens
RGTKEARGTKEGPSASRGHRKRSRRVLYPRVVRRQLPVEEPNPAKRLLFLLLTIVFCQILMAEEGVPAPLPPEDAPNAASLAPTPVSPVLEPFNLTSEPSDYALDLSTFLQQHPAAF

SEQ ID NO: 858163 - protein, 120 aa, Homo sapiens
MCHSRSCHPTMTILQAPTPAPSTIPGPRRGSGPEIFTFDPLPEPAAAPAGRPSASRGHRKRSRRVLYPRVVRRQLPVEEPNPAKRLLFLLLTIVFCLQRTPLTPHPWRPPLCPPSSSPLI

SEQ ID NO: 858164 - protein, 156 aa, Homo sapiens
MCHSRSCHPTMTILQAPTPAPSTIPGPRRGSGPEIFTFDPLPEPAAAPAGRPSASRGHRKRSRRVLYPRVVRRQLPVEEPNPAKRLLFLLLTIVFCQILMAEEGVPAPLPPEDAPNAASLAPTPVSPVLEPFNLTSEPSDYALDLSTFLQQHPAAF

SEQ ID NO: 858165 - protein, 156 aa, Homo sapiens; identical to SEQ ID NO: 858164

SEQ ID NO: 858166 - protein, 156 aa, Homo sapiens; identical to SEQ ID NO: 858164

SEQ ID NO: 858167 - protein, 123 aa, Homo sapiens
MCHSRSCHPTMTILQAPTPAPSTIPGPRRGSGPEIFTFDPLPEPAAAPAGRPSASRGHRKRSRRVLYPRVVRRQLPVEEPNPAKRLLFLLLTIVFCQILMAEEGVPAPLPPEDAPNAASLAAR

SEQ ID NO: 858168 - protein, 156 aa, Homo sapiens; identical to SEQ ID NO: 858164

SEQ ID NO: 858169 - protein, 156 aa, Homo sapiens; identical to SEQ ID NO: 858164

SEQ ID NO: 858170 - protein, 156 aa, Homo sapiens; identical to SEQ ID NO: 858164

SEQ ID NO: 858171 - protein, 156 aa, Homo sapiens; identical to SEQ ID NO: 858164

SEQ ID NO: 858172 - protein, 156 aa, Homo sapiens; identical to SEQ ID NO: 858164

SEQ ID NO: 858173 - protein, 87 aa, Homo sapiens
LSCRTMCYRGAFVLGCSVVLSILEKRPLRMGMRLPLLRARCIPSRYRGLHRPKVEPPRRRWTAGRRTQGETQKEAHQRPVDIKDIPF

SEQ ID NO: 858174 - protein, 750 aa, Homo sapiens
SGPGLYGRRRSLEVATSLPHPSPGPRPAADVKMSSSEEVSWISWFCGLRGNEFFCEVDEDYIQDKFNLTGLNEQVPHYRQALDMILDLEPDEELEDNPNQSDLIEQAAEMLYGLIHARYILTNRGIAQMLEKYQQGDFGYCPRVYCENQPMLPIGLSDIPGEAMVKLYCPKCMDVYTPKSSRHHHTDGAYFGTGFPHMLFMVHPEYRPKRPANQFVPRLYGFKIHAMAYQLQLQAASNFKSPVKTIRCFPPPPVLQSLTFPFFFATLSGTLYGFEFKLKESLLWWEYEDKVEEKAMKKKKKKKKKVCVLDALVVGIGYRKGISAPRKGHPPRDSYYPVSGDPGISRARFAFTKPKEVTGGAPAQDLRMLCPEDGIAEQQQCRIRSGDPSEGLPRRGAGLRRSEEEEEEDEDVDLAQVLAYLLRRGQVRLVQGGGAANLQFIQALLDSEEENDRAWDGRLGDRYNPPVDATPDTRAPDSWSCERRGLRSRTNQGLAMKPGFSPRGGGFGGRGGFGDRGGRGGRGGFGGGRGRGGGFRGRGRGGGGGGGGGGGGGRGGGGFHSGGNRGRGRGGKRGNQSGKNVMVEPHRHEGVFICRGKEDALVTKNLVPGESVYGEKRVSISEGDDKIEYRAWNPFRSKLAAAILGGVDQIHIKPGAKVLYLGAASGTTVSHVSDIVGPDGLVYAVEFSHRSGRDLINLAKKRTNIIPVIEDARHPHKYRMLIAMVDVIFADVAQPDPDPDCGPECPHLPA

SEQ ID NO: 858175 - protein, 80 aa, Homo sapiens
RTRGSTHADGLVYAVEFSHRSGRDLINLAKKRTNIIPVIEDARHPHKYRMLIAMVDVIFADVAQPDPDPDCGPECPHLPA

SEQ ID NO: 858176 - protein, 255 aa, Homo sapiens
MKPGFSPRGGGFGGRGGFGDRGGRGGRGGFGGGRGRGGGFRGRGRGGGGGGGGGGGGGRGGGGFHSGGNRGRGRGGKRGNQSGKNVMVEPHRHEGVFICRGKEDALVTKNLVPGESVYGEKRVSISEGDDKIEYRAWNPFRSKLAAAILGGVDQIHIKPGAKVLYLGAASGTTVSHVSDIVGPDGLVYAVEFSHRSGRDLINLAKKRTNIIPVIEDARHPHKYRMLIAMVDVIFADVAQPDPDPDCGPECPHLPA

SEQ ID NO: 858177 - protein, 255 aa, Homo sapiens; identical to SEQ ID NO: 858176

SEQ ID NO: 858178 - protein, 255 aa, Homo sapiens; identical to SEQ ID NO: 858176

SEQ ID NO: 858179 - protein, 255 aa, Homo sapiens; identical to SEQ ID NO: 858176

SEQ ID NO: 858180 - protein, 255 aa, Homo sapiens; identical to SEQ ID NO: 858176

SEQ ID NO: 858181 - protein, 255 aa, Homo sapiens; identical to SEQ ID NO: 858176

SEQ ID NO: 858182 - protein, 231 aa, Homo sapiens
MKPGFSPRGGGFGGRGGFGDRGGRGGRGGFGGGRGRGGGFHSGGNRGRGRGGKRGNQSGKNVMVEPHRHEGVFICRGKEDALVTKNLVPGESVYGEKRVSISEGDDKIEYRAWNPFRSKLAAAILGGVDQIHIKPGAKVLYLGAASGTTVSHVSDIVGPDGLVYAVEFSHRSGRDLINLAKKRTNIIPVIEDARHPHKYRMLIAMVDVIFADVAQPDPDPDCGPECPHLPA

SEQ ID NO: 858183 - protein, 243 aa, Homo sapiens
MKPGFSPRGGGFGGRGGFGDRGGRGGRGGFGGGRGRGGGFRGRGRGGGGGGFHSGGNRGRGRGGKRGNQSGKNVMVEPHRHEGVFICRGKEDALVTKNLVPGESVYGEKRVSISEGDDKIEYRAWNPFRSKLAAAILGGVDQIHIKPGAKVLYLGAASGTTVSHVSDIVGPDGLVYAVEFSHRSGRDLINLAKKRTNIIPVIEDARHPHKYRMLIAMVDVIFADVAQPDPDPDCGPECPHLPA

SEQ ID NO: 858184 - protein, 219 aa, Homo sapiens
MKPGFSPRGGGFGGRGGFGDRGGRGGGFHSGGNRGRGRGGKRGNQSGKNVMVEPHRHEGVFICRGKEDALVTKNLVPGESVYGEKRVSISEGDDKIEYRAWNPFRSKLAAAILGGVDQIHIKPGAKVLYLGAASGTTVSHVSDIVGPDGLVYAVEFSHRSGRDLINLAKKRTNIIPVIEDARHPHKYRMLIAMVDVIFADVAQPDPDPDCGPECPHLPA

SEQ ID NO: 858185 - protein, 194 aa, Homo sapiens
MKPGFSPRGGRGRGGKRGNQSGKNVMVEPHRHEGVFICRGKEDALVTKNLVPGESVYGEKRVSISEGDDKIEYRAWNPFRSKLAAAILGGVDQIHIKPGAKVLYLGAASGTTVSHVSDIVGPDGLVYAVEFSHRSGRDLINLAKKRTNIIPVIEDARHPHKYRMLIAMVDVIFADVAQPDPDPDCGPECPHLPA

SEQ ID NO: 858186 - protein, 255 aa, Homo sapiens; identical to SEQ ID NO: 858176

SEQ ID NO: 858187 - protein, 169 aa, Homo sapiens
MVEPHRHEGVFICRGKEDALVTKNLVPGESVYGEKRVSISEGDDKIEYRAWNPFRSKLAAAILGGVDQIHIKPGAKVLYLGAASGTTVSHVSDIVGPDGLVYAVEFSHRSGRDLINLAKKRTNIIPVIEDARHPHKYRMLIAMVDVIFADVAQPDPDPDCGPECPHLPA

SEQ ID NO: 858188 - protein, 255 aa, Homo sapiens; identical to SEQ ID NO: 858176

SEQ ID NO: 858189 - protein, 255 aa, Homo sapiens; identical to SEQ ID NO: 858176

SEQ ID NO: 858190 - protein, 255 aa, Homo sapiens; identical to SEQ ID NO: 858176

SEQ ID NO: 858191 - protein, 264 aa, Homo sapiens
MKPGFSPRGGGFGGRGGFGDRGGRGGRGGFGGGRGRGGGFRGRGRGGGGGGGGGGGGGRGGGGFHSGGNRGRGRGGKRGNQSGKNVMVEPHRHEGVFICRGKEDALVTKNLVPGESVYGEKRVSISEGDDKIEYRAWNPFRSKLAAAILGGVDQIHIKPGAKVLYLGAASGTTVSHVSDIVGPDGLVYAVEFSHRSGRDLINLAKKRTNIIPVIEDARHPHKYRMLIAMVDVIFADVAQPDPEATVAVPAQQQEFSREQQEFSR

SEQ ID NO: 858192 - protein, 241 aa, Homo sapiens
MKPGFSPRGGGFGGRGGFGDRGGRGGRGGFGGGRGRGGGFRGRGRGGGGGGGGGGGGGRGGGGFHSGGNRGRGRGGKRGNQSGKNVMVEPHRHEGVFICRGKEDALVTKNLVPGESVYGEKRVSISEGDDKIEYRAWNPFRSKLAAAILGGVDQIHIKPGAKVLYLGAASGTTVSHVSDIVGPDGLVYAVEFSHRSGRDLINLAKKRTNIIPVIEDVEPKITVVTLGCDFALAATDRFWSM

SEQ ID NO: 858193 - protein, 126 aa, Homo sapiens
MKPGFSPRGGGFGGRGEALEVVDEEEVEAAAAVEEEEEVVEASILVATGVVVGEEKEETSREFSHRSGRDLINLAKKRTNIIPVIEDARHPHKYRMLIAMVDVIFADVAQPDPDPDCGPECPHLPA

SEQ ID NO: 858194 - protein, 243 aa, Homo sapiens; identical to SEQ ID NO: 858183

SEQ ID NO: 858195 - protein, 165 aa, Homo sapiens
  misc_feature (159)..(159): Xaa can be any naturally occurring amino acid
MKPGFSPRGGGFGGRGGFGDRGGRGGRGGFGGGRGRGGGFRGRGRGGGGGGGGGGGGGRGGGGFHSGGNRGRGRGGKRGNQSGKNVMVEPHRHEGVFICRGKEDALVTKNLVPGESVYGEKRVSISEGDDKIEYRAWNPFRSKLAAAILGVGVGHKIPXFKTLGG

SEQ ID NO: 858196 - protein, 229 aa, Homo sapiens
MAFLMLTEGKIGGFRGRGRGGGGGGGGGGGGGRGGGGFHSGGNRGRGRGGKRGNQSGKNVMVEPHRHEGVFICRGKEDALVTKNLVPGESVYGEKRVSISEGDDKIEYRAWNPFRSKLAAAILGGVDQIHIKPGAKVLYLGAASGTTVSHVSDIVGPDGLVYAVEFSHRSGRDLINLAKKRTNIIPVIEDARHPHKYRMLIAMVDVIFADVAQPDPDPDCGPECPHLPA

SEQ ID NO: 858197 - protein, 255 aa, Homo sapiens; identical to SEQ ID NO: 858176

SEQ ID NO: 858198 - protein, 255 aa, Homo sapiens; identical to SEQ ID NO: 858176

SEQ ID NO: 858199 - protein, 255 aa, Homo sapiens; identical to SEQ ID NO: 858176

SEQ ID NO: 858200 - protein, 255 aa, Homo sapiens; identical to SEQ ID NO: 858176

SEQ ID NO: 858201 - protein, 213 aa, Homo sapiens
MKPGFSPRGGGFGGRGGFGDRGGRGGRGGFGGGRGRGGGFRGRGRGGGGGGGGGGGGGRGGGGFHSGGNRGRGRGGKRGNQSGKNVMVEPHRHEGVFICRGKEDALVTKNLVPGESVYGEKRVSISEGDDKIEYRAWNPFRSKLAAAILGGVDQIHIKPGAKVLYLGAASGTTVSHVSDIVGPDGLVYAVEFSHRSGRDLINLAKKRTLCDFH

SEQ ID NO: 858202 - protein, 187 aa, Homo sapiens
MSEMAELSELYEESSDLQMDVMPGEGDLPQMEVGSGSRELSLRPSRSGAQQLEEEGPMEEEEAQPMAAPEGKRSLANGPNAGEQPGQVAGADFESEDEGEEFDDWEDDYDYPEEEQLSGAGYRVSAALEEADKMFLRTREPALDGGFQMHYEKTPFDQLAFIEELFSLMVVNRLTEELGCDEIIDRE

SEQ ID NO: 858203 - protein, 187 aa, Homo sapiens; identical to SEQ ID NO: 858202

SEQ ID NO: 858204 - protein, 187 aa, Homo sapiens; identical to SEQ ID NO: 858202

SEQ ID NO: 858205 - protein, 187 aa, Homo sapiens; identical to SEQ ID NO: 858202

SEQ ID NO: 858206 - protein, 144 aa, Homo sapiens
MSEMAELSELYEESSDLQMDVMPGEGDLPQMEVGSGSRELSLRPSRSGAQQLEEEGPMEEEEAQPMAAPEGKRSLANGPNAGEQPGQVAGADFESEDEGEEFDDWEDDYDYPEEEQLSGAGYRSRQDVSENKRTSPGWRVSDAL

SEQ ID NO: 858207 - protein, 94 aa, Homo sapiens
YRGRLLLLNSRPRRTNYQERPKTPMALTLLLIQIIFLALGKISFIFVCCKDGFARISHDQDKLPIQKPTDTNYIMRKKCIQLGHISFELFGLKA

SEQ ID NO: 858208 - protein, 114 aa, Homo sapiens
MSEMAELSELYEESSDLQMDVMPGEGDLPQMEVGSGSRELSLRPSRSGAQQLEEEGPMEEEEAQPMAAPEGKRSLANGPNAGEQPGQVAGADFESSGKGSSAKGSSAKGSSAKG

SEQ ID NO: 858209 - protein, 187 aa, Homo sapiens; identical to SEQ ID NO: 858202

SEQ ID NO: 858210 - protein, 187 aa, Homo sapiens; identical to SEQ ID NO: 858202

SEQ ID NO: 858211 - protein, 187 aa, Homo sapiens; identical to SEQ ID NO: 858202

SEQ ID NO: 858212 - protein, 187 aa, Homo sapiens; identical to SEQ ID NO: 858202

SEQ ID NO: 858213 - protein, 1012 aa, Homo sapiens
MEEYEKFCEKSLARIQEASLSTESFLPAQSESISLIRFHGVAILSPLLNIEKRKEMQQEKQKALDVEARKQVNRKKALLTRVQEILDNVQVRKAPNASDFDQWEMETVYSNSEVRNLNVPATFPNSFPSHTEHSTAAKLDKIAGILPLDNEDQCKTDGIDLARDSEGFNSPKQCDSSNISHVENEAFPKTSSATPQETLISDGPFSVNEQQDLPLLAEVIPDPYVMSLQNLMKKSKEYIEREQSRRSLRGSMNRIVNESHLDKEHDAVEVADCVKEKGQLTGKHCVSVIPDKPSLNKSNVLLQGASTQASSMSMPVLASFSKVDIPIRTGHPTVLESNSDFKVIPTFVTENNVIKSLTGSYAKLPSPEPSMSPKMHRRRSRTSSACHILINNPINACELSPKGKEQAMDLIIQDTDENTNVPEIMPKLPTDLAGVCSSKVYVGKNTSEVKEDVVLGKSNQVCQSSGNHLENKVTHGLVTVEGQLTSDERGAHIMNSTCAAMPKLHEPYASSQCIASPNFGTVSGLKPASMLEKNCSLQTELNKSYDVKNPSPLLMQNQNTRQQMDTPMVSCGNEQFLDNSFEKVKRRLDLDIDGLQKENCPYVITSGITEQERQHLPEKRYPKGSGFVNKNKMLGTSSKESEELLKSKMLAFEEMRKRLEEQHAQQLSLLIAEQEREQERLQKEIEEQEKMLKEKKAMTAEASELDINNAVELEWRKISDSSLLETMLSQADSLHTSNSNSSGFTNSAMQYSFVSANEAPFYLWGSSTSGLTKLSVTRPFGRAKTRWSQVFSLEIQAKFNKITAVAKGFLTRRLMQTDKLKQLRQTVKDTMEFIRSFQSEAPLKRGIVSAQDASLQERVLAQLRAALYGIHDIFFVMDAAERMSILHHDREVRKEKMLRQMDKMKSPRVALSAATQKSLDRKKYMKAAEMGMPNKKFLVKQNPSETRVLQPNQGQNAPVHRLLSRQGTPKTSVKGVVQNRQKPSQSRVPNRVPVSGVYAGKIQRKRPNVATI

SEQ ID NO: 858214 - protein, 969 aa, Homo sapiens
MEEYEKFCEKSLARIQEASLSTESFLPAQSESISLIRFHGVAILSPLVRKAPNASDFDQWEMETVYSNSEVRNLNVPATFPNSFPSHTEHSTAAKLDKIAGILPLDNEDQCKTDGIDLARDSEGFNSPKQCDSSNISHVENEAFPKTSSATPQETLISDGPFSVNEQQDLPLLAEVIPDPYVMSLQNLMKKSKEYIEREQSRRSLRGSMNRIVNESHLDKEHDAVEVADCVKEKGQLTGKHCVSVIPDKPSLNKSNVLLQGASTQASSMSMPVLASFSKVDIPIRTGHPTVLESNSDFKVIPTFVTENNVIKSLTGSYAKLPSPEPSMSPKMHRRRSRTSSACHILINNPINACELSPKGKEQAMDLIIQDTDENTNVPEIMPKLPTDLAGVCSSKVYVGKNTSEVKEDVVLGKSNQVCQSSGNHLENKVTHGLVTVEGQLTSDERGAHIMNSTCAAMPKLHEPYASSQCIASPNFGTVSGLKPASMLEKNCSLQTELNKSYDVKNPSPLLMQNQNTRQQMDTPMVSCGNEQFLDNSFEKVKRRLDLDIDGLQKENCPYVITSGITEQERQHLPEKRYPKGSGFVNKNKMLGTSSKESEELLKSKMLAFEEMRKRLEEQHAQQLSLLIAEQEREQERLQKEIEEQEKMLKEKKAMTAEASELDINNAVELEWRKISDSSLLETMLSQADSLHTSNSNSSGFTNSAMQYSFVSANEAPFYLWGSSTSGLTKLSVTRPFGRAKTRWSQVFSLEIQAKFNKITAVAKGFLTRRLMQTDKLKQLRQTVKDTMEFIRSFQSEAPLKRGIVSAQDASLQERVLAQLRAALYGIHDIFFVMDAAERMSILHHDREVRKEKMLRQMDKMKSPRVALSAATQKSLDRKKYMKAAEMGMPNKKFLVKQNPSETRVLQPNQGQNAPVHRLLSRQGTPKTSVKGVVQNRQKPSQSRVPNRVPVSGVYAGKIQRKRPNVATI

SEQ ID NO: 858215 - protein, 1012 aa, Homo sapiens; identical to SEQ ID NO: 858213

SEQ ID NO: 858216 - protein, 1012 aa, Homo sapiens; identical to SEQ ID NO: 858213

SEQ ID NO: 858217 - protein, 204 aa, Homo sapiens
MIPRGRRCFVAETKLYGMAKGFLTRRLMQTDKLKQLRQTVKDTMEFIRSFQSEAPLKRGIVSAQDASLQERVLAQLRAALYGIHDIFFVMDAAERMSILHHDREVRKEKMLRQMDKMKSPRVALSAATQKSLDRKKYMKAAEMGMPNKKFLVKQNPSETRVLQPNQGQNAPVHRLLSRQGSICRKNPKKAAKCCDNLRRQHSLG

SEQ ID NO: 858218 - protein, 997 aa, Homo sapiens
MEEYEKFCEKSLARIQEASLSTESFLPAQSESISLIRFHGVAILSPLLNIEKRKEMQQEKQKALDVEARKQVNRKKALLTRVQEILDNVQVRKAPNASDFDQWEMETVYSNSEVRNLNVPATFPNSFPSHTEHSTAAKLDKIAGILPLDNEDQCKTDGIDLARDSEGFNSPKQCDSSNISHVENEAFPKTSSATPQETLISDGPFSVNEQQDLPLLAEVIPDPYVMSLQNLMKKSKEYIEREQSRRSLRGSMNRIVNESHLDKEHDAVEVADCVKEKGQLTGKHCVSVIPDKPSLNKSNVLLQGASTQASSMSMPVLASFSKVDIPIRTGHPTVLESNSDFKVIPTFVTENNVIKSLTGSYAKLPSPEPSMSPKMHRRRSRTSSACHILINNPINACELSPKGKEQAMDLIIQDTDENTNVPEIMPKLPTDLAGVCSSKVYVGKNTSEVKEDVVLGKSNQVCQSSGNHLENKVTHGLVTVEGQLTSDERGAHIMNSTCAAMPKLHEPYASSQCIASPNFGTVSGLKPASMLEKNCSLQTELNKSYDVKNPSPLLMQNQNTRQQMDTPMVSCGNEQFLDNSFEKVKRRLDLDIDGLQKENCPYVITSGITEQERQHLPEKRYPKGSGFVNKNKMLGTSSKESEELLKSKMLAFEEMRKRLEEQHAQQLSLLIAEQEREQERLQKEIEEQEKMLKEKKAMTAEASELDINNAVELEWRKISDSSLLETMLSQADSLHTSNSNSSGFTNSAMQYSFVSANEAPFYLWGSSTSGLTKLSVTRPFGRAKTRWSQVFSLEIQAKFNKITAVAKGFLTRRLMQTDKLKQLRQTVKDTMEFIRSFQSEAPLKRGIVSAQDASLQERVLAQLRAALYGIHDIFFVMDAAERMSILHHDREVRKEKMLRQMDKMKSPRVALSAATQKSLDRKKYMKAAEMGMPNKKFLVKQNPSETRVLQPNQGQNAPVHRLLSRQGTPKTSVKGVVQNRQKPSQSRVPNRVPVSGL

SEQ ID NO: 858219 - protein, 991 aa, Homo sapiens
MEEYEKFCEKSLARIQEASLSTESFLPAQSESISLIRFHGVAILSPLLNIEKRKEMQQEKQKALDVEARKQVNRKKALLTRVQEILDNVQVRKAPNASDFDQWEMETVYSNSEVRNLNVPATFPNSFPSHTEHSTAAKLDKIAGILPLDNEDQCKTDGIDLARDSEGFNSPKQCDSSNISHVENEAFPKTSSATPQETLISDGPFSVNEQQDLPLLAEVIPDPYVMSLQNLMKKSKEYIEREQSRRSLRGSMNRIVNESHLDKEHDAVEVADCVKEKGQLTGKHCVSVIPDKPSLNKSNVLLQGASTQASSMSMPVLASFSKVDIPIRTGHPTVLESNSDFKVIPTFVTENNVIKSLTGSYAKLPSPEPSMSPKMHRRRSRTSSACHILINNPINACELSPKGKEQAMDLIIQDTDENTNVPEIMPKLPTDLAGVCSSKVYVGKNTSEVKEDVVLGKSNQVCQSSGNHLENKVTHGLVTVEGQLTSDERGAHIMNSTCAAMPKLHEPYASSQCIASPNFGTVSGLKPASMLEKNCSLQTELNKSYDVKNPSPLLMQNQNTRQQMDTPMVSCGNEQFLDNSFEKVKRRLDLDIDGLQKENCPYVITSGITEQERQHLPEKRYPKGSGFVNKNKMLGTSSKESEELLKSKMLAFEEMRKRLEEQHAQQLSLLIAEQEREQERLQKEIEEQEKMLKEKKAMTAEASELDINNAVELEWRKISDSSLLETMLSQADSLHTSNSNSSGFTNSAMQYSFVSANEAPFYLWGSSTSGLTKLSVTRPFGRAKTRWSQVFSLEIQAKFNKITAVAKGFLTRRLMQTDKLKQLRQTVKDTMEFIRSFQSEAPLKRGIVSAQDASLQERVLAQLRAALYGIHDIFFVMDAAERMSILHHDREVRKEKMLRQMDKMKSPRVALSAATQKSLDRKKYMKAAEMGMPNKKFLVKQNPSETRVLQPNQGQNAPVHRLLSRQGSICRKNPKKAAKCCDNLRRQHSLG

SEQ ID NO: 858220 - protein, 1012 aa, Homo sapiens; identical to SEQ ID NO: 858213

SEQ ID NO: 858221 - protein, 364 aa, Homo sapiens [sequence omitted]

SEQ ID NO: 858222 - protein, 1003 aa, Homo sapiens
MEEYEKFCEKSLARIQEASLSTESFLPAQSESISLIRFHGVAILSPLLNIEKRKEMQQEKQKALDVEARKQVNRKKALLTRVQEILDNVQVRKAPNASDFDQWEMETVYSNSEVRNLNVPATFPNSFPSHTEHSTAAKLDKIAGILPLDNEDQCKTDGIDLARDSEGFNSPKQCDSSNISHVENEAFPKTSSATPQETLISDGPFSVNEQQDLPLLAEVIPDPYVMSLQNLMKKSKEYIEREQSRRSLRGSMNRIVNESHLDKEHDAVEVADCVKEKGQLTGKHCVSVIPDKPSLNKSNVLLQGASTQASSMSMPVLASFSKVDIPIRTGHPTVLESNSDFKVIPTFVTENNVIKSLTGSYAKLPSPEPSMSPKMHRRRSRTSSACHILINNPINACELSPKGKEQAMDLIIQDTDENTNVPEIMPKLPTDLAGVCSSKVYVGKNTSEVKEDVVLGKSNQVCQSSGNHLENKVTHGLVTVEGQLTSDERGAHIMNSTCAAMPKLHEPYASSQCIASPNFGTVSGLKPASMLEKNCSLQTELNKSYDVKNPSPLLMQNQNTRQQMDTPMVSCGNEQFLDNSFEKVKRRLDLDIDGLQKENCPYVITSGITEQERQHLPEKRYPKGSGFVNKNKMLGTSSKESEELLKSKMLAFEEMRKRLEEQHAQQLSLLIAEQEREQERLQKEIEEQEKMLKEKKAMTAEASELDINNAVELEWRKISDSSLLETMLSQADSLHTSNSNSSGFTNSAMQYSFVSANEAPFYLWGSSTSGLTKLSVTRPFGRAKTRWSQVFSLEIQAKFNKITAVAKGFLTRRLMQTDKLKQLRQTVKDTMEFIRSFQSEAPLKRGIVSAQDASLQERVLAQLRAALYGIHDIFFVMDAAERMSILHHDREVRKEKMLRQMDKMKSPRVALSAATQKSLDRKKYMKNKKQKHNFVRARASRRPLERSSFSKHHLRFGARARAPQMGRKVHTGGPNTAWSPQRENTRGPQKNIRGGEESLSPTI

SEQ ID NO: 858223 - protein, 832 aa, Homo sapiens
MEEYEKFCEKSLARIQEASLSTESFLPAQSESISLIRFHGVAILSPLLNIEKRKEMQQEKQKALDVEARKQVNRKKALLTRVQEILDNVQVRKAPNASDFDQWEMETVYSNSEVRNLNVPATFPNSFPSHTEHSTAAKLDKIAGILPLDNEDQCKTDGIDLARDSEGFNSPKQCDSSNISHVENEAFPKTSSATPQETLISDGPFSVNEQQDLPLLAEVIPDPYVMSLQNLMKKSKEYIEREQSRRSLRGSMNRIVNESHLDKEHDAVEVADCVKEKGQLTGKHCVSVIPDKPSLNKSNVLLQGASTQASSMSMPVLASFSKVDIPIRTGHPTVLESNSDFKVIPTFVTENNVIKSLTGSYAKLPSPEPSMSPKMHRRRSRTSSACHILINNPINACELSPKGKEQAMDLIIQDTDENTNVPEIMPKLPTDLAGVCSSKVYVGKNTSEVKEDVVLGKSNQVCQSSGNHLENKVTHGLVTVEGQLTSDERGAHIMNSTCAAMPKLHEPYASSQCIASPNFGTVSGLKPASMLEKNCSLQTELNKSYDVKNPSPLLMQNQNTRQQMDTPMVSCGNEQFLDNSFEKVKRRLDLDIDGLQKENCPYVITSGITEQERQHLPEKRYPKGSGFVNKNKMLGTSSKESEELLKSKMLAFEEMRKRLEEQHAQQLSLLIAEQEREQERLQKEIEEQEKMLKEKKAMTAEASELDINNAVELEWRKISDSSLLETMLSQADSLHTSNSNSSGFTNSAMQYSFVSANEAPFYLWGSSTSGLTKLSVTRPFGRAKTRWSQVFSLEIQAKFNKITAVAKGFLTRRLMQTDKLKQLRQTVKVRFL

SEQ ID NO: 858224 - protein, 120 aa, Homo sapiens
MVQPAPPSRSRTVGPSTCRKALWDGSLSFLPFGASLLWFLLWVLWDGAWLWPRGLSRRGAGRGNAATLSLVSRLRRPVSEVSGAVNKGSGLASGLRSHVWKRGASSICVYIIDYAREFSR

SEQ ID NO: 858225 - protein, 120 aa, Homo sapiens; identical to SEQ ID NO: 858224

SEQ ID NO: 858226 - protein, 120 aa, Homo sapiens; identical to SEQ ID NO: 858224

SEQ ID NO: 858227 - protein, 120 aa, Homo sapiens; identical to SEQ ID NO: 858224

SEQ ID NO: 858228 - protein, 120 aa, Homo sapiens; identical to SEQ ID NO: 858224

SEQ ID NO: 858229 - protein, 120 aa, Homo sapiens; identical to SEQ ID NO: 858224

SEQ ID NO: 858230 - protein, 1132 aa, Homo sapiens
MGANASNYPHSCSPRVGGNSQAQQTFIGTSSYSQQGYGCESKLYSLDHGHEKPQDKKKRTSGLATLKKKFIKRRKSNRSADHAKQMRELLSGWDVRDVNALVEEYEGTSALKELSLQASLARPEARTLQKDMADLYEYKYCTDVDLIFQETCFPVHRAILAARCPFFKTLLSSSPEYGAEIIMDINTAGIDMPMFSALLHYLYTGEFGMEDSRFQNVDILVQLSEEFGTPNSLDVDMRGLFDYMCYYDVVLSFSSDSELVEAFGGNQNCLDEELKAHKAVISARSPFFRNLLQRRIRTGEEITDRTLRTPTRIILDESIIPKKYATVILHCMYTDVVDLSVLHCSPSVGSLSEVQALVAGKPNMTRAEEAMELYHIALFLEFNMLAQGCEDIIAESISLDTLIAILKWSSHPYGSKWVHRQALHFLCEEFSQVMTSDVFYELSKDHLLTAIQSDYLQASEQDILKYLIKWGEHQLMKRIADREPNLLSGTAHSVNKRGVKRRDLDMEELREILSSLLPFVRIEHILPINSEVLSDAMKRGLISTPPSDMLPTTEGGKSNAWLRQKNAGIYVRPRLFSPYVEEAKSVLDEMMVEQTDLVRLRMVRMSNVPDTLYMVNNAVPQCCHMISHQQISSNQSSPPSVVANEIPVPRLLIMKDMVRRLQELRHTEQVQRAYALNCGEGATVSYEIQIRVLREFGLADAAAELLQNPHKFFPDERFGDESPLLTMRQPGRCRVNSTPPAETMFTDLDSFVAFHPPLPPPPPPYHPPATPIHNQLKAGWKQRPPSQHPSRSFSYPCNHSLFHSRTAPKAGPPPVYLPSVKAAPPDCTSTAGLGRQTVAAAAATTTSTATAAAAAASEKQVRTQPVLNDLMPDIAVGVSTLSLKDRRLPELAVDTELSQSVSEAGPGPPQHLSCIPQRHTHTSRKKHTLEQKTDTRENPQEYPDFYDFSNAACRPSTPALSRRTPSPSQGGYFGPDLYSHNKASPSGLKSAYLPGQTSPKKQEEARREYPLSPDGHLHRQKNEPIHLDVVEQPPQRSDFPLAAPENASTGPAHVRGRTAVETDLTFGLTPNRPSLSACSSEAPEERSGRRLADSESLGHGAQRNTDLEREDSISRGRRSPSKPDFLYKKSAL

SEQ ID NO: 858231 - protein, 1132 aa, Homo sapiens; identical to SEQ ID NO: 858230

SEQ ID NO: 858232 - protein, 757 aa, Homo sapiens
MINLKKYLPSLLGCEDIIAESISLDTLIAILKWSSHPYGSKWVHRQALHFLCEEFSQVMTSDVFYELSKDHLLTAIQSDYLQASEQDILKYLIKWGEHQLMKRIADREPNLLSGTAHSVNKRGVKRRDLDMEELREILSSLLPFVRIEHILPINSEVLSDAMKRGLISTPPSDMLPTTEGGKSNAWLRQKNAGIYVRPRLFSPYVEEAKSVLDEMMVEQTDLVRLRMVRMSNVPDTLYMVNNAVPQCCHMISHQQISSNQSSPPSVVANEIPVPRLLIMKDMVRRLQELRHTEQVQRAYALNCGEGATVSYEIQIRVLREFGLADAAAELLQNPHKFFPDERFGDESPLLTMRQPGRCRVNSTPPAETMFTDLDSFVAFHPPLPPPPPPYHPPATPIHNQLKAGWKQRPPSQHPSRSFSYPCNHSLFHSRTAPKAGPPPVYLPSVKAAPPDCTSTAGLGRQTVAAAAATTTSTATAAAAAASEKQVRTQPVLNDLMPDIAVGVSTLSLKDRRLPELAVDTELSQSVSEAGPGPPQHLSCIPQRHTHTSRKKHTLEQKTDTRENPQEYPDFYDFSNAACRPSTPALSRRTPSPSQGGYFGPDLYSHNKASPSGLKSAYLPGQTSPKKQEEARREYPLSPDGHLHRQKNEPIHLDVVEQPPQRSDFPLAAPENASTGPAHVRGRTAVETDLTFGLTPNRPSLSACSSEAPEERSGRRLADSESLGHGAQRNTDLEREDSISRGRRSPSKPDFLYKKSAL

SEQ ID NO: 858233 - protein, 546 aa, Homo sapiens [sequence omitted]

SEQ ID NO: 858234 - protein, 410 aa, Homo sapiens
MGANASNYPHSCSPRVGGNSQAQQTFIGTSSYSQQGYGCESKLYSLDHGHEKPQDKKKRTSGLATLKKKFIKRRKSNRSADHAKQMRELLSGWDVRDVNALVEEYEGTSALKELSLQASLARPEARTLQKDMADLYEYKYCTDVDLIFQETCFPVHRAILAARCPFFKTLLSSSPEYGAEIIMDINTAGIDMPMFSALLHYLYTGEFGMEDSRFQNVDILVQLSEEFGTPNSLDVDMRGLFDYMCYYDVVLSFSSDSELVEAFGGNQNCLDEELKAHKAVISARSPFFRNLLQRRIRTGEEITDRTLRTPTRIILDESIIPKKYATVILHCMYTDVVDLSVLHCSPSVGSLSEVQALVAGKPNMTRAEEAMELYHIALFLEFNMLAQEETTVIRPACAAELSNSCLLPQS

SEQ ID NO: 858235 - protein, 1132 aa, Homo sapiens; identical to SEQ ID NO: 858230

SEQ ID NO: 858236 - protein, 1132 aa, Homo sapiens; identical to SEQ ID NO: 858230

SEQ ID NO: 858237 - protein, 1132 aa, Homo sapiens; identical to SEQ ID NO: 858230

SEQ ID NO: 858238 - protein, 1132 aa, Homo sapiens; identical to SEQ ID NO: 858230

SEQ ID NO: 858239 - protein, 1132 aa, Homo sapiens; identical to SEQ ID NO: 858230

SEQ ID NO: 858240 - protein, 410 aa, Homo sapiens; identical to SEQ ID NO: 858234

SEQ ID NO: 858241 - protein, 589 aa, Homo sapiens
MSVSVHENRKSRASSGSINIYLFHKSSYADSVLTHLNLLRQQRLFTDVLLHAGNRTFPCHRAVLAACSRYFEAMFSGGLKESQDSEVNFDNSIHPEVLELLLDYAYSSRVIINEENAESLLEAGDMLEFQDIRDACAEFLEKNLHPTNCLGMLLLSDAHQCTKLYELSWRMCLSNFQTIRKNEDFLQLPQDMVVQLLSSEELETEDERLVYESAINWISYDLKKRYCYLPELLQTVRLALLPAIYLMENVAMEELITKQRKSKEIVEEAIRCKLKILQNDGVVTSLCARPRKTGHALFLLGGQTFMCDKLYLVDQKAKEIIPKADIPSPRKEFSACAIGCKVYITGGRGSENGVSKDVWVYDTLHEEWSKAAPMLVARFGHGSAELKHCLYVVGGHTAATGCLPASPSVSLKQVEHYDPTINKWTMVAPLREGVSNAAVVSAKLKLFAFGGTSVSHDKLPKVQCYDQCENRWTVPATCPQPWRYTAAAVLGNQIFIMGGDTEFSACSAYKFNSETYQWTKVGDVTAKRMSCHAVASGNKLYVVGGYFGIQRCKTLDCYDPTLDVWNSITTVPYSLIPTAFVSTWKHLPS

SEQ ID NO: 858242 - protein, 589 aa, Homo sapiens; identical to SEQ ID NO: 858241

SEQ ID NO: 858243 - protein, 589 aa, Homo sapiens; identical to SEQ ID NO: 858241

SEQ ID NO: 858244 - protein, 106 aa, Homo sapiens
MSVSVHENRKSRASSGSINIYLFHKSSYADSVLTHLNLLRQQRLFTDVLLHAGNRTFPCHRAVLAACSRYFEAMFSGGLKESQDSEVNFDNSSPEFDCVISTLRHI

SEQ ID NO: 858245 - protein, 589 aa, Homo sapiens; identical to SEQ ID NO: 858241

SEQ ID NO: 858246 - protein, 589 aa, Homo sapiens; identical to SEQ ID NO: 858241

SEQ ID NO: 858247 - protein, 589 aa, Homo sapiens; identical to SEQ ID NO: 858241

SEQ ID NO: 858248 - protein, 516 aa, Homo sapiens
MFSGGLKESQDSEVNFDNSIHPEVLELLLDYAYSSRVIINEENAESLLEAGDMLEFQDIRDACAEFLEKNLHPTNCLGMLLLSDAHQCTKLYELSWRMCLSNFQTIRKNEDFLQLPQDMVVQLLSSEELETEDERLVYESAINWISYDLKKRYCYLPELLQTVRLALLPAIYLMENVAMEELITKQRKSKEIVEEAIRCKLKILQNDGVVTSLCARPRKTGHALFLLGGQTFMCDKLYLVDQKAKEIIPKADIPSPRKEFSACAIGCKVYITGGRGSENGVSKDVWVYDTLHEEWSKAAPMLVARFGHGSAELKHCLYVVGGHTAATGCLPASPSVSLKQVEHYDPTINKWTMVAPLREGVSNAAVVSAKLKLFAFGGTSVSHDKLPKVQCYDQCENRWTVPATCPQPWRYTAAAVLGNQIFIMGGDTEFSACSAYKFNSETYQWTKVGDVTAKRMSCHAVASGNKLYVVGGYFGIQRCKTLDCYDPTLDVWNSITTVPYSLIPTAFVSTWKHLPS

SEQ ID NO: 858249 - protein, 350 aa, Homo sapiens
MYEAGWLIGRRGGGAAVALRRPGPDAWRPPAHKALSSSLPRAHSPPPSAAPAVAGLLCPTVTRSGDALRVLDTGSAAWGRQTEANAIGSRSASHRSGRSPLPGWPSFLRGSENGVSKDVWVYDTLHEEWSKAAPMLVARFGHGSAELKHCLYVVGGHTAATGCLPASPSVSLKQVEHYDPTINKWTMVAPLREGVSNAAVVSAKLKLFAFGGTSVSHDKLPKVQCYDQCENRWTVPATCPQPWRYTAAAVLGNQIFIMGGDTEFSACSAYKFNSETYQWTKVGDVTAKRMSCHAVASGNKLYVVGGYFGIQRCKTLDCYDPTLDVWNSITTVPYSLIPTAFVSTWKHLPS

SEQ ID NO: 858250 - protein, 131 aa, Homo sapiens
MVRGWVVNRPRGGGAAVALRRPGPDAWRPPAHKALSSSLPRAHSPPPSAAPAVAGLLCPTVTRSGDALRVLDTGSAAWGRQTEANAIGSRSASHRSGRSPLPGWPSFLRGIRHRFPGLRRPVRRLLARDRR

SEQ ID NO: 858251 - protein, 131 aa, Homo sapiens; identical to SEQ ID NO: 858250

SEQ ID NO: 858252 - protein, 123 aa, Homo sapiens
MSGCRVFIGRLNPAAREKDVERFFKGYGRIRDIDLKRGFGFVEFEDPRDADDAVYELDGKELCSERVLSNMLVLLTRLYEYADRTLPREVAVDFELFAPFPRYPTSASSSDFISPRFVVLHFP

SEQ ID NO: 858253 - protein, 114 aa, Homo sapiens
LLGSLLFWGLCSFGVFAQEVVREIENQKTDAASKPFAEVRILSCGELDGKELCSERVTIEHARARSRGGRGRGRYSDRFSSRRPRNDRRNAPPVRTENRLIVENLSSRVSWQVC

SEQ ID NO: 858254 - protein, 97 aa, Homo sapiens
LLGSLLFWGLCSFGVFAQEVVREIENQKTDAASKPFAEVRILSCGELDGKELCSERVTIEHARARSRGGRGRGRYSDRFSSRRPRNDRRYVKGGWLH

SEQ ID NO: 858255 - protein, 114 aa, Homo sapiens; identical to SEQ ID NO: 858253

SEQ ID NO: 858256 - protein, 114 aa, Homo sapiens; identical to SEQ ID NO: 858253

SEQ ID NO: 858257 - protein, 114 aa, Homo sapiens; identical to SEQ ID NO: 858253

SEQ ID NO: 858258 - protein, 114 aa, Homo sapiens; identical to SEQ ID NO: 858253

SEQ ID NO: 858259 - protein, 114 aa, Homo sapiens; identical to SEQ ID NO: 858253

SEQ ID NO: 858260 - protein, 114 aa, Homo sapiens; identical to SEQ ID NO: 858253

SEQ ID NO: 858261 - protein, 114 aa, Homo sapiens; identical to SEQ ID NO: 858253

SEQ ID NO: 858262 - protein, 139 aa, Homo sapiens
LLGSLLFWGLCSFGVFAQEVVREIENQKTDAASKPFAEVRILSCGELDGKELCSERVTIEHARARSRGGRGRGRYSDRFSSRRPRNDRRNAPPVRTENRLIVENLSSRVSWQDLKDFMRQAGEVTFADAHRPKLNEGGG

SEQ ID NO: 858263 - protein, 114 aa, Homo sapiens; identical to SEQ ID NO: 858253

SEQ ID NO: 858264 - protein, 114 aa, Homo sapiens; identical to SEQ ID NO: 858253

SEQ ID NO: 858265 - protein, 114 aa, Homo sapiens; identical to SEQ ID NO: 858253

SEQ ID NO: 858266 - protein, 114 aa, Homo sapiens; identical to SEQ ID NO: 858253

SEQ ID NO: 858267 - protein, 114 aa, Homo sapiens; identical to SEQ ID NO: 858253

SEQ ID NO: 858268 - protein, 114 aa, Homo sapiens; identical to SEQ ID NO: 858253

SEQ ID NO: 858269 - protein, 114 aa, Homo sapiens; identical to SEQ ID NO: 858253

SEQ ID NO: 858270 - protein, 139 aa, Homo sapiens; identical to SEQ ID NO: 858262

SEQ ID NO: 858271 - protein, 149 aa, Homo sapiens
MSGCRVFIGRLNPAAREKDVERFFKGYGRIRDIDLKRGFGFVEFEDPRDADDAVYELDGKELCSERVTIEHARARSRGGRGRGRYSDRFSSRRPRNDRRNAPPVRTENRLIVENLSSRVSWQDLKDFMRQAGEVTFADAHRPKLNEGAG

SEQ ID NO: 858272 - protein, 114 aa, Homo sapiens; identical to SEQ ID NO: 858253

SEQ ID NO: 858273 - protein, 97 aa, Homo sapiens; identical to SEQ ID NO: 858254

SEQ ID NO: 858274 - protein, 114 aa, Homo sapiens; identical to SEQ ID NO: 858253

SEQ ID NO: 858275 - protein, 114 aa, Homo sapiens; identical to SEQ ID NO: 858253

SEQ ID NO: 858276 - protein, 114 aa, Homo sapiens; identical to SEQ ID NO: 858253

SEQ ID NO: 858277 - protein, 139 aa, Homo sapiens; identical to SEQ ID NO: 858262

SEQ ID NO: 858278 - protein, 114 aa, Homo sapiens; identical to SEQ ID NO: 858253

SEQ ID NO: 858279 - protein, 114 aa, Homo sapiens; identical to SEQ ID NO: 858253

SEQ ID NO: 858280 - protein, 114 aa, Homo sapiens; identical to SEQ ID NO: 858253

SEQ ID NO: 858281 - protein, 114 aa, Homo sapiens; identical to SEQ ID NO: 858253

SEQ ID NO: 858282 - protein, 114 aa, Homo sapiens; identical to SEQ ID NO: 858253

SEQ ID NO: 858283 - protein, 630 aa, Homo sapiens
MHWLNDAEFVFSVLVRESKASAVGDDDKVYYFFTERATEEGSGSFTQSRSSHRVARVARVCKGDLGGKKILQKKWTSFLKARLICHIPLYETLRGVCSLDAETSSRTHFYAAFTLSTQWKTLEASAICRYDLAEIQAVFAGPYMEYQDGSRRWGRYEGGVPEPRPGSCITDSLRSQGYNSSQDLPSLVLDFVKLHPLMARPVVPTRGRPLLLKRNIRYTHLTGTPVTTPAGPTYDLLFLGTADGWIHKAVVLGSGMHIIEETQVFRESQSVENLVISHCHSLYVGAPSGVIQLPLSSCSRYRSCYDCILARDPYCGWDPGTHACAAATTIANRPRTALIQDIERGNRGCESSRDTGPPPPLKTRSVLRGDDVLLPCDQPSNLARALWLLNGSMGLSDGQGGYRVGVDGLLVTDAQPEHSGNYGCYAEENGLRTLLASYSLTVRPATPAPAPKAPATPGAQLAPDVRLLYVLAIAALGGLCLILASSLLYVACLREGRRGRRRKYSLGRASRAGGSAVQLQTVSGQCPGEEDEGDDEGAGGLEGSCLQIIPGEGAPAPPPPPPPPPPAELTNGLVALPSRLRRMNGNSYVLLRQSNNGVPAGPCSFAEELSRILEKRKHTQLVEQLDESSV

SEQ ID NO: 858284 - protein, 91 aa, Homo sapiens
ARGNSAASWNSLPEQMLFQASLSVPGWATASLTQPPSLHYPHLTFSWCILVSSLLLDLGYPPNCHILSGPLPQPHVVTSLSRAWERASLGR

SEQ ID NO: 858285 - protein, 527 aa, Homo sapiens
KGLRSQSSDYTGHVHPGTYTNTLERLVKEMEDTQRLDELQKQLQEDIRQGRGIKSPIRIGEEDSTDDEDGLLEEHKEFLKKFSVTIDAIPDHHPGEEIFNFLNSGKIFNQYTLDLRDSGFIGQSAVEKLILKSGKTDQIFLTTQGFLTSAYHYVQCPVPVLKWLFRMMSVHTDCIVSVQILSTLMEITIRNDTFSDSPVWPWIPSLSDVAAVFFNMGIDFRSLFPLENLQPDFNEDYLVSETQTTSRGKESEDSSYKPIFSTLPETNILNVVKFLGLCTSIHPEGYQDREIMLLILMLFKMSLEKQLKQIPLVDFQSLLINLMKNIRDWNTKVPELCLGINELSSHPHNLLWLVQLVPNWTSRGRQLRQCLSLVIISKLLDEKHEDVPNASNLQVSVLHRYLVQMKPSDLLKKMVLKKKAEQPDGIIDDSLHLELEKQAYYLTYILLHLVGEVSCSHSFSSGQRKHFVLLCGALEKHVKCDIREDARLFYRTKVKDLVARIHGKWQEIIQNCRPTQGQLHDFWVPDS

SEQ ID NO: 858286 - protein, 302 aa, Homo sapiens
IFLGIAAIVATVLRLCICNQQPVQNPTGPPPPLKTRSVLRGDDVLLPCDQPSNLARALWLLNGSMGLSDGQGGYRVGVDGLLVTDAQPEHSGNYGCYAEENGLRTLLASYSLTVRPATPAPAPKAPATPGAQLAPDVRLLYVLAIAALGGLCLILASSLLYVACLREGRRGRRRKYSLGRASRAGGSAVQLQTVSGQCPGEEDEGDDEGAGGLEGSCLQIIPGEGAPAPPPPPPPPPPAELTNGLVALPSRLRRMNGNSYVLLRQSNNGVPAGPCSFAEELSRILEKRKHTQLVEQLDESSV

SEQ ID NO: 858287 - protein, 88 aa, Homo sapiens
LCVVLSPPFCPPLPVVMVVSLPKVTPPRLASCFLVSLPRSFFVSPPAPPSRLFILDASPFLSGRRPLLLPQQWRGGLPHFVCSSPGGR

SEQ ID NO: 858288 - protein, 441 aa, Homo sapiens
MAVVPASLSGQDVGSFAYLTIKDRIPQILTKVIDTLHRHKSEFFEKHGEEGVEAEKKAISLLSKLRNELQTDKPFIPLVEKFVDTDIWNQYLEYQQSLLNESDGKSRWFYSPWLLVECYMYRRIHEAIIQSPPIDYFDVFKESKEQNFYGSQESIIALCTHLQQLIRTIEDLDENQLKDEFFKLLQISLWGNKCDLSLSGGESSSQNTNVLNSLEDLKPFILLNDMEHLWSLLSNCKKTREKASATRVYIVLDNSGFELVTDLILADFLLSSELATEVHFYGKTIPWFVSDTTIHDFNWLIEQVKHSNHKWMSKCGADWEEYIKMGKWVYHNHIFWTLPHEYCAMPQVAPDLYAELQKAHLILFKGDLNYRKLTGDRKWEFSVPFHQALNGFHPAPLCTIRTLKAEIQVGLQPGQGEQLLASEPSWWTTGKYGIFQYDGPL

SEQ ID NO: 858289 - protein, 483 aa, Homo sapiens
AQDTGGPGRQSGHGGDLQIPILPPLFLRRLNSRALRPGSRKVMAVVPASLSGQDVGSFAYLTIKDRIPQILTKVIDTLHRHKSEFFEKHGEEGVEAEKKAISLLSKLRNELQTDKPFIPLVEKFVDTDIWNQYLEYQQSLLNESDGKSRWFYSPWLLVECYMYRRIHEAIIQSPPIDYFDVFKESKEQNFYGSQESIIALCTHLQQLIRTIEDLDENQLKDEFFKLLQISLWGNKCDLSLSGGESSSQNTNVLNSLEDLKPFILLNDMEHLWSLLSNCKKTREKASATRVYIVLDNSGFELVTDLILADFLLSSELATEVHFYGKTIPWFVSDTTIHDFNWLIEQVKHSNHKWMSKCGADWEEYIKMGKWVYHNHIFWTLPHEYCAMPQVAPDLYAELQKAHLILFKGDLNYRKLTGDRKWEFSVPFHQALNGFHPAPLCTIRTLKAEIQVGLQPGQGEQLLASEPSWWTTGKYGIFQYDGPL

SEQ ID NO: 858290 - protein, 441 aa, Homo sapiens; identical to SEQ ID NO: 858288

SEQ ID NO: 858291 - protein, 322 aa, Homo sapiens
MYRRIHEAIIQSPPIDYFDVFKESKEQNFYGSQESIIALCTHLQQLIRTIEDLDENQLKDEFFKLLQISLWGNKCDLSLSGGESSSQNTNVLNSLEDLKPFILLNDMEHLWSLLSNCKKTREKASATRVYIVLDNSGFELVTDLILADFLLSSELATEVHFYGKTIPWFVSDTTIHDFNWLIEQVKHSNHKWMSKCGADWEEYIKMGKWVYHNHIFWTLPHEYCAMPQVAPDLYAELQKAHLILFKGDLNYRKLTGDRKWEFSVPFHQALNGFHPAPLCTIRTLKAEIQVGLQPGQGEQLLASEPSWWTTGKYGIFQYDGPL

SEQ ID NO: 858292 - protein, 152 aa, Homo sapiens
MAVVPASLSGQDVGSFAYLTIKDRIPQILTKVIDTLHRHKSEFFEKHGEEGVEAEKKAISLLSKLRNELQTDKPFIPLVEKFVDTDIWNQYLEYQQSLLNESDGKSRWFYSPWLLVECYMYRRIHEAIIQSPPIDYFDVFKESKEQTIDKNY

SEQ ID NO: 858293 - protein, 441 aa, Homo sapiens; identical to SEQ ID NO: 858288

SEQ ID NO: 858294 - protein, 441 aa, Homo sapiens; identical to SEQ ID NO: 858288

SEQ ID NO: 858295 - protein, 447 aa, Homo sapiens
RKTQEAQAGSQDMAAFADSNLTASVSAAIEQPSFAAGIAESDGCRPGVSLRTGRGEGVEAEKKAISLLSKLRNELQTDKPFIPLVEKFVDTDIWNQYLEYQQSLLNESDGKSRWFYSPWLLVECYMYRRIHEAIIQSPPIDYFDVFKESKEQNFYGSQESIIALCTHLQQLIRTIEDLDENQLKDEFFKLLQISLWGNKCDLSLSGGESSSQNTNVLNSLEDLKPFILLNDMEHLWSLLSNCKKTREKASATRVYIVLDNSGFELVTDLILADFLLSSELATEVHFYGKTIPWFVSDTTIHDFNWLIEQVKHSNHKWMSKCGADWEEYIKMGKWVYHNHIFWTLPHEYCAMPQVAPDLYAELQKAHLILFKGDLNYRKLTGDRKWEFSVPFHQALNGFHPAPLCTIRTLKAEIQVGLQPGQGEQLLASEPSWWTTGKYGIFQYDGPL

SEQ ID NO: 858296 - protein, 556 aa, Homo sapiens
MELCGLGLPRPPMLLALLLATLLAAMLALLTQVALVVQVAEAARAPSVSAKPGPALWPLPLSVKMTPNLLHLAPENFYISHSPNSTAGPSCTLLEEAFRRYHGYIFGFYKWHHEPAEFQAKTQVQQLLVSITLQSECDAFPNISSDESYTLLVKEPVAVLKANRVWGALRGLETFSQLVYQDSYGTFTINESTIIDSPRFSHRGILIDTSRHYLPVKIILKTLDAMAFNKFNVLHWHIVDDQSFPYQSITFPELSNKGSYSLSHVYTPNDVRMVIEYARLRGIRVLPEFDTPGHTLSWGKGQKDLLTPCYSRQNKLDSFGPINPTLNTTYSFLTTFFKEISEVFPDQFIHLGGDEVEFKCWESNPKIQDFMRQKGFGTDFKKLESFYIQKVLDIIATINKGSIVWQEVFDDKAKLAPGTIVEVWKDSAYPEELSRVTASGFPVILSAPWYLDLISYGQDWRKYYKVEPLDFGGTQKQKQLFIGGEACLWGEYVDATNLTPRLWPRASAVGERLWSSKDVRDMDDAYDRLTRHRCRMVERGIAAQPLYAGYCNHENM

SEQ ID NO: 858297 - protein, 112 aa, Homo sapiens
MPRRKEGQPGRGLRPERWLADRLPMAFASVCRPHAADPVSRTRRASPERVTVGQSKPATAGAAEGGGLCARGRELESALCAGGRQASGPGLRSATAAPPPLRLPEQSAPRRR

SEQ ID NO: 858298 - protein, 556 aa, Homo sapiens; identical to SEQ ID NO: 858296

SEQ ID NO: 858299 - protein, 556 aa, Homo sapiens; identical to SEQ ID NO: 858296

SEQ ID NO: 858300 - protein, 556 aa, Homo sapiens; identical to SEQ ID NO: 858296

SEQ ID NO: 858301 - protein, 571 aa, Homo sapiens
MELCGLGLPRPPMLLALLLATLLAAMLALLTQVALVVQVAEAARAPSVSAKPGPALWPLPLSVKMTPNLLHLAPENFYISHSPNSTAGPSCTLLEEAFRRYHGYIFGFYKWHHEPAEFQAKTQVQQLLVSITLQSECDAFPNISSDESYTLLVKEPVAVLKANRVWGALRGLETFSQLVYQDSYGTFTINESTIIDSPRFSHRGILIDTSRHYLPVKIILKTLEESRNDAVFFISAYQDAMAFNKFNVLHWHIVDDQSFPYQSITFPELSNKGSYSLSHVYTPNDVRMVIEYARLRGIRVLPEFDTPGHTLSWGKGQKDLLTPCYSRQNKLDSFGPINPTLNTTYSFLTTFFKEISEVFPDQFIHLGGDEVEFKCWESNPKIQDFMRQKGFGTDFKKLESFYIQKVLDIIATINKGSIVWQEVFDDKAKLAPGTIVEVWKDSAYPEELSRVTASGFPVILSAPWYLDLISYGQDWRKYYKVEPLDFGGTQKQKQLFIGGEACLWGEYVDATNLTPRLWPRASAVGERLWSSKDVRDMDDAYDRLTRHRCRMVERGIAAQPLYAGYCNHENM

SEQ ID NO: 858302 - protein, 237 aa, Homo sapiens
MELCGLGLPRPPMLLALLLATLLAAMLALLTQVALVVQVAEAARAPSVSAKPGPALWPLPLSVKMTPNLLHLAPENFYISHSPNSTAGPSCTLLEEAFRRYHGYIFGFYKWHHEPAEFQAKTQVQQLLVSITLQSECDAFPNISSDESYTLLVKEPVAVLKANRVWGALRGLETFSQLVYQDSYGTFTINESTIIDSPRFSHRGILIDTSRHYLPVKIILKTLMTSLSHIRASLFLS

SEQ ID NO: 858303 - protein, 544 aa, Homo sapiens
MELCGLGLPRPPMLLALLLATLLAAMLALLTQVALVVQVAEAARAPSVSAKPGPALWPLPLSVKMTPNLLHLAPENFYISHSPNSTAGPSCTLLEEAFRRYHGYIFGFYKWHHEPAEFQAKTQVQQLLVSITLQSECDAFPNISSDESYTLLVKEPVAVLKANRVWGALRGLETFSQLVYQDSYGTFTINESTIIDSPRFSHRGILIDTSRHYLPVKIILKTLDAMAFNKFNVLHWHIVDDQSFPYQSITFPELSNKGSYSLSHVYTPNDVRMVIEYARLRGIRVLPEFDTPGHTLSWGKGQKDLLTPCYSRQNKLDSFGPINPTLNTTYSFLTTFFKEISEVFPDQFIHLGGDEVEFKCWESNPKIQDFMRQKGFGTDFKKLESFYIQKVLDIIATINKGSIVWQEVFDDKAKLAPGTIVEVWKDSAYPEELSRVTASGFPVILSAPWYLDLISYGQDWRKYYKVEPLDFGGTQKQKQLFIGGEACLWGEYVDATNLTPRLWPRASAVGERLWSSKDVRDMDDAYDRLTRHRCRMVEGLASFL

SEQ ID NO: 858304 - protein, 331 aa, Homo sapiens
MAFNKFNVLHWHIVDDQSFPYQSITFPELSNKGSYSLSHVYTPNDVRMVIEYARLRGIRVLPEFDTPGHTLSWGKGQKDLLTPCYSRQNKLDSFGPINPTLNTTYSFLTTFFKEISEVFPDQFIHLGGDEVEFKCWESNPKIQDFMRQKGFGTDFKKLESFYIQKVLDIIATINKGSIVWQEVFDDKAKLAPGTIVEVWKDSAYPEELSRVTASGFPVILSAPWYLDLISYGQDWRKYYKVEPLDFGGTQKQKQLFIGGEACLWGEYVDATNLTPRLWPRASAVGERLWSSKDVRDMDDAYDRLTRHRCRMVERGIAAQPLYAGYCNHENM

SEQ ID NO: 858305 - protein, 583 aa, Homo sapiens
MELCGLGLPRPPMLLALLLATLLAAMLALLTQVALVVQVAEAARAPSVSAKPGPALWPLPLSVKMTPNLLHLAPENFYISHSPNSTAGPSCTLLEEAFRRYHGYIFGFYKWHHEPAEFQAKTQVQQLLVSITLQSECDAFPNISSDESYTLLVKEPVAVLKANRVWGALRGLETFSQLVYQDSYGTFTINESTIIDSPRFSHRGILIDTSRHYLPVKIILKTLDAMAFNKFNVLHWHIVDDQSFPYQSITFPELSNKGSYSLSHVYTPNDVRMVIEYARLRGIRVLPEFDTPGHTLSWGKGQKDLLTPCYSRQNKLDSFGPINPTLNTTYSFLTTFFKEISEVFPDQFIHLGGDEVEFKCWESNPKIQDFMRQKGFGTDFKKLESFYIQKVLDIIATINKGSIVWQEVFDDKAKLAPGTIVEVWKDSAYPEELSRVTASGFPVILSAPWYLDLISYGQDWRKYYKVEPLDFGGTQKQKQLFIGGEACLWGEYVDATNLTPRLWPRASAVGERLWSSKDVRDMDDAYDRLTRHRCRMVELGIAGPPLELVCYPVKLYNAGEKGQIVYTTFFEPVTQFNGLDNQF

SEQ ID NO: 858306 - protein, 470 aa, Homo sapiens
MELCGLGLPRPPMLLALLLATLLAAMLALLTQVALVVQVAEAARAPSVSAKPGPALWPLPLSVKMTPNLLHLAPENFYISHSPNSTAGPSCTLLEEAFRRYHGYIFGFYKWHHEPAEFQAKTQVQQLLVSITLQSECDAFPNISSDESYTLLVKEPVAVLKANRVWGALRGLETFSQLVYQDSYGTFTINESTIIDSPRFSHRGILIDTSRHYLPVKIILKTLDAMAFNKFNVLHWHIVDDQSFPYQSITFPELSNKGSYSLSHVYTPNDVRMVIEYARLRGIRVLPEFDTPGHTLSWGKGQKDLLTPCYSRQNKLDSFGPINPTLNTTYSFLTTFFKEISEVFPDQFIHLGGDEVEFKCWESNPKIQDFMRQKGFGTDFKKLESFYIQKVLDIIATINKGSIVWQEVFDDKAKVLRNRNNFSLVEKLVYGENMWMQLTSLQDYGLGQVLLVRDSGVPKMSEIWMTPMTD

SEQ ID NO: 858307 - protein, 315 aa, Homo sapiens
MESWGQSITLPELRNKGSYSLSHVYTPNDVRMVIEYARLRGIRVLPEFDTPGHTLSWGKGQKDLLTPCYSRQNKLDSFGPINPTLNTTYSFLTTFFKEISEVFPDQFIHLGGDEVEFKCWESNPKIQDFMRQKGFGTDFKKLESFYIQKVLDIIATINKGSIVWQEVFDDKAKLAPGTIVEVWKDSAYPEELSRVTASGFPVILSAPWYLDLISYGQDWRKYYKVEPLDFGGTQKQKQLFIGGEACLWGEYVDATNLTPRLWPRASAVGERLWSSKDVRDMDDAYDRLTRHRCRMVERGIAAQPLYAGYCNHENM

SEQ ID NO: 858308 - protein, 415 aa, Homo sapiens
MELCGLGLPRPPMLLALLLATLLAAMLALLTQVALVVQVAEAARAPSVSAKPGPALWPLPLSVKMTPNLLHLAPENFYISHSPNSTAGPSCTLLEEAFRRYHGYIFGFYKWHHEPAEFQAKTQVQQLLVSITLQSECDAFPNISSDESYTLLVKEPVAVLKANRVWGALRGLETFSQLVYQDSYGTFTINESTIIDSPRFSHRGILIDTSRHYLPVKIILKTLDAMAFNKFNVLHWHIVDDQSFPYQSITFPELSNKGSYSLSHVYTPNDVRMVIEYARLRGIRVLPEFDTPGHTLSWGKGQKDLLTPCYSRQNKLDSFGPINPTLNTTYSFLTTFFKEISEVFPDQFIHLGGDEVEFKCWESNPKIQDFMRQKGFGTDFKKLESFYIQKVLDIIATINKGSIVWQEVFDDKAKI

SEQ ID NO: 858309 - protein, 390 aa, Homo sapiens [sequence omitted]

SEQ ID NO: 858310 - protein, 163 aa, Homo sapiens
  misc_feature (3)..(3): Xaa can be any naturally occurring amino acid
  misc_feature (8)..(8): Xaa can be any naturally occurring amino acid
  misc_feature (11)..(11): Xaa can be any naturally occurring amino acid
  misc_feature (13)..(18): Xaa can be any naturally occurring amino acid
  misc_feature (20)..(20): Xaa can be any naturally occurring amino acid
  misc_feature (22)..(23): Xaa can be any naturally occurring amino acid
  misc_feature (25)..(25): Xaa can be any naturally occurring amino acid
  misc_feature (28)..(31): Xaa can be any naturally occurring amino acid
  misc_feature (33)..(36): Xaa can be any naturally occurring amino acid
  misc_feature (38)..(43): Xaa can be any naturally occurring amino acid
  misc_feature (47)..(47): Xaa can be any naturally occurring amino acid
  misc_feature (50)..(50): Xaa can be any naturally occurring amino acid
  misc_feature (52)..(52): Xaa can be any naturally occurring amino acid
  misc_feature (54)..(54): Xaa can be any naturally occurring amino acid
  misc_feature (56)..(56): Xaa can be any naturally occurring amino acid
  misc_feature (59)..(60): Xaa can be any naturally occurring amino acid
  misc_feature (62)..(62): Xaa can be any naturally occurring amino acid
  misc_feature (64)..(64): Xaa can be any naturally occurring amino acid
  misc_feature (66)..(68): Xaa can be any naturally occurring amino acid
  misc_feature (73)..(74): Xaa can be any naturally occurring amino acid
  misc_feature (77)..(77): Xaa can be any naturally occurring amino acid
  misc_feature (79)..(80): Xaa can be any naturally occurring amino acid
  misc_feature (82)..(82): Xaa can be any naturally occurring amino acid
  misc_feature (84)..(84): Xaa can be any naturally occurring amino acid
  misc_feature (87)..(94): Xaa can be any naturally occurring amino acid
  misc_feature (96)..(98): Xaa can be any naturally occurring amino acid
  misc_feature (100)..(102): Xaa can be any naturally occurring amino acid
  misc_feature (108)..(108): Xaa can be any naturally occurring amino acid
  misc_feature (110)..(110): Xaa can be any naturally occurring amino acid
KKXNQKQXSQXRXXXXXXEXKXXPXTRXXXXKXXXXPXXXXXXTAAXGPXSXAXPXNGXXRXEXQXXXKDEKXXPRXGXXTXKXKQXXXXXXXXLXXXNXXXTNLTPXLXPRASAVGERLWSSKDVRDMDDAYDRLTRHRCRMVERGIAAQPLYAGYCNHENM

SEQ ID NO: 858311 - protein, 245 aa, Homo sapiens
MELCGLGLPRPPMLLALLLATLLAAMLALLTQVALVVQVAEAARAPSVSAKPGPALWPLPLSVKMTPNLLHLAPENFYISHSPNSTAGPSCTLLEEAFRRYHGYIFGFYKWHHEPAEFQAKTQVQQLLVSITLQSECDAFPNISSDESYTLLVKEPVAVLKANRVWGALRGLETFSQLVYQDSYGTFTINESTIIDSPRFSHRGILIDTSRHYLPVKIILKTLSQALKVTVFLAYVTVFPISSFE

SEQ ID NO: 858312 - protein, 171 aa, Homo sapiens [sequence omitted]

SEQ ID NO: 858313 - protein, 226 aa, Homo sapiens
EVFHFISSQMNELIWKHLTNLGGDEVEFKCWESNPKIQDFMRQKGFGTDFKKLESFYIQKVLDIIATINKGSIVWQEVFDDKAKLAPGTIVEVWKDSAYPEELSRVTASGFPVILSAPWYLDLISYGQDWRKYYKVEPLDFGGTQKQKQLFIGGEACLWGEYVDATNLTPRLWPRASAVGERLWSSKDVRDMDDAYDRLTRHRCRMVERGIAAQPLYAGYCNHENM

SEQ ID NO: 858314 - protein, 556 aa, Homo sapiens; identical to SEQ ID NO: 858296

SEQ ID NO: 858315 - protein, 556 aa, Homo sapiens; identical to SEQ ID NO: 858296

SEQ ID NO: 858316 - protein, 538 aa, Homo sapiens
MELCGLGLPRPPMLLALLLATLLAAMLALLTQVALVVQVAEAARAPSVSAKPGPALWPLPLSVKMTPNLLHLAPENFYISHSPNSTAGPSCTLLEEAFRRYHGYIFGFYKWHHEPAEFQAKTQVQQLLVSITLQSECDAFPNISSDESYTLLVKEPVAVLKANRVWGALRGLETFSQLVYQDSYGTFTINESTIIDSPRFSHRGILIDTSRHYLPVKIILKTLDAMAFNKFNVLHWHIVDDQSFPYQSITFPELSNKGSYSLSHVYTPNDVRMVIEYARLRGIRVLPEFDTPGHTLSWGKGQKDLLTPCYSRQNKLDSFGPINPTLNTTYSFLTTFFKEISEVFPDQFIHLGGDEVEFKCWESNPKIQDFMRQKGFGTDFKKLESFYIQKVLDIIATINKGSIVWQEVFDDKAKLAPGTIVEVWKDSAYPEELSRVTASGFPVILSAPWYLDLISYGQDWRKYYKVEPLDFGGTQKQKQLFIGGEACLWGEYVDATNLTPRLWPRASAVGERLWSSKDVRDMDDAYDRLTRHRCRMVE

SEQ ID NO: 858317 - protein, 739 aa, Homo sapiens
MWINSVFHLQAHQFLSFVTNNVNTTDQETSFSESSFHSFSIDISAAVNMPALRVSVMAPTFLQAGEDATWANHPARSALEAAGSDAARHSPPGKRCFPQRREADCILSSAPRFPSGSPQTLHRGGEAGRPLRRCPASACCGRAAAGTVISAPRRAPLAPSRSSRVLGARSPLANTPLQPKQPLKPAAPATGPGQWGKLTAVATGRNAQLSSSDGHGQGGDEPVVSAQGSGGECPGERRASRGEDCAPNDGSRTGYRWRSPPSVVPTPRTRCPGPAERLRSASRYHGYIFGFYKWHHEPAEFQAKTQVQQLLVSITLQSECDAFPNISSDESYTLLVKEPVAVLKANRVWGALRGLETFSQLVYQDSYGTFTINESTIIDSPRFSHRGILIDTSRHYLPVKIILKTLDAMAFNKFNVLHWHIVDDQSFPYQSITFPELSNKGSYSLSHVYTPNDVRMVIEYARLRGIRVLPEFDTPGHTLSWGKGQKDLLTPCYSRQNKLDSFGPINPTLNTTYSFLTTFFKEISEVFPDQFIHLGGDEVEFKCWESNPKIQDFMRQKGFGTDFKKLESFYIQKVLDIIATINKGSIVWQEVFDDKAKLAPGTIVEVWKDSAYPEELSRVTASGFPVILSAPWYLDLISYGQDWRKYYKVEPLDFGGTQKQKQLFIGGEACLWGEYVDATNLTPRLWPRASAVGERLWSSKDVRDMDDAYDRLTRHRCRMVERGIAAQPLYAGYCNHENM

SEQ ID NO: 858318 - protein, 538 aa, Homo sapiens; identical to SEQ ID NO: 858316

SEQ ID NO: 858319 - protein, 544 aa, Homo sapiens; identical to SEQ ID NO: 858303

SEQ ID NO: 858320 - protein, 331 aa, Homo sapiens; identical to SEQ ID NO: 858304

SEQ ID NO: 858321 - protein, 415 aa, Homo sapiens; identical to SEQ ID NO: 858308

SEQ ID NO: 858322 - protein, 485 aa, Homo sapiens
MELCGLGLPRPPMLLALLLATLLAAMLALLTQVALVVQVAEAARAPSVSAKPGPALWPLPLSVKMTPNLLHLAPENFYISHSPNSTAGPSCTLLEEAFRRYHGYIFGFYKWHHEPAEFQAKTQVQQLLVSITLQSECDAFPNISSDESYTLLVKEPVAVLKANRVWGALRGLETFSQLVYQDSYGTFTINESTIIDSPRFSHRGILIDTSRHYLPVKIILKTLDAMAFNKFNVLHWHIVDDQSFPYQSITFPELSNKGSYSLSHVYTPNDVRMVIEYARLRGIRVLPEFDTPGHTLSWGKGQKDLLTPCYSRQNKLDSFGPINPTLNTTYSFLTTFFKEISEVFPDQFIHLGGDEVEFKCWESNPKIQDFMRQKGFGTDFKKLESFYIQKVLDIIATINKGSIVWQEVFDDKAKLAPGTIVEVWKDSAYPEELSRVTASGFPVILSAPWYLDLISYGQDWRKYYKVEPLDFGAQKQKQLFIVQEC

SEQ ID NO: 858323 - protein, 316 aa, Homo sapiens
MELCGLGLPRPPMLLALLLATLLAAMLALLTQVALVVQVAEAARAPSVSAKPGPALWPLPLSVKMTPNLLHLAPENFYISHSPNSTAGPSCTLLEEAFRRYHGYIFGFYKWHHEPAEFQAKTQVQQLLVSITLQSECDAFPNISSDESYTLLVKEPVAVLKANRVWGALRGLETFSQLVYQDSYGTFTINESTIIDSPRFSHRGILIDTSRHYLPVKIILKTLDAMAFNKFNVLHWHIVDDQSFPYQSITFPELSNKGSYSLSHVYTPNDVRMVIEYARLRGIRVLPEFDTPGHTLSWGKAERPPDSMLQHRWLQL

SEQ ID NO: 858324 - protein, 302 aa, Homo sapiens
MELCGLGLPRPPMLLALLLATLLAAMLALLTQVALVVQVAEAARAPSVSAKPGPALWPLPLSVKMTPNLLHLAPENFYISHSPNSTAGPSCTLLEEAFRRYHGYIFGFYKWHHEPAEFQAKTQVQQLLVSITLQSECDAFPNISSDESYTLLVKEPVAVLKANRVWGALRGLETFSQLVYQDSYGTFTINESTIIDSPRFSHRGILMKYYKVEPLDFGGTQKQKQLFIGGEACLWGEYVDATNLTPRLWPRASAVGERLWSSKDVRDMDDAYDRLTRHRCRMVERGIAAQPLYAGYCNHENM

SEQ ID NO: 858325 - protein, 130 aa, Homo sapiens
AAALPLIRAGREVGSRGSGSADRAESSRAAMELCGLGLPRPPMLLALLLATLLAAMLALLTQVALVVQVAEAARAPSVSAKPGPALWPLPLSVKMTPNLLHLAPENFYISHSPNSTAGPSCTLLEEAFRR

SEQ ID NO: 858326 - protein, 1447 aa, Homo sapiens
MWPSQLLIFMMLLAPIIHAFSRAPIPMAVVRRELSCESYPIELRCPGTDVIMIESANYGRTDDKICDSDPAQMENIRCYLPDAYKIMSQRCNNRTQCAVVAGPDVFPDPCPGTYKYLEVQYECVPYKVEQKVFLCPGLLKGVYQSEHLFESDHQSGAWCKDPLQASDKIYYMPWTPYRTDTLTEYSSKDDFIAGRPTTTYKLPHRVDGTGFVVYDGALFFNKERTRNIVKFDLRTRIKSGEAIIANANYHDTSPYRWGGKSDIDLAVDENGLWVIYATEQNNGKIVISQLNPYTLRIEGTWDTAYDKRSASNAFMICGILYVVKSVYEDDDNEATGNKIDYIYNTDQSKDSLVDVPFPNSYQYIAAVDYNPRDNLLYVWNNYHVVKYSLDFGPLDSRSGQAHHGQVSYISPPIHLDSELERPSVKDISTTGPLGMGSTTTSTTLRTTTLSPGRSTTPSVSGRRNRSTSTPSPAVEVLDDMTTHLPSASSQIPALEESCEAVEAREIMWFKTRQGQIAKQPCPAGTIGVSTYLCLAPDGIWDPQGPDLSNCSSPWVNHITQKLKSGETAANIARELAEQTRNHLNAGDITYSVRAMDQLVGLLDVQLRNLTPGGKDSAARSLNKAMVETVNNLLQPQALNAWRDLTTSDQLRAATMLLHTVEESAFVLADNLLKTDIVRENTDNIKLEVARLSTEGNLEDLKFPENMGHGSTIQLSANTLKQNGRNGEIRVAFVLYNNLGPYLSTENASMKLGTEALSTNHSVIVNSPVITAAINKEFSNKVYLADPVVFTVKHIKQSEENFNPNCSFWSYSKRTMTGYWSTQGCRLLTTNKTHTTCSCNHLTNFAVLMAHVEVKHSDAVHDLLLDVITWVGILLSLVCLLICIFTFCFFRGLQSDRNTIHKNLCISLFVAELLFLIGINRTDQPIACAVFAALLHFFFLAAFTWMFLEGVQLYIMLVEVFESEHSRRKYFYLVGYGMPALIVAVSAAVDYRSYGTDKVCWLRLDTYFIWSFIGPATLIIMLNVIFLGIALYKMFHHTAILKPESGCLDNIKSWVIGAIALLCLLGLTWAFGLMYINESTVIMAYLFTIFNSLQGMFIFIFHCVLQKKVRKEYGKCLRTHCCSGKSTESSIGSGKTSGSRTPGRYSTGSQSRIRRMWNDTVRKQSESSFITGDINSSASLNREGLLNNARDTSVMDTLPLNGNHGNSYSIASGEYLSNCVQIIDRGYNHNETALEKKILKELTSNYIPSYLNNHERSSEQNRNLMNKLVNNLGSGREDDAIVLDDATSFNHEESLGLELIHEESDAPLLPPRVYSTENHQPHHYTRRRIPQDHSESFFPLLTNEHTEDLQSPHRDSLYTSMPTLAGVAATESVTTSTQTEPPPAKCGDAEDVYYKSMPNLGSRNHVHQLHTYYQLGRGSSDGFIVPPNKDGTPPEGSSKGPAHLVTSL

SEQ ID NO: 858327 - protein, 1529 aa, Homo sapiens
MWPSQLLIFMMLLAPIIHAFSRAPIPMAVVRRELSCESYPIELRCPGTDVIMIESANYGRTDDKICDSDPAQMENIRCYLPDAYKIMSQRCNNRTQCAVVAGPDVFPDPCPGTYKYLEVQYECVPYKVEQKVFLCPGLLKGVYQSEHLFESDHQSGAWCKDPLQASDKIYYMPWTPYRTDTLTEYSSKDDFIAGRPTTTYKLPHRVDGTGFVVYDGALFFNKERTRNIVKFDLRTRIKSGEAIIANANYHDTSPYRWGGKSDIDLAVDENGLWVIYATEQNNGKIVISQLNPYTLRIEGTWDTAYDKRSASNAFMICGILYVVKSVYEDDDNEATGNKIDYIYNTDQSKDSLVDVPFPNSYQYIAAVDYNPRDNLLYVWNNYHVVKYSLDFGPLDSRSGQAHHGQVSYISPPIHLDSELERPSVKDISTTGPLGMGSTTTSTTLRTTTLSPGRSTTPSVSGRRNRSTSTPSPAVEVLDDMTTHLPSASSQIPALEESCEAVEAREIMWFKTRQGQIAKQPCPAGTIGVSTYLCLAPDGIWDPQGPDLSNCSSPWVNHITQKLKSGETAANIARELAEQTRNHLNAGDITYSVRAMDQLVGLLDVQLRNLTPGGKDSAARSLNKLQKRERSCRAYVQAMVETVNNLLQPQALNAWRDLTTSDQLRAATMLLHTVEESAFVLADNLLKTDIVRENTDNIKLEVARLSTEGNLEDLKFPENMGHGSTIQLSANTLKQNGRNGEIRVAFVLYNNLGPYLSTENASMKLGTEALSTNHSVIVNSPVITAAINKEFSNKVYLADPVVFTVKHIKQSEENFNPNCSFWSYSKRTMTGYWSTQGCRLLTTNKTHTTCSCNHLTNFAVLMAHVEVKHSDAVHDLLLDVITWVGILLSLVCLLICIFTFCFFRGLQSDRNTIHKNLCISLFVAELLFLIGINRTDQPIACAVFAALLHFFFLAAFTWMFLEGVQLYIMLVEVFESEHSRRKYFYLVGYGMPALIVAVSAAVDYRSYGTDKVCWLRLDTYFIWSFIGPATLIIMLNVIFLGIALYKMFHHTAILKPESGCLDNINYEDNRPFIKSWVIGAIALLCLLGLTWAFGLMYINESTVIMAYLFTIFNSLQGMFIFIFHCVLQKKVRKEYGKCLRTHCCSGKSTESSIGSGKTSGSRTPGRYSTGSQSRIRRMWNDTVRKQSESSFITGDINSSASLNRGAMANHLISNALLRPHGTNNPYNTLLGEPAVCNNPSVSMYNAQEPYRETSMGVKLNIAYQKGLLNNARDTSVMDTLPLNGNHGNSYSIASGEYLSNCVQIIDRGYNHNETALEKKILKELTSNYIPSYLNNHERSSEQNRNLMNKLVNNLGSGREDDAIVLDDATSFNHEESLGLELIHEESDAPLLPPRVYSTENHQPHHYTRRRIPQDHSESFFPLLTNEHTEDLQSPHRDSLYTSMPTLAGVAATESVTTSTQTEPPPAKCGDAEDVYYKSMPNLGSRNHVHQLHTYYQLGRGSSDGFIVPPNKDGTPPEGSSKGPAHLVTSL

SEQ ID NO: 858328 - protein, 254 aa, Homo sapiens [sequence omitted]

SEQ ID NO: 858329 - protein, 160 aa, Homo sapiens [sequence omitted]

SEQ ID NO: 858330 - protein, 1486 aa, Homo sapiens
MWPSQLLIFMMLLAPIIHAFSRAPIPMAVVRRELSCESYPIELRCPGTDVIMIESANYGRTDDKICDSDPAQMENIRCYLPDAYKIMSQRCNNRTQCAVVAGPDVFPDPCPGTYKYLEVQYECVPYKVEQKVFLCPGLLKGVYQSEHLFESDHQSGAWCKDPLQASDKIYYMPWTPYRTDTLTEYSSKDDFIAGRPTTTYKLPHRVDGTGFVVYDGALFFNKERTRNIVKFDLRTRIKSGEAIIANANYHDTSPYRWGGKSDIDLAVDENGLWVIYATEQNNGKIVISQLNPYTLRIEGTWDTAYDKRSASNAFMICGILYVVKSVYEDDDNEATGNKIDYIYNTDQSKDSLVDVPFPNSYQYIAAVDYNPRDNLLYVWNNYHVVKYSLDFGPLDSRSGQAHHGQVSYISPPIHLDSELERPSVKDISTTGPLGMGSTTTSTTLRTTTLSPGRSTTPSVSGRRNRSTSTPSPAVEVLDDMTTHLPSASSQIPALEESCEAVEAREIMWFKTRQGQIAKQPCPAGTIGVSTYLCLAPDGIWDPQGPDLSNCSSPWVNHITQKLKSGETAANIARELAEQTRNHLNAGDITYSVRAMDQLVGLLDVQLRNLTPGGKDSAARSLNKLQKRERSCRAYVQAMVETVNNLLQPQALNAWRDLTTSDQLRAATMLLHTVEESAFVLADNLLKTDIVRENTDNIKLEVARLSTEGNLEDLKFPENMGHGSTIQLSANTLKQNGRNGEIRVAFVLYNNLGPYLSTENASMKLGTEALSTNHSVIVNSPVITAAINKEFSNKVYLADPVVFTVKHIKQSEENFNPNCSFWSYSKRTMTGYWSTQGCRLLTTNKTHTTCSCNHLTNFAVLMAHVEVKHSDAVHDLLLDVITWVGILLSLVCLLICIFTFCFFRGLQSDRNTIHKNLCISLFVAELLFLIGINRTDQPIACAVFAALLHFFFLAAFTWMFLEGVQLYIMLVEVFESEHSRRKYFYLVGYGMPALIVAVSAAVDYRSYGTDKVCWLRLDTYFIWSFIGPATLIIMLNVIFLGIALYKMFHHTAILKPESGCLDNINYEDNRPFIKSWVIGAIALLCLLGLTWAFGLMYINESTVIMAYLFTIFNSLQGMFIFIFHCVLQKKVRKEYGKCLRTHCCSGKSTESSIGSGKTSGSRTPGRYSTGSQSRIRRMWNDTVRKQSESSFITGDINSSASLNREPYRETSMGVKLNIAYQKGLLNNARDTSVMDTLPLNGNHGNSYSIASGEYLSNCVQIIDRGYNHNETALEKKILKELTSNYIPSYLNNHERSSEQNRNLMNKLVNNLGSGREDDAIVLDDATSFNHEESLGLELIHEESDAPLLPPRVYSTENHQPHHYTRRRIPQDHSESFFPLLTNEHTEDLQSPHRDSLYTSMPTLAGVAATESVTTSTQTEPPPAKCGDAEDVYYKSMPNLGSRNHVHQLHTYYQLGRGSSDGFIVPPNKDGTPPEGSSKGPAHLVTSL

SEQ ID NO: 858331 - protein, 254 aa, Homo sapiens [sequence omitted]

SEQ ID NO: 858332 - protein, 674 aa, Homo sapiens
MWPSQLLIFMMLLAPIIHAFSRAPIPMAVVRRELSCESYPIELRCPGTDVIMIESANYGRTDDKICDSDPAQMENIRCYLPDAYKIMSQRCNNRTQCAVVAGPDVFPDPCPGTYKYLEVQYECVPYKVEQKVFLCPGLLKGVYQSEHLFESDHQSGAWCKDPLQASDKIYYMPWTPYRTDTLTEYSSKDDFIAGRPTTTYKLPHRVDGTGFVVYDGALFFNKERTRNIVKFDLRTRIKSGEAIIANANYHDTSPYRWGGKSDIDLAVDENGLWVIYATEQNNGKIVISQLNPYTLRIEGTWDTAYDKRSASNAFMICGILYVVKSVYEDDDNEATGNKIDYIYNTDQSKDSLVDVPFPNSYQYIAAVDYNPRDNLLYVWNNYHVVKYSLDFGPLDSRSGQAHHGQVSYISPPIHLDSELERPSVKDISTTGPLGMGSTTTSTTLRTTTLSPGRSTTPSVSGRRNRSTSTPSPAVEVLDDMTTHLPSASSQIPALEESCEAVEAREIMWFKTRQGQIAKQPCPAGTIGVSTYLCLAPDGIWDPQGPDLSNCSSPWVNHITQKLKSGETAANIARELAEQTRNHLNAGDITYSVRAMDQLVGLLDVQLRNLTPGGKDSAARSLNKAMVETVNNLLQPQALNAWRDLTTSDQLRAATMLLHTVEESAFVWSCKFVYQ

SEQ ID NO: 858333 - protein, 261 aa, Homo sapiens
PALRRAAPRYCCGGRWGAQLGRGSEGRLGGRARPEAEAGPGCGAEAQHGLALGPTFPAAPGSSGRTGIANWRPHCTATSTTLNRRTPAADPTGAGRVSGKPGVCESAPSTQCQRGQREPPGLGSAVLQEAVSTGDPEMVQLVLQYRDYQRATQRLAGIPELLNKLRQAQGHVGKRDGQAHVGETGPFGREALPALGLLKNADYLEQGLQVDSVDYGLKPWNTCYYAPFWKHTEGPGWQSILSHTPYPRSRLGGSHCAPFTE

SEQ ID NO: 858334 - protein, 309 aa, Homo sapiens
PALRRAAPRYCCGGRWGAQLGRGSEGRLGGRARPEAEAGPGCGAEAQHGLALGPTFPAAPGSSGRTGIANWRPHCTATSTTLNRRTPAADPTGAGRVSGKPGVCESAPSTQCQRGQREPPGLGSAVLQEAVSTGDPEMVQLVLQYRDYQRATQRLAGIPELLNKLRQVQQGTVMEVGYHGRAPPWLLCQAWPWKGTQFVQCASCHQQGGLSILTPAQGHVGKRDGQAHVGETGPFGREALPALGLLKNADYLEQGLQVDSVDYGLKPWNTCYYAPFWKHTEGPGWQSILSHTPYPRSRLGGSHCAPFTE

SEQ ID NO: 858335 - protein, 233 aa, Homo sapiens
PALRRAAPRYCCGGRWGAQLGRGSEGRLGGRARPEAEAGPGCGAEAQHGLALGPTFPAAPGSSGRTGIANWRPHCTATSTTLNRRTPAADPTGAGRVSGKPGVCESAPSTQCQRGQREPPGLGSAVLQEAVSTGDPEMVQLVLQYRDYQRATQRLAGIPELLNKLRQAPDFYVEMKWEFTSWVPLVSKMCPSDVYRVWKRGESLRVDTSLLGFEHMTWQRGRRSFIFKGQGEL

SEQ ID NO: 858336 - protein, 270 aa, Homo sapiens
MACRPRSPPRHQSRCDGDASPPSPARWSLGRKRRADGRRWRPEDAEEAEHRGAERRPESFTTPEGPKPRSRCSDWASAVEEDEMRTRVNKEMARYKRKLLINDFGRERKSSSGSSDSKESMSTVPADFETDESVLMRRQKQINYGKNTIAYDRYIKEVPRHLRQPGIHPKTPNKFKKYSRRSWDQQIKLWKVALHFWDPPAEEGCDLQEIHPVDLESAESSSEPQTSSQDDFDVYSGTPTKVRHMDSQVEDEFDLEACLTEPLRDFSAMS

SEQ ID NO: 858337 - protein, 235 aa, Homo sapiens
MACRPRSPPRHQSRCDGDASPPSPARWSLGRKRRADGRRWRPEDAEEAEHRGAERRPERYKRKLLINDFGRERKSSSGSSDSKESMSTVPADFETDESVLMRRQKQINYGKNTIAYDRYIKEVPRHLRQPGIHPKTPNKFKKYSRRSWDQQIKLWKVALHFWDPPAEEGCDLQEIHPVDLESAESSSEPQTSSQDDFDVYSGTPTKVRHMDSQVEDEFDLEACLTEPLRDFSAMS

SEQ ID NO: 858338 - protein, 300 aa, Homo sapiens
MACRPRSPPRHQSRCDGDASPPSPARWSLGRKRRADGRRWRPEDAEEAEHRGAERRPESFTTPEGPKPRSRCSDWASAVEEDEMRTRVNKEMARYKRKLLINDFGRERKSSSGSSDSKESMSTVPADFETDESVLMRRQKQINYGKNTIAYDRYIKEVPRHLRQPGIHPKTPNKFKKYSRRSWDQQIKLWKVALHFWDPPAEEGCDLQEMYVFIAFLSCDSLIGPVTGAAAHHWDRRSGAKSPSSCWGAEQLLQLGAEFFCTGREAAGRKSLLPGLNLFFQAKSIWEIQFLFVVLLFLLL

SEQ ID NO: 858339 - protein, 270 aa, Homo sapiens; identical to SEQ ID NO: 858336

SEQ ID NO: 858340 - protein, 77 aa, Homo sapiens
EDQVPVDEVVAHAETPVSARYLNGRSCCRDTITSSQDDFDVYSGTPTKVRHMDSQVEDEFDLEACLTEPLRDFSAMS

SEQ ID NO: 858341 - protein, 782 aa, Homo sapiens
RRPVQRPPPATPDPGVWLPPSRDPAMAKRSSLYIRIVEGKNLPAKDITGSSDPYCIVKVDNEPIIRTATVWKTLCPFWGEEYQVHLPPTFHAVAFYVMDEDALSRDDVIGKVCLTRDTIASHPKGFSGWAHLTEVDPDEEVQGEIHLRLEVWPGARACRLRCSVLEARDLAPKDRNGTSDPFVRVRYKGRTRETSIVKKSCYPRWNETFEFELQEGAMEALCVEAWDWDLVSRNDFLGKVVIDVQRLRVVQQEEGWFRLQPDQSKSRRHDEGNLGSLQLEVRLRDETVLPSSYYQPLVHLLCHEVKLGMQGPGQLIPLIEETTSTECRQDVATNLLKLFLGQGLAKDFLDLLFQLELSRTSETNTLFRSNSLASKSMESFLKVAGMQYLHGVLGPIINKVFEEKKYVELDPSKVEVKDVGCSGLHRPQTEAEVLEQSAQTLRAHLGALLSALSRSVRACPAVVRATFRQLFRRVRERFPGAQHENVPFIAVTSFLCLRFFSPAIMSPKLFHLRERHADARTSRTLLLLAKAVQNVGNMDTPASRAKEAWMEPLQPTVRQGVAQLKDFITKLVDIEEKDELDLQRTLSLQAPPVKEGPLFIHRTKGKGPLMSSSFKKLYFSLTTEALSFAKTPSSKCVNELNQWLSALRKVSINNTGLLGSYHPGVFRGDKWSCCHQKEKTGQGCDKTRSRVTLQEWNDPLDHDLEAQLIYRHLLGVEAMLWERHRELSGGAEAGTVPTSPGKVPEDSLARLLRVLQDLREAHSSSPAGSPPSEPNCLLELQT

SEQ ID NO: 858342 - protein, 169 aa, Homo sapiens
RRPVQRPPPATPDPGVWLPPSRDPAMAKRSSLYIRIVEGKNLPAKDITGSSDPYCIVKVDNEPIIRTATVWKTLCPFWGEEYQVHLPPTFHAVAFYVMDEDALSRDDVIGKVCLTRDTIASHPKGFSGWAHLTEVDPDEEVQGEIHLRLEVWPGARACRLRCSVLEARS

SEQ ID NO: 858343 - protein, 851 aa, Homo sapiens
RRPVQRPPPATPDPGVWLPPSRDPAMAKRSSLYIRIVEGKNLPAKDITGSSDPYCIVKVDNEPIIRYRPHPQDRGALSLSSARALPAKGTATVWKTLCPFWGEEYQVHLPPTFHAVAFYVMDEDALSRDDVIGKVCLTRDTIASHPKGFSGWAHLTEVDPDEEVQGEIHLRLEVWPGARACRLRCSVLEARDLAPKDRNGTSDPFVRVRYKGRTRETSIVKKSCYPRWNETFEFELQEGAMEALCVEAWDWDLVSRNDFLGKVVIDVQRLRVVQQEEGWFRLQPDQSKSRRHDEGNLGSLQLEVRLRDETVLPSSYYQPLVHLLCHEVKLGMQGPGQLIPLIEETTSTECRQDVATNLLKLFLGQGLAKDFLDLLFQLELSRTSETNTLFRSNSLASKSMESFLKVAGMQYLHGVLGPIINKVFEEKKYVELDPSKVEVKDVGCSGLHRPQTEAEVLEQSAQTLRAHLGALLSALSRSVRACPAVVRATFRQLFRRVRERFPGAQHENVPFIAVTSFLCLRFFSPAIMSPKLFHLRERHADARTSRTLLLLAKAVQNVGNMDTPASRAKEAWMEPLQPTVRQGVAQLKDFITKLVDIEEKDELDLQRTLSLQAPPVKEGPLFIHRTKGKGPLMSSSFKKLYFSLTTEALSFAKTPSSKKSALIKLANIRAAEKVEEKSFGGSHVMQVIYTDDAGRPQTAYLQCKCVNELNQWLSALRKVSINNTGLLGSYHPGVFRGDKWSCCHQKEKTGQGCDKTRSRVTLQEWNDPLDHDLEAQLIYRHLLGVEAMLWERHRELSGGAEAGTVPTSPGKVPEDSLARLLRVLQDLREAHSSSPAGSPPSEPNCLLELQT

SEQ ID NO: 858344 - protein, 813 aa, Homo sapiens
RRPVQRPPPATPDPGVWLPPSRDPAMAKRSSLYIRIVEGKNLPAKDITGSSDPYCIVKVDNEPIIRTATVWKTLCPFWGEEYQVHLPPTFHAVAFYVMDEDALSRDDVIGKVCLTRDTIASHPKGFSGWAHLTEVDPDEEVQGEIHLRLEVWPGARACRLRCSVLEARDLAPKDRNGTSDPFVRVRYKGRTRETSIVKKSCYPRWNETFEFELQEGAMEALCVEAWDWDLVSRNDFLGKVVIDVQRLRVVQQEEGWFRLQPDQSKSRRHDEGNLGSLQLEVRLRDETVLPSSYYQPLVHLLCHEVKLGMQGPGQLIPLIEETTSTECRQDVATNLLKLFLGQGLAKDFLDLLFQLELSRTSETNTLFRSNSLASKSMESFLKVAGMQYLHGVLGPIINKVFEEKKCSGLHRPQTEAEVLEQSAQTLRAHLGALLSALSRSVRACPAVVRATFRQLFRRVRERFPGAQHENVPFIAVTSFLCLRFFSPAIMSPKLFHLRERHADARTSRTLLLLAKAVQNVGNMDTPASRAKEAWMEPLQPTVRQGVAQLKDFITKLVDIEEKDELDLQRTLSLQAPPVKEGPLFIHRTKGKGPLMSSSFKKLYFSLTTEALSFAKTPSSKKSALIKLANIRAAEKVEEKSFGGSHVMQVIYTDDAGRPQTAYLQCKCVNELNQWLSALRKVSINNTGLLGSYHPGVFRGDKWSCCHQKEKTGQGCDKTRSRVTLQEWNDPLDHDLEAQLIYRHLLGVEAMLWERHRELSGGAEAGTVPTSPGKVPEDSLARLLRVLQDLREAHSSSPAGSPPSEPNCLLELQT

SEQ ID NO: 858345 - protein, 725 aa, Homo sapiens
LPPSPSSSRDDVIGKVCLTRDTIASHPKGFSGWAHLTEVDPDEEVQGEIHLRLEVWPGARACRLRCSVLEARDLAPKDRNGTSDPFVRVRYKGRTRETSIVKKSCYPRWNETFEFELQEGAMEALCVEAWDWDLVSRNDFLGKVVIDVQRLRVVQQEEGWFRLQPDQSKSRRHDELEVRLRDETVLPSSYYQPLVHLLCHEVKLGMQGPGQLIPLIEETTSTECRQDVATNLLKLFLGQGLAKDFLDLLFQLELSRTSETNTLFRSNSLASKSMESFLKVAGMQYLHGVLGPIINKVFEEKKYVELDPSKVEVKDVGCSGLHRPQTEAEVLEQSAQTLRAHLGALLSALSRSVRACPAVVRATFRQLFRRVRERFPGAQHENVPFIAVTSFLCLRFFSPAIMSPKLFHLRERHADARTSRTLLLLAKAVQNVGNMDTPASRAKEAWMEPLQPTVRQGVAQLKDFITKLVDIEEKDELDLQRTLSLQAPPVKEGPLFIHRTKGKGPLMSSSFKKLYFSLTTEALSFAKTPSSKKSALIKLANIRAAEKVEEKSFGGSHVMQVIYTDDAGRPQTAYLQCKCVNELNQWLSALRKVSINNTGLLGSYHPGVFRGDKWSCCHQKEKTGQGCDKTRSRVTLQEWNDPLDHDLEAQLIYRHLLGVEAMLWERHRELSGGAEAGTVPTSPGKVPEDSLARLLRVLQDLREAHSSSPAGSPPSEPNCLLELQT

SEQ ID NO: 858346 - protein, 617 aa, Homo sapiens
CLYLLFIFGGLCGLVFGRELHPHQANHGARNRDSRKGKAGHCLLHPFTAQSRTGSGDVRSWPVSRAPSPATPWENVLFPWDALRSSEGKVRDPPCLSLQGPGQLIPLIEETTSTECRQDVATNLLKLFLGQGLAKDFLDLLFQLELSRTSETNTLFRSNSLASKSMESFLKVAGMQYLHGVLGPIINKVFEEKKYVELDPSKVEVKDVGCSGLHRPQTEAEVLEQSAQTLRAHLGALLSALSRSVRACPAVVRATFRQLFRRVRERFPGAQHENVPFIAVTSFLCLRFFSPAIMSPKLFHLRERHADARTSRTLLLLAKAVQNVGNMDTPASRAKEAWMEPLQPTVRQGVAQLKDFITKLVDIEEKDELDLQRTLSLQAPPVKEGPLFIHRTKGKGPLMSSSFKKLYFSLTTEALSFAKTPSSKKSALIKLANIRAAEKVEEKSFGGSHVMQVIYTDDAGRPQTAYLQCKCVNELNQWLSALRKVSINNTGLLGSYHPGVFRGDKWSCCHQKEKTGQGCDKTRSRVTLQEWNDPLDHDLEAQLIYRHLLGVEAMLWERHRELSGGAEAGTVPTSPGKVPEDSLARLLRVLQDLREAHSSSPAGSPPSEPNCLLELQT

SEQ ID NO: 858347 - protein, 871 aa, Homo sapiens
MAKRSSLYIRIVEGKNLPAKDITGSSDPYCIVKVDNEPIIRTATVWKTLCPFWGEEYQVHLPPTFHAVAFYVMDEDALSRDDVIGKVCLTRDTIASHPKGFSGWAHLTEVDPDEEVQGEIHLRLEVWPGARACRLRCSVLEARDLAPKDRNGTSDPFVRVRYKGRTRETSIVKKSCYPRWNETFEFELQEGAMEALCVEAWDWDLVSRNDFLGKVVIDVQRLRVVQQEEGWFRLQPDQSKSRRHDEGNLGSLQLEVRLRDETVLPSSYYQPLVHLLCHEVKLGMQGPGQLIPLIEETTSTECRQDVATNLLKLFLGQGLAKDFLDLLFQLELSRTSETNTLFRSNSLASKSMESFLKVAGMQYLHGVLGPIINKVFEEKKYVELDPSKVEVKDVGCSGLHRPQTEAEVLEQSAQTLRAHLGALLSALSRSVRACPAVVRATFRQLFRRVRERFPGAQHEVRPPPAGLGWAGLDWAGARGEERWGTRERWGGPGRLCRSEGQGRSLREGAARSPGLGDSSPRSSAPLQNVPFIAVTSFLCLRFFSPAIMSPKLFHLRERHADARTSRTLLLLAKAVQNVGNMDTPASRAKEAWMEPLQPTVRQGVAQLKDFITKLVDIEEKDELDLQRTLSLQAPPVKEGPLFIHRTKGKGPLMSSSFKKLYFSLTTEALSFAKTPSSKKSALIKLANIRAAEKVEEKSFGGSHVMQVIYTDDAGRPQTAYLQCKCVNELNQWLSALRKVSINNTGLLGSYHPGVFRGDKWSCCHQKEKTGQGCDKTRSRVTLQEWNDPLDHDLEAQLIYRHLLGVEAMLWERHRELSGGAEAGTVPTSPGKVPEDSLARLLRVLQDLREAHSSSPAGSPPSEPNCLLELQT

SEQ ID NO: 858348 - protein, 782 aa, Homo sapiens; identical to SEQ ID NO: 858341

SEQ ID NO: 858349 - protein, 205 aa, Homo sapiens [sequence omitted]

SEQ ID NO: 858350 - protein, 205 aa, Homo sapiens [sequence omitted]

SEQ ID NO: 858351 - protein, 851 aa, Homo sapiens; identical to SEQ ID NO: 858343

SEQ ID NO: 858352 - protein, 799 aa, Homo sapiens
RRPVQRPPPATPDPGVWLPPSRDPAMAKRSSLYIRIVEGKNLPAKDITGSSDPYCIVKVDNEPIIRTATVWKTLCPFWGEEYQVHLPPTFHAVAFYVMDEDALSRDDVIGKVCLTRDTIASHPKGFSGWAHLTEVDPDEEVQGEIHLRLEVWPGARACRLRCSVLEARDLAPKDRNGTSDPFVRVRYKGRTRETSIVKKSCYPRWNETFEFELQEGAMEALCVEAWDWDLVSRNDFLGKVVIDVQRLRVVQQEEGWFRLQPDQSKSRRHDEGNLGSLQLEVRLRDETVLPSSYYQPLVHLLCHEVKLGMQGPGQLIPLIEETTSTECRQDVATNLLKLFLGQGLAKDFLDLLFQLELSRTSETNTLFRSNSLASKSMESFLKVAGMQYLHGVLGPIINKVFEEKKYVELDPSKVEVKDVGCSGLHRPQTEAEVLEQSAQTLRAHLGALLSALSRSVRACPAVVRATFRQLFRRVRERFPGAQHEVRPPPAGLGWAGLDWAGARGEERWGTRERWGGPGRLCRSEGQGRSLREGAARSPGLGDSSPRSSAPLQNVPFIAVTSFLCLRFFSPAIMSPKLFHLRERHADARTSRTLLLLAKAVQNVGNMDTPASRAKEAWMEPLQPTVRQGVAQLKDFITKLVDIEEKDELDLQRTLSLQAPPVKEGPLFIHRTKGKGPLMSSSFKKLYFSLTTEALSFAKTPSSKKSALIKLANIRAAEKVEEKSFGGSHVMQVIYTDDAGRPQTAYLQCKCVNELNQWLSALRKVSINNTGLLGSYHPGVFRGDKWSCCHQKEKTGGRGG

SEQ ID NO: 858353 - protein, 726 aa, Homo sapiens
RRPVQRPPPATPDPGVWLPPSRDPAMAKRSSLYIRIVEGKNLPAKDITGSSDPYCIVKVDNEPIIRTATVWKTLCPFWGEEYQVHLPPTFHAVAFYVMDEDALSRDDVIGKVCLTRDTIASHPKGFSGWAHLTEVDPDEEVQGEIHLRLEVWPGARACRLRCSVLEARDLAPKDRNGTSDPFVRVRYKGRTRETSIVKKSCYPRWNETFEFELQEGAMEALCVEAWDWDLVSRNDFLGKVVIDVQRLRVVQQEEGWFRLQPDQSKSRRHDEGNLGSLQLEVRLRDETVLPSSYYQPLVHLLCHEVKLGMQGPGQLIPLIEETTSTECRQDVATNLLKLFLGQGLAKDFLDLLFQLELSRTSETNTLFRSNSLASKSMESFLKVAGMQYLHGVLGPIINKVFEEKKYVELDPSKVEVKDVGCSGLHRPQTEAEVLEQSAQTLRAHLGALLSALSRSVRACPAVVRATFRQLFRRVRERFPGAQHENVPFIAVTSFLCLRFFSPAIMSPKLFHLRERHADARTSRTLLLLAKAVQNVGNMDTPASRAKEAWMEPLQPTVRQGVAQLKDFITKLVDIEEKDELDLQRTLSLQAPPVKEGPLFIHRTKGKGPLMSSSFKKLYFSLTTEALSFAKTPSSKKSALIKLANIRAAEKVEEKSFGGSHVMQVIYTDDAGRPQTAYLQCKVRGGERVLWEWPEHCGSGLGAVGEAWVLWEWHESCGSGLGIVGEA

SEQ ID NO: 858354 - protein, 130 aa, Homo sapiens [sequence omitted]

SEQ ID NO: 858355 - protein, 130 aa, Homo sapiens [sequence omitted]

SEQ ID NO: 858356 - protein, 636 aa, Homo sapiens
RRPVQRPPPATPDPGVWLPPSRDPAMAKRSSLYIRIVEGKNLPAKDITGSSDPYCIVKVDNEPIIRTATVWKTLCPFWGEEYQVHLPPTFHAVAFYVMDEDALSRDDVIGKVCLTRDTIASHPKGFSGWAHLTEVDPDEEVQGEIHLRLEVWPGARACRLRCSVLEARDLAPKDRNGTSDPFVRVRYKGRTRETSIVKKSCYPRWNETFEFELQEGAMEALCVEAWDWDLVSRNDFLGKVVIDVQRLRVVQQEEGWFRLQPDQSKSRRHDEGNLGSLQLEVRLRDETVLPSSYYQPLVHLLCHEVKLGMQGPGQLIPLIEETTSTECRQDVATNLLKLFLGQGLAKDFLDLLFQLELSRTSETNTLFRSNSLASKSMESFLKVAGMQYLHGVLGPIINKVFEEKKYVELDPSKVEVKDVGCSGLHRPQTEAEVLEQSAQTLRAHLGALLSALSRSVRACPAVVRATFRQLFRRVRERFPGAQHEVRPPPAGLGWAGLDWAGARGEERWGTRERWGGPGRLCRSEGQGRSLRGGGCQEPWSGGLQPALFRTPPECTVHRRHQLPVPALLLSRHHVAQALPPAGAPRGRPHQPHPAPVGQGAGLAATGGMHSWVSYRGPGLDCRVFPTGSGEATGTPT

SEQ ID NO: 858357 - protein, 627 aa, Homo sapiens
RRPVQRPPPATPDPGVWLPPSRDPAMAKRSSLYIRIVEGKNLPAKDITGSSDPYCIVKVDNEPIIRTATVWKTLCPFWGEEYQVHLPPTFHAVAFYVMDEDALSRDDVIGKVCLTRDTIASHPKGFSGWAHLTEVDPDEEVQGEIHLRLEVWPGARACRLRCSVLEARDLAPKDRNGTSDPFVRVRYKGRTRETSIVKKSCYPRWNETFEFELQEGAMEALCVEAWDWDLVSRNDFLGKVVIDVQRLRVVQQEEGWFRLQPDQSKSRRHDEGNLGSLQLEVRLRDETVLPSSYYQPLVHLLCHEVKLGMQGPGQLIPLIEETTSTECRQDVATNLLKLFLGQGLAKDFLDLLFQLELSRTSETNTLFRSNSLASKSMESFLKVAGMQYLHGVLGPIINKVFEEKKYVELDPSKVEVKDVGCSGLHRPQTEAEVLEQSAQTLRAHLGALLSALSRSVRACPAVVRATFRQLFRRVRERFPGAQHENVPFIAVTSFLCLRFFSPAIMSPKLFHLRERHADARTSRTLLLLAKAVQNVGNMDTPASRAKEAWMEPLQPTVRQGVAQLKDFITKLVDIEEKDGERRPAQTRPQPTADVCSALEPHGPTHRCLFLSWPHPPPAVGICQAPRP

SEQ ID NO: 858358 - protein, 214 aa, Homo sapiens
RRPVQRPPPATPDPGVWLPPSRDPAMAKRSSLYIRIVEGKNLPAKDITGSSDPYCIVKVDNEPIIRYRPHPQDRGALSLSSARALPAKGTATVWKTLCPFWGEEYQVHLPPTFHAVAFYVMDEDALSRDDVIGKVCLTRDTIASHPKGKFSLPSHTGLPSPWPPSHSETSPLGSVWSPAQGKPFLLSPEAGATFCTPGLCSAACSQAWLLLPLP

SEQ ID NO: 858359 - protein, 828 aa, Homo sapiens
RRPVQRPPPATPDPGVWLPPSRDPAMAKRSSLYIRIVEGKNLPAKDITGSSDPYCIVKVDNEPIIRTATVWKTLCPFWGEEYQVHLPPTFHAVAFYVMDEDALSRDDVIGKVCLTRDTIASHPKGFSGWAHLTEVDPDEEVQGEIHLRLEVWPGARACRLRCSVLEARDLAPKDRNGTSDPFVRVRYKGRTRETSIVKKSCYPRWNETFEFELQEGAMEALCVEAWDWDLVSRNDFLGKVVIDVQRLRVVQQEEGWFRLQPDQSKSRRHDEGNLGSLQLEVRLRDETVLPSSYYQPLVHLLCHEVKLGMQGPGQLIPLIEETTSTECRQDVATNLLKLFLGQGLAKDFLDLLFQLELSRTSETNTLFRSNSLASKSMESFLKVAGMQYLHGVLGPIINKVFEEKKYVELDPSKVEVKDVGCSGLHRPQTEAEVLEQSAQTLRAHLGALLSALSRSVRACPAVVRATFRQLFRRVRERFPGAQHENVPFIAVTSFLCLRFFSPAIMSPKLFHLRERHADARTSRTLLLLAKAVQNVGNMDTPASRAKEAWMEPLQPTVRQGVAQLKDFITKLVDIEEKDELDLQRTLSLQAPPVKEGPLFIHRTKGKGPLMSSSFKKLYFSLTTEALSFAKTPSSKKSALIKLANIRAAEKVEEKSFGGSHVMQVIYTDDAGRPQTAYLQCKCVNELNQWLSALRKVSINNTGLLGSYHPGVFRGDKWSCCHQKEKTGQGCDKTRSRVTLQEWNDPLDHDLEAQLIYRHLLGVEAMLWERHRELSGGAEAGTVPTSPGKVPEDSLARLLRVLQDLREAHSSSPAGSPPSEPNCLLELQT

SEQ ID NO: 858360 - protein, 828 aa, Homo sapiens; identical to SEQ ID NO: 858359

SEQ ID NO: 858361 - protein, 851 aa, Homo sapiens; identical to SEQ ID NO: 858343

SEQ ID NO: 858362 - protein, 611 aa, Homo sapiens
MEALCVEAWDWDLVSRNDFLGKVVIDVQRLRVVQQEEGWFRLQPDQSKSRRHDEGNLGSLQLEVRLRDETVLPSSYYQPLVHLLCHEVKLGMQGPGQLIPLIEETTSTECRQDVATNLLKLFLGQGLAKDFLDLLFQLELSRTSETNTLFRSNSLASKSMESFLKVAGMQYLHGVLGPIINKVFEEKKYVELDPSKVEVKDVGCSGLHRPQTEAEVLEQSAQTLRAHLGALLSALSRSVRACPAVVRATFRQLFRRVRERFPGAQHENVPFIAVTSFLCLRFFSPAIMSPKLFHLRERHADARTSRTLLLLAKAVQNVGNMDTPASRAKEAWMEPLQPTVRQGVAQLKDFITKLVDIEEKDELDLQRTLSLQAPPVKEGPLFIHRTKGKGPLMSSSFKKLYFSLTTEALSFAKTPSSKKSALIKLANIRAAEKVEEKSFGGSHVMQVIYTDDAGRPQTAYLQCKCVNELNQWLSALRKVSINNTGLLGSYHPGVFRGDKWSCCHQKEKTGQGCDKTRSRVTLQEWNDPLDHDLEAQLIYRHLLGVEAMLWERHRELSGGAEAGTVPTSPGKVPEDSLARLLRVLQDLREAHSSSPAGSPPSEPNCLLELQT

SEQ ID NO: 858363 - protein, 851 aa, Homo sapiens; identical to SEQ ID NO: 858343

SEQ ID NO: 858364 - protein, 1009 aa, Homo sapiens
RRPVQRPPPATPDPGVWLPPSRDPAMAKRSSLYIRIVEGKNLPAKDITGSSDPYCIVKVDNEPIIRTATVWKTLCPFWGEEYQVHLPPTFHAVAFYVMDEDALSRDDVIGKVCLTRDTIASHPKGFSGWAHLTEVDPDEEVQGEIHLRLEVWPGARACRLRCSVLEARDLAPKDRNGTSDPFVRVRYKGRTRETSIVKKSCYPRWNETFEFELQEGAMEALCVEAWDWDLVSRNDFLGKVVIDVQRLRVVQQEEGWFRLQPDQSKSRRHDEGNLGSLQLEVRLRDETVLPSSYYQPLVHLLCHEVKLGMQGPGQLIPLIEETTSTECRQDVATNLLKLFLGQGLAKDFLDLLFQLELSRTSETNTLFRSNSLASKSMESFLKVAGMQYLHGVLGPIINKVFEEKKYVELDPSKVEVKDVGCSGLHRPQTEAEVLEQSAQTLRAHLGALLSALSRSVRACPAVVRATFRQLFRRVRERFPGAQHEVRPPPAGLGWAGLDWAGARGEERWGTRERWGGPGRLCRSEGQGRSLRGGGCQEPWSGGLQPALFRTPPECTVHRRHQLPVPALLLSRHHVAQALPPAGAPRGRPHQPHPAPVGQGAGLAGHGRDAQLGVLPGPWPGLQSVPYRLRRGHWHAHVGTALHSLQSLPVATLSESISWIREQACEGSGVAKAAHPVGGESRDLPTQVCLLSGCTYVPGTGVGYPVQQRQLNAVQNVGNMDTPASRAKEAWMEPLQPTVRQGVAQLKDFITKLVDIEEKDELDLQRTLSLQAPPVKEGPLFIHRTKGKGPLMSSSFKKLYFSLTTEALSFAKTPSSKKSALIKLANIRAAEKVEEKSFGGSHVMQVIYTDDAGRPQTAYLQCKCVNELNQWLSALRKVSINNTGLLGSYHPGVFRGDKWSCCHQKEKTGQGCDKTRSRVTLQEWNDPLDHDLEAQLIYRHLLGVEAMLWERHRELSGGAEAGTVPTSPGKVPEDSLARLLRVLQDLREAHSSSPAGSPPSEPNCLLELQT

SEQ ID NO: 858365 - protein, 851 aa, Homo sapiens; identical to SEQ ID NO: 858343

SEQ ID NO: 858366 - protein, 205 aa, Homo sapiens [sequence omitted]

SEQ ID NO: 858367 - protein, 952 aa, Homo sapiens
RRPVQRPPPATPDPGVWLPPSRDPAMAKRSSLYIRIVEGKNLPAKDITGSSDPYCIVKVDNEPIIRTATVWKTLCPFWGEEYQVHLPPTFHAVAFYVMDEDALSRDDVIGKVCLTRDTIASHPKGFSGWAHLTEVDPDEEVQGEIHLRLEVWPGARACRLRCSVLEARDLAPKDRNGTSDPFVRVRYKGRTRETSIVKKSCYPRWNETFEFELQEGAMEALCVEAWDWDLVSRNDFLGKVVIDVQRLRVVQQEEGWFRLQPDQSKSRRHDEGNLGSLQLEVRLRDETVLPSSYYQPLVHLLCHEVKLGMQGPGQLIPLIEETTSTECRQDVATNLLKLFLGQGLAKDFLDLLFQLELSRTSETNTLFRSNSLASKSMESFLKVAGMQYLHGVLGPIINKVFEEKKYVELDPSKVEVKDVGCSGLHRPQTEAEVLEQSAQTLRAHLGALLSALSRSVRACPAVVRATFRQLFRRVRERFPGAQHENVPFIAVTSFLCLRFFSPAIMSPKLFHLRERHADARTSRTLLLLAKAVQNVGNMDTPASRAKEAWMEPLQPTVRQGVAQLKDFITKLVDIEEKDELDLQRTLSLQAPPVKEGPLFIHRTKGKGPLMSSSFKKLYFSLTTEALSFAKTPSSKKSALIKLANIRAAEKVEEKSFGGSHVMQVIYTDDAGRPQTAYLQCKCVNELNQWLSALRKVSINNTGLLGSYHPGVFRGDKWSCCHQKEKTGQGCDKTRSRVTLQEWNDPLDHDLEAQLIYRHLLGVEAMLWITINKDTKVPNACLFTINKEDHTLGNIIKSRACFPFAFCRDCQFPEASPATLPVQPAELLAWKSPCATGKDINKHQEVSKSTRSHRHHVDVHLPVFPGKILLNCAALAKRAAPEHISYVPQLSNDTLAGRLTLSTFTLEQPLGQFSSHNISDLDTIWLVGPSARHPELRPRQTGLRSALSRGSIS

SEQ ID NO: 858368 - protein, 906 aa, Homo sapiens
RRPVQRPPPATPDPGVWLPPSRDPAMAKRSSLYIRIVEGKNLPAKDITGSSDPYCIVKVDNEPIIRTATVWKTLCPFWGEEYQVHLPPTFHAVAFYVMDEDALSRDDVIGKVCLTRDTIASHPKGFSGWAHLTEVDPDEEVQGEIHLRLEVWPGARACRLRCSVLEARDLAPKDRNGTSDPFVRVRYKGRTRETSIVKKSCYPRWNETFEFELQEGAMEALCVEAWDWDLVSRNDFLGKVVIDVQRLRVVQQEEGWFRLQPDQSKSRRHDEGNLGSLQLEVRLRDETVLPSSYYQPLVHLLCHEVKLGMQGPGQLIPLIEETTSTECRQDVATNLLKLFLGQGLAKDFLDLLFQLELSRTSETNTLFRSNSLASKSMESFLKVAGMQYLHGVLGPIINKVFEEKKYVELDPSKVEVKDVGCSGLHRPQTEAEVLEQSAQTLRAHLGALLSALSRSVRACPAVVRATFRQLFRRVRERFPGAQHENVPFIAVTSFLCLRFFSPAIMSPKLFHLRERHADARTSRTLLLLAKAVQNVGNMDTPASRAKEAWMEPLQPTVRQGVAQLKDFITKLVDIEEKDELDLQRTLSLQAPPVKEGPLFIHRTKGKGPLMSSSFKKLYFSLTTEALSFAKTPSSKCVNELNQWLSALRKVSINNTGLLGSYHPGVFRGDKWSCCHQKEKTGQGCDKTRSRVTLQEWNDPLDHDLEAQLIYRHLLGVEAMLWITINKDTKVPNACLFTINKEDHTLGNIIKSRACFPFAFCRDCQFPEASPATLPVQPAELLAWKSPCATGKDINKHQEVSKSTRSHRHHVDVHLPVFPGKILLNCAALAKRAAPEHISYVPQLSNDTLAGRLTLSTFTLEQPLGQFSSHNISDLDTIWLVGPSARHPELRPRQTGLRSALSRGSIS

SEQ ID NO: 858369 - protein, 130 aa, Homo sapiens [sequence omitted]

SEQ ID NO: 858370 - protein, 636 aa, Homo sapiens; identical to SEQ ID NO: 858356

SEQ ID NO: 858371 - protein, 94 aa, Homo sapiens
YYYYYYYQIRALDQGLGFPVDHRSKNLQGPASPPSPVFPTLARPSRCRNMQAPLQDCGRSVSLRLACVLAPLTTSSRGCHLQLPQDKGKAREDS

SEQ ID NO: 858372 - protein, 615 aa, Homo sapiens
MGGWKGPGQRRGKEGPEARRRAAERGGGGGGGGVPAPRSPAREPRPRSCLLLPPPWGAAMTPDLLNFKKGWMSILDEPGEPPSPSLTTTSTSQWKKHWFVLTDSSLKYYRDSTAEEADELDGEIDLRSCTDVTEYAVQRNYGFQIHTKDAVYTLSAMTSGIRRNWIEALRKTVRPTSAPDVTKLSDSNKENALHSYSTQKGPLKAGEQRAGSEVISRGGPRKADGQRQALDYVELSPLTQASPQRARTPARTPDRLAKQEELERDLAQRSEERRKWFEATDSRTPEVPAGEGPRRGLGAPLTEDQQNRLSEEIEKKWQELEKLPLRENKRVPLTALLNQSRGERRGPPSDGHEALEKEEACERSLAEMESSHQQVMEELQRHHERELQRLQQEKEWLLAEETAATASAIEAMKKAYQEELSRELSKTRSLQQGPDGLRKQHQSDVEALKRELQVLSEQYSQKCLEIGALMRQAEEREHTLRRCQQEGQELLRHNQELHGRLSEEIDQLRGFIASQGMGNGCGRSNERSSCELEVLLRVKENELQYLKKEVQCLRDELQMMQKDKRFTSGKYQDVYVELSHIKTRSEREIEQLKEHLRLAMAALQEKESMRNSLAE

SEQ ID NO: 858373 - protein, 652 aa, Homo sapiens
MGGWKGPGQRRGKEGPEARRRAAERGGGGGGGGVPAPRSPAREPRPRSCLLLPPPWGAAMTPDLLNFKKGWMSILDEPGEPPSPSLTTTSTSQWKKHWFVLTDSSLKYYRDSTAEEADELDGEIDLRSCTDVTEYAVQRNYGFQIHTKDAVYTLSAMTSGIRRNWIEALRKTVRPTSAPDVTKLSDSNKENALHSYSTQKGPLKAGEQRAGSEVISRGGPRKADGQRQALDYVELSPLTQASPQRARTPARTPDRLAKQEELERDLAQRSEERRKWFEATDSRTPEVPAGEGPRRGLGAPLTEDQQNRLSEEIEKKWQELEKLPLRENKRVPLTALLNQSRGERRGPPSDGHEALEKEVQALRAQLEAWRLQGEAPQSALRSQEDGHIPPGYISQEACERSLAEMESSHQQVMEELQRHHERELQRLQQEKEWLLAEETAATASAIEAMKKAYQEELSRELSKTRSLQQGPDGLRKQHQSDVEALKRELQVLSEQYSQKCLEIGALMRQAEEREHTLRRCQQEGQELLRHNQELHGRLSEEIDQLRGFIASQGMGNGCGRSNERSSCELEVLLRVKENELQYLKKEVQCLRDELQMMQKDKRFTSGKYQDVYVELSHIKTRSEREIEQLKEHLRLAMAALQEKESMRNSLAE

SEQ ID NO: 858374 - protein, 652 aa, Homo sapiens; identical to SEQ ID NO: 858373

SEQ ID NO: 858375 - protein, 611 aa, Homo sapiens
MLQLVAPRPRGCAPLGGTQKPDLLNFKKGWMSILDEPGEPPSPSLTTTSTSQWKKHWFVLTDSSLKYYRDSTAEEADELDGEIDLRSCTDVTEYAVQRNYGFQIHTKDAVYTLSAMTSGIRRNWIEALRKTVRPTSAPDVTKLSDSNKENALHSYSTQKGPLKAGEQRAGSEVISRGGPRKADGQRQALDYVELSPLTQASPQRARTPARTPDRLAKQEELERDLAQRSEERRKWFEATDSRTPEVPAGEGPRRGLGAPLTEDQQNRLSEEIEKKWQELEKLPLRENKRVPLTALLNQSRGERRGPPSDGHEALEKEVQALRAQLEAWRLQGEAPQSALRSQEDGHIPPGYISQEACERSLAEMESSHQQVMEELQRHHERELQRLQQEKEWLLAEETAATASAIEAMKKAYQEELSRELSKTRSLQQGPDGLRKQHQSDVEALKRELQVLSEQYSQKCLEIGALMRQAEEREHTLRRCQQEGQELLRHNQELHGRLSEEIDQLRGFIASQGMGNGCGRSNERSSCELEVLLRVKENELQYLKKEVQCLRDELQMMQKDKRFTSGKYQDVYVELSHIKTRSEREIEQLKEHLRLAMAALQEKESMRNSLAE

SEQ ID NO: 858376 - protein, 1185 aa, Homo sapiens
CPWKGQGSRAESPWKGQGSLHECPHIPTPVCIGHRDAPSFSSPPRQAPEPSLFFQDPPGTSMESLAPSTDSLHGSPVLIPQVCIGHRDAPRASSPPRHPPSDLAFLAPSPSPGSSGGSRGSAPPGETRHNLEREEYTVLADLPPPRRLAQRQPGPQAQCSSGGRTHSPGRAEVERLFGQERRKSEAAGAFQAQDEGRSQQPSQGQSQLLRRQSSPAPSRQVTMLPAKQAELTRRSQAEPPHPWSPEKRPEGDRQLQGSPLPPRTSARTPERELRTQRPLESGQAGPRQPLGVWQSQEEPPGSQGPHRHLERSWSSQEGGLGPGGWWGCGEPSLGAAKAPEGAWGGTSREYKESWGQPEAWEEKPTHELPRELGKRSPLTSPPENWGGPAESSQSWHSGTPTAVGWGAEGACPYPRGSERRPELDWRDLLGLLRAPGEGVWARVPSLDWEGLLELLQARLPRKDPAGHRDDLARALGPELGPPGTNDVPEQESHSQPEGWAEATPVNGHSPALQSQSPVQLPSPACTSTQWPKIKVTRGPATATLAGLEQTGPLGSRSTAKGPSLPELQFQPEEPEESEPSRGQDPLTDQKQADSPDLLNFKKGWMSILDEPGEPPSPSLTTTSTSQWKKHWFVLTDSSLKYYRDSTAEEADELDGEIDLRSCTDVTEYAVQRNYGFQIHTKDAVYTLSAMTSGIRRNWIEALRKTVRPTSAPDVTKLSDSNKENALHSYSTQKGPLKAGEQRAGSEVISRGGPRKADGQRQALDYVELSPLTQASPQRARTPARTPDRLAKQEELERDLAQRSEERRKWFEATDSRTPEVPAGEGPRRGLGAPLTEDQQNRLSEEIEKKWQELEKLPLRENKRVPLTALLNQSRGERRGPPSDGHEALEKEVQALRAQLEAWRLQGEAPQSALRSQEDGHIPPGYISQEACERSLAEMESSHQQVMEELQRHHERELQRLQQEKEWLLAEETAATASAIEAMKKAYQEELSRELSKTRSLQQGPDGLRKQHQSDVEALKRELQVLSEQYSQKCLEIGALMRQAEEREHTLRRCQQEGQELLRHNQELHGRLSEEIDQLRGFIASQGMGNGCGRSNERSSCELEVLLRVKENELQYLKKEVQCLRDELQMMQKDKRFTSGKYQDVYVELSHIKTRSEREIEQLKEHLRLAMAALQEKESMRNSLAE

SEQ ID NO: 858377 - protein, 639 aa, Homo sapiens
MGGWKGPGQRRGKEGPEARRRAAERGGGGGGGGVPAPRSPAREPRPRSCLLLPPPWGAAMTPDLLNFKKGWMSILDEPGEWKKHWFVLTDSSLKYYRDSTAEEADELDGEIDLRSCTDVTEYAVQRNYGFQIHTKDAVYTLSAMTSGIRRNWIEALRKTVRPTSAPDVTKLSDSNKENALHSYSTQKGPLKAGEQRAGSEVISRGGPRKADGQRQALDYVELSPLTQASPQRARTPARTPDRLAKQEELERDLAQRSEERRKWFEATDSRTPEVPAGEGPRRGLGAPLTEDQQNRLSEEIEKKWQELEKLPLRENKRVPLTALLNQSRGERRGPPSDGHEALEKEVQALRAQLEAWRLQGEAPQSALRSQEDGHIPPGYISQEACERSLAEMESSHQQVMEELQRHHERELQRLQQEKEWLLAEETAATASAIEAMKKAYQEELSRELSKTRSLQQGPDGLRKQHQSDVEALKRELQVLSEQYSQKCLEIGALMRQAEEREHTLRRCQQEGQELLRHNQELHGRLSEEIDQLRGFIASQGMGNGCGRSNERSSCELEVLLRVKENELQYLKKEVQCLRDELQMMQKDKRFTSGKYQDVYVELSHIKTRSEREIEQLKEHLRLAMAALQEKESMRNSLAE

SEQ ID NO: 858378 - protein, 652 aa, Homo sapiens; identical to SEQ ID NO: 858373

SEQ ID NO: 858379 - protein, 246 aa, Homo sapiens
MNLLLQCLLLLLALQLPLVVPLQEKEWLLAEETAATASAIEAMKKAYQEELSRELSKTRSLQQGPDGLRKQHQSDVEALKRELQVLSEQYSQKCLEIGALMRQAEEREHTLRRCQQEGQELLRHNQELHGRLSEEIDQLRGFIASQGMGNGCGRSNERSSCELEVLLRVKENELQYLKKEVQCLRDELQMMQKDKRFTSGKYQDVYVELSHIKTRSEREIEQLKEHLRLAMAALQEKESMRNSLAE

SEQ ID NO: 858380 - protein, 578 aa, Homo sapiens
MGGWKGPGQRRGKEGPEARRRAAERGGGGGGGGVPAPRSPAREPRPRSCLLLPPPWGAAMTPDLLNFKKGWMSILDEPGEPPSPSLTTTSTSQWKKHWFVLTDSSLKYYRDSTAEEADELDGEIDLRSCTDVTEYAVQRNYGFQIHTKDAVYTLSAMTSGIRRNWIEALRKTVRPTSAPDVTKLSDSNKENALHSYSTQKGPLKAGEQRAGSEVISRGGPRKADGQRQALDYVELSPLTQASPQRARTPARTPDRLAKQEELERDLAQRSEERRKWFEATDSRTPEVPAGEGPRRGLGAPLTEDQQNRLSEEIEKKWQELEKLPLRENKRVPLTALLNQSRGERRGPPSDGHEALEKEVQALRAQLEAWRLQGEAPQSALRSQEDGHIPPGYISQEACERSLAEMESSHQQVMEELQRHHERELQRLQQEKEWLLAEETAATASAIEAMKKAYQEELSRELSKTRSLQQGPDGLRKQHQSDVEALKRELQVLSEQYSQKCLEIGALMRQAEEREHTLRRCQQEGQELLRHNQELHGRLSEEIDQLRGFIASQGMGNGCGRSNERSSCELEVSVLTSTR

SEQ ID NO: 858381 - protein, 328 aa, Homo sapiens
AAAYYYYYCSEFKLLTMYGDMAPQPPSRLCWVQNRQSHPKGVSLLLPEPLNLIKRSSRKKKKKKKKTKFLGASRKSFINPIGCGGEGPRVGNSVTTCPNALSQSETRGQKHRGWGFSHPNKKTAREEPQTCSGTKPQKGRSTEATNRDTYKTGSLTSRTRIIKIKPRQWRKRTATTHKEERKQAKAKPRRATAEREEHENRRHDRKRKHNNDGKQEAENEHEKRRRNKSNTGTRTEAIQRKTRDGASEEGRDDERERAERGGGEGAERAARTKEQKRTGRRKGRERSAEARGRKKRGRRKEKGEGERRAEKKGERDQERRRREGKGRA

SEQ ID NO: 858382 - protein, 652 aa, Homo sapiens; identical to SEQ ID NO: 858373

SEQ ID NO: 858383 - protein, 1231 aa, Homo sapiens
CPWKGQGSRAESPWKGQGSLHECPHIPTPVCIGHRDAPSFSSPPRQAPEPSLFFQDPPGTSMESLAPSTDSLHGSPVLIPQVCIGHRDAPRASSPPRHPPSDLAFLAPSPSPGSSGGSRGSAPPGETRHNLEREEYTVLADLPPPRRLAQRQPGPQAQCSSGGRTHSPGRAEVERLFGQERRKSEAAGAFQAQDEGRSQQPSQGQSQLLRRQSSPAPSRQVTMLPAKQAELTRRSQAEPPHPWSPEKRPEGDRQLQGSPLPPRTSARTPERELRTQRPLESGQAGPRQPLGVWQSQEEPPGSQGPHRHLERSWSSQEGGLGPGGWWGCGEPSLGAAKAPEGAWGGTSREYKESWGQPEAWEEKPTHELPRELGKRSPLTSPPENWGGPAESSQSWHSGTPTAVGWGAEGACPYPRGSERRPELDWRDLLGLLRAPGEGVWARVPSLDWEGLLELLQARLPRKDPAGHRDDLARALGPELGPPGTNDVPEQESHSQPEGWAEATPVNGHSPALQSQSPVQLPSPACTSTQWPKIKVTRGPATATLAGLEQTGPLGSRSTAKGPSLPELQFQPEEPEESEPSRGQDPLTDQKQADSADKRPAEGKAGSPLKGRLVTSWRMPGDRPTLFNPFLLSLGVLRWRRPDLLNFKKGWMSILDEPGEPPSPSLTTTSTSQWKKHWFVLTDSSLKYYRDSTAEEADELDGEIDLRSCTDVTEYAVQRNYGFQIHTKDAVYTLSAMTSGIRRNWIEALRKTVRPTSAPDVTKLSDSNKENALHSYSTQKGPLKAGEQRAGSEVISRGGPRKADGQRQALDYVELSPLTQASPQRARTPARTPDRLAKQEELERDLAQRSEERRKWFEATDSRTPEVPAGEGPRRGLGAPLTEDQQNRLSEEIEKKWQELEKLPLRENKRVPLTALLNQSRGERRGPPSDGHEALEKEVQALRAQLEAWRLQGEAPQSALRSQEDGHIPPGYISQEACERSLAEMESSHQQVMEELQRHHERELQRLQQEKEWLLAEETAATASAIEAMKKAYQEELSRELSKTRSLQQGPDGLRKQHQSDVEALKRELQVLSEQYSQKCLEIGALMRQAEEREHTLRRCQQEGQELLRHNQELHGRLSEEIDQLRGFIASQGMGNGCGRSNERSSCELEVLLRVKENELQYLKKEVQCLRDELQMMQKDKRFTSGKYQDVYVELSHIKTRSEREIEQLKEHLRLAMAALQEKESMRNSLAE

SEQ ID NO: 858384 - protein, 682 aa, Homo sapiens
MGGWKGPGQRRGKEGPEARRRAAERGGGGGGGGVPAPRSPAREPRPRSCLLLPPPWGAAMTGIQGGAGMPTYWVPRLWLWKVLDLQLSQAPPDLLNFKKGWMSILDEPGEPPSPSLTTTSTSQWKKHWFVLTDSSLKYYRDSTAEEADELDGEIDLRSCTDVTEYAVQRNYGFQIHTKDAVYTLSAMTSGIRRNWIEALRKTVRPTSAPDVTKLSDSNKENALHSYSTQKGPLKAGEQRAGSEVISRGGPRKADGQRQALDYVELSPLTQASPQRARTPARTPDRLAKQEELERDLAQRSEERRKWFEATDSRTPEVPAGEGPRRGLGAPLTEDQQNRLSEEIEKKWQELEKLPLRENKRVPLTALLNQSRGERRGPPSDGHEALEKEVQALRAQLEAWRLQGEAPQSALRSQEDGHIPPGYISQEACERSLAEMESSHQQVMEELQRHHERELQRLQQEKEWLLAEETAATASAIEAMKKAYQEELSRELSKTRSLQQGPDGLRKQHQSDVEALKRELQVLSEQYSQKCLEIGALMRQAEEREHTLRRCQQEGQELLRHNQELHGRLSEEIDQLRGFIASQGMGNGCGRSNERSSCELEVLLRVKENELQYLKKEVQCLRDELQMMQKDKRFTSGKYQDVYVELSHIKTRSEREIEQLKEHLRLAMAALQEKESMRNSLAE

SEQ ID NO: 858385 - protein, 652 aa, Homo sapiens; identical to SEQ ID NO: 858373

SEQ ID NO: 858386 - protein, 652 aa, Homo sapiens; identical to SEQ ID NO: 858373

SEQ ID NO: 858387 - protein, 431 aa, Homo sapiens
MGGWKGPGQRRGKEGPEARRRAAERGGGGGGGGVPAPRSPAREPRPRSCLLLPPPWGAAMTPDLLNFKKGWMSILDEPGEPPSPSLTTTSTSQWKKHWFVLTDSSLKYYRDSTAEEADELDGEIDLRSCTDVTEYAVQRNYGFQIHTKDAVYTLSAMTSGIRRNWIEALRKTVRPTSAPDVTKLSDSNKENALHSYSTQKGPLKAGEQRAGSEVISRGGPRKADGQRQALDYVELSPLTQASPQRARTPARTPDRLAKQEELERDLAQRSEERRKWFEATDSRTPEVPAGEGPRRGLGAPLTEDQQNRLSEEIEKKWQELEKLPLRENKRVPLTALLNQSRGERRGPPSDGHEALEKEVQALRAQLEAWRLQGEAPQSALRSQEDGHIPPGYISQLVGVITVPVLQTRPLSSERLCDLPKVTPPAGLKGGI

SEQ ID NO: 858388 - protein, 60 aa, Homo sapiens
VLLRVKENELQYLKKEVQCLRDELQMMQKVGPSAGLGAVGDSGAIWMPSCEHLLCAKPST

SEQ ID NO: 858389 - protein, 393 aa, Homo sapiens
MMLRGNLKQVRIEKNPARLRALESAVGESEPAAAAAMALALAGEPAPPAPAPPEDHPDEEMGFTIDIKSFLKPGEKTYTQRCRLFVGNLPTDITEEDFKRLFERYGEPSEVFINRDRGFGFIRLESRTLAEIAKAELDGTILKSRPLRIRFATHGAALTVKNLSPVVSNELLEQAFSQFGPVEKAVVVVDDRGRATGKGFVEFAAKPPARKALERCGDGAFLLTTTPRPVIVEPMEQFDDEDGLPEKLMQKTQQYHKEREQPPRFAQPGTFEFEYASRWKALDEMEKQQREQVDRNIREAKEKLEAEMEAARHEHQLMLMRQDLMRRQEELRRLEELRNQELQKRKQIQLRHEEEHRRREEEMIRHREQEELRRQQEGFKPNYMENGDKRKCG

SEQ ID NO: 858390 - protein, 393 aa, Homo sapiens; identical to SEQ ID NO: 858389

SEQ ID NO: 858391 - protein, 523 aa, Homo sapiens
MMLRGNLKQVRIEKNPARLRALESAVGESEPAAAAAMALALAGEPAPPAPAPPEDHPDEEMGFTIDIKSFLKPGEKTYTQRCRLFVGNLPTDITEEDFKRLFERYGEPSEVFINRDRGFGFIRLESRTLAEIAKAELDGTILKSRPLRIRFATHGAALTVKNLSPVVSNELLEQAFSQFGPVEKAVVVVDDRGRATGKGFVEFAAKPPARKALERCGDGAFLLTTTPRPVIVEPMEQFDDEDGLPEKLMQKTQQYHKEREQPPRFAQPGTFEFEYASRWKALDEMEKQQREQVDRNIREAKEKLEAEMEAARHEHQLMLMRQDLMRRQEELRRLEELRNQELQKRKQIQLRHEEEHRRREEEMIRHREQEELRRQQEGFKPNYMENREQEMRMGDMGPRGAINMGDAFSPAPAGNQGPPPMMGMNMNNRATIPGPPMGPGPAMGPEGAANMGTPMMPDNGAVHNDRFPQGPPSQMGSPMGSRTGSETPQAPMSGVGPVSGGPGGFGRGSQGGNFEGPNKRRRY

SEQ ID NO: 858392 - protein, 530 aa, Homo sapiens
MMLRGNLKQVRIEKNPARLRALESAVGESEPAAAAAMALALAGEPAPPAPAPPEDHPDEEMGFTIDIKSFLKPGEKTYTQRCRLFVGNLPTDITEEDFKRLFERYGEPSEVFINRDRGFGFIRLESRTLAEIAKAELDGTILKSRPLRIRFATHGAALTVKNLSPVVSNELLEQAFSQFGPVEKAVVVVDDRGRATGKGFVEFAAKPPARKALERCGDGAFLLTTTPRPVIVEPMEQFDDEDGLPEKLMQKTQQYHKEREQPPRFAQPGTFEFEYASRWKALDEMEKQQREQVDRNIREAKEKLEAEMEAARHEHQLMLMRQDLMRRQEELRRLEELRNQELQKRKQIQLRHEEEHRRREEEMIRHREQEELRRQQEGFKPNYMENFKGRNQMREQEMRMGDMGPRGAINMGDAFSPAPAGNQGPPPMMGMNMNNRATIPGPPMGPGPAMGPEGAANMGTPMMPDNGAVHNDRFPQGPPSQMGSPMGSRTGSETPQAPMSGVGPVSGGPGGFGRGSQGGNFEGPNKRRRY

SEQ ID NO: 858393 - protein, 415 aa, Homo sapiens
MCSCSGRELGEPVSGVRGELSKMMLRGNLKQVRIEKNPARLRALESAVGESEPAAAAAMALALAGEPAPPAPAPPEDHPDEEMGFTIDIKSFLKPGEKTYTQRCRLFVGNLPTDITEEDFKRLFERYGEPSEVFINRDRGFGFIRLESRTLAEIAKAELDGTILKSRPLRIRFATHGAALTVKNLSPVVSNELLEQAFSQFGPVEKAVVVVDDRGRATGKGFVEFAAKPPARKALERCGDGAFLLTTTPRPVIVEPMEQFDDEDGLPEKLMQKTQQYHKEREQPPRFAQPGTFEFEYASRWKALDEMEKQQREQVDRNIREAKEKLEAEMEAARHEHQLMLMRQDLMRRQEELRRLEELRNQELQKRKQIQLRHEEEHRRREEEMIRHREQEELRRQQEGFKPNYMENGDKRKCG

SEQ ID NO: 858394 - protein, 523 aa, Homo sapiens; identical to SEQ ID NO: 858391

SEQ ID NO: 858395 - protein, 393 aa, Homo sapiens; identical to SEQ ID NO: 858389

SEQ ID NO: 858396 - protein, 393 aa, Homo sapiens; identical to SEQ ID NO: 858389

SEQ ID NO: 858397 - protein, 393 aa, Homo sapiens; identical to SEQ ID NO: 858389

SEQ ID NO: 858398 - protein, 523 aa, Homo sapiens; identical to SEQ ID NO: 858391

SEQ ID NO: 858399 - protein, 525 aa, Homo sapiens
MMLRGNLKQVRIEKNPARLRALESAVGESEPAAAAAMALALAGEPAPPAPAPPEDHPDEEMGFTIDIKSFLKPGEKTYTQRCRLFVGNLPTDITEEDFKRLFERYGEPSEVFINRDRGFGFIRLESRTLAEIAKAELDGTILKSRPLRIRFATHGAALTVKNLSPVVSNELLEQAFSQFGPVEKAVVVVDDRGRATGKGFVEFAAKPPARKALERCGDGAFLLTTTPRPVIVEPMEQFDDEDGLPEKLMQKTQQYHKEREQPPRFAQPGTFEFEYASRWKALDEMEKQQREQVDRNIREAKEKLEAEMEAARHEHQLMLMRQDLMRRQEELRRLEELRNQELQKRKQIQLRHEEEHRRREEEMIRHREQEELRRQQEGFKPNYMENREQEMRMGDMGPRGAINMGDAFSPAPAGNQGPPPMMGMNMNNRATIPGPPMGPGPAMGPEGAANMGTPMMPDNGAVHNDRFPQGPPSQMGSPMGSRTGSETPQAPMSGVGPVSGGPGGFGRGSQGGNFEGPNKRRCYTF

SEQ ID NO: 858400 - protein, 429 aa, Homo sapiens
MMLRGNLKQVRIEKNPARLRALESAVGESEPAAAAAMALALAGEPAPPAPAPPEDHPDEEMGFTIDIKSFLKPGEKTYTQRCRLFVGNLPTDITEEDFKRLFERYGEPSEVFINRDRGFGFIRLESRTLAEIAKAELDGTILKSRPLRIRFATHGAALTVKNLSPVVSNELLEQAFSQFGPVEKAVVVVDDRGRATGKGFVEFAAKPPARKALERCGDGAFLLTTTPRPVIVEPMEQFDDEDGLPEKLMQKTQQYHKEREQPPRFAQPGTFEFEYASRWKALDEMEKQQREQVDRNIREAKEKLEAEMEAARHEHQLMLMRQDLMRRQEELRRLEELRNQELQKRKQIQLRHEEEHRRREEEMIRHREQEELRRQQEGFKPNYMENREQEMRMGDMGPRGAINMGDAFSPAPAGNQGPPPMMGMNILNI

SEQ ID NO: 858401 - protein, 123 aa, Homo sapiens
CGQVGCGLVGQYRATSYQWCSALRVERGLSQPLAGRAGVPSGASWGTQLPHPSATPGPPPGPLWFSLVPSSTPGPQKSLVHSSLDLRPEIDPLPPEAWSKSKYAFLSSQMPACHSACQSRQGL

SEQ ID NO: 858402 - protein, 137 aa, Homo sapiens
ISLLRAGTTGACHHIRLIFVFLVEMGFCHVGQAGLELLSSGDLPTSASQSSGITGVSHGAQPGSCFLRRGFTLFPRLEYSGAVMTYCSLELFGSSSPPHSASLVAGAPGMNHRARLSFFKIFCRENLSLLHRLFLNS

SEQ ID NO: 858403 - protein, 1118 aa, Homo sapiens
PERSVGKSGLRDSTRGCPSGFPASLGAQQSKASGHKEYGSNVIGVMKTLLLDLALWSLLFQPGWLSFSSQVSQNCHNGSYEISVLMMGNSAFAEPLKNLEDAVNEGLEIVRGRLQNAGLNVTVNATFMYSDGLIHNSGDCRSSTCEGLDLLRKISNAQRMGCVLIGPSCTYSTFQMYLDTELSYPMISAGSFGLSCDYKETLTRLMSPARKLMYFLVNFWKTNDLPFKTYSWSTSYVYKNGTETEDCFWYLNALEASVSYFSHELGFKVVLRQDKEFQDILMDHNRKSNVIIMCGGPEFLYKLKGDRAVAEDIVIILVDLFNDQYLEDNVTAPDYMKNVLVLTLSPGNSLLNSSFSRNLSPTKRDFALAYLNGILLFGHMLKIFLENGENITTPKFAHAFRNLTFEGYDGPVTLDDWGDVDSTMVLLYTSVDTKKYKVLLTYDTHVNKTYPVDMSPTFTWKNSKLPNDITGRGPQILMIAVFTLTGAVVLLLLVALLMLRKYRKDYELRQKKWSHIPPENIFPLETNETNHVSLKIDDDKRRDTIQRLRQCKYDKKRVILKDLKHNDGNFTEKQKIELNKLLQIDYYNLTKFYGTVKLDTMIFGVIEYCERGSLREVLNDTISYPDGTFMDWEFKISVLYDIAKGMSYLHSSKTEVHGRLKSTNCVVDSRMVVKITDFGCNSILPPKKDLWTAPEHLRQANISQKGDVYSYGIIAQEIILRKETFYTLSCRDRNEKIFRVENSNGMKPFRPDLFLETAEEKELEVYLLVKNCWEEDPEKRPDFKKIETTLAKIFGLFHDQKNESYMDTLIRRLQLYSRNLEHLVEERTQLYKAERDRADRLNFMLLPRLVVKSLKEKGFVEPELYEEVTIYFSDIVGFTTICKYSTPMEVVDMLNDIYKSFDHIVDHHDVYKVETIGDAYMVASGLPKRNGNRHAIDIAKMALEILSFMGTFELEHLPGLPIWIRIGVHSGPCAAGVVGIKMPRYCLFGDTVNTASRMESTGLPLRIHVSGSTIAILKRTECQFLYEVRGETYLKGRGNETTYWLTGMKDQKFNLPTPPTVENQQRLQAEFSDMIANSLQKRQAAGIRSQKPRRVASYKKGTLEYLQLNTTDKESTYF

SEQ ID NO: 858404 - protein, 1118 aa, Homo sapiens; identical to SEQ ID NO: 858403

SEQ ID NO: 858405 - protein, 304 aa, Homo sapiens
SGVGGRRRQRQRLRAARGAQGAGRSPSGLGRRAVGTGSPVPAPPLRRGAASGRPGRGRHRRHKMSLLSAIDTSAASVYQPAQLLNWVYLSLQDTHQASAFDAFRPEPTAGAAPPELAFGKGRPEQLGSPLHSSYLNSFFQLQRGEALSNSVYKGASPYGSLNNIADGLSSLTEHFSDLTLTSEARKPSKRPPPNYLCHLCFNKGHYIKDCPQARPKGEGLTPYQGKKRCFGEYKCPKCKRKWMSGNSWANMGQECIKCHINVYPHKQRPLEKPDGLDVSDQSKEHPQHLCEKCKVLGYYCRRVQ

SEQ ID NO: 858406 - protein, 304 aa, Homo sapiens; identical to SEQ ID NO: 858405

SEQ ID NO: 858407 - protein, 68 aa, Homo sapiens
YKCPKCKRKWMSGNSWANMGQECIKCHINVYPHKQVSRAGWGLLRRTAGGQLFPYRTSVYSLLQGRSL

SEQ ID NO: 858408 - protein, 452 aa, Homo sapiens
RGARWPQRLRARPKPGRSAEPPPRPCGSRPGGLGWGPRRPPRSAPAEPEPDPGRLPPGTMVQKSRNGGVYPGPSGEKKLKVGFVGLDPGAPDSTRDGALLIAGSEAPKRGSILSKPRAGGAGAGKPPKRNAFYRKLQNFLYNVLERPRGWAFIYHAYVFLLVFSCLVLSVFSTIKEYEKSSEGALYILEIVTIVVFGVEYFVRIWAAGCCCRYRGWRGRLKFARKPFCVIDIMVLIASIAVLAAGSQGNVFATSALRSLRFLQILRMIRMDRRGGTWKLLGSVVYAHSKELVTAWYIGFLCLILASFLVYLAEKGENDHFDTYADALWWGLITLTTIGYGDKYPQTWNGRLLAATFTLIGVSFFALPAGILGSGFALKVQEQHRQKHFEKRRNPAAGLIQSAWRFYATNLSRTDLHSTWQYYERTVTVPMYRYRRRAPATKQLFHFLFSICS

SEQ ID NO: 858409 - protein, 112 aa, Homo sapiens
MPRAGLSPRPGRLEAEVPGPTHTPSASGCPGPNQEGRKVTPRTGDTRQGPVGLEILRHQPLAHRPALHVAVLRANGHRAHVQVPPPGTCHQATVSFFIFHLFLNPTFCCSLF

SEQ ID NO: 858410 - protein, 901 aa, Homo sapiens
RGARWPQRLRARPKPGRSAEPPPRPCGSRPGGLGWGPRRPPRSAPAEPEPDPGRLPPGTMVQKSRNGGVYPGPSGEKKLKVGFVGLDPGAPDSTRDGALLIAGSEAPKRGSILSKPRAGGAGAGKPPKRNAFYRKLQNFLYNVLERPRGWAFIYHAYVFLLVFSCLVLSVFSTIKEYEKSSEGALYILEIVTIVVFGVEYFVRIWAAGCCCRYRGWRGRLKFARKPFCVIDIMVLIASIAVLAAGSQGNVFATSALRSLRFLQILRMIRMDRRGGTWKLLGSVVYAHSKELVTAWYIGFLCLILASFLVYLAEKGENDHFDTYADALWWGLITLTTIGYGDKYPQTWNGRLLAATFTLIGVSFFALPAGILGSGFALKVQEQHRQKHFEKRRNPAAGLIQSAWRFYATNLSRTDLHSTWQYYERTVTVPMYSSQTQTYGASRLIPPLNQLELLRNLKSKSGLAFRKDPPPEPSPSPRGVAAKGKGSPQAQTVRRSPSADQSLEDSPSKVPKSWSFGDRSRARQAFRIKGAASRQNSEEASLPGEDIVDDKSCPCEFVTEDLTPGLKVSIRAVCVMRFLVSKRKFKESLRPYDVMDVIEQYSAGHLDMLSRIKSLQSRVDQIVGRGPAITDKDRTKGPAEAELPEDPSMMGRLGKVEKQVLSMEKKLDFLVNIYMQRMGIPPTETEAYFGAKEPEPAPPYHSPEDSREHVDRHGCIVKIVRSSSSTGQKNFSAPPAAPPVQCPPSTSWQPQSHPRQGHGTSPVGDHGSLVRIPPPPAHERSLSAYGGGNRASMEFLRQEDTPGCRPPEGNLRDSDTSISIPSVDHEELERSFSGFSISQSKENLDALNSCYAAVAPCAKVRPYIAEGESDTDSDLCTPCGPPPRSATGEGPFGDVGWAGPRK

SEQ ID NO: 858411 - protein, 913 aa, Homo sapiens
RGARWPQRLRARPKPGRSAEPPPRPCGSRPGGLGWGPRRPPRSAPAEPEPDPGRLPPGTMVQKSRNGGVYPGPSGEKKLKVGFVGLDPGAPDSTRDGALLIAGSEAPKRGSILSKPRAGGAGAGKPPKRNAFYRKLQNFLYNVLERPRGWAFIYHAYVFLLVFSCLVLSVFSTIKEYEKSSEGALYILEIVTIVVFGVEYFVRIWAAGCCCRYRGWRGRLKFARKPFCVIDIMVLIASIAVLAAGSQGNVFATSALRSLRFLQILRMIRMDRRGGTWKLLGSVVYAHSKELVTAWYIGFLCLILASFLVYLAEKGENDHFDTYADALWWGLITLTTIGYGDKYPQTWNGRLLAATFTLIGVSFFALPAGILGSGFALKVQEQHRQKHFEKRRNPAAGLIQSAWRFYATNLSRTDLHSTWQYYERTVTVPMYSSQTQTYGASRLIPPLNQLELLRNLKSKSGLAFRKDPPPEPSPSQKVSLKDRVFSSPRGVAAKGKGSPQAQTVRRSPSADQSLEDSPSKVPKSWSFGDRSRARQAFRIKGAASRQNSEEASLPGEDIVDDKSCPCEFVTEDLTPGLKVSIRAVCVMRFLVSKRKFKESLRPYDVMDVIEQYSAGHLDMLSRIKSLQSRVDQIVGRGPAITDKDRTKGPAEAELPEDPSMMGRLGKVEKQVLSMEKKLDFLVNIYMQRMGIPPTETEAYFGAKEPEPAPPYHSPEDSREHVDRHGCIVKIVRSSSSTGQKNFSAPPAAPPVQCPPSTSWQPQSHPRQGHGTSPVGDHGSLVRIPPPPAHERSLSAYGGGNRASMEFLRQEDTPGCRPPEGNLRDSDTSISIPSVDHEELERSFSGFSISQSKENLDALNSCYAAVAPCAKVRPYIAEGESDTDSDLCTPCGPPPRSATGEGPFGDVGWAGPRK

SEQ ID NO: 858412 - protein, 549 aa, Homo sapiens
GLLAQSPECLAYSMGVPSAPFPPRPALLGAPLAACPSPTALSFPPQSAWRFYATNLSRTDLHSTWQYYERTVTVPMYRLIPPLNQLELLRNLKSKSGLAFRKDPPPEPSPSQKVSLKDRVFSSPRGVAAKGKGSPQAQTVRRSPSADQSLEDSPSKVPKSWSFGDRSRARQAFRIKGAASRQNSEEASLPGEDIVDDKSCPCEFVTEDLTPGLKVSIRAVCVMRFLVSKRKFKESLRPYDVMDVIEQYSAGHLDMLSRIKSLQSRVDQIVGRGPAITDKDRTKGPAEAELPEDPSMMGRLGKVEKQVLSMEKKLDFLVNIYMQRMGIPPTETEAYFGAKEPEPAPPYHSPEDSREHVDRHGCIVKIVRSSSSTGQKNFSAPPAAPPVQCPPSTSWQPQSHPRQGHGTSPVGDHGSLVRIPPPPAHERSLSAYGGGNRASMEFLRQEDTPGCRPPEGNLRDSDTSISIPSVDHEELERSFSGFSISQSKENLDALNSCYAAVAPCAKVRPYIAEGESDTDSDLCTPCGPPPRSATGEGPFGDVGWAGPRK

SEQ ID NO: 858413 - protein, 120 aa, Homo sapiens
MANMVNFRICLFQHRKTKQRHRERKSSQARFSLTYRLMPRAGLSPRPGRLEAEVPGPTHTPSASGCPGPNQEGRKVTPRTGDTRQGPGKSHEKERTQPPCELAQGPESSPNRSPPSGPTV

SEQ ID NO: 858414 - protein, 285 aa, Homo sapiens
PSPRTSLGPPHFLGLAWVPHFLGLAWVSPVSWNQPGPPHFLGAARVPTSPGTSLGPPFPGTSLGLSCFLEPAWAPPFPGSSLGPHISWDGPSTPAQQPLLQVLSMEKKLDFLVNIYMQRMGIPPTETEAYFGAKEPEPAPPYHSPEDSREHVDRHGCIVKIVRSSSSTGQKNFSAPPAAPPVQCPPSTSWQPQSHPRQGHGTSPVGDHGSLVRIPPPPAHERSLSAYGGGNRASMEFLRQEDTPGCRPPEGNLRDSDTSISIPSVDHEELERSFSGFSISQSKEN

SEQ ID NO: 858415 - protein, 903 aa, Homo sapiens
RGARWPQRLRARPKPGRSAEPPPRPCGSRPGGLGWGPRRPPRSAPAEPEPDPGRLPPGTMVQKSRNGGVYPGPSGEKKLKVGFVGLDPGAPDSTRDGALLIAGSEAPKRGSILSKPRAGGAGAGKPPKRNAFYRKLQNFLYNVLERPRGWAFIYHAYVFLLVFSCLVLSVFSTIKEYEKSSEGALYILEIVTIVVFGVEYFVRIWAAGCCCRYRGWRGRLKFARKPFCVIDIMVLIASIAVLAAGSQGNVFATSALRSLRFLQILRMIRMDRRGGTWKLLGSVVYAHSKELVTAWYIGFLCLILASFLVYLAEKGENDHFDTYADALWWGLITLTTIGYGDKYPQTWNGRLLAATFTLIGVSFFALPAGILGSGFALKVQEQHRQKHFEKRRNPAAGLIQSAWRFYATNLSRTDLHSTWQYYERTVTVPMYRLIPPLNQLELLRNLKSKSGLAFRKDPPPEPSPSQKVSLKDRVFSSPRGVAAKGKGSPQAQTVRRSPSADQSLEDSPSKVPKSWSFGDRSRARQAFRIKGAASRQNSEEASLPGEDIVDDKSCPCEFVTEDLTPGLKVSIRAVCVMRFLVSKRKFKESLRPYDVMDVIEQYSAGHLDMLSRIKSLQSRVDQIVGRGPAITDKDRTKGPAEAELPEDPSMMGRLGKVEKQVLSMEKKLDFLVNIYMQRMGIPPTETEAYFGAKEPEPAPPYHSPEDSREHVDRHGCIVKIVRSSSSTGQKNFSAPPAAPPVQCPPSTSWQPQSHPRQGHGTSPVGDHGSLVRIPPPPAHERSLSAYGGGNRASMEFLRQEDTPGCRPPEGNLRDSDTSISIPSVDHEELERSFSGFSISQSKENLDALNSCYAAVAPCAKVRPYIAEGESDTDSDLCTPCGPPPRSATGEGPFGDVGWAGPRK

SEQ ID NO: 858416 - protein, 117 aa, Homo sapiens
MEFARGLSPGHKADQNVCVMRFLVSKRKFKESLRPYDVMDVIEQYSAGHLDMLSRIKSLQSRQEPRLPVQQGTRTGWASGTKPTVAHGGSAGGVWAGPPPHPRRPLSASVVSSQSLF

SEQ ID NO: 858417 - protein, 901 aa, Homo sapiens; identical to SEQ ID NO: 858410

SEQ ID NO: 858418 - protein, 931 aa, Homo sapiens
RGARWPQRLRARPKPGRSAEPPPRPCGSRPGGLGWGPRRPPRSAPAEPEPDPGRLPPGTMVQKSRNGGVYPGPSGEKKLKVGFVGLDPGAPDSTRDGALLIAGSEAPKRGSILSKPRAGGAGAGKPPKRNAFYRKLQNFLYNVLERPRGWAFIYHAYVFLLVFSCLVLSVFSTIKEYEKSSEGALYILEIVTIVVFGVEYFVRIWAAGCCCRYRGWRGRLKFARKPFCVIDIMVLIASIAVLAAGSQGNVFATSALRSLRFLQILRMIRMDRRGGTWKLLGSVVYAHSKELVTAWYIGFLCLILASFLVYLAEKGENDHFDTYADALWWGLITLTTIGYGDKYPQTWNGRLLAATFTLIGVSFFALPAGILGSGFALKVQEQHRQKHFEKRRNPAAGLIQSAWRFYATNLSRTDLHSTWQYYERTVTVPMYSSQTQTYGASRLIPPLNQLELLRNLKSKSGLAFRKDPPPEPSPSKGSPCRGPLCGCCPGRSSQKVSLKDRVFSSPRGVAAKGKGSPQAQTVRRSPSADQSLEDSPSKVPKSWSFGDRSRARQAFRIKGAASRQNSEEASLPGEDIVDDKSCPCEFVTEDLTPGLKVSIRAVCVMRFLVSKRKFKESLRPYDVMDVIEQYSAGHLDMLSRIKSLQSRVDQIVGRGPAITDKDRTKGPAEAELPEDPSMMGRLGKVEKQVLSMEKKLDFLVNIYMQRMGIPPTETEAYFGAKEPEPAPPYHSPEDSREHVDRHGCIVKIVRSSSSTGQKNFSAPPAAPPVQCPPSTSWQPQSHPRQGHGTSPVGDHGSLVRIPPPPAHERSLSAYGGGNRASMEFLRQEDTPGCRPPEGNLRDSDTSISIPSVDHEELERSFSGFSISQSKENLDALNSCYAAVAPCAKVRPYIAEGESDTDSDLCTPCGPPPRSATGEGPFGDVGWAGPRK

SEQ ID NO: 858419 - protein, 447 aa, Homo sapiens
RGARWPQRLRARPKPGRSAEPPPRPCGSRPGGLGWGPRRPPRSAPAEPEPDPGRLPPGTMVQKSRNGGVYPGPSGEKKLKVGFVGLDPGAPDSTRDGALLIAGSEAPKRGSILSKPRAGGAGAGKPPKRNAFYRKLQNFLYNVLERPRGWAFIYHAYVFLLVFSCLVLSVFSTIKEYEKSSEGALYILEIVTIVVFGVEYFVRIWAAGCCCRYRGWRGRLKFARKPFCVIDIMVLIASIAVLAAGSQGNVFATSALRSLRFLQILRMIRMDRRGGTWKLLGSVVYAHSKELVTAWYIGFLCLILASFLVYLAEKGENDHFDTYADALWWGLITLTTIGYGDKYPQTWNGRLLAATFTLIGVSFFALPAGILGSGFALKVQEQHRQKHFEKRRNPAAGLIQVSPGVPRGPAQPLSWSHLVEEWRPLGLWHCPVCGWATALTLCRNLWK

SEQ ID NO: 858420 - protein, 246 aa, Homo sapiens
MFPPARGKELLSFEDVAMYFTREEWGHLNWGQKDLYRDVMLENYRNMVLLGFQFPKPEMICQLENWDEQWILDLPRTGNRKASGSACPGSEARHKMKKLTPKQKFSEDLESYKISVVMQESAEKLSEKLHKCKEFVDSCRLTFPTSGDEYSRGFLQNLNLIQDQNAQTRWKQGRYDEDGKPFNQRSLLLGHERILTRAKSYECSECGKVIRRKAWFDQHQRIHFLENPFECKVCGQAFRQRSALTV

SEQ ID NO: 858421 - protein, 229 aa, Homo sapiens
MYFTREEWGHLNWGQKDLYRDVMLENYRNMVLLGFQFPKPEMICQLENWDEQWILDLPRTGNRKASGSACPGSEARHKMKKLTPKQKFSEDLESYKISVVMQESAEKLSEKLHKCKEFVDSCRLTFPTSGDEYSRGFLQNLNLIQDQNAQTRWKQGRYDEDGKPFNQRSLLLGHERILTRAKSYECSECGKVIRRKAWFDQHQRIHFLENPFECKVCGQAFRQRSALTV

SEQ ID NO: 858422 - protein, 74 aa, Homo sapiens
SLSVSYFKNCSYLYQLLFQELLSFEDVAMYFTREEWGHLNWGQKDLYRDVMLENYRNMVLLGRTRLEDWALSVF

SEQ ID NO: 858423 - protein, 87 aa, Homo sapiens
PARGSEAARVVVSVPPVRGDSPRGADQTDLGSGPGTPRGEPSPWWRRLGGDSEPSAAQPDVQDPTPCKRPGRGSHVPTSQGEGAALV

SEQ ID NO: 858424 - protein, 110 aa, Homo sapiens
TCSNTKHRDFVLSFVCVPRWNSGSQICQPRELQIRAGLTDFFSSPAQPDVQDPTPCKRPGRGSHVPTSQGEGELCLPLCFISIVTATSSSFLRLSPLDQCGEFSFLDSAM

SEQ ID NO: 858425 - protein, 229 aa, Homo sapiens
MLQYHCAERLWHIHLGCNCTLGYISKSEMTTAKGFQFPKPEMICQLENWDEQWILDLPRTGNRKASGSACPGSEARHKMKKLTPKQKFSEDLESYKISVVMQESAEKLSEKLHKCKEFVDSCRLTFPTSGDEYSRGFLQNLNLIQDQNAQTRWKQGRYDEDGKPFNQRSLLLGHERILTRAKSYECSECGKVIRRKAWFDQHQRIHFLENPFECKVCGQAFRQRSALTV

SEQ ID NO: 858426 - protein, 174 aa, Homo sapiens
SSAVDRSFTSFLVIWLGSEARHKMKKLTPKQKFSEDLESYKISVVMQESAEKLSEKLHKCKEFVDSCRLTFPTSGDEYSRGFLQNLNLIQDQNAQTRWKQGRYDEDGKPFNQRSLLLGHERILTRAKSYECSECGKVIRRKAWFDQHQRIHFLENPFECKVCGQAFRQRSALTV

SEQ ID NO: 858427 - protein, 138 aa, Homo sapiens
MFPPARGKELLSFEDVAMYFTREEWGHLNWGQKDLYRDVMLENYRNMVLLGFQFPKPEMICQLENWDEQWILDLPRTGNRKASGSACPGGLSLCRQAVFSLLSSLDYRRAPPCPATFCILVEMGFHHVGQAGLELLTS

SEQ ID NO: 858428 - protein, 530 aa, Homo sapiens
MATPDVSVHMEEVVVVTTPDTAVDGSGVEGVKTVLVTTNLAPHGGDLTEDNMETENAAAAAAAAFTASSQLKEAVLVKMAEEGENLEAEIVYPITCGDSRANLIWRKFVCPGINVKCVQYDEHVISPKEFVHLAGKSTLKDWKRAIRMNGIMLRKIMDSGELDFYQHDKVCSNTCRSTKIDLSGARVSLSSPTSAEYIPLTPAAADVNGSPATITIETCEDPGDWTAAIGDDTFTFWRGLKDAGLLDEVIQEFHQELVETMRGLQQRVQDPPLQLRDAVLLNNIVQNFGMLDLVKKVLASHKCQMDRSREQYARDLAALEQQCDEHRRRAKELKHKSQHLSNVLMTLTPVSLPPPVKRPRLARATSGPAAMASQVLTQSAQLALGPGVPVPQLTSVPLGKVVSTLPSTVLGKGSLQAPPASSPASPLLGGYTVLASSGSTYPSTVEIHPDASSLTVLSTAAVQDGSTVFKVVSPLQLLTLPGLGPTLQNVAQASPGSSTIVTVPAGAAPGPEEHTATIEVAAMAEDHERK

SEQ ID NO: 858429 - protein, 530 aa, Homo sapiens; identical to SEQ ID NO: 858428

SEQ ID NO: 858430 - protein, 530 aa, Homo sapiens; identical to SEQ ID NO: 858428

SEQ ID NO: 858431 - protein, 103 aa, Homo sapiens
GRVGRPTRPAVCGCPETWPWTHKEDQAEAPPGQGPGAGISGSSQPRPPAVSNRACPGRTLSARFPWTLLLILSAVEGPSEAPQCEGPVSHFTAPKGTGWLSVQ

SEQ ID NO: 858432 - protein, 530 aa, Homo sapiens; identical to SEQ ID NO: 858428

SEQ ID NO: 858433 - protein, 507 aa, Homo sapiens
CPAGCALRDPDSILSSLHFTRGDLTEDNMETENAAAAAAAAFTASSQLKEAVLVKMAEEGENLEAEIVYPITCGDSRANLIWRKFVCPGINVKCVQYDEHVISPKEFVHLAGKSTLKDWKRAIRMNGIMLRKIMDSGELDFYQHDKVCSNTCRSTKIDLSGARVSLSSPTSAEYIPLTPAAADVNGSPATITIETCEDPGDWTAAIGDDTFTFWRGLKDAGLLDEVIQEFHQELVETMRGLQQRVQDPPLQLRDAVLLNNIVQNFGMLDLVKKVLASHKCQMDRSREQYARDLAALEQQCDEHRRRAKELKHKSQHLSNVLMTLTPVSLPPPVKRPRLARATSGPAAMASQVLTQSAQLALGPGVPVPQLTSVPLGKVVSTLPSTVLGKGSLQAPPASSPASPLLGGYTVLASSGSTYPSTVEIHPDASSLTVLSTAAVQDGSTVFKVVSPLQLLTLPGLGPTLQNVAQASPGSSTIVTVPAGAAPGPEEHTATIEVAAMAEDHERK

SEQ ID NO: 858434 - protein, 165 aa, Homo sapiens [sequence omitted]

SEQ ID NO: 858435 - protein, 530 aa, Homo sapiens; identical to SEQ ID NO: 858428

SEQ ID NO: 858436 - protein, 530 aa, Homo sapiens; identical to SEQ ID NO: 858428

SEQ ID NO: 858437 - protein, 149 aa, Homo sapiens
MWSTEIRACTREAHTGVCVLGCSPHGPRSSDPVPPTSPFLPPCSVGLAPPAVILITAFHPRELITDPGQGSPTKTSIMSVTRARNWPQLGELQRGSSSGPEQLPGVRGGSAWCSALFCGCLNSLLPLHSVQPPNTECPLCTRYFVEAVR

SEQ ID NO: 858438 - protein, 189 aa, Homo sapiens
QTQIKDPKTPPQPGHQPAPRQGASRGRSLRARCAGRSQTPALCSLQQGEELGTEGGEKGGGVGGKRTRPRPARQAPAGEEGGGEPSWRNETLLKTENRANQGLQTGMWTRSKTKQNRTKKGGGTGRKNRRGERDRGKGRRIFFSSSHFFKKPTQENTHTHNQRLFPSRNINRAESNTLFFSLPKKKKKK

SEQ ID NO: 858439 - protein, 189 aa, Homo sapiens; identical to SEQ ID NO: 858438

SEQ ID NO: 858440 - protein, 470 aa, Homo sapiens
GGDRGRGRRRRPGERRRRSREPGAGWPALLLLAGDFPAWALTPRTSLRPSRTMGDKGTRVFKKASPNGKLTVYLGKRDFVDHIDLVDPVDGVVLVDPEYLKERRVYVTLTCAFRYGREDLDVLGLTFRKDLFVANVQSFPPAPEDKKPLTRLQERLIKKLGEHAYPFTFEIPPNLPCSVTLQPGPEDTGKACGVDYEVKAFCAENLEEKIHKRNSVRLVIRKVQYAPERPGPQPTAETTRQFLMSDKPLHLEASLDKEIYYHGEPISVNVHVTNNTNKTVKKIKISVRQYADICLFNTAQYKCPVAMEEADDTVAPSSTFCKVYTLTPFLANNREKRGLALDGKLKHEDTNLASSTLLREGANREILGIIVSYKVKVKLVVSRGGLLGDLASSDVAVELPFTLMHPKPKEEPPHREVPENETPVDTNLIELDTNDDDIVFEDFARQRLKGMKDDKEEEEDGTGSPQLNNR

SEQ ID NO: 858441 - protein, 470 aa, Homo sapiens; identical to SEQ ID NO: 858440

SEQ ID NO: 858442 - protein, 470 aa, Homo sapiens; identical to SEQ ID NO: 858440

SEQ ID NO: 858443 - protein, 470 aa, Homo sapiens; identical to SEQ ID NO: 858440

SEQ ID NO: 858444 - protein, 505 aa, Homo sapiens
MPGFSSLELRKLALGDSRSLPCKDLTARRLLRSPGELYWLSWRLTSGDGKSGLHGHCSDLKPAWCLSVTPALVPSPASRWPAGACPWAGYANPGLTSLSLHRVFKKASPNGKLTVYLGKRDFVDHIDLVDPVDGVVLVDPEYLKERRVYVTLTCAFRYGREDLDVLGLTFRKDLFVANVQSFPPAPEDKKPLTRLQERLIKKLGEHAYPFTFEIPPNLPCSVTLQPGPEDTGKACGVDYEVKAFCAENLEEKIHKRNSVRLVIRKVQYAPERPGPQPTAETTRQFLMSDKPLHLEASLDKEIYYHGEPISVNVHVTNNTNKTVKKIKISVRQYADICLFNTAQYKCPVAMEEADDTVAPSSTFCKVYTLTPFLANNREKRGLALDGKLKHEDTNLASSTLLREGANREILGIIVSYKVKVKLVVSRGGDVAVELPFTLMHPKPKEEPPHREVPENETPVDTNLIELDTNDDDIVFEDFARQRLKGMKDDKEEEEDGTGSPQLNNR

SEQ ID NO: 858445 - protein, 156 aa, Homo sapiens
MEEADDTVAPSSTFCKVYTLTPFLANNREKRGLALDGKLKHEDTNLASSTLLREGANREILGIIVSYKVKVKLVVSRGGDVAVELPFTLMHPKPKEEPPHREVPENETPVDTNLIELDTNDDDIVFEDFARQRLKGMKDDKEEEEDGTGSPQLNNR

SEQ ID NO: 858446 - protein, 459 aa, Homo sapiens
GGDRGRGRRRRPGERRRRSREPGAGWPALLLLAGDFPAWALTPRTSLRPSRTMGDKGTRVFKKASPNGKLTVYLGKRDFVDHIDLVDPVDGVVLVDPEYLKERRVYVTLTCAFRYGREDLDVLGLTFRKDLFVANVQSFPPAPEDKKPLTRLQERLIKKLGEHAYPFTFEIPPNLPCSVTLQPGPEDTGKACGVDYEVKAFCAENLEEKIHKRNSVRLVIRKVQYAPERPGPQPTAETTRQFLMSDKPLHLEASLDKEIYYHGEPISVNVHVTNNTNKTVKKIKISVRQYADICLFNTAQYKCPVAMEEADDTVAPSSTFCKVYTLTPFLANNREKRGLALDGKLKHEDTNLASSTLLREGANREILGIIVSYKVKVKLVVSRGGGQAWRGRGCEEACMAQAVTSTWLKVMTLRRVSLQLFTRPSGKQGSRSFSSVSMCSVVVPSLEPPDFSSPDAHCR

SEQ ID NO: 858447 - protein, 97 aa, Homo sapiens
QACMVPVSHSSPGPQSCLKVARRSLPLGRIREPWPDLSFSPQSVQEGQSKWKGESVTAAPSASLTSHSGHFLLGSRGNGMSPEMHTSVGGGRCCSPS

SEQ ID NO: 858448 - protein, 226 aa, Homo sapiens
  misc_feature (218)..(218): Xaa can be any naturally occurring amino acid
GGDRGRGRRRRPGERRRRSREPGAGWPALLLLAGDFPAWALTPRTSLRPSRTMGDKGTRVFKKASPNGKLTVYLGKRDFVDHIDLVDPVDGVVLVDPEYLKERRVYVTLTCAFRYGREDLDVLGLTFRKDLFVANVQSFPPAPEDKKPLTRLQERLIKKLGEHAYPFTFEIPPNLPCSVTLQPGPEDTGKACGVDYEVKAFCRPGGEILGREERFQQXREILVRSG

SEQ ID NO: 858449 - protein, 462 aa, Homo sapiens
GGDRGRGRRRRPGERRRRSREPGAGWPALLLLAGDFPAWALTPRTSLRPSRTMGDKGTRVFKKASPNGKLTVYLGKRDFVDHIDLVDPVDGVVLVDPEYLKERRVYVTLTCAFRYGREDLDVLGLTFRKDLFVANVQSFPPAPEDKKPLTRLQERLIKKLGEHAYPFTFEIPPNLPCSVTLQPGPEDTGKACGVDYEVKAFCAENLEEKIHKRNSVRLVIRKVQYAPERPGPQPTAETTRQFLMSDKPLHLEASLDKEIYYHGEPISVNVHVTNNTNKTVKKIKISVRQYADICLFNTAQYKCPVAMEEADDTVAPSSTFCKVYTLTPFLANNREKRGLALDGKLKHEDTNLASSTLLREGANREILGIIVSYKVKVKLVVSRGGDVAVELPFTLMHPKPKEEPPHREVPENETPVDTNLIELDTNDDDIVFEDFARQRLKGMKDDKEEEEDGTGSPQLNNR

SEQ ID NO: 858450 - protein, 470 aa, Homo sapiens; identical to SEQ ID NO: 858440

SEQ ID NO: 858451 - protein, 405 aa, Homo sapiens
MGVFKKASPNGKLTVYLGKRDFVDHIDLVDPVDGVVLVDPEYLKERRVYVTLTCAFRYGREDLDVLGLTFRKDLFVANVQSFPPAPEDKKPLTRLQERLIKKLGEHAYPFTFEIPPNLPCSVTLQPGPEDTGKACGVDYEVKAFCAENLEEKIHKRNSVRLVIRKVQYAPERPGPQPTAETTRQFLMSDKPLHLEASLDKEIYYHGEPISVNVHVTNNTNKTVKKIKISVRQYADICLFNTAQYKCPVAMEEADDTVAPSSTFCKVYTLTPFLANNREKRGLALDGKLKHEDTNLASSTLLREGANREILGIIVSYKVKVKLVVSRGGDVAVELPFTLMHPKPKEEPPHREVPENETPVDTNLIELDTNDDDIVFEDFARQRLKGMKDDKEEEEDGTGSPQLNNR

SEQ ID NO: 858452 - protein, 348 aa, Homo sapiens
MGFLSSGAGGNDCTLATNRSLRKVGPRTIQVLPAKRKAQVSLIKKLGEHAYPFTFEIPPNLPCSVTLQPGPEDTGKACGVDYEVKAFCAENLEEKIHKRNSVRLVIRKVQYAPERPGPQPTAETTRQFLMSDKPLHLEASLDKEIYYHGEPISVNVHVTNNTNKTVKKIKISVRQYADICLFNTAQYKCPVAMEEADDTVAPSSTFCKVYTLTPFLANNREKRGLALDGKLKHEDTNLASSTLLREGANREILGIIVSYKVKVKLVVSRGGDVAVELPFTLMHPKPKEEPPHREVPENETPVDTNLIELDTNDDDIVFEDFARQRLKGMKDDKEEEEDGTGSPQLNNR

SEQ ID NO: 858453 - protein, 112 aa, Homo sapiens
GPSPDVTVPTATGGIHMCQPDRPFCSWSAPEARDLREGGSPRPQSHTLSHIWPGLWISLLSLPLQTHHIFLVSPTSDDDIVFEDFARQRLKGMKDDKEEEEDGTGSPQLNNR

SEQ ID NO: 858454 - protein, 647 aa, Homo sapiens
MLSGAAGAARRGGAALAPSLTRSLAGTHAGADSCAGADKGSHKETIEERDKRQQRQQRQRQHQGCGAAGSGSDSPTSGPHPVPVLFPLALSLEEQPLPPLPLGRAPGLLAREGQGREALASPSSRGQMPIEIVCKIKFAEEDAKPKEKEAGDEQSLLGAVAPGAAPRDLATFASTSTLHGLGRACGPGPHGLRRTLWALALLTSLAAFLYQAAGLARGYLTRPHLVAMDPAAPAPVAGFPAVTLCNINRFRHSALSDADIFHLANLTGLPPKDRDGHRAAGLRYPEPDMVDILNRTGHQLADMLKSCNFSGHHCSASNFSVVYTRYGKCYTFNADPRSSLPSRAGGMGSGLEIMLDIQQEEYLPIWRETNETSFEAGIRVQIHSQEEPPYIHQLGFGVSPGFQTFVSCQEQRLTYLPQPWGNCRAESELREPELQGYSAYSVSACRLRCEKEAVLQRCHCRMVHMPDSLGGGPEGPCFCPTPCNLTRYGKEISMVRIPNRGSARYLARKYNRNETYIRENFLVLDVFFEALTSEAMEQRAAYGLSALLGDLGGQMGLFIGASILTLLEILDYIYEVSWDRLKRVWRRPKTPLRTSTGGISTLGLQELKEQSPCPSLGRAEGGGVSSLLPNHHHPHGPPGGLFEDFAC

SEQ ID NO: 858455 - protein, 296 aa, Homo sapiens
MGSGLEIMLDIQQEEYLPIWRETNETSFEAGIRVQIHSQEEPPYIHQLGFGVSPGFQTFVSCQEQRLTYLPQPWGNCRAESELREPELQGYSAYSVSACRLRCEKEAVLQRCHCRMVHMPGNETICPPNIYIECADHTLDSLGGGPEGPCFCPTPCNLTRYGKEISMVRIPNRGSARYLARKYNRNETYIRENFLVLDVFFEALTSEAMEQRAAYGLSALLGDLGGQMGLFIGASILTLLEILDYIYEARALEKAGWEWGPWAKQKGAVRGAWWSWPGWKVRFRVLCQGPLTGWQA

SEQ ID NO: 858456 - protein, 528 aa, Homo sapiens
MLSGAAGAARRGGAALAPSLTRSLAGTHAGADSCAGADKGSHKETIEERDKRQQRQQRQRQHQGCGAAGSGSDSPTSGPHPVPVLFPLALSLEEQPLPPLPLGRAPGLLAREGQGREALASPSSRGQMPIEIVCKIKFAEEDAKPKEKEAGDEQSLLGAVAPGAAPRDLATFASTSTLHGLGRACGPGPHGLRRTLWALALLTSLAAFLYQAAGLARGYLTRPHLVAMDPAAPAPVAGFPAVTLCNINRFRHSALSDADIFHLANLTGLPPKDRDGHRAAGLRYPEPDMVDILNRTGHQLADMLKSCNFSGHHCSASNFSVVYTRYGKCYTFNADPRSSLPSRAGGMGSGLEIMLDIQQEEYLPIWRETNETSFEAGIRVQIHSQEEPPYIHQLGFGVSPGFQTFVSCQEQRLTYLPQPWGNCRAESELREPELQGYSAYSVSACRLRCEKEAVLQRCHCRMVHMPGNETICPPNIYIECADHTLGPCCLPFPTSPSASSCLCPLFSSLSWILPSQSLPGGFFLGVEP

SEQ ID NO: 858457 - protein, 528 aa, Homo sapiens; identical to SEQ ID NO: 858456

SEQ ID NO: 858458 - protein, 666 aa, Homo sapiens
MLSGAAGAARRGGAALAPSLTRSLAGTHAGADSCAGADKGSHKETIEERDKRQQRQQRQRQHQGCGAAGSGSDSPTSGPHPVPVLFPLALSLEEQPLPPLPLGRAPGLLAREGQGREALASPSSRGQMPIEIVCKIKFAEEDAKPKEKEAGDEQSLLGAVAPGAAPRDLATFASTSTLHGLGRACGPGPHGLRRTLWALALLTSLAAFLYQAAGLARGYLTRPHLVAMDPAAPAPVAGFPAVTLCNINRFRHSALSDADIFHLANLTGLPPKDRDGHRAAGLRYPEPDMVDILNRTGHQLADMLKSCNFSGHHCSASNFSVVYTRYGKCYTFNADPRSSLPSRAGGMGSGLEIMLDIQQEEYLPIWRETNETSFEAGIRVQIHSQEEPPYIHQLGFGVSPGFQTFVSCQEQRLTYLPQPWGNCRAESELREPELQGYSAYSVSACRLRCEKEAVLQRCHCRMVHMPGNETICPPNIYIECADHTLDSLGGGPEGPCFCPTPCNLTRYGKEISMVRIPNRGSARYLARKYNRNETYIRENFLVLDVFFEALTSEAMEQRAAYGLSALLGDLGGQMGLFIGASILTLLEILDYIYEVSWDRLKRVWRRPKTPLRTSTGGISTLGLQELKEQSPCPSLGRAEGGGVSSLLPNHHHPHGPPGGLFEDFAC

SEQ ID NO: 858459 - protein, 182 aa, Homo sapiens
MGSGLEIMLDIQQEEYLPIWRETNETSFEAGIRVQIHSQEEPPYIHQLGFGVSPGFQTFVSCQEQRLTYLPQPWGNCRAESELREPELQGYSAYSVSACRLRCEKEAVLQRCHCRMVHMPGNETICPPNIYIECADHTLGPCCLPFPTSPSASSCLCPLFSSLSWILPSQSLPGGFFLGVEP

SEQ ID NO: 858460 - protein, 192 aa, Homo sapiens
MTSIPFPGDRLLQVDGVILCGLTHKQAVQCLKGPGQVARLVLERRVPRSTQQCPSANDSMGDERTAVSLVTALPGRPSSCVSVTDGPKFEVKLKKNANGLGFSFVQMEKESCSHLKSDLVRIKRLFPGQPAEENGAIAAGDIILAVNGRSTEGLIFQEVLHLLRGAPQEVTLLLCRPPPGALPELEQEWADT

SEQ ID NO: 858461 - protein, 133 aa, Homo sapiens
MGDERTAVSLVTALPGRPSSCVSVTDGPKFEVKLKKNANGLGFSFVQMEKESCSHLKSDLVRIKRLFPGQPAEENGAIAAGDIILAVNGRSTEGLIFQEVLHLLRGAPQEVTLLLCRPPPGALPELEQEWADT

SEQ ID NO: 858462 - protein, 129 aa, Homo sapiens [sequence omitted]

SEQ ID NO: 858463 - protein, 234 aa, Homo sapiens
MAFLAGPRLLDWASSPPHLQFNKFVLTGYRPASSGSGCLRSLFYLHNELGNIYTHGSVLYHLFMCHQGGSAVYARLLALDMCGVCLVNTLGALPIIHCTLACRPWLRPAALVGYTVLSGVAGWRALTAPSTSARLRAFGWQAAARLLVFGARGVGLGSGAPGSLPCYLRMDALALLGGLVNVARLPERWGPGRFDYWGNSHQIMHLLSVGSILQLHAGVVPDLLWAAHHACPRD

SEQ ID NO: 858464 - protein, 337 aa, Homo sapiens
MAFLAGPRLLDWASSPPHLQFNKFVLTGYRPASSGSGCLRSLFYLHNELGNIYTHGLALLGFLVLVPMTMPWGQLGKDGWLGGTHCVACLAPPAGSVLYHLFMCHQGGSAVYARLLALDMCGVCLVNTLGALPIIHCTLACRPWLRPAALVGYTVLSGVAGWRALTAPTMKYSYFLIKKKTLFQCGVCLVNTLGALPIIHCTLACRPWLRPAALVGYTVLSGVAGWRALTAPSTSARLRAFGWQAAARLLVFGARGVGLGSGAPGSLPCYLRMDALALLGGLVNVARLPERWGPGRFDYWGNSHQIMHLLSVGSILQLHAGVVPDLLWAAHHACPRD

SEQ ID NO: 858465 - protein, 204 aa, Homo sapiens
MPWGQLGKDGWLGGTHCVACLAPPAGSVLYHLFMCHQGGSAVYARLLALDMCGVCLVNTLGALPIIHCTLACRPWLRPAALVGYTVLSGVAGWRALTAPSTSARLRAFGWQAAARLLVFGARGVGLGSGAPGSLPCYLRMDALALLGGLVNVARLPERWGPGRFDYWGNSHQIMHLLSVGSILQLHAGVVPDLLWAAHHACPRD

SEQ ID NO: 858466 - protein, 273 aa, Homo sapiens
MAFLAGPRLLDWASSPPHLQFNKFVLTGYRPASSGSGCLRSLFYLHNELGNIYTHGLALLGFLVLVPMTMPWGQLGKDGWLGGTHCVACLAPPAGSVLYHLFMCHQGGSAVYARLLALDMCGVCLVNTLGALPIIHCTLACRPWLRPAALVGYTVLSGVAGWRALTAPSTSARLRAFGWQAAARLLVFGARGVGLGSGAPGSLPCYLRMDALALLGGLVNVARLPERWGPGRFDYWGNSHQIMHLLSVGSILQLHAGVVPDLLWAAHHACPRD

SEQ ID NO: 858467 - protein, 273 aa, Homo sapiens; identical to SEQ ID NO: 858466

SEQ ID NO: 858468 - protein, 273 aa, Homo sapiens; identical to SEQ ID NO: 858466

SEQ ID NO: 858469 - protein, 273 aa, Homo sapiens; identical to SEQ ID NO: 858466

SEQ ID NO: 858470 - protein, 273 aa, Homo sapiens; identical to SEQ ID NO: 858466

SEQ ID NO: 858471 - protein, 270 aa, Homo sapiens
GAWAEPGVPSRVRPRPSSWLQRDYRPPPPPPPRAVPAARLPWRSRPQCAQASGLALLGFLVLVPMTMPWGQLGKDGWLGGTHCVACLAPPAGSVLYHLFMCHQGGSAVYARLLALDMCGVCLVNTLGALPIIHCTLACRPWLRPAALVGYTVLSGVAGWRALTAPSTSARLRAFGWQAAARLLVFGARGVGLGSGAPGSLPCYLRMDALALLGGLVNVARLPERWGPGRFDYWGNSHQIMHLLSVGSILQLHAGVVPDLLWAAHHACPRD

SEQ ID NO: 858472 - protein, 206 aa, Homo sapiens
MAFLAGPRLLDWASSPPHLQFNKFVLTGYRPASSGSGCLRSLFYLHNELGNIYTHGLALLGFLVLVPMTMPWGQLGKDGWLGGTHCVACLAPPAGSVLYHLFMCHQGGSAVYARLLALDMCGVCLVNTLGALPIIHCTLACRPWLRPAALVGYTVLSGVAGWRALTAPSTSARLRAFGWQAAARLLLHAGVVPDLLWAAHHACPRD

SEQ ID NO: 858473 - protein, 272 aa, Homo sapiens
MAFLAGPRLLDWASSPPHLQFNKFVLTGYRPASSGSGCLRSLFYLHNELGNIYTHGLALLGFLVLVPMTMPWGQLGKDGWLGGTHCVACLAPPAGSVLYHLFMCHQGGSAVYARLLALDMCGVCLVNTLGALPIIHCTLACRPWLRPAALVGYTVLSGVAGWRALTAPSTSARLRAFGWQAAARLLVFGARGVGLGSGAPGSLPCYLRMDALALLGGLVNVARLPERWGPGRFDYVVQVTQPGIIDNHRIEADGASNTLQCIANKTWQSGCH

SEQ ID NO: 858474 - protein, 273 aa, Homo sapiens; identical to SEQ ID NO: 858466

SEQ ID NO: 858475 - protein, 171 aa, Homo sapiens
MAEDEPDAKSPKTGGRAPPGGAEAGEPTTLLQRLRGTISKAVQNKVEGIRKMAEVEQKKKRTFRKFTYRGVDLDQLLDMSYEQLMQLYSARQRRRLNRGLRRKQHSLLKRLRKAKKEAPPMGEAGSGETHLRDMIILPEMVGSNGGASTTEDFNRWRSSRMIGHYLGDSHH

SEQ ID NO: 858476 - protein, 616 aa, Homo sapiens
MAEDEPDAKSPKTGGRAPPGGAEAGEPTTLLQRLRGTISKAVQNKVEGILQDVQKFSDNDKLYLYLQLPSGPTTGDKSSEPSTLSNEEYMYAYRWIRNHLEEHTDTCLPKQSVYDAYRKYCESLACCRPLSTANFGKIIREIFPDIKARRLGGRGQSKYCYSGIRRKTLVSMPPLPGLDLKGSESPEMGPEVTPAPRDELVEAACALTCDWAERILKRSFSSIVEVARFLLQQHLISARSAHAHVLKAMGLAEEDEHAPRERSSKPKNGLENPEGGAHKKPERLAQPPKDLEARTGAGPLARGERKKSVVESSAPGANNLQVNALVARLPLLLPRAPRSLIPPIPVSPPILAPRLSSGALKVATLPLSSRAGAPPAAVPIINMILPTVPALPGPGPGPGRAPPGGLTQPRGTENREVGIGGDQGPHDKGVKRTAEVPVSEASGQAPPAKAAKQDIEDTASDAKRKRGRPRKKSGGSGERNSTPLKSAAAMESAQSSRLPWETWGSGGEGNSAGGAERPGPMGEAEKGAVLAQGQGDGTVSKGGRGPGSQHTKEAEDKIPLVPSKVSVIKGSRSQKEAFPLAKGEVDTAPQGNKDLKEHVLQSSLSQEHKDPKATPP

SEQ ID NO: 858477 - protein, 616 aa, Homo sapiens; identical to SEQ ID NO: 858476

SEQ ID NO: 858478 - protein, 679 aa, Homo sapiens
MAEDEPDAKSPKTGGRAPPGGAEAGEPTTLLQRLRGTISKAVQNKVEGILQDVQKFSDNDKLYLYLQLPSGPTTGDKSSEPSTLSNEEYMYAYRWIRNHLEEHTDTCLPKQSVYDAYRWVEGWVVEMSGLVGIGPLTHEELPALIKPAFLKGSSHLILGTLRAYPWPPSLSIFPLCSPLTQKYCESLACCRPLSTANFGKIIREIFPDIKARRLGGRGQSKYCYSGIRRKTLVSMPPLPGLDLKGSESPEMGPEVTPAPRDELVEAACALTCDWAERILKRSFSSIVEVARFLLQQHLISARSAHAHVLKAMGLAEEDEHAPRERSSKPKNGLENPEGGAHKKPERLAQPPKDLEARTGAGPLARGERKKSVVESSAPGANNLQVNALVARLPLLLPRAPRSLIPPIPVSPPILAPRLSSGALKVATLPLSSRAGAPPAAVPIINMILPTVPALPGPGPGPGRAPPGGLTQPRGTENREVGIGGDQGPHDKGVKRTAEVPVSEASGQAPPAKAAKQDIEDTASDAKRKRGRPRKKSGGSGERNSTPLKSAAAMESAQSSRLPWETWGSGGEGNSAGGAERPGPMGEAEKGAVLAQGQGDGTVSKGGRGPGSQHTKEAEDKIPLVPSKVSVIKGSRSQKEAFPLAKGEVDTAPQGNKDLKEHVLQSSLSQEHKDPKATPP

SEQ ID NO: 858479 - protein, 616 aa, Homo sapiens; identical to SEQ ID NO: 858476

SEQ ID NO: 858480 - protein, 370 aa, Homo sapiens
MAEDEPDAKSPKTGGRAPPGGAEAGEPTTLLQRLRGTISKAVQNKVEGILQDVQKFSDNDKLYLYLQLPSGPTTGDKSSEPSTLSNEEYMYAYRWIRNHLEEHTDTCLPKQSVYDAYRKYCESLACCRPLSTANFGKIIREIFPDIKARRLGGRGQSKYCYSGIRRKTLVSMPPLPGLDLKGSESPEMGPEVTPAPRDELVEAACALTCDWAERILKRSFSSIVEVARFLLQQHLISARSAHAHVLKAMGLAAWETWGSGGEGNSAGGAERPGPMGEAEKGAVLAQGQGDGTVSKGGRGPGSQHTKEAEDKIPLVPSKVSVIKGSRSQKEAFPLAKGEVDTAPQGNKDLKEHVLQSSLSQEHKDPKATPP

SEQ ID NO: 858481 - protein, 183 aa, Homo sapiens
MAEDEPDAKSPKTGGRAPPGGAEAGEPTTLLQRLRGTISKAVQNKVEGILQDVQKFSDNDKLYLYLQLPSGPTTGDKSSEPSTLSNEEYMYAYRWIRNHLEEHTDTCLPKQSVYDAYRKYCESLACCRPLSTANFGKIIREIFPDIKARRLGGRGQSKYCYSGIRRKTLVSMPPLLLPLTFSA

SEQ ID NO: 858482 - protein, 203 aa, Homo sapiens
MAEDEPDAKSPKTGGRAPPGGAEAGEPTTLLQRLRGTISKAVQNKVEGILQDVQKFSDNDKLYLYLQLPSGPTTGDKSSEPSTLSNEEYMYAYRWIRNHLEEHTDTCLPKQSVYDAYRKYCESLACCRPLSTANFGKIIREIFPDIKARRLGGRGQSKYCYSGIRRKTLVSMPPLPGLDLKGSESPEMGPEVTPALLPLTFSA

SEQ ID NO: 858483 - protein, 183 aa, Homo sapiens; identical to SEQ ID NO: 858481

SEQ ID NO: 858484 - protein, 160 aa, Homo sapiens [sequence omitted]

SEQ ID NO: 858485 - protein, 616 aa, Homo sapiens; identical to SEQ ID NO: 858476

SEQ ID NO: 858486 - protein, 527 aa, Homo sapiens
MYAYRWIRNHLEEHTDTCLPKQSVYDAYRKYCESLACCRPLSTANFGKIIREIFPDIKARRLGGRGQSKYCYSGIRRKTLVSMPPLPGLDLKGSESPEMGPEVTPAPRDELVEAACALTCDWAERILKRSFSSIVEVARFLLQQHLISARSAHAHVLKAMGLAEEDEHAPRERSSKPKNGLENPEGGAHKKPERLAQPPKDLEARTGAGPLARGERKKSVVESSAPGANNLQVNALVARLPLLLPRAPRSLIPPIPVSPPILAPRLSSGALKVATLPLSSRAGAPPAAVPIINMILPTVPALPGPGPGPGRAPPGGLTQPRGTENREVGIGGDQGPHDKGVKRTAEVPVSEASGQAPPAKAAKQDIEDTASDAKRKRGRPRKKSGGSGERNSTPLKSAAAMESAQSSRLPWETWGSGGEGNSAGGAERPGPMGEAEKGAVLAQGQGDGTVSKGGRGPGSQHTKEAEDKIPLVPSKVSVIKGSRSQKEAFPLAKGEVDTAPQGNKDLKEHVLQSSLSQEHKDPKATPP

SEQ ID NO: 858487 - protein, 616 aa, Homo sapiens; identical to SEQ ID NO: 858476

SEQ ID NO: 858488 - protein, 616 aa, Homo sapiens; identical to SEQ ID NO: 858476

SEQ ID NO: 858489 - protein, 602 aa, Homo sapiens
MAEDEPDAKSPKTGGRAPPGGAEAGEPTTLLQRLRGTISKAVQNKVEGILQDVQKFSDNDKLYLYLQLPSGPTTGDKSSEPSTLSNEEYMYAYRWIRNHLEEHTDTCLPKQSVYDAYRKYCESLACCRPLSTANFGKIIREIFPDIKARRLGGRGQSKYCYSGIRRKTLVSMPPLPGLDLKGSESPEMGPEVTPAPRDELVEAACALTCDWAERILKRSFSSIVEVARFLLQQHLISARSAHAHVLKAMGLAEEDEHAPRERSSKPKNGLENPEGGAHKKPERLAQPPKDLEARTGAGPLARGERKKSVVESSAPGANNLQVNALVARLPLLLPRAPRSLIPPIPVSPPILAPRLSSGALKVATLPLSSRAGAPPAAVPIINMILPTVPALPGPGPGPGRAPPGGLTQPRGTENREVGIGGDQGPHDKGVKRTAEVPVSEASGQAPPAKAAKQDIEDTASDAKRKRGRPRKKSGGSGERNSTPLKSAAAMESAQSSRLPWETWGSGGEGNSAGGAERPGPMGEAEKGAVLAQGQGDGTVSKGGRGPGSQHTKEAEDKIPLVPSKVSVIKGSRSQKEAFPKEVHSPLYRQLSHPVYLVPGCCL

SEQ ID NO: 858490 - protein, 407 aa, Homo sapiens
AAVGAGHGAGGPGAASSSGGAREGARVAALCLLWYALSAGGNVVNKVILSAFPFPVTVSLCHILALCAGLPPLLRAWRVPPAPPVSGPGPSPHPSSGPLLPPRFYPRYVLPLAFGKYFASVSAHVSIWKVPVSYAHTVKATMPIWVVLLSRIIMKEKQSTKVYLSLIPIISGVLLATVTELSFDMWGLVSALAATLCFSLQNIFSKKVLRDSRIHHLRLLNILGCHAVFFMIPTWVLVDLSAFLVSSDLTYVYQWPWTLLLLAVSGFCNFAQNVIAFSILNLVSPLSYSVANATKRIMVITVSLIMLRNPVTSTNVLGMMTAILGVFLYNKTKYDANQQARKHLLPVTTADLSSKERHRSPLEKPHNGLLFPQHGDYQYGRNNILTDHFQYSRQSYPNSYSLNRYDV

SEQ ID NO: 858491 - protein, 407 aa, Homo sapiens; identical to SEQ ID NO: 858490

SEQ ID NO: 858492 - protein, 407 aa, Homo sapiens; identical to SEQ ID NO: 858490

SEQ ID NO: 858493 - protein, 407 aa, Homo sapiens; identical to SEQ ID NO: 858490

SEQ ID NO: 858494 - protein, 407 aa, Homo sapiens; identical to SEQ ID NO: 858490

SEQ ID NO: 858495 - protein, 180 aa, Homo sapiens
MPAFTLCTSHPRAAVSPPSGLQTYVYQWPWTLLLLAVSGFCNFAQNVIAFSILNLVSPLSYSVANATKRIMVITVSLIMLRNPVTSTNVLGMMTAILGVFLYNKTKYDANQQARKHLLPVTTADLSSKERHRSPLEKPHNGLLFPQHGDYQYGRNNILTDHFQYSRQSYPNSYSLNRYDV

SEQ ID NO: 858496 - protein, 407 aa, Homo sapiens; identical to SEQ ID NO: 858490

SEQ ID NO: 858497 - protein, 262 aa, Homo sapiens
AAVGAGHGAGGPGAASSSGGAREGARVAALCLLWYALSAGGNVVNKVILSAFPFPVTVSLCHILALCAGLPPLLRAWRVPPAPPVSGPGPSPHPSSGPLLPPRFYPRYVLPLAFGKYFASVSAHVSIWKVPVSYAHTVKATMPIWVVLLSRIIMKEKQSTKVYLSLIPIISGVLLATVTELSFDMWGLVSALAATLCFSLQNIFSKKVLRDSRIHHLRLLNILGCHAVFFMIPTWVLVDLSAFLVSSDLVSCTAPRTRHFLG

SEQ ID NO: 858498 - protein, 151 aa, Homo sapiens
AGGPGAASSSGGAREGARVAALCLLWYALSAGGNVVNKVILSAFPFPVTVSLCHILALCAGLPPLLRAWRVPPAPPVSGPGPSPHPSSGPLLPPRFYPRYVLPLAFGKYFASVSAHVSIWKVPVSYAHTGRFRARPRGRRPGPPLRVWAHG

SEQ ID NO: 858499 - protein, 215 aa, Homo sapiens
AAVGAGHGAGGPGAASSSGGAREGARVAALCLLWYALSAGGNVVNKVILSAFPFPVTVSLCHILALCAGLPPLLRAWRVPPAPPVSGPGPSPHPSSGPLLPPRFYPRYVLPLAFGKYFASVSAHVSIWKVPVSYAHTVKATMPIWVVLLSRIIMKEKQSTKVTPGRDSGQMGAPGGSSLLPTGDVVRILVCRLPGFPSNREVSVEVSSGLLLLKF

SEQ ID NO: 858500 - protein, 407 aa, Homo sapiens; identical to SEQ ID NO: 858490

SEQ ID NO: 858501 - protein, 407 aa, Homo sapiens; identical to SEQ ID NO: 858490

SEQ ID NO: 858502 - protein, 407 aa, Homo sapiens; identical to SEQ ID NO: 858490

SEQ ID NO: 858503 - protein, 321 aa, Homo sapiens
MGMGLPTNKPCPWRSDNHLPPATHQSVTGTANTTFKVLGGIPLLREERGSSLGICGMWPSSSLACEPFSDDLFLQVYLSLIPIISGVLLATVTELSFDMWGLVSALAATLCFSLQNIFSKKVLRDSRIHHLRLLNILGCHAVFFMIPTWVLVDLSAFLVSSDLTYVYQWPWTLLLLAVSGFCNFAQNVIAFSILNLVSPLSYSVANATKRIMVITVSLIMLRNPVTSTNVLGMMTAILGVFLYNKTKYDANQQARKHLLPVTTADLSSKERHRSPLEKPHNGLLFPQHGDYQYGRNNILTDHFQYSRQSYPNSYSLNRYDV

SEQ ID NO: 858504 - protein, 407 aa, Homo sapiens; identical to SEQ ID NO: 858490

SEQ ID NO: 858505 - protein, 262 aa, Homo sapiens; identical to SEQ ID NO: 858497

SEQ ID NO: 858506 - protein, 222 aa, Homo sapiens
QRFILLDIFPVQEKNHTVVSPRALELSDPVLDEHHQGDQDGGDQDERAEKSKLTGTRQNHSFIWSGASFDLSPGLQRILDKVSSPLENEKLKSMTINFSSLNRKNTELNEEQEVISNLETKQVQGISFSSNNEVYSVESTLYTSEKLQMKEMTCRDIVKEVAKIIYIVHDEVKDKAFELELSWVGELTNGRHEIVPKDIREEAEKYAKESLKEEDESDDDNM

SEQ ID NO: 858507 - protein, 259 aa, Homo sapiens
MSSIGTGYDLSASTFSPDGRVFQVEYAMKAVENSSTAIGIRCKDGVVFGVEKLVLSKLYEEGSNKRLFNVDRHVGMAVAGLLADARSLADIAREEASNFRSNFGYNIPLKHLADRVAMYVHAYTLYSAVRPFGCSFWLQFMLGSYSVNDGAQLYMIDPSGVSYGYWGCAIGKARQAAKTEIEKLQMKEMTCRDIVKEVAKIIYIVHDEVKDKAFELELSWVGELTNGRHEIVPKDIREEAEKYAKESLKEEDESDDDNM

SEQ ID NO: 858508 - protein, 259 aa, Homo sapiens; identical to SEQ ID NO: 858507

SEQ ID NO: 858509 - protein, 259 aa, Homo sapiens; identical to SEQ ID NO: 858507

SEQ ID NO: 858510 - protein, 281 aa, Homo sapiens
MSSIGTGYDLSASTFSPDGRVFQVEYAMKAVENSSTAIGIRCKDGVVFGVEKLVLSKLYEEGSNKRLFNVDRHVGMAVAGLLADARSLADIAREEASNFRSNFGYNIPLKHLADRVAMYVHAYTLYSAVRPFGCSFWLQFMLGSYSVNDGAQLYMIDPSGVSYGYWGCAIGKARQAAKTEIEKLQMKEMTCRDIVKEVAKIIYIVHDEVKDKAFELELSWVGELTNGRHEIVPKDIREEAEKYAKVSHSTKTSLGQVQSGNHLAQEFETSLSSTARPPSLI

SEQ ID NO: 858511 - protein, 283 aa, Homo sapiens
MSSIGTGYDLSASTFSPDGRVFQVEYAMKAVENSSTAIGIRCKDGVVFGVEKLVLSKLYEEGSNKRLFNVDRHVGMAVAGLLADARSLADIAREEASNFRSNFGYNIPLKHLADRVAMYVHAYTLYSAVRPFGCSFWLQFMLGSYSVNDGAQLYMIDPSGVSYGYWGCAIGKARQAAKTEIEKLQMKEMTCRDIVKEVAKIIYIVHDEVKDKAFELELSWVGELTNGRHEIVPKDIREEAEKYAKVSHSTKTSLGQVQSGNHLAQEFETSVGGSPEVRSSRPA

SEQ ID NO: 858512 - protein, 233 aa, Homo sapiens
MSSIGTGYDLSASTFSPDGRVFQVEYAMKAVENSSTAIGIRCKDGVVFGVEKLVLSKLYEEGSNKRLFNVDRHVGMAVAGLLADARSLADIAREEASNFRSNFGYNIPLKHLADRVAMYVHAYTLYSAVRPFGCSFWLQFMLGSYSVNDGAQLYMIDPSGVSYGYWGCAIGKARQAAKTEIEKLQMKEMTCRDIVKEVAKIIYIVHDEVKDKAFELELSWVGECKLFLYIYLP

SEQ ID NO: 858513 - protein, 142 aa, Homo sapiens
MYVHAYTLYSAVRPFGCSFWLQFMLGSYSVNDGAQLYMIDPSGVSYGYWGCAIGKARQAAKTEIEKLQMKEMTCRDIVKEVAKIIYIVHDEVKDKAFELELSWVGELTNGRHEIVPKDIREEAEKYAKESLKEEDESDDDNM

SEQ ID NO: 858514 - protein, 223 aa, Homo sapiens
MSSIGTGYDLSASTFSPDGRVFQVEYAMKAVENSSTAIGIRCKDGVVFGVEKLVLSKLYEEGSNKRLFNVDRHVGMAVAGLLADARSLADIAREEASNFRSNFGYNIPLKHLADRVAMYVHAYTLYSAVRPFGCSFWLQFMLGSYSVNDGAQLYMIDPSGVSYGYWGCAIGKARQAAKTEIEKLQMKEMTCRDIVKEVAKIIYIVHDEVKDKAFELELSWVGE

SEQ ID NO: 858515 - protein, 116 aa, Homo sapiens
MSSIGTGYDLSASTFSPDGRVFQVEYAMKAVENSSTAIGIRCKDGVVFGVEKLVLSKLYEEGSNKRLFNVDRHVGMAVAGLLADARSLADIAREEASNFRSNFGYNIPLKSKLITY

SEQ ID NO: 858516 - protein, 119 aa, Homo sapiens
MLGSYSVNDGAQLYMIDPSGVSYGYWGCAIGKARQAAKTEIEKLQMKEMTCRDIVKEVAKIIYIVHDEVKDKAFELELSWVGELTNGRHEIVPKDIREEAEKYAKESLKEEDESDDDNM

SEQ ID NO: 858517 - protein, 208 aa, Homo sapiens
MSSIGTGYDLSASTFSPDGRVFQVEYAMKAVENSSTAIGIRCKDGVVFGVEKLVLSKLYEEGSNKRLFNVDRHVGMAVAGLLADARSLADIAREEASNFRSNFGYNIPLKHLADRVAMYVHAYTLYSAVRPFGCSFWLQFMLGSYSVNDGAQLYMIDPSGVSYGYWGCAIGKARQAAKTEIEKLQMKEMTCRDIVKEVAKISAVVVNY

SEQ ID NO: 858518 - protein, 154 aa, Homo sapiens
WSKCYILSSSDSSSSFRDSLAYFSASSVDLFWLQFMLGSYSVNDGAQLYMIDPSGVSYGYWGCAIGKARQAAKTEIEKLQMKEMTCRDIVKEVAKIIYIVHDEVKDKAFELELSWVGELTNGRHEIVPKDIREEAEKYAKESLKEEDESDDDNM

SEQ ID NO: 858519 - protein, 194 aa, Homo sapiens
MSSIGTGYDLSASTFSPDGRVFQVEYAMKAVENSSTAIGIRCKDGVVFGVEKLVLSKLYEEGSNKRLFNVDRHVGMAVAGLLADARSLADIAREEASNFRSNFGYNIPLKHLADRVAMYVHAYTLYSAVRPFGCSFWLQFMLGSYSVNDGAQLYMIDPSGVSYGYWGCAIGKARQAAKTEIEKLQMKEMTCRKS

SEQ ID NO: 858520 - protein, 119 aa, Homo sapiens; identical to SEQ ID NO: 858516

SEQ ID NO: 858521 - protein, 193 aa, Homo sapiens
MSSIGTGYDLSASTFSPDGRVFQVEYAMKAVENSSTAIGIRCKDGVVFGVEKLVLSKLYEEGSNKRLFNVDRHVGMAVAGLLADARSLADIAREEASNFRSNFGYNIPLKHLADRVAMYVHAYTLYSAVRPFGCRIYIVHDEVKDKAFELELSWVGELTNGRHEIVPKDIREEAEKYAKESLKEEDESDDDNM

SEQ ID NO: 858522 - protein, 134 aa, Homo sapiens
QRFILLDIFPVQEKNHTVVSPRALELSDPVLDEHHQGDQDGGDQDERAEKSKLTGTRQNHSFIWSGASFDLSPGLQRILDKVSSPLENEKLKSMTINFSSLNRKNTELNEEQEVISNLETKQVQGISFSSNNEV

SEQ ID NO: 858523 - protein, 259 aa, Homo sapiens; identical to SEQ ID NO: 858507

SEQ ID NO: 858524 - protein, 159 aa, Homo sapiens
SNFGYNIPLKHLADRVAMYVHAYTLYSAVRPFGCSFWLQFMLGSYSVNDGAQLYMIDPSGVSYGYWGCAIGKARQAAKTEIEKLQMKEMTCRDIVKEVAKIIYIVHDEVKDKAFELELSWVGELTNGRHEIVPKDIREEAEKYAKESLKEEDESDDDNM

SEQ ID NO: 858525 - protein, 90 aa, Homo sapiens
GLQEFGTRDYIHINIGALELSANHNILHIVVCVMTYKRKTKKKKKKKKIKSRKTITNGRHEIVPKDIREEAEKYAKESLKEEDESDDDNM

SEQ ID NO: 858526 - protein, 259 aa, Homo sapiens; identical to SEQ ID NO: 858507

SEQ ID NO: 858527 - protein, 269 aa, Homo sapiens
MSSIGTGYDLSASTFSPDGRVFQVEYAMKAVENSSTAIGIRCKDGVVFGVEKLVLSKLYEEGSNKRLFNVDRHVGMAVAGLLADARSLADIAREEASNFRSNFGYNIPLKHLADRVAMYVHAYTLYSAVRPFGCSFWLQFMLGSYSVNDGAQLYMIDPSGVSYGYWGCAIGKARQAAKTEIEKLQMKEMTCRDIVKEVAKIIYIVHDEVKDKAFELELSWVGELTNGRHEIVPKDIREEAEKYAKESLKEEDESDDDNMHKHSKRGSLE

SEQ ID NO: 858528 - protein, 281 aa, Homo sapiens; identical to SEQ ID NO: 858510

SEQ ID NO: 858529 - protein, 247 aa, Homo sapiens
MSSIGTGYDLSASTFSPDGRVFQVEYAMKAVENSSTAIGIRCKDGVVFGVEKLVLSKLYEEGSNKRLFNVDRHVGMAVAGLLADARSLADIAREEASNFRSNFGYNIPLKHLADRVAMYVHAYTLYSAVRPFGCSFWLQFMLGSYSVNDGAQLYMIDPSGVSYGYWGCAIGKARQAAKTEIEKLQMKEMTCRDIVKEVAKIIYIVHDEVKDKAFELELSWVGELTNGRHEIVPKDIREEAEKYAKNL

SEQ ID NO: 858530 - protein, 184 aa, Homo sapiens
MAVAGLLADARSLADIAREEASNFRSNFGYNIPLKHLADRVAMYVHAYTLYSAVRPFGCSFWLQFMLGSYSVNDGAQLYMIDPSGVSYGYWGCAIGKARQAAKTEIEKLQMKEMTCRDIVKEVAKIIYIVHDEVKDKAFELELSWVGELTNGRHEIVPKDIREEAEKYAKESLKEEDESDDDNM

SEQ ID NO: 858531 - protein, 233 aa, Homo sapiens; identical to SEQ ID NO: 858512

SEQ ID NO: 858532 - protein, 241 aa, Homo sapiens
MSSIGTGYDLSASTFSPDGRVFQVEYAMKAVENSSTAIGIRCKDGVVFGVEKLVLSKLYEEGSNADARSLADIAREEASNFRSNFGYNIPLKHLADRVAMYVHAYTLYSAVRPFGCSFWLQFMLGSYSVNDGAQLYMIDPSGVSYGYWGCAIGKARQAAKTEIEKLQMKEMTCRDIVKEVAKIIYIVHDEVKDKAFELELSWVGELTNGRHEIVPKDIREEAEKYAKESLKEEDESDDDNM

SEQ ID NO: 858533 - protein, 248 aa, Homo sapiens
MSSIGTGYDLSASTFSPDGRVFQVEYAMKAVENSSTAIGIRCKDGVVFGVEKLVLSKLYEEGSNKRLFNVDRHVGMAVAGLLADARSLADIAREEASNFRSNFGYNIPLKHLADRVAMYVHAYTLYSAVRPFGCSVNDGAQLYMIDPSGVSYGYWGCAIGKARQAAKTEIEKLQMKEMTCRDIVKEVAKIIYIVHDEVKDKAFELELSWVGELTNGRHEIVPKDIREEAEKYAKESLKEEDESDDDNM

SEQ ID NO: 858534 - protein, 203 aa, Homo sapiens
MSSIGTGYDLSASTFSPDGRVFQVEYAMKAVENSSTAIGIRCKDGVVFGVEKLVLSKLYEEGSNKRLFNVDRHVGMAVAGLLADARSLADIAREEASNFRSNFGYNIPLKHLADRVAMYVHAYTLYSAVRPFGCSFWLQFMLGSYSVNDGAQLYMIDPSGVSYGYWGCAIGKARQAAKTEIEKLQMKEMTCRDIVKEVAKIVS

SEQ ID NO: 858535 - protein, 184 aa, Homo sapiens; identical to SEQ ID NO: 858530

SEQ ID NO: 858536 - protein, 190 aa, Homo sapiens
MSSIGTGYDLSASTFSPDGRVFQVEYAMKAVENSSTAIGIRCKDGVVFGVEKLVLSKLYEEGSNKRLFNVDRHVGMAVAGLLADARSLADIAREEASNFRSNFGYNIPLKHLADRVAMYVHAYTLYSAVRPFGCSFWLQFMLGSYSVNDGAQLYMIDPSGVSYGYWGCAIGKARQAAKTEIEKLQVIINA

SEQ ID NO: 858537 - protein, 135 aa, Homo sapiens
MSSIGTGYDLSASTFSPDGRVFQVEYAMKAVENSSTAIGIRCKDGVVFGVEKLVLSKLYEEGSNKRLFNVDRHVGMAVAGLLADARSLADIAREEASNFRSNFGYNIPLKHLADRVAMYVHAYTLYSAVRPFGCR

SEQ ID NO: 858538 - protein, 1059 aa, Homo sapiens
APPREVSGSWFCFLRPRSPPLHPSRLPLRSGPEPSRLRCHSSRLHTLADAHTLSLPVPPPPPQLLDLWVCFITPGASPADSAARYLSSARSPLAGSGEQRRRGWGGEGKGRGWKLPGAVSPRRCWCCRCLLLLRRRRRRRRLLRLFARPLSASMCRIAGALRTLLPLLAALLQASVEASGEIALCKTGFPEDVYSAVLSKDVHEGQPLLNVKFSNCNGKRKVQYESSEPADFKVDEDGMVYAVRSFPLSSEHAKFLIYAQDKETQEKWQVAVKLSLKPTLTEESVKESAEVEEIVFPRQFSKHSGHLQRQKRDWVIPPINLPENSRGPFPQELVRIRSDRDKNLSLRYSVTGPGADQPPTGIFIINPISGQLSVTKPLDREQIARFHLRAHAVDINGNQVENPIDIVINVIDMNDNRPEFLHQVWNGTVPEGSKPGTYVMTVTAIDADDPNALNGMLRYRIVSQAPSTPSPNMFTINNETGDIITVAAGLDREKVQQYTLIIQATDMEGNPTYGLSNTATAVITVTDVNDNPPEFTAMTFYGEVPENRVDIIVANLTVTDKDQPHTPAWNAVYRISGGDPTGRFAIQTDPNSNDGLVTVVKPIDFETNRMFVLTVAAENQVPLAKGIQHPPQSTATVSVTVIDVNENPYFAPNPKIIRQEEGLHAGTMLTTFTAQDPDRYMQQNIRYTKLSDPANWLKIDPVNGQITTIAVLDRESPNVKNNIYNATFLASDNGIPPMSGTGTLQIYLLDINDNAPQVLPQEAETCETPDPNSINITALDYDIDPNAGPFAFDLPLSPVTIKRNWTITRLNGDFAQLNLKIKFLEAGIYEVPIIITDSGNPPKSNISILRVKVCQCDSNGDCTDVDRIVGAGLGTGAIIAILLCIIILLILVLMFVVWMKRRDKERQAKQLLIDPEDDVRDNILKYDEEGGGEEDQDYDLSQLQQPDTVEPDAIKPVGIRRMDERPIHAEPQYPVRSAAPHPGDIGDFINEGLKAADNDPTAPPYDSLLVFDYEGSGSTAGSLSSLNSSSSGGEQDYDYLNDWGPRFKKLADMYGGGDD

SEQ ID NO: 858539 - protein, 887 aa, Homo sapiens
SRRNYGKWKLDGMFLLRRYVCIFTEKLKNQAELYVFLSVKFSNCNGKRKVQYESSEPADFKVDEDGMVYAVRSFPLSSEHAKFLIYAQDKETQEKWQVAVKLSLKPTLTEESVKESAEVEEIVFPRQFSKHSGHLQRQKRDWVIPPINLPENSRGPFPQELVRIRSDRDKNLSLRYSVTGPGADQPPTGIFIINPISGQLSVTKPLDREQIARFHLRAHAVDINGNQVENPIDIVINVIDMNDNRPEFLHQVWNGTVPEGSKPGTYVMTVTAIDADDPNALNGMLRYRIVSQAPSTPSPNMFTINNETGDIITVAAGLDREKVQQYTLIIQATDMEGNPTYGLSNTATAVITVTDVNDNPPEFTAMTFYGEVPENRVDIIVANLTVTDKDQPHTPAWNAVYRISGGDPTGRFAIQTDPNSNDGLVTVVKPIDFETNRMFVLTVAAENQVPLAKGIQHPPQSTATVSVTVIDVNENPYFAPNPKIIRQEEGLHAGTMLTTFTAQDPDRYMQQNIRYTKLSDPANWLKIDPVNGQITTIAVLDRESPNVKNNIYNATFLASDNGIPPMSGTGTLQIYLLDINDNAPQVLPQEAETCETPDPNSINITALDYDIDPNAGPFAFDLPLSPVTIKRNWTITRLNGDFAQLNLKIKFLEAGIYEVPIIITDSGNPPKSNISILRVKVCQCDSNGDCTDVDRIVGAGLGTGAIIAILLCIIILLILVLMFVVWMKRRDKERQAKQLLIDPEDDVRDNILKYDEEGGGEEDQDYDLSQLQQPDTVEPDAIKPVGIRRMDERPIHAEPQYPVRSAAPHPGDIGDFINEGLKAADNDPTAPPYDSLLVFDYEGSGSTAGSLSSLNSSSSGGEQDYDYLNDWGPRFKKLADMYGGGDD

SEQ ID NO: 858540 - protein, 1041 aa, Homo sapiens
APPREVSGSWFCFLRPRSPPLHPSRLPLRSGPEPSRLRCHSSRLHTLADAHTLSLPVPPPPPQLLDLWVCFITPGASPADSAARYLSSARSPLAGSGEQRRRGWGGEGKGRGWKLPGAVSPRRCWCCRCLLLLRRRRRRRRLLRLFARPLSASMCRIAGALRTLLPLLAALLQASVEASGEIALCKTGFPEDVYSAVLSKDVHEGQPLLNVKFSNCNGKRKVQYESSEPADFKVDEDGMVYAVRSFPLSSEHAKFLIYAQDKETQEKWQVAVKLSLKPTLTEESVKESAEVEEIVFPRQFSKHSGHLQRQKRDWVIPPINLPENSRGPFPQELVRIRSDRDKNLSLRYSVTGPGADQPPTGIFIINPISGQLSVTKPLDREQIARFHLRAHAVDINGNQVENPIDIVINVIDMNDNRPEFLHQVWNGTVPEGSKPGTYVMTVTAIDADDPNALNGMLRYRIVSQAPSTPSPNMFTINNETGDIITVAAGLDREKVQQYTLIIQATDMEGNPTYGLSNTATAVITVTDVNDNPPEFTAMTFYGEVPENRVDIIVANLTVTDKDQPHTPAWNAVYRISGGDPTGRFAIQTDPNSNDGLVTVVKPIDFETNRMFVLTVAAENQVPLAKGIQHPPQSTATVSVTVIDVNENPYFAPNPKIIRQEEGLHAGTMLTTFTAQDPDRYMQQNIRYTKLSDPANWLKIDPVNGQITTIAVLDRESPNVKNNIYNATFLASDNGIPPMSGTGTLQIYLLDINDNAPQVLPQEAETCETPDPNSINITALDYDIDPNAGPFAFDLPLSPVTIKRNWTITRLNGDFAQLNLKIKFLEAGIYEVPIIITDSGNPPKSNISILRVKVCQCDSNGDCTDVDRIVGAGLGTGAIIAILLCIIILLILVLMFVVWMKRRDKERQAKQLLIDPEDDVRDNILLQQPDTVEPDAIKPVGIRRMDERPIHAEPQYPVRSAAPHPGDIGDFINEGLKAADNDPTAPPYDSLLVFDYEGSGSTAGSLSSLNSSSSGGEQDYDYLNDWGPRFKKLADMYGGGDD

SEQ ID NO: 858541 - protein, 1059 aa, Homo sapiens; identical to SEQ ID NO: 858538

SEQ ID NO: 858542 - protein, 1001 aa, Homo sapiens
APPREVSGSWFCFLRPRSPPLHPSRLPLRSGPEPSRLRCHSSRLHTLADAHTLSLPVPPPPPQLLDLWVCFITPGASPADSAARYLSSARSPLAGSGEQRRRGWGGEGKGRGWKLPGAVSPRRCWCCRCLLLLRRRRRRRRLLRLFARPLSASMCRIAGALRTLLPLLAALLQASVEASGEIALCKTGFPEDVYSAVLSKDVHEGQPLLNVKFSNCNGKRKVQYESSEPADFKVDEDGMVYAVRSFPLSSEHAKFLIYAQDKETQEKWQVAVKLSLKPTLTEESVKESAEVEEIVFPRQFSKHSGHLQRQKRDWVIPPINLPENSRGPFPQELVRIRSDRDKNLSLRYSVTGPGADQPPTGIFIINPISGQLSVTKPLDREQIARFHLRAHAVDINGNQVENPIDIVINVIDMNDNRPEFLHQVWNGTVPEGSKPGTYVMTVTAIDADDPNALNGMLRYRIVSQAPSTPSPNMFTINNETGDIITVAAGLDREKVQQYTLIIQATDMEGNPTYGLSNTATAVITVTDVNDNPPEFTAMTFYGEVPENRVDIIVANLTVTDKDQPHTPAWNAVYRISGGDPTGRFAIQTDPNSNDGLVTVVKPIDFETNRMFVLTVAAENQVPLAKGIQHPPQSTATVSVTVIDVNENPYFAPNPKIIRQEEGLHAGTMLTTFTAQDPDRYMQQNIRYTKLSDPANWLKIDPVNGQITTIAVLDRESPNVKNNIYNATFLASDNGIPPMSGTGTLQIYLLDINDNAPQVLPQEAETCETPDPNSINITALDYDIDPNAGPFAFDLPLSPVTIKRNWTITRLNGDFAQLNLKIKFLEAGIYEVPIIITDSGNPPKSNISILRVKVCQCDSNGDCTDVDRIVGAGLGTGAIIAILLCIIILLILVLMFVVWMKRRDKERQAKQLLIDPEDDVRDNILKYDEEGGGEEDQDYDLSQLQQPDTVEPDAIKPVGIRRMDERPIHAEPQYPVRSAAPHPGDIGDFINEKTWPIQSLHL

SEQ ID NO: 858543 - protein, 541 aa, Homo sapiens
APPREVSGSWFCFLRPRSPPLHPSRLPLRSGPEPSRLRCHSSRLHTLADAHTLSLPVPPPPPQLLDLWVCFITPGASPADSAARYLSSARSPLAGSGEQRRRGWGGEGKGRGWKLPGAVSPRRCWCCRCLLLLRRRRRRRRLLRLFARPLSASMCRIAGALRTLLPLLAALLQASVEASGEIALCKTGFPEDVYSAVLSKDVHEGQPLLNVKFSNCNGKRKVQYESSEPADFKVDEDGMVYAVRSFPLSSEHAKFLIYAQDKETQEKWQVAVKLSLKPTLTEESVKESAEVEEIVFPRQFSKHSGHLQRQKRDWVIPPINLPENSRGPFPQELVRIRSDRDKNLSLRYSVTGPGADQPPTGIFIINPISGQLSVTKPLDREQIARFHLRAHAVDINGNQVENPIDIVINVIDMNDNRPEFLHQVWNGTVPEGSKPGTYVMTVTAIDADDPNALNGMLRYRIVSQAPSTPSPNMFTINNETGDIITVAAGLDREKVQQYTLIIQATDMEGNPTYGLSNTATAVITVTDVNDNPPEFTAMTVL

SEQ ID NO: 858544 - protein, 191 aa, Homo sapiens
MCNTQRMKFSNCNGKRKVQYESSEPADFKVDEDGMVYAVRSFPLSSEHAKFLIYAQDKETQEKWQVAVKLSLKPTLTEESVKESAEVEEIVFPRQFSKHSGHLQRQKRDWVIPPINLPENSRGPFPQELVRIRSDRDKNLSLRYSVTGPGADQPPTGIFIINPISGQLSVTKPLDREQIARFHVRFQPADN

SEQ ID NO: 858545 - protein, 177 aa, Homo sapiens
RGAEKRPSAPTQRRRGVAGLLLFVGAARTTRSALPAALSPASSSRRAALERGPGGSKTTSPKPRVAELLGSAIRSTSTSTSSTGQGPRRCIPRGFRCAPGRSRAACAATAAASTHSQTLTRSPSLFPRPLPSSLISGSVLLLLVRVPRTPRPAICHQLALHWRGAESSEEGGGEGRG

SEQ ID NO: 858546 - protein, 773 aa, Homo sapiens
KNVLAASSIYFKSLVLHDNLINLDTDMVSSTVFQQILDFIYTGKLLPSDQPAEPNFSTLLTAASYLQLPELAALCRRKLKRAGKPFGSGRAGSTGMGRPPRSQRLSTASVIQARYQGLVDGRKGAHAPQELPQAKGSDDELFLGGSNQDSVQGLGRAVCPAGGEAGLGGCSSSTNGSSGGCEQELGLDLSKKSPPLPPATPGPHLTPDDAAQLSDSQHGSPPAASAPPVANSASYSELGGTPDEPMDLEGAEDNHLSLLEAPGGQPRKSLRHSTRKKEWGKKEPVAGSPFERREAGPKGPCPGEEGEGVGDRVPNGILASGAGPSGPYGEPPYPCKEEEENGKDASEDSAQSGSEGGSGHASAHYMYRQEGYETVSYGDNLYVCIPCAKGFPSSEQLNAHVETHTEEELFIKEEGAYETGSGGAEEEAEDLSAPSAAYTAEPRPFKCSVCEKTYKDPATLRQHEKTHWLTRPFPCNICGKMFTQRGTMTRHMRSHLGLKPFACDECGMRFTRQYRLTEHMRVHSGEKPYECQLCGGKFTQQRNLISHLRMHTSPSKKPKTRGRPLPPCSPGTHGRRSEVMQQQGQDPGSSGGSGWPLWPPLPTPRALMDSPYQAEPRGGKPGVPARLPPHPTQAPSSPRGPPQGLWAGSRGSRWDLVPLLQAAWRKGSGTLATARVVSGAGLTPLAVSVCVHVCLCLCGRVQPWFCREKVLGVQIPPSLSQGGTVHWRWDSQGDPTAYLSTTKEPSGPVLLLFLLICSSVFLFDFCFLNQNRQ

SEQ ID NO: 858547 - protein, 773 aa, Homo sapiens; identical to SEQ ID NO: 858546

SEQ ID NO: 858548 - protein, 773 aa, Homo sapiens; identical to SEQ ID NO: 858546

SEQ ID NO: 858549 - protein, 69 aa, Homo sapiens
MIAAILWRGGLVFICVCVRVCVCMCVCVCLCVVCAVCMGRCFAFPPSSLNKVETSDLLLPLEFMTTICW

SEQ ID NO: 858550 - protein, 248 aa, Homo sapiens
  misc_feature (1)..(1): Xaa can be any naturally occurring amino acid
XLVVPGGGAWPQYKKQNKKFYGDPLDIPDGRRAPLPAHYRSSSTRSIDTQTPSVQERSSSCSSHSPCVSPFCPPESQDGSPCSTEDLLYDRDKDSGSSSPLPKYASSPKPNNSYMFKREPPEGCERVKVFEEMASRQPISAPLFSCPDKNKVNFIPTGSAFCPVKLLGPLLPASDLMLKNSPNSGQSSALATLTVEQLSSRVSFTSLSDDTSTAGSMEASVQQPSQQQQLLQELQGEDHISAQNYVII

SEQ ID NO: 858551 - protein, 104 aa, Homo sapiens
KLAAAAPAEQAPRAKGRPRRSPESHRRSSSPERRSPGSPVCRGSEPNPPVLPGCVSPTVPSVETSASSGFSLLVHYRRCESGFGNLTPLRSLWGLEERTEKRLL

SEQ ID NO: 858552 - protein, 137 aa, Homo sapiens
MFHFFRKPPESKKPSVPETEADGFVLLGDTTDEQRMTARGKTSDIEANQPLETNKENSSSVTVSDPEMENKAGQTLENSSLMAELLSDVPFTLAPHVLAVQGTITDLPDHLLSYDGSENLSRFWYDFTLENSVLCDS

SEQ ID NO: 858553 - protein, 137 aa, Homo sapiens; identical to SEQ ID NO: 858552

SEQ ID NO: 858554 - protein, 137 aa, Homo sapiens; identical to SEQ ID NO: 858552

SEQ ID NO: 858555 - protein, 137 aa, Homo sapiens; identical to SEQ ID NO: 858552

SEQ ID NO: 858556 - protein, 437 aa, Homo sapiens
KLAAAAPAEQAPRAKGRPRRSPESHRRSSSPERRSPGSPVCRADKAKSQQVRTSSTIRRTSSLDTITGPYLTGQWPRDPHVHYPSCMKDKATQTPSCWAEEGAEKRSHQRSASWGSADQLKEQIAKLRQQLQRSKQSSRHSKEKDRQSPLHGNHITISHTQATGSRSVPMPLSNISVPKSSVSRVPCNVEGISPELEKVFIKENNGKEEVSKPLDIPDGRRAPLPAHYRSSSTRSIDTQTPSVQERSSSCSSHSPCVSPFCPPESQDGSPCSTEDLLYDRDKDSGSSSPLPKYASSPKPNNSYMFKREPPEGCERVKVFEEMASRQPISAPLFSCPDKNKVNFIPTGSAFCPVKLLGPLLPASDLMLKNSPNSGQSSALATLTVEQLSSRVSFTSLSDDTSTAGSMEASVQQPSQQQQLLQELQGEDHISAQNYVII

SEQ ID NO: 858557 - protein, 494 aa, Homo sapiens
MFHFFRKPPESKKPSVPETEADGFVLLGDTTDEQRMTARGKTSDIEANQPLETESCTGTQAGVQWRNLGSLQAPPPGFTPCSCLSLPSSWDYRRPPPWPADKAKSQQVRTSSTIRRTSSLDTITGPYLTGQWPRDPHVHYPSCMKDKATQTPSCWAEEGAEKRSHQRSASWGSADQLKEQIAKLRQQLQRSKQSSRHSKEKDRQSPLHGNHITISHTQATGSRSVPMPLSNISVPKSSVSRVPCNVEGISPELEKVFIKENNGKEEVSKPLDIPDGRRAPLPAHYRSSSTRSIDTQTPSVQERSSSCSSHSPCVSPFCPPESQDGSPCSTEDLLYDRDKDSGSSSPLPKYASSPKPNNSYMFKREPPEGCERVKVFEEMASRQPISAPLFSCPDKNKVNFIPTGSAFCPVKLLGPLLPASDLMLKNSPNSGQSSALATLTVEQLSSRVSFTSLSDDTSTAGSMEASVQQPSQQQQLLQELQGEDHISAQNYVII

SEQ ID NO: 858558 - protein, 470 aa, Homo sapiens
MFIAALFTIAKTWNQPKCPSVIDWIKKMWHIYTMEYYAAIKKNEFMTFARMWMKLETIILSKLSARTKHCMSSLIADKAKSQQVRTSSTIRRTSSLDTITGPYLTGQWPRDPHVHYPSCMKDKATQTPSCWAEEGAEKRSHQRSASWGSADQLKEQIAKLRQQLQRSKQSSRHSKEKDRQSPLHGNHITISHTQATGSRSVPMPLSNISVPKSSVSRVPCNVEGISPELEKVFIKENNGKEEVSKPLDIPDGRRAPLPAHYRSSSTRSIDTQTPSVQERSSSCSSHSPCVSPFCPPESQDGSPCSTEDLLYDRDKDSGSSSPLPKYASSPKPNNSYMFKREPPEGCERVKVFEEMASRQPISAPLFSCPDKNKVNFIPTGSAFCPVKLLGPLLPASDLMLKNSPNSGQSSALATLTVEQLSSRVSFTSLSDDTSTAGSMEASVQQPSQQQQLLQELQGEDHISAQNYVII

SEQ ID NO: 858559 - protein, 154 aa, Homo sapiens
KLAAAAPAEQAPRAKGRPRRSPESHRRSSSPERRSPGSPVCRADKAKSQQVRTSSTIRRTSSLDTITGPYLTGQWPRDPHVHYPSCMKDKATQTPSCWAEEGAEKRSHQRSASWGSADQLKERQGLIMLPRLVSNSWAQAVLPPQPPKVLESQV

SEQ ID NO: 858560 - protein, 75 aa, Homo sapiens
RFLGDLGVVSNLSLAHLVTRSRRPCQEYSRMSAHKNTFKRYGGNWTEVLIGYYNVVETESVNWPKATELSSFKFP

SEQ ID NO: 858561 - protein, 140 aa, Homo sapiens
KLAAAAPAEQAPRAKGRPRRSPESHRRSSSPERRSPGSPVCRADKAKSQQVRTSSTIRRTSSLDTITGPYLTGQWPRDPHVHYPSCMKDKATQTPSCWAEEGAEKRSHQRSASWGSADQLKEVSYFCFPSVTCFGPSRLP

SEQ ID NO: 858562 - protein, 118 aa, Homo sapiens
KLAAAAPAEQAPRAKGRPRRSPESHRRSSSPERRSPGSPVCRADKAKSQQVRTSSTIRRTSSLDTITGPYLTGQWPRDPHVHYPSCMKDKATQVKSGNQNQLITLHFFCFDHSKENVI

SEQ ID NO: 858563 - protein, 137 aa, Homo sapiens; identical to SEQ ID NO: 858552

SEQ ID NO: 858564 - protein, 227 aa, Homo sapiens
QLVPALRLWIGSWGVKLRVLDAARGLLGPASVLARTQTAAAAAAAAAAAAAAAAMFHFFRKPPESKKPSVPETEADGFVLLEASQRLSSDVLLKVLTLGQTLWVGFVAPRLTLYSLAGDTTDEQRMTARGKTSDIEANQPLETNKENSSSVTVSDPEMENKAGQTLENSSLMAELLSDVPFTLAPHVLAVQGTITDLPDHLLSYDGSENLSRFWYDFTLENSVLCDS

SEQ ID NO: 858565 - protein, 137 aa, Homo sapiens; identical to SEQ ID NO: 858552

SEQ ID NO: 858566 - protein, 386 aa, Homo sapiens
KLAAAAPAEQAPRAKGRPRRSPESHRRSSSPERRSPGSPVCRADKAKSQQVRTSSTIRRTSSLDTITGPYLTGQWPRDPHVHYPSCMKDKATQTPSCWAEEGAEKRSHQRSASWGSADQLKEQIAKLRQQLQRSKQSSRHSKEKDRQSPLHGNHITISHTQPLDIPDGRRAPLPAHYRSSSTRSIDTQTPSVQERSSSCSSHSPCVSPFCPPESQDGSPCSTEDLLYDRDKDSGSSSPLPKYASSPKPNNSYMFKREPPEGCERVKVFEEMASRQPISAPLFSCPDKNKVNFIPTGSAFCPVKLLGPLLPASDLMLKNSPNSGQSSALATLTVEQLSSRVSFTSLSDDTSTAGSMEASVQQPSQQQQLLQELQGEDHISAQNYVII

SEQ ID NO: 858567 - protein, 351 aa, Homo sapiens [sequence omitted]

SEQ ID NO: 858568 - protein, 408 aa, Homo sapiens
KLAAAAPAEQAPRAKGRPRRSPESHRRSSSPERRSPGSPVCRADKAKSQQVRTSSTIRRTSSLDTITGPYLTGQWPRDPHVHYPSCMKDKATQQIAKLRQQLQRSKQSSRHSKEKDRQSPLHGNHITISHTQATGSRSVPMPLSNISVPKSSVSRVPCNVEGISPELEKVFIKENNGKEEVSKPLDIPDGRRAPLPAHYRSSSTRSIDTQTPSVQERSSSCSSHSPCVSPFCPPESQDGSPCSTEDLLYDRDKDSGSSSPLPKYASSPKPNNSYMFKREPPEGCERVKVFEEMASRQPISAPLFSCPDKNKVNFIPTGSAFCPVKLLGPLLPASDLMLKNSPNSGQSSALATLTVEQLSSRVSFTSLSDDTSTAGSMEASVQQPSQQQQLLQELQGEDHISAQNYVII

SEQ ID NO: 858569 - protein, 201 aa, Homo sapiens
MFPEQQKEEFVSVWVRDPRIQKEDFWHSYIDYEICIHTNSMCFTMKTSCVRRRYREFVWLRQRLQSNALLVQLPELPSKNLFFNMNNRQHVDQRRQGLEDFLRKVLQNALLLSDSSLHLFLQSHLNSEDIEACVSGQTKYSVEEAIHKFALMNRRFPEEDEEGKKENDIDYDSESSSSGLGHSSDDSSSHGCKVNTAPQES

SEQ ID NO: 858570 - protein, 224 aa, Homo sapiens [sequence omitted]

SEQ ID NO: 858571 - protein, 201 aa, Homo sapiens; identical to SEQ ID NO: 858569

SEQ ID NO: 858572 - protein, 117 aa, Homo sapiens
MNNRQHVDQRRQGLEDFLRKVLQNALLLSDSSLHLFLQSHLNSEDIEACVSGQTKYSVEEAIHKFALMNRRFPEEDEEGKKENDIDYDSESSSSGLGHSSDDSSSHGCKVNTAPQES

SEQ ID NO: 858573 - protein, 201 aa, Homo sapiens; identical to SEQ ID NO: 858569

SEQ ID NO: 858574 - protein, 201 aa, Homo sapiens; identical to SEQ ID NO: 858569

SEQ ID NO: 858575 - protein, 161 aa, Homo sapiens
MCFTMKTSCVRRRYREFVWLRQRLQSNALLVQLPELPSKNLFFNMNNRQHVDQRRQGLEDFLRKVLQNALLLSDSSLHLFLQSHLNSEDIEACVSGQTKYSVEEAIHKFALMNRRFPEEDEEGKKENDIDYDSESSSSGLGHSSDDSSSHGCKVNTAPQES

SEQ ID NO: 858576 - protein, 201 aa, Homo sapiens; identical to SEQ ID NO: 858569

SEQ ID NO: 858577 - protein, 194 aa, Homo sapiens
FPVLLAVLKNISLFMMPLQEFVSVWVRDPRIQKEDFWHSYIDYEICIHTNSMCFTMKTSCVRRRYREFVWLRQRLQSNALLVQLPELPSKNLFFNMNNRQHVDQRRQGLEDFLRKVLQNALLLSDSSLHLFLQSHLNSEDIEACVSGQTKYSVEEAIHKFALMNRRFPEEDEEGKKDDDSSSHGCKVNTAPQES

SEQ ID NO: 858578 - protein, 270 aa, Homo sapiens [sequence omitted]

SEQ ID NO: 858579 - protein, 233 aa, Homo sapiens
MTQNTVIVNGVAMASRPSQPTHVNVHIHQESALTQLLKAGGSLKKFLFHPGDTVPSTARIGYEQLALGVIAAGAGAIVHEKHPGKLAGYISSLLTLAGFATAMAAVVLCVNSFIWQTEPFLYIDTVCDRSDPVFPTTGYRWMRRSQENQWQKEECRAYMQMLRKLFTAIRALFLAVCVLKVIVSLVSLGVGLRNLCGQSSQPLNEEGSEKRLLGENSVPPSPSREQTSTAIVL

SEQ ID NO: 858580 - protein, 321 aa, Homo sapiens
GGGAELQPLGFMTGCRAWGPSGVLLLREGHWALGSWEGPRADGPGKARGVVLASSPARPGPACKCARVGAQGARGGSVFSRPVRSSGRNPLCRAPGPQLVSGNRAAWAGPQPPPVHLPSPPSRRSPARGQLVSALLGRGLPEDCRQGLRGRETLLPQDPLSRGVPRAMPPPRPVHRTSFFLQPGFQEDSRRREGQLGAGVSPQKNGWRAGGEAWGWRVPSTFCRLHAWTLAGALRWGGSWDGARERRGCRTLSPAPGHGKSWTEESVRGSREEPTTYQASGGPQGNLRGAGLVQIRLFRRGRGRSRGWRGAGEAVVLGARR

SEQ ID NO: 858581 - protein, 270 aa, Homo sapiens [sequence omitted]

SEQ ID NO: 858582 - protein, 270 aa, Homo sapiens [sequence omitted]

SEQ ID NO: 858583 - protein, 270 aa, Homo sapiens [sequence omitted]

SEQ ID NO: 858584 - protein, 284 aa, Homo sapiens
HQTLPYNKTFKKSHYWKTKLQHLAYSSSCEVLLGFRGPSKPYQESALTQLLKAGGSLKKFLFHPGDTVPSTARIGYEQLALGVTQILLGVVSCVLGVCLSLGPWTVLRASGCAFWAGSVVIAAGAGAIVHEKHPGKLAGYISSLLTLAGFATAMAAVVLCVNSFIWQTEPFLYIDTVCDRSDPVFPTTGYRWMRRSQENQWQKEECRAYMQMLRKLFTAIRALFLAVCVLKVIVSLVSLGVGLRNLCGQSSQPLNEEGSEKRLLGENSVPPSPSREQTSTAIVL

SEQ ID NO: 858585 - protein, 274 aa, Homo sapiens
IAKPMRRVRGDPGQCCFMDFKGTESSRIRAAERSRQRKGEESHLGRSQAAGPRAAGACGLTGRGLVSHPVLQVTQILLGVVSCVLGVCLSLGPWTVLRASGCAFWAGSVVIAAGAGAIVHEKHPGKLAGYISSLLTLAGFATAMAAVVLCVNSFIWQTEPFLYIDTVCDRSDPVFPTTGYRWMRRSQENQWQKEECRAYMQMLRKLFTAIRALFLAVCVLKVIVSLVSLGVGLRNLCGQSSQPLNEEGSEKRLLGENSVPPSPSREQTSTAIVL

SEQ ID NO: 858586 - protein, 233 aa, Homo sapiens; identical to SEQ ID NO: 858579

SEQ ID NO: 858587 - protein, 209 aa, Homo sapiens
MTQNTVIVNGVAMASRPSQPTHVNVHIHQESALTQLLKAGGSLKKFLFHPGDTVPSTARIGYEQLALGVTQILLGVVSCVLGVCLSLGPWTVLRASGCAFWAGSVVIAAGAGAIVHEKHPGKLAGYISSLLTLAGFATAMAAVVLCVNSFIWQTEPFLYIDTVCDRSDQVVHSNPCPVPGCLCLEGHCVLGFLGSRSSKLVWPELPAPE

SEQ ID NO: 858588 - protein, 253 aa, Homo sapiens
MTQNTVIVNGVAMASRPSQPTHVNVHIHQESALTQLLKAGGSLKKFLFHPGDTVPSTARIGYEQLALGVTQILLGVVSCVLGVCLSLGPWTVLSASGCAFWAGSVVIAAGAGAIVHEKHPGKLAGYISSLLTLAGFATAMAAVVLCVNSFIWQTEPFLYIDTVCDRSDPVFPTTGYRWMRRSQENQWQKEECRAYMQMLRLNSKCGALVEGRAWPVRTVRVRLDTAEQATGWEEQSLERWGCATVRGFGFHAE

SEQ ID NO: 858589 - protein, 243 aa, Homo sapiens
MTQNTVIVNGVAMASRPSQPTHVNVHIHQESALTQLLKAGGSLKKFLFHPGDTVPSTARIGYEQLALGVTQILLGVVSCVLGVCLSLGPWTVLRASGCAFWAGSVVIAAGAGAIVHEKHPGKLAGYISSLLTLAGFATAMAAVVLCVNSFIWQTEPFLYIDTVCDRSDPPLPLSCEPPKTPRGARMSLSRAAQGPHSWLLTLASPMAALQTLLLSSPHIRTCCSHSGVLKSMNRYCCIFHNAD

SEQ ID NO: 858590 - protein, 270 aa, Homo sapiens [sequence omitted]

SEQ ID NO: 858591 - protein, 270 aa, Homo sapiens [sequence omitted]

SEQ ID NO: 858592 - protein, 102 aa, Homo sapiens
MTQNTVIVNGVAMASRPSQPTHVNVHIHQESALTQLLKAGGSLKKFLFHPGDTVPSTARIGYEQLALGDSDIAGVGGTSYPTASRSAGITGTSHHTRPNTQL

SEQ ID NO: 858593 - protein, 270 aa, Homo sapiens [sequence omitted]

SEQ ID NO: 858594 - protein, 286 aa, Homo sapiens
MTATELGSVSPNGEGRMTQNTVIVNGVAMASRPSQPTHVNVHIHQESALTQLLKAGGSLKKFLFHPGDTVPSTARIGYEQLALGVTQILLGVVSCVLGVCLSLGPWTVLSASGCAFWAGSVVIAAGAGAIVHEKHPGKLAGYISSLLTLAGFATAMAAVVLCVNSFIWQTEPFLYIDTVCDRSDPVFPTTGYRWMRRSQENQWQKEECRAYMQMLRKLFTAIRALFLAVCVLKVIVSLVSLGVGLRNLCGQSSQPLNEEGSEKRLLGENSVPPSPSREQTSTAIVL

SEQ ID NO: 858595 - protein, 131 aa, Homo sapiens
MAAVVLCVNSFIWQTEPFLYIDTVCDRSDPVFPTTGYRWMRRSQENQWQKEECRAYMQMLRKLFTAIRALFLAVCVLKVIVSLVSLGVGLRNLCGQSSQPLNEEGSEKRLLGENSVPPSPSREQTSTAIVL

SEQ ID NO: 858596 - protein, 270 aa, Homo sapiens [sequence omitted]

SEQ ID NO: 858597 - protein, 210 aa, Homo sapiens
CFSGLFIMFNQHCGKCNNCVLGVCLSLGPWTVLRASGCAFWAGSVVIAAGAGAIVHEKHPGKLAGYISSLLTLAGFATAMAAVVLCVNSFIWQTEPFLYIDTVCDRSDPVFPTTGYRWMRRSQENQWQKEECRAYMQMLRKLFTAIRALFLAVCVLKVIVSLVSLGVGLRNLCGQSSQPLNEEGSEKRLLGENSVPPSPSREQTSTAIVL

SEQ ID NO: 858598 - protein, 296 aa, Homo sapiens
MTQNTVIVNGVAMASRPSQPTHVNVHIHQESALTQLLKAGGSLKKFLFHPGDTVPSTARIGYEQLALGVTQILLGVVSCVLGVCLSLGPWTVLRASGCAFWAGSVVIAAGAGAIVHEKHPGKLAGYISSLLTLAGFATAMAAVVLCVNSFIWQTEPFLYIDTVCDRSDPVFPTTGYRWMRRSQENQWQKEECRAYMQMLRKLFTAIRALFLAVCVLKVIVSLVSLGVGLRNLCGQSSQPLNEEGSEKRLLGENSVPPSPSREQTLLLSSPHIRTCCSHSGVLKSMNRYCCIFHNAD

SEQ ID NO: 858599 - protein, 219 aa, Homo sapiens
MTQNTVIVNGVAMASRPSQPTHVNVHIHQESALTQLLKAGGSLKKFLFHPGDTVPSTARIGYEQLALGVTQILLGVVSCVLGVCLSLGPWTVLRASGCAFWAGSVVIAAGAGAIVHEKHPGKLAGYISSLLTLAGFATAMAAVVLCVNSFIWQTEPFLYIDTVCDRSDPVFPTTGYRWMRRSQENQWQKEECRAYMQMLRKFYSKALTDSGRGGFKVSP

SEQ ID NO: 858600 - protein, 238 aa, Homo sapiens
MDAALKRSRSEEPAEILPPARDEEEEEEEGMEQGLEEEEEVDPRIQGELEKLNQSTDDINRRETELEDARQKFRSVLVEATVKLDELVKKIGKAVEDSKPYWEARRVARQAQLEAQKATQDFQRATEVLRAAKETISLAEQRLLEDDKRQFDSAWQEMLNHATQRVMEAEQTKTRSELVHKETAARYNAAMGRMRQLEKKLKRAINKSKPYFDSGNSTYVKPSNERIVLLRQMPLKAV

SEQ ID NO: 858601 - protein, 211 aa, Homo sapiens
MDAALKRSRSEEPAEILPPARDEEEEEEEGMEQGLEEEEEVDPRIQGELEKLNQSTDDINRRETELEDARQKFRSVLVEATVKLDELVKKIGKAVEDSKPYWEARRVARQAQLEAQKATQDFQRATEVLRAAKETISLAEQRLLEDDKRQFDSAWQEMLNHATQRSWRRSNKTRTTCARRRASKIRWRYSWEEQSSEQLLRREIFLTITMT

SEQ ID NO: 858602 - protein, 520 aa, Homo sapiens
AAAPISSAPPRPEVSASASCVSRVSAPAAPRPCPAVARRLQPSLWQPRPPGRSGAHCAARVPAACMDAALKRSRSEEPAEILPPARDEEEEEEEGMEQGLEEEEEVDPRIQGELEKLNQSTDDINRRETELEDARQKFRSVLVEATVKLDELVKKIGKAVEDSKPYWEARRVARQAQLEAQKATQDFQRATEVLRAAKETISLAEQRLLEDDKRQFDSAWQEMLNHATQRVMEAEQTKTRSELVHKETAARYNAAMGRMRQLEKKLKRAINKSKPYFELKAKYYVQLEQLKKTVDDLQAKLTLAKGEYKMALKNLEMISDEIHERRRSSAMGPRGCGVGAEGSSTSVEDLPGSKPEPDAISVASEAFEDDSCSNFVSEDDSETQSVSSFSSGPTSPSEMPDQFPAVVRPGSLDLPSPVSLSEFGMMFPVLGPRSECSGASSPECEVERGDRAEGAENKTSDKANNNRGLSSSSGSGGSSKSQSSTSPEGQALENRMKQLSLQCSKGRDGIIADIKMVQIG

SEQ ID NO: 858603 - protein, 298 aa, Homo sapiens
MLNHATQRVMEAEQTKTRSELVHKETAARYNAAMGRMRQLEKKLKRAINKSKPYFELKAKYYVQLEQLKKTVDDLQAKLTLAKGEYKMALKNLEMISDEIHERRRSSAMGPRGCGVGAEGSSTSVEDLPGSKPEPDAISVASEAFEDDSCSNFVSEDDSETQSVSSFSSGPTSPSEMPDQFPAVVRPGSLDLPSPVSLSEFGMMFPVLGPRSECSGASSPECEVERGDRAEGAENKTSDKANNNRGLSSSSGSGGSSKSQSSTSPEGQALENRMKQLSLQCSKGRDGIIADIKMVQIG

SEQ ID NO: 858604 - protein, 520 aa, Homo sapiens; identical to SEQ ID NO: 858602

SEQ ID NO: 858605 - protein, 414 aa, Homo sapiens
MWCQRGELEKLNQSTDDINRRETELEDARQKFRSVLVEATVKLDELVKKIGKAVEDSKPYWEARRVARQAQLEAQKATQDFQRATEVLRAAKETISLAEQRLLEDDKRQFDSAWQEMLNHATQRVMEAEQTKTRSELVHKETAARYNAAMGRMRQLEKKLKRAINKSKPYFELKAKYYVQLEQLKKTVDDLQAKLTLAKGEYKMALKNLEMISDEIHERRRSSAMGPRGCGVGAEGSSTSVEDLPGSKPEPDAISVASEAFEDDSCSNFVSEDDSETQSVSSFSSGPTSPSEMPDQFPAVVRPGSLDLPSPVSLSEFGMMFPVLGPRSECSGASSPECEVERGDRAEGAENKTSDKANNNRGLSSSSGSGGSSKSQSSTSPEGQALENRMKQLSLQCSKGRDGIIADIKMVQIG

SEQ ID NO: 858606 - protein, 427 aa, Homo sapiens
VANSAPRGGGRRGGSPDPGELEKLNQSTDDINRRETELEDARQKFRSVLVEATVKLDELVKKIGKAVEDSKPYWEARRVARQAQLEAQKATQDFQRATEVLRAAKETISLAEQRLLEDDKRQFDSAWQEMLNHATQRVMEAEQTKTRSELVHKETAARYNAAMGRMRQLEKKLKRAINKSKPYFELKAKYYVQLEQLKKTVDDLQAKLTLAKGEYKMALKNLEMISDEIHERRRSSAMGPRGCGVGAEGSSTSVEDLPGSKPEPDAISVASEAFEDDSCSNFVSEDDSETQSVSSFSSGPTSPSEMPDQFPAVVRPGSLDLPSPVSLSEFGMMFPVLGPRSECSGASSPECEVERGDRAEGAENKTSDKANNNRGLSSSSGSGGSSKSQSSTSPEGQALENRMKQLSLQCSKGRDGIIADIKMVQIG

SEQ ID NO: 858607 - protein, 520 aa, Homo sapiens; identical to SEQ ID NO: 858602

SEQ ID NO: 858608 - protein, 520 aa, Homo sapiens; identical to SEQ ID NO: 858602

SEQ ID NO: 858609 - protein, 520 aa, Homo sapiens; identical to SEQ ID NO: 858602

SEQ ID NO: 858610 - protein, 215 aa, Homo sapiens
MWCQRGELEKLNQSTDDINRRETELEDARQKFRSVLVEATVKLDELVKKIGKAVEDSKPYWEARRVARQAQLEAQKATQDFQRATEVLRAAKETISLAEQRLLEDDKRQFDSAWQEMLNHATQRVMEAEQTKTRSELVHKETAARYNAAMGRMRQLEKKLKRAINKSKPYFELKAKYYVQLEQLKKTVDDLQAKLTLAKGEYKMALKNSGMRCWC

SEQ ID NO: 858611 - protein, 497 aa, Homo sapiens
AAAPISSAPPRPEVSASASCVSRVSAPAAPRPCPAVARRLQPSLWQPRPPGRSGAHCAARVPAACMDAALKRSRSEEPAEILPPARDEEEEEEEGMEQGLEEEEEVDPRIQGELEKLNQSTDDINRRETELEDARQKFRSVLVEATVKLDELVKKIGKAVEDSKPYWEARRVARQAQLEAQKATQDFQRATEVLRAAKETISLAEQRLLEDDKRQFDSAWQEMLNHATQRVMEAEQTKTRSELVHKETAARYNAAMGRMRQLEKKLKRAINKSKPYFELKAKYYVQLEQLKKTVDDLQAKLTLAKGEYKMALKNLEMISDEIHERRRSSAMGPRGCGVGAEGSSTSVEDLPGSKPEPDAISVASEAFEDDSCSNFVSEDDSETQSVSSFSSGPTSPSEMPDQFPAVVRPGSLDLPSPVSLSEFGMMFPVLGPRSECSGASSPECEVERGDRAEGAENKTSDKANNNRGLSSSSGSGGSSKSQTALPTVLKGKRWNYC

SEQ ID NO: 858612 - protein, 417 aa, Homo sapiens
AAAPISSAPPRPEVSASASCVSRVSAPAAPRPCPAVARRLQPSLWQPRPPGRSGAHCAARVPAACMDAALKRSRSEEPAEILPPARDEEEEEEEGMEQGLEEEEEVDPRIQGELEKLNQSTDDINRRETELEDARQKFRSVLVEATVKLDELVKKIGKAVEDSKPYWEARRVARQAQLEAQKATQDFQRATEVLRAAKETISLAEQRLLEDDKRQFDSAWQEMLNHATQRVMEAEQTKTRSELVHKETAARYNAAMGRMRQLEKKLKRAINKSKPYFELKAKYYVQLEQLKKTVDDLQAKLTLAKGEYKMALKNLEMISDEIHERRRSSAMGPRGCGVGAEGSSTSVEDLPGSKPEPDAISGDRAEGAENKTSDKANNNRGLSSSSGMGATACFSFSSHPQFVWENGDVLSTLSHDI

SEQ ID NO: 858613 - protein, 485 aa, Homo sapiens
AAAPISSAPPRPEVSASASCVSRVSAPAAPRPCPAVARRLQPSLWQPRPPGRSGAHCAARVPAACMDAALKRSRSEEPAEILPPARDEEEEEEEGMEQGLEEEEEVDPRIQGELEKLNQSTDDINRRETELEDARQKFRSVLVEATVKLDELVKKIGKAVEDSKPYWEARRVARQAQLEAQKATQDFQRATEVLRAAKETISLAEQRLLEDDKRQFDSAWQEMLNHATQRVMEAEQTKTRSELVHKETAARYNAAMGRMRQLEKKLKRAINKSKPYFELKAKYYVQLEQLKKTVDDLQAKLTLAKGEYKMALKNLEMISDEIHERRRSSAMGPRGCGVGAEGSSTSVEDLPGSKPEPDAISVASEAFEDDSCSNFVSEDDSETQSVSSFSSGPTSPSEMPDQFPAVVRPGSLDLPSPVSLSEFGMMFPVLGPRSECSGASSPECEVERGDRAEGAENKTSDKATVNPQATVNPQATVNPQATVNP

SEQ ID NO: 858614 - protein, 520 aa, Homo sapiens; identical to SEQ ID NO: 858602

SEQ ID NO: 858615 - protein, 208 aa, Homo sapiens
VANSAPRGGGRRGGSPDPGELEKLNQSTDDINRRETELEDARQKFRSVLVEATVKLDELVKKIGKAVEDSKPYWEARRVARQAQLEAQKATQDFQRATEVLRAAKETISLAEQRLLEDDKRQFDSAWQEMLNHATQRVMEAEQTKTRSELVHKETAARYNAAMGRMRQLEKKLKRAINKSKPYFDSGKDYVRRAMKRRGDRATDRKGY

SEQ ID NO: 858616 - protein, 455 aa, Homo sapiens
MDAALKRSRSEEPAEILPPARDEEEEEEEGMEQGLEEEEEVDPRIQGELEKLNQSTDDINRRETELEDARQKFRSVLVEATVKLDELVKKIGKAVEDSKPYWEARRVARQAQLEAQKATQDFQRATEVLRAAKETISLAEQRLLEDDKRQFDSAWQEMLNHATQRVMEAEQTKTRSELVHKETAARYNAAMGRMRQLEKKLKRAINKSKPYFELKAKYYVQLEQLKKTVDDLQAKLTLAKGEYKMALKNLEMISDEIHERRRSSAMGPRGCGVGAEGSSTSVEDLPGSKPEPDAISVASEAFEDDSCSNFVSEDDSETQSVSSFSSGPTSPSEMPDQFPAVVRPGSLDLPSPVSLSEFGMMFPVLGPRSECSGASSPECEVERGDRAEGAENKTSDKANNNRGLSSSSGSGGSSKSQSSTSPEGQALENRMKQLSLQCSKGRDGIIADIKMVQIG

SEQ ID NO: 858617 - protein, 520 aa, Homo sapiens; identical to SEQ ID NO: 858602

SEQ ID NO: 858618 - protein, 484 aa, Homo sapiens
RPRPFPLLRRGRRYPHRRAASPGCRPRRLPDRARLWRGGSSPAEILPPARDEEEEEEEGMEQGLEEEEEVDPRIQGELEKLNQSTDDINRRETELEDARQKFRSVLVEATVKLDELVKKIGKAVEDSKPYWEARRVARQAQLEAQKATQDFQRATEVLRAAKETISLAEQRLLEDDKRQFDSAWQEMLNHATQRVMEAEQTKTRSELVHKETAARYNAAMGRMRQLEKKLKRAINKSKPYFELKAKYYVQLEQLKKTVDDLQAKLTLAKGEYKMALKNLEMISDEIHERRRSSAMGPRGCGVGAEGSSTSVEDLPGSKPEPDAISVASEAFEDDSCSNFVSEDDSETQSVSSFSSGPTSPSEMPDQFPAVVRPGSLDLPSPVSLSEFGMMFPVLGPRSECSGASSPECEVERGDRAEGAENKTSDKANNNRGLSSSSGSGGSSKSQSSTSPEGQALENRMKQLSLQCSKGRDGIIADIKMVQIG

SEQ ID NO: 858619 - protein, 321 aa, Homo sapiens
AAAPISSAPPRPEVSASASCVSRVSAPAAPRPCPAVARRLQPSLWQPRPPGRSGAHCAARVPAACMDAALKRSRSEEPAEILPPARDEEEEEEEGMEQGLEEEEEVDPRIQGELEKLNQSTDDINRRETELEDARQKFRSVLVEATVKLDELVKKIGKAVEDSKPYWEARRVARQAQLEAQKATQDFQRATEVLRAAKETISLAEQRLLEDDKRQFDSAWQEMLNHATQRVMEAEQTKTRSELVHKETAARYNAAMGRMRQLEKKLKRAINKSKPYFELKAKYYVQLEQLKKTVDDLQAKLTLAKGEYKMALKNSGMRCWC

SEQ ID NO: 858620 - protein, 347 aa, Homo sapiens
MKAQLEAQKATQDFQRATEVLRAAKETISLAEQRLLEDDKRQFDSAWQEMLNHATQRVMEAEQTKTRSELVHKETAARYNAAMGRMRQLEKKLKRAINKSKPYFELKAKYYVQLEQLKKTVDDLQAKLTLAKGEYKMALKNLEMISDEIHERRRSSAMGPRGCGVGAEGSSTSVEDLPGSKPEPDAISVASEAFEDDSCSNFVSEDDSETQSVSSFSSGPTSPSEMPDQFPAVVRPGSLDLPSPVSLSEFGMMFPVLGPRSECSGASSPECEVERGDRAEGAENKTSDKANNNRGLSSSSGSGGSSKSQSSTSPEGQALENRMKQLSLQCSKGRDGIIADIKMVQIG

SEQ ID NO: 858621 - protein, 520 aa, Homo sapiens; identical to SEQ ID NO: 858602

SEQ ID NO: 858622 - protein, 433 aa, Homo sapiens
AAAPISSAPPRPEVSASASCVSRVSAPAAPRPCPAVARRLQPSLWQPRPPGRSGAHCAARVPAACMDAALKRSRSEEPAEILPPARDEEEEEEEGMEQGLEEEEEVDPRIQGELEKLNQSTDDINRRETELEDARQKFRSVLVEATVKLDELVKKIGKAVEDSKPYWEARRVARQAQLEAQKATQDFQRATEVLRAAKETISLAEQRLLEDDKRQFDSAWQEMLNHATQRVMEAEQTKTRSELVHKETAARYNAAMGRMRQLEKKLKRAINKSKPYFELKAKYYVQLEQLKKTVDDLQAKLTLAKGEYKMALKNLEMISDEIHERRRSSAMGPRGCGVGAEGSSTSVEDLPGSKPEPDAISGDRAEGAENKTSDKANNNRGLSSSSGSGGSSKSQSSTSPEGQALENRMKQLSLQCSKGRDGIIADIKMVQIG

SEQ ID NO: 858623 - protein, 520 aa, Homo sapiens; identical to SEQ ID NO: 858602

SEQ ID NO: 858624 - protein, 520 aa, Homo sapiens; identical to SEQ ID NO: 858602

SEQ ID NO: 858625 - protein, 274 aa, Homo sapiens
AAAPISSAPPRPEVSASASCVSRVSAPAAPRPCPAVARRLQPSLWQPRPPGRSGAHCAARVPAACMDAALKRSRSEEPAEILPPARDEEEEEEEGMEQGLEEEEEVDPRIQGELEKLNQSTDDINRRETELEDARQKFRSVLVEATVKLDELVKKIGKAVEDSKPYWEARRVARQAQLEAQKATQDFQRATEVLRAAKETISLAEQRLLEDDKRQFDSAWQEMLNHATQRVMEAEQTKTRSELVHKETAARYNAAMGRMRQLEKKLKRAINKSK

SEQ ID NO: 858626 - protein, 302 aa, Homo sapiens
AFFTEKYLQEHPEDQEKVELLKRLIALQMPLLTEGIRIHGEKLTEQLKPLHERLSSCFRELKEKVEKHYGVITLPPNLTERKQSRTGSIVLPYIMSSTLRRLSITSVTSSVVSTSSNSSDNAPSRPGSDGSILEPLLERRASSGARVEDLSLREENSENRISKFKRKDWSLSKSQVIAEKAPEPDLMSPTRKAQRPKSLQLMDNRLSPFHGSSPPQSTPLSPPPLTPKATRTLSSPSLQTDGIAATPVPPPPPPKSKPYEGSQRNSTELAPPLPVRREAKAPPPPPPKARKSGIPTSEPGSQ

SEQ ID NO: 858627 - protein, 302 aa, Homo sapiens; identical to SEQ ID NO: 858626

SEQ ID NO: 858628 - protein, 111 aa, Homo sapiens
TSAGGFGSELMDNRLSPFHGSSPPQSTPLSPPPLTPKATRTLSSPSLQTDGIAATPVPPPPPPKSKPYEGSQRNSTELAPPLPVRREAKAPPPPPPKARKSGIPTSEPGSQ

SEQ ID NO: 858629 - protein, 241 aa, Homo sapiens
PVCRLGNGTHKHARRAVAVWIWPLGNRVMSRPKMTSLYPEKTQRIYKLPELIIQQGHQIQEPKLQGPWIVKGKRARAESIDPVQDHPHEHTHGRPSPQARMGGSEGDTRSSDDQKDDIPVENYVAQRYIENPYLIGGRKFDLRVYVLVMSYIPLRAWLYRDGFARFSNTRFTLNSIDDQYVHLTNVAVQKTSPDYHPKKGCKWTLQRFRQYLASKHGPEAVETLFRDIDNIFVKSLQSVQK

SEQ ID NO: 858630 - protein, 290 aa, Homo sapiens
PVCRLGNGTHKHARRAVAVWIWPLGNRVMSRPKNQNYKGHGLSKGKEREQRASIRFKTTLMNTLMDVLRHRPGWVEVKDEGEWDFYWCDVSWLRENFDHTYMDEHVRISHFRNHYELTRKNYMVKNLKRFRKQLEREAGKLEAAKCDFFPKTFEMPCEYHLFVEEFRKNPGITWIMKPDTRSSDDQKDDIPVENYVAQRYIENPYLIGGRKFDLRVYVLVMSYIPLRAWLYRDGFARFSNTRFTLNSIDDQYVHLTNVAVQKTSPDYHPKKVAPGGQCVPITDSQQPGRL

SEQ ID NO: 858631 - protein, 299 aa, Homo sapiens
MVPSREALLGPGTTAIRCPKKLQMTSLYPEKTQRIYKLPELIISKGIKYKNQNYKGHGLSKGKEREQRASIRFKTTLMNTLMDVLRHRPGWVEVKDEGEWDFYWCDVSWLRENFDHTYMDEHVRISHFRNHYELTRKNYMVKNLKRFRKQLEREAGKLEAAKCDFFPKTFEMPCEYHLFVEEFRKNPGITWIMKPVARSQGKGIFLFRRLKDIVDWRKDTRSSDDQKDDIPVENYVAQRYIENPYLIGGEMAVSAPALPLHGHQTVSQQALTSSLPRAQPDTRHEGMHGKRWVLQSPTS

SEQ ID NO: 858632 - protein, 281 aa, Homo sapiens
MVPSREALLGPGTTAIRCPKKLQMTSLYPEKTQRIYKLPELIISKGIKYKNQNYKGHGLSKGKEREQRASIRFKTTLMNTLMDVLRHRPGWVEVKDEGEWDFYWCDVSWLRENFDHTYMDEHVRISHFRNHYELTRKNYMVKNLKRFRKQLEREAGKLEAAKCDFFPKTFEMPCEYHLFVEEFRKNPGITWIMKPVARSQGKGIFLFRRLKDIVDWRKDTRSSDDQKDDIPVENYVAQRYIENPYLIGGRKFDLRVYVLVMSVAPGGQCVPITDSQQPGRL

SEQ ID NO: 858633 - protein, 330 aa, Homo sapiens
MVPSREALLGPGTTAIRCPKKLQMTSLYPEKTQRIYKLPELIISKGIKYKNQNYKGHGLSKGKEREQRASIRFKTTLMNTLMDVLRHRPGWVEVKDEGEWDFYWCDVSWLRENFDHTYMDEHVRISHFRNHYELTRKNYMVKNLKRFRKQLEREAGKLEAAKCDFFPKTFEMPCEYHLFVEEFRKNPGITWIMKPVARSQGKGIFLFRRLKDIVDWRKDTRSSDDQKDDIPVENYVAQRYIENPYLIGGRKFDLRVYVLVMSYIPLRAWLYRDGFARFSNTRFTLNSIDDQYVHLTNVAVQKTSPDYHPKKVAPGGQCVPITDSQQPGRL

SEQ ID NO: 858634 - protein, 281 aa, Homo sapiens; identical to SEQ ID NO: 858632

SEQ ID NO: 858635 - protein, 437 aa, Homo sapiens
MVPSREALLGPGTTAIRCPKKLQMTSLYPEKTQRIYKLPELIISKGIKYKNQNYKGHGLSKGKEREQRASIRFKTTLMNTLMDVLRHRPGWVEVKDEGEWDFYWCDVSWLRENFDHTYMDEHVRISHFRNHYELTRKNYMVKNLKRFRKQLEREAGKLEAAKCDFFPKTFEMPCEYHLFVEEFRKNPGITWIMKPVARSQGKGIFLFRRLKDIVDWRKDTRSSDDQKDDIPVENYVAQRYIENPYLIGGRKFDLRVYVLVMSVAPGGQCVPITDSQQQEDYELKTCLLEDTLHVVDMEARLRQRSEETTEAALLLPSSSEESFQLIPSCQEEISLSRCHPGLPPTPRSQHSTSQHSPPHLQPGTSFAGLAAAAYYLNWAPWIPPAHPQASLHQETANHWDWGRFNLDKLTWQLGPKRTNTASSATPRRSYLINEHRP

SEQ ID NO: 858636 - protein, 476 aa, Homo sapiens
MVSKRIAQETFDAAVRENIEEFAMGPEEAVKEAVEQFESQGVDLSNIVKTAPKVSADGSQEPTHDILQMLSDLQESVASSRPQEVSAYLTRFCDQCKQDKACRFLAAQKGAYPIIFTAWKLATAGDQGLLLQSLNALSVLTDGQPDLLDAQGLQLLVATLTQNADEADLTCSGIRCVRHACLKHEQNRQDLVKAGVLPLLTGAITHHGHHTDVVREACWALRVMTFDDDIRVPFGHAHNHAKMIVQENKGLKVLIEATKAFLDNPGILSELCGTLSRLAIRNEFCQEVVDLGGLSILVSLLADCNDHQMRDQSGVQELVKQVLSTLRAIAGNDDVKDAIVRAGGTESIVAAMTQHLTSPQVCEQSCAALCFLALRKPDNSRIIVEGGGAVAALQAMKAHPQKAGVQKQACMLIRNLVAHGQAFSKPILDLGAEALIMQARSAHRDCEDVAKAALRDLGCHVELRELWTGQRGNLAP

SEQ ID NO: 858637 - protein, 476 aa, Homo sapiens; identical to SEQ ID NO: 858636

SEQ ID NO: 858638 - protein, 476 aa, Homo sapiens; identical to SEQ ID NO: 858636

SEQ ID NO: 858639 - protein, 492 aa, Homo sapiens
MVSKRIAQETFDAAVRENIEEFAMGPEEAVKEAVEQFESQGVDLSNIVKTAPKVSADGSQEPTHDILQMLSDLQESVASSRPQEVSAYLTRFCDQCKQDKACRFLAAQKGAYPIIFTAWKLATAGDQGLLLQSLNALSVLTDGQPDLLDAQGLQLLVATLTQNADEADLTCSGIRCVRHACLKHEQNRQDLVKAGVLPLLTGAITHHGHHTDVVREACWALRVMTFDDDIRVPFGHAHNHAKMIVQENKGLKVLIEATKAFLDNPGILSELCGTLSRLAIRNEFCQEVVDLGGLSILVSLLADCNDHQMRDQSGVQELVKQVLSTLRAIAGNDDVKDAIVRAGGTESIVAAMTQHLTSPQVCEQSCAALCFLALRKPDNSRIIVEGGGAVAALQAMKAHPQKAGVQVGRAGDGGRQAGVDVQKQACMLIRNLVAHGQAFSKPILDLGAEALIMQARSAHRDCEDVAKAALRDLGCHVELRELWTGQRGNLAP

SEQ ID NO: 858640 - protein, 476 aa, Homo sapiens; identical to SEQ ID NO: 858636

SEQ ID NO: 858641 - protein, 142 aa, Homo sapiens
VRRRGPPRPGSLAQGRAVRFFWADALEAKHFPAGGGDHRERPGRGGKDASVAHEVASLALPWFAVVLGYRERPRVSGRPSLGAPQRLRAYGGRKGLEAAPWVTTARPTFPHVAAKTGTCALSACCVSGPVLGSGDKEATGYK

SEQ ID NO: 858642 - protein, 91 aa, Homo sapiens
MEFIWGMMEGSGLGGTFLSLPSSQQGALQAQVAPGVPWGLPGARGHSNRQKGWTLPVEQDLHQNRGPCGWFFPPPPPSPFLPAAFLDNPGI

SEQ ID NO: 858643 - protein, 501 aa, Homo sapiens
MSERCCSRYSSGASIGCTPTSTQAKMVSKRIAQETFDAAVRENIEEFAMGPEEAVKEAVEQFESQGVDLSNIVKTAPKVSADGSQEPTHDILQMLSDLQESVASSRPQEVSAYLTRFCDQCKQDKACRFLAAQKGAYPIIFTAWKLATAGDQGLLLQSLNALSVLTDGQPDLLDAQGLQLLVATLTQNADEADLTCSGIRCVRHACLKHEQNRQDLVKAGVLPLLTGAITHHGHHTDVVREACWALRVMTFDDDIRVPFGHAHNHAKMIVQENKGLKVLIEATKAFLDNPGILSELCGTLSRLAIRNEFCQEVVDLGGLSILVSLLADCNDHQMRDQSGVQELVKQVLSTLRAIAGNDDVKDAIVRAGGTESIVAAMTQHLTSPQVCEQSCAALCFLALRKPDNSRIIVEGGGAVAALQAMKAHPQKAGVQKQACMLIRNLVAHGQAFSKPILDLGAEALIMQARSAHRDCEDVAKAALRDLGCHVELRELWTGQRGNLAP

SEQ ID NO: 858644 - protein, 608 aa, Homo sapiens
VRRRGPPRPGSLAQGRAVRFFWADALEAKHFPAGGGDHRERPGRGGKDASVAHEVASLALPWFAVVLGYRERPRVSGRPSLGAPQRLRAYGGRKGLEAAPWVTTARPTFPHVAAKTGSGASIGCTPTSTQAKMVSKRIAQETFDAAVRENIEEFAMGPEEAVKEAVEQFESQGVDLSNIVKTAPKVSADGSQEPTHDILQMLSDLQESVASSRPQEVSAYLTRFCDQCKQDKACRFLAAQKGAYPIIFTAWKLATAGDQGLLLQSLNALSVLTDGQPDLLDAQGLQLLVATLTQNADEADLTCSGIRCVRHACLKHEQNRQDLVKAGVLPLLTGAITHHGHHTDVVREACWALRVMTFDDDIRVPFGHAHNHAKMIVQENKGLKVLIEATKAFLDNPGILSELCGTLSRLAIRNEFCQEVVDLGGLSILVSLLADCNDHQMRDQSGVQELVKQVLSTLRAIAGNDDVKDAIVRAGGTESIVAAMTQHLTSPQVCEQSCAALCFLALRKPDNSRIIVEGGGAVAALQAMKAHPQKAGVQKQACMLIRNLVAHGQAFSKPILDLGAEALIMQARSAHRDCEDVAKAALRDLGCHVELRELWTGQRGNLAP

SEQ ID NO: 858645 - protein, 408 aa, Homo sapiens
MLSDLQESVASSRPQEVSAYLTRFCDQCKQDKACRFLAAQKGAYPIIFTAWKLATAGDQGLLLQSLNALSVLTDGQPDLLDAQGLQLLVATLTQNADEADLTCSGIRCVRHACLKHEQNRQDLVKAGVLPLLTGAITHHGHHTDVVREACWALRVMTFDDDIRVPFGHAHNHAKMIVQENKGLKVLIEATKAFLDNPGILSELCGTLSRLAIRNEFCQEVVDLGGLSILVSLLADCNDHQMRDQSGVQELVKQVLSTLRAIAGNDDVKDAIVRAGGTESIVAAMTQHLTSPQVCEQSCAALCFLALRKPDNSRIIVEGGGAVAALQAMKAHPQKAGVQKQACMLIRNLVAHGQAFSKPILDLGAEALIMQARSAHRDCEDVAKAALRDLGCHVELRELWTGQRGNLAP

SEQ ID NO: 858646 - protein, 430 aa, Homo sapiens
MVSKRIAQETFDAAVRENIEEFAMGPEEAVKEAVEQFESQGVDLSNIVKTAPKVSADGSQEPTHDILQMLSDLQESVASSRPQEVSAYLTRFCDQCKQDKACRFLAAQKGAYPIIFTAWKLATAGDQGLLLQSLNALSVLTDGQPDLLDAQGLQLLVATLTQNADEADLTCSGIRCVRHACLKHEQNRQDLVKAGVLPLLTGAITHHGHHTDVVREACWALRVMTFDDDIRVPFGHAHNHAKMIVQENKGLKVLIEATKAFLDNPGILSELCGTLSRLAIRNEFCQEVVDLGGLSILVSLLADCNDHQMRDQSGVQELVKQVLSTLRAIAGNDDVKDAIVRAGGTESIVAAMTQHLTSPQKQACMLIRNLVAHGQAFSKPILDLGAEALIMQARSAHRDCEDVAKAALRDLGCHVELRELWTGQRGNLAP

SEQ ID NO: 858647 - protein, 476 aa, Homo sapiens; identical to SEQ ID NO: 858636

SEQ ID NO: 858648 - protein, 645 aa, Homo sapiens
MDFSFSFMQGIMGNTIQQPPQLIDSANIRQEDAFDNNSDIAEDGGQTPYEATLQQGFQYPATTEDLPPLTNGYPSSISVYETQTKYQSYNQYPNGSANGFGAVRNFSPTDYYHSEIPNTRPHEILEKPSPPQPPPPPSVPQTVIPKKTGSPEIKLKITKTIQNGRELFESSLCGDLLNEVQASEHTKSKHESRKEKRKKSNKHDSSRSEERKSHKIPKLEPEEQNRPNERVDTVSEKPREEPVLKEEAPVQPILSSVPTTEVSTGVKFQVGDLVWSKVGTYPWWPCMVSSDPQLEVHTKINTRGAREYHVQFFSNQPERAWVHEKRVREYKGHKQYEELLAEATKQASNHSEKQKIRKPRPQRERAQWDIGIAHAEKALKMTREERIEQYTFIYIDKQPEEALSQAKKSVASKTEVKKTRRPRSVLNTQPEQTNAGEVASSLSSTEIRRHSQRRHTSAEEEEPPPVKIAWKTAAARKSLPASITMHKGSLDLQKCNMSPVVKIEQVFALQNATGDGKFIDQFVYSTKGIGNKTEISVRGQDRLIISTPNQRNEKPTQSVSSPEATSGSTGSVEKKQQRRSIRTRSESEKSTEVVPKKKIKKEQVETVPQATVKTGLQKGSADRGVQGSVRFSDSSVSAAIEETVD

SEQ ID NO: 858649 - protein, 1437 aa, Homo sapiens
MDFSFSFMQGIMGNTIQQPPQLIDSANIRQEDAFDNNSDIAEDGGQTPYEATLQQGFQYPATTEDLPPLTNGYPSSISVYETQTKYQSYNQYPNGSANGFGAVRNFSPTDYYHSEIPNTRPHEILEKPSPPQPPPPPSVPQTVIPKKTGSPEIKLKITKTIQNGRELFESSLCGDLLNEVQASEHTKSKHESRKEKRKKSNKHDSSRSEERKSHKIPKLEPEEQNRPNERVDTVSEKPREEPVLKEEAPVQPILSSVPTTEVSTGVKFQVGDLVWSKVGTYPWWPCMVSSDPQLEVHTKINTRGAREYHVQFFSNQPERAWVHEKRVREYKGHKQYEELLAEATKQASNHSEKQKIRKPRPQRERAQWDIGIAHAEKALKMTREERIEQYTFIYIDKQPEEALSQAKKSVASKTEVKKTRRPRSVLNTQPEQTNAGEVASSLSSTEIRRHSQRRHTSAEEEEPPPVKIAWKTAAARKSLPASITMHKGSLDLQKCNMSPVVKIEQVFALQNATGDGKFIDQFVYSTKGIGNKTEISVRGQDRLIISTPNQRNEKPTQSVSSPEATSGSTGSVEKKQQRRSIRTRSESEKSTEVVPKKKIKKEQVETVPQATVKTGLQKGASEISDSCKPLKKRSRASTDVEMTSSAYRDTSDSDSRGLSDLQVGFGKQVDSPSATADADVSDVQSMDSSLSRRGTGMSKKDTVCQICESSGDSLIPCEGECCKHFHLECLGLASLPDSKFICMECKTGQHPCFSCKVSGKDVKRCSVGACGKFYHEACVRKFPTAIFESKGFRCPQHCCSACSMEKDIHKASKGRMMRCLRCPVAYHSGDACIAAGSMLVSSYILICSNHSKRSSNSSAVNVGFCFVCARGLIVQDHSDPMFSSYAYKSHYLLNESNRAELMKLPMIPSSSASKKKCEKGGRLLCCESCPASFHPECLSIEMPEGCWNCNDCKAGKKLHYKQIVWVKLGNYRWWPAEICNPRSVPLNIQGLKHDLGDFPVFFFGSHDYYWVHQGRVFPYVEGDKSFAEGQTSINKTFKKALEEAAKRFQELKAQRESKEALEIEKNSRKPPPYKHIKANKVIGKVQIQVADLSEIPRCNCKPADENPCGLESECLNRMLQYECHPQVCPAGDRCQNQCFTKRLYPDAEIIKTERRGWGLRTKRSIKKGEFVNEYVGELIDEEECRLRIKRAHENSVTNFYMLTVTKDRIIDAGPKGNYSRFMNHSCNPNCETQKWTVNGDVRVGLFALCDIPAGMELTFNYNLDCLGNGRTECHCGADNCSGFLGVRPKSACASTNEEKAKNAKLKQKRRKIKTEPKQMHEDYCFQCGDGGELVMCDKKDCPKAYHLLCLNLTQPPYGKWECPWHQCDECSSAAVSFCEFCPHSFCKDHEKGALVPSALEGRLCCSEHDPMAPVSPEYWSKIKCKWESQDHGEEVKE

SEQ ID NO: 858650 - protein, 168 aa, Homo sapiens
AAPRESGWGGFVRGGGGRGGGGGQHGGGGRGGCAQVAAERRANSEPSAEDRATQAGLPAAGSSLAAAAARRPPSLGLPFPSHLPSLPLPAARPARPGRGPPQCRPPWQRRPARGKSSPGISCGLARFRLLLARPQRLPAPQPHSGPPCLSCDRTDTAGGLEWNKLKAR

SEQ ID NO: 858651 - protein, 645 aa, Homo sapiens; identical to SEQ ID NO: 858648

SEQ ID NO: 858652 - protein, 1388 aa, Homo sapiens
MDFSFSFMQGIMGNTIQQPPQLIDSANIRQEDAFDNNSDIAEDGGQTPYEATLQQGFQYPATTEDLPPLTNGYPSSISVYETQTKYQSYNQYPNGSANGFGAVRNFSPTDYYHSEIPNTRPHEILEKPSPPQPPPPPSVPQTVIPKKTGSPEIKLKITKTIQNGRELFESSLCGDLLNEVQASEHTKSKHESRKEKRKKSNKHDSSRSEERKSHKIPKLEPEEQNRPNERVDTVSEKPREEPVLKEEAPVQPILSSVPTTEVSTGVKFQVGDLVWSKVGTYPWWPCMVSSDPQLEVHTKINTRGAREYHVQFFSNQPERAWVHEKRVREYKGHKQYEELLAEATKQASNHSEKQKIRKPRPQRERAQWDIGIAHAEKALKMTREERIEQYTFIYIDKQPEEALSQAKKSVASKTEVKKTRRPRSVLNTQPEQTNAGEVASSLSSTEIRRHSQRRHTSAEEEEPPPVKIAWKTAAARKSLPASITMHKGSLDLQKCNMSPVVKIEQVFALQNATGDGKFIDQFVYSTKGIGNKTEISVRGQDRLIISTPNQRNEKPTQSVSSPEATSGSTGSVEKKQQRRSIRTRSESEKSTEVVPKKKIKKEQVETVPQATVKTGLQKGASEISDSCKPLKKRSRASTDVEMTSSAYRDTSDSDSRGLSDLQVGFGKQVDSPSATADADVSDVQSMDSSLSRRGTGMSKKDTVCQICESSGDSLIPCEGECCKHFHLECLGLASLPDSKFICMECKTGQHPCFSCKVSGKDVKRCSVGACGKFYHEACVRKFPTAIFESKGFRCPQHCCSACSMEKDIHKASKGRMMRCLRCPVAYHSGDACIAAGSMLVSSYILICSNHSKRSSNSSAVNVGFCFVCARGGRLLCCESCPASFHPECLSIEMPEGCWNCNDCKAGKKLHYKQIVWVKLGNYRWWPAEICNPRSVPLNIQGLKHDLGDFPVFFFGSHDYYWVHQGRVFPYVEGDKSFAEGQTSINKTFKKALEEAAKRFQELKAQRESKEALEIEKNSRKPPPYKHIKANKVIGKVQIQVADLSEIPRCNCKPADENPCGLESECLNRMLQYECHPQVCPAGDRCQNQCFTKRLYPDAEIIKTERRGWGLRTKRSIKKGEFVNEYVGELIDEEECRLRIKRAHENSVTNFYMLTVTKDRIIDAGPKGNYSRFMNHSCNPNCETQKWTVNGDVRVGLFALCDIPAGMELTFNYNLDCLGNGRTECHCGADNCSGFLGVRPKSACASTNEEKAKNAKLKQKRRKIKTEPKQMHEDYCFQCGDGGELVMCDKKDCPKAYHLLCLNLTQPPYGKWECPWHQCDECSSAAVSFCEFCPHSFCKDHEKGALVPSALEGRLCCSEHDPMAPVSPEYWSKIKCKWESQDHGEEVKE

SEQ ID NO: 858653 - protein, 627 aa, Homo sapiens
MDFSFSFMQGIMGNTIQQPPQLIDSANIRQEDAFDNNSDIAEDGGQTPYEATLQQGFQYPATTEDLPPLTNGYPSSISVYETQTKYQSYNQYPNGSANGFGAVRNFSPTDYYHSEIPNTRPHEILEKPSPPQPPPPPSVPQTVIPKKTGSPEIKLKITKTIQNGRELFESSLCGDLLNEVQASEHTKSKHESRKEKRKKSNKHDSSRSEERKSHKIPKLEPEEQNRPNERVDTVSEKPREEPVLKEEAPVQPILSSVPTTEVSTGVKFQVGDLVWSKVGTYPWWPCMVSSDPQLEVHTKINTRGAREYHVQFFSNQPERAWVHEKRVREYKGHKQYEELLAEATKQASNHSEKQKIRKPRPQRERAQWDIGIAHAEKALKMTREERIEQYTFIYIDKQPEEALSQAKKSVASKTEVKKTRRPRSVLNTQPEQTNAGEVASSLSSTEIRRHSQRRHTSAEEEEPPPVKIAWSLDLQKCNMSPVVKIEQVFALQNATGDGKFIDQFVYSTKGIGNKTEISVRGQDRLIISTPNQRNEKPTQSVSSPEATSGSTGSVEKKQQRRSIRTRSESEKSTEVVPKKKIKKEQVETVPQATVKTGLQKGSADRGVQGSVRFSDSSVSAAIEETVD

SEQ ID NO: 858654 - protein, 409 aa, Homo sapiens
FCHMMTSAVKPMKDMAPPTTVFHSFEPLFISAKLSLNLMRYNSTFSSMERLLQEAFSLSFSAFWLQTGAREYHVQFFSNQPERAWVHEKRVREYKGHKQYEELLAEATKQASNHSEKQKIRKPRPQRERAQWDIGIAHAEKALKMTREERIEQYTFIYIDKQPEEALSQAKKSVASKTEVKKTRRPRSVLNTQPEQTNAGEVASSLSSTEIRRHSQRRHTSAEEEEPPPVKIAWKTAAARKSLPASITMHKGSLDLQKCNMSPVVKIEQVFALQNATGDGKFIDQFVYSTKGIGNKTEISVRGQDRLIISTPNQRNEKPTQSVSSPEATSGSTGSVEKKQQRRSIRTRSESEKSTEVVPKKKIKKEQVETVPQATVKTGLQKGSADRGVQGSVRFSDSSVSAAIEETVD

SEQ ID NO: 858655 - protein, 645 aa, Homo sapiens; identical to SEQ ID NO: 858648

SEQ ID NO: 858656 - protein, 1426 aa, Homo sapiens
MDFSFSFMQGIMGNTIQQPPQLIDSANIRQEDAFDNNSDIAEDGGQTPYEATLQQGFQYPATTEDLPPLTNGYPSSISVYETQTKYQSYNQYPNGSANGFGAVRNFSPTDYYHSEIPNTRPHEILEKPSPPQPPPPPSVPQTVIPKKTGSPEIKLKITKTIQNGRELFESSLCGDLLNEVQASEHTKSKHESRKEKRKKSNKHDSSRSEERKSHKIPKLEPEEQNRPNERVDTVSEKPREEPVLKEEAPVQPILSSVPTTEVSTGVKFQVGDLVWSKVGTYPWWPCMVSSDPQLEVHTKINTRGAREYHVQFFSNQPERAWVHEKRVREYKGHKQYEELLAEATKQASNHSEKQKIRKPRPQRERAQWDIGIAHAEKALKMTREERIEQYTFIYIDKQPEEALSQAKKSVASKTEVKKTRRPRSVLNTQPEQTNAGEVASSLSSTEIRRHSQRRHTSAEEEEPPPVKIAWKTAAARKSLPASITMHKGSLDLQKCNMSPVVKIEQVFALQNATGDGKFIDQFVYSTKGIGNKTEISVRGQDRLIISTPNQRNEKPTQSVSSPEATSGSTGSVEKKQQRRSIRTRSESEKSTEVVPKKKIKKEQVETVPQATVKTGLQKGASEISDSCKPLKKRSRASTDVEMTSSAYRDTSDSDSRGLSDLQVGFGKQVDSPSATADADVSDVQSMDSSLSRRGTGMSKKDTVCQICESSGDSLIPCEGECCKHFHLECLGLASLPDSKFICMECKTGQHPCFSCKVSGKDVKRCSVGACGKFYHEACVRKFPTAIFESKGFRCPQHCCSACSMEKDIHKASKGRMMRCLRCPVAYHSGDACIAAGSMLVSSYILICSNHSKRSSNSSAVNVGFCFVCARGLIVQDHSDPMFSSYAYKSHYLLNESNRAELMKLPMIPSSSASKKKCEKGGRLLCCESCPASFHPECLSIEMPEGCWNCNDCKAGKKLHYKQIVWVKLGNYRWWPAEICNPRSVPLNIQGLKHDLGDFPVFFFGSHDYYWVHQGRVFPYVEGDKSFAEGQTSINKTFKKALEEAAKRFQELKAQRESKEALEIEKNSRKPPPYKHIKANKVIGKVQIQVADLSEIPRCNCKPADENPCGLESECLNRMLQYECHPQVCPAGDRCQNQCFTKRLYPDAEIIKTERRGWGLRTKRSIKKGEFVNEYVGELIDEEECRLRIKRAHENSDRIIDAGPKGNYSRFMNHSCNPNCETQKWTVNGDVRVGLFALCDIPAGMELTFNYNLDCLGNGRTECHCGADNCSGFLGVRPKSACASTNEEKAKNAKLKQKRRKIKTEPKQMHEDYCFQCGDGGELVMCDKKDCPKAYHLLCLNLTQPPYGKWECPWHQCDECSSAAVSFCEFCPHSFCKDHEKGALVPSALEGRLCCSEHDPMAPVSPEYWSKIKCKWESQDHGEEVKE

SEQ ID NO: 858657 - protein, 611 aa, Homo sapiens [sequence omitted]

SEQ ID NO: 858658 - protein, 102 aa, Homo sapiens
MWSYLNYIDVKVSLSEFLFVCLNHFLGSVEKKQQRRSIRTRSESEKSTEVVPKKKIKKEQVETVPQATVKTGLQKGSADRGVQGSVRFSDSSVSAAIEETVD

SEQ ID NO: 858659 - protein, 102 aa, Homo sapiens; identical to SEQ ID NO: 858658

SEQ ID NO: 858660 - protein, 250 aa, Homo sapiens
DVSGRDLIYVKGTFLFFLKDRIIDAGPKGNYSRFMNHSCNPNCETQKWTVNGDVRVGLFALCDIPAGMELTFNYNLDCLGNGRTECHCGADNCSGFLGVRPKSACASTNEEKAKNAKLKQKRRKIKTEPKQMHEDYCFQCGDGGELVMCDKKDCPKAYHLLCLNLTQPPYGKWECPWHQCDECSSAAVSFCEFCPHSFCKDHEKGALVPSALEGRLCCSEHDPMAPVSPEYWSKIKCKWESQDHGEEVKE

SEQ ID NO: 858661 - protein, 140 aa, Homo sapiens
MDFSFSFMQGIMGNTIQQPPQLIDSANIRQEDAFDNNSDIAEDGGQTPYEATLQQGFQYPATTEDLPPLTNGYPSSISVYETQTKYQSYNQYPNGSANGFGAVRNFSPTDYYHSEIPNTRPHEILEKPSPPQPPPPPSVP

SEQ ID NO: 858662 - protein, 645 aa, Homo sapiens; identical to SEQ ID NO: 858648

SEQ ID NO: 858663 - protein, 645 aa, Homo sapiens; identical to SEQ ID NO: 858648

SEQ ID NO: 858664 - protein, 645 aa, Homo sapiens; identical to SEQ ID NO: 858648

SEQ ID NO: 858665 - protein, 581 aa, Homo sapiens
  misc_feature (1)..(1): Xaa can be any naturally occurring amino acid
XLFNKGRSGMGWWGVYETQTKYQSYNQYPNGSANGFGAVRNFSPTDYYHSEIPNTRPHEILEKPSPPQPPPPPSVPQTVIPKKTGSPEIKLKITKTIQNGRELFESSLCGDLLNEVQASEHTKSKHESRKEKRKKSNKHDSSRSEERKSHKIPKLEPEEQNRPNERVDTVSEKPREEPVLKEEAPVQPILSSVPTTEVSTGVKFQVGDLVWSKVGTYPWWPCMVSSDPQLEVHTKINTRGAREYHVQFFSNQPERAWVHEKRVREYKGHKQYEELLAEATKQASNHSEKQKIRKPRPQRERAQWDIGIAHAEKALKMTREERIEQYTFIYIDKQPEEALSQAKKSVASKTEVKKTRRPRSVLNTQPEQTNAGEVASSLSSTEIRRHSQRRHTSAEEEEPPPVKIAWKTAAARKSLPASITMHKGSLDLQKCNMSPVVKIEQVFALQNATGDGKFIDQFVYSTKGIGNKTEISVRGQDRLIISTPNQRNEKPTQSVSSPEATSGSTGSVEKKQQRRSIRTRSESEKSTEVVPKKKIKKEQVETVPQATVKTGLQKGSADRGVQGSVRFSDSSVSAAIEETVD

SEQ ID NO: 858666 - protein, 611 aa, Homo sapiens [sequence omitted]

SEQ ID NO: 858667 - protein, 1251 aa, Homo sapiens
MDFSFSFMQGIMGNTIQQPPQLIDSANIRQEDAFDNNSDIAEDGGQTPYEATLQQGFQYPATTEDLPPLTNGYPSSISVYETQTKYQSYNQYPNGSANGFGAVRNFSPTDYYHSEIPNTRPHEILEKPSPPQPPPPPSVPQTVIPKKTGSPEIKLKITKTIQNGRELFESSLCGDLLNEVQASEHTKSKHESRKEKRKKSNKHDSSRSEERKSHKIPKLEPEEQNRPNERVDTVSEKPREEPVLKEEAPVQPILSSVPTTEVSTGVKFQVGDLVWSKVGTYPWWPCMVSSDPQLEVHTKINTRGAREYHVQFFSNQPERAWVHEKRVREYKGHKQYEELLAEATKQASNHSEKQKIRKPRPQRERAQWDIGIAHAEKALKMTREERIEQYTFIYIDKQPEEALSQAKKSVASKTEVKKTRRPRSVLNTQPEQTNAGEVASSLSSTEIRRHSQRRHTSAEEEEPPPVKIAWKTAAARKSLPASITMHKGSLDLQKCNMSPVVKIEQVFALQNATGDGKFIDQFVYSTKGIGNKTEISVRGQDRLIISTPNQRNEKPTQSVSSPEATSGSTGSVEKKQQRRSIRTRSESEKSTEVVPKKKIKKEQVETVPQATVKTGLQKGASEISDSCKPLKKRSRASTDVEMTSSAYRDTSDSDSRGLSDLQVGFGKQVDSPSATADADVSDVQSMDSSLSRRGTGMSKKDTVCQICESSGDSLIPCEGECCKHFHLECLGLASLPDSKFICMECKTGQHPCFSCKVSGKDVKRCSVGACGKFYHEACVRKFPTAIFESKGFRCPQHCCSACSMEKDIHKASKGRMMRCLRCPVAYHSGDACIAAGSMLVSSYILICSNHSKRSSNSSAVNVGFCFVCARGLIVQDHSDPMFSSYAYKSHYLLNESNRAELMKLPMIPSSSASKKKCEKGGRLLCCESCPASFHPECLSIEMPEGCWNCNDCKAGKKLHYKQIVWVKLGNYRWWPAEICNPRSVPLNIQGLKHDLGDFPVFFFGSHDYYWVHQGRVFPYVEGDKSFAEGQTSINKTFKKALEEAAKRFQELKAQRESKEALEIEKNSRKPPPYKHIKANKVIGKVQIQVADLSEIPRCNCKPADENPCGLESECLNRMLQYECHPQVCPAGDRCQNQCFTKRLYPDAEIIKTERRGWGLRTKRSIKKGEFVNEYVGELIDEEECRLRIKRAHENSDRIIDAGPKGNYSRFMNHSCNPNCETQKWTVNGDVRVGLFALCDIPADRKSDSFPM

SEQ ID NO: 858668 - protein, 161 aa, Homo sapiens
MHKGSLDLQKCNMSPVVKIEQVFALQNATGDGKFIDQFVYSTKGIGNKTEISVRGQDRLIISTPNQRNEKPTQSVSSPEATSGSTGSVEKKQQRRSIRTRSESEKSTEVVPKKKIKKEQVETVPQATVKTGLQKGSADRGVQGSVRFSDSSVSAAIEETVD

SEQ ID NO: 858669 - protein, 478 aa, Homo sapiens
ANLVNSGFLFRFCPLESKIAFVFRWWPAEICNPRSVPLNIQGLKHDLGDFPVFFFGSHDYYWVHQGRVFPYVEGDKSFAEGQTSINKTFKKALEEAAKRFQELKAQRESKEALEIEKNSRKPPPYKHIKANKVIGKVQIQVADLSEIPRCNCKPADENPCGLESECLNRMLQYECHPQVCPAGDRCQNQCFTKRLYPDAEIIKTERRGWGLRTKRSIKKGEFVNEYVGELIDEEECRLRIKRAHENSDRIIDAGPKGNYSRFMNHSCNPNCETQKWTVNGDVRVGLFALCDIPAGMELTFNYNLDCLGNGRTECHCGADNCSGFLGVRPKSACASTNEEKAKNAKLKQKRRKIKTEPKQMHEDYCFQCGDGGELVMCDKKDCPKAYHLLCLNLTQPPYGKWECPWHQCDECSSAAVSFCEFCPHSFCKDHEKGALVPSALEGRLCCSEHDPMAPVSPEYWSKIKCKWESQDHGEEVKE

SEQ ID NO: 858670 - protein, 102 aa, Homo sapiens
LIVQDHSDPMFSSYAYKSHYLLNESNRAELMKLPMIPSSSASKKKCEKGNNQNSFSCFYFCISYFFLFQYRGEMYACQAPSVAFGKFCLGGCDCFFIWLHNY

SEQ ID NO: 858671 - protein, 264 aa, Homo sapiens
MLLLSLTLSLVLLGSSWGCGIPAIKPALSFSQRIVNGENAVLGSWPWQVSLQDSSGFHFCGGSLISQSWVVTAAHCNVSPGRHFVVLGEYDRSSNAEPLQVLSVSRAITHPSWNSTTMNNDVTLLKLASPAQYTTRISPVCLASSNEALTEGLTCVTTGWGRLSGVGNVTPAHLQQVALPLVTVNQCRQYWGSSITDSMICAGGAGASSCQGDSGGPLVCQKGNTWVLIGIVSWGTKNCNVRAPAVYTRVSKFSTWINQVIAYN

SEQ ID NO: 858672 - protein, 258 aa, Homo sapiens [sequence omitted]

SEQ ID NO: 858673 - protein, 264 aa, Homo sapiens; identical to SEQ ID NO: 858671

SEQ ID NO: 858674 - protein, 147 aa, Homo sapiens [sequence omitted]

SEQ ID NO: 858675 - protein, 147 aa, Homo sapiens
MDSSGFHFCGGSLISQSWVVTAAHCNVSPGRHFVVLGEYDRSSNAEPLQVLSVSRAITHPSWNSTTMNNDVTLLKLASPAQYTTRISPVCLASSNEALTEGLTCVTTGWGRLSGVGNVTPAHLQQVALPLVTVNQCRQYWGCCVYSS

SEQ ID NO: 858676 - protein, 499 aa, Homo sapiens
RSGLRSSLALGLGSRCERPPCPRTALSAHRRASRAGPSTSAPRGRTEAASSAAGCGADPGDEMTTSTLQKAIDLVTKATEEDKAKNYEEALRLYQHAVEYFLHAIKYEAHSDKAKESIRAKCVQYLDRAEKLKDYLRSKEKHGKKPVKENQSEGKGSDSDSEGDNPEKKKLQEQLMGAVVMEKPNIRWNDVAGLEGAKEALKEAVILPIKFPHLFTGKRTPWRGILLFGPPGTGKSYLAKAVATEANNSTFFSVSSSDLMSKWLGESEKLVKNLFELARQHKPSIIFIDEVDSLCGSRNENESEAARRIKTEFLVQMQGVGNNNDGTLVLGATNIPWVLDSAIRRRFEKRIYIPLPEEAARAQMFRLHLGSTPHNLTDANIHELARKTEGYSGADISIIVRDSLMQPVRKVQSATHFKKVCGPSRTNPSMMIDDLLTPCSPGDPGAMEMTWMDVPGDKLLEPVVCMSDMLRSLATTRPTVNADDLLKVKKFSEDFGQES

SEQ ID NO: 858677 - protein, 499 aa, Homo sapiens; identical to SEQ ID NO: 858676

SEQ ID NO: 858678 - protein, 499 aa, Homo sapiens; identical to SEQ ID NO: 858676

SEQ ID NO: 858679 - protein, 499 aa, Homo sapiens; identical to SEQ ID NO: 858676

SEQ ID NO: 858680 - protein, 499 aa, Homo sapiens; identical to SEQ ID NO: 858676

SEQ ID NO: 858681 - protein, 426 aa, Homo sapiens
RSGLRSSLALGLGSRCERPPCPRTALSAHRRASRAGPSTSAPRGRTEAASSAAGCGADPGDEMTTSTLQKAIDLVTKATEEDKAKNYEEALRLYQHAVEYFLHAIKYEAHSDKAKESIRAKCVQYLDRAEKLKDYLRSKEKHGKKPVKENQSEGKGSDSDSEGDNPEKKKLQEQLMGAVVMEKPNIRWNDVAGLEGAKEALKEAVILPIKFPHLFTGKRTPWRGILLFGPPGTGKSYLAKAVATEANNSTFFSVSSSDLMSKWLGESEKLVKNLFELARQHKPSIIFIDEVDSLCGSRNENESEAARRIKTEFLVQMQGVGNNNDGTLVLGATNIPWVLDSAIRRRFEKRIYIPLPEEAARAQMFRLHLGSTPHNLTDANIHELARKTEGYSGADISIIVRDSLMQPVRKVQSATHFKKVSARGHC

SEQ ID NO: 858682 - protein, 196 aa, Homo sapiens
MSEAPRIKRSLGSDAGVGNNNDGTLVLGATNIPWVLDSAIRRRFEKRIYIPLPEEAARAQMFRLHLGSTPHNLTDANIHELARKTEGYSGADISIIVRDSLMQPVRKVQSATHFKKVCGPSRTNPSMMIDDLLTPCSPGDPGAMEMTWMDVPGDKLLEPVVCMSDMLRSLATTRPTVNADDLLKVKKFSEDFGQES

SEQ ID NO: 858683 - protein, 346 aa, Homo sapiens
RSGLRSSLALGLGSRCERPPCPRTALSAHRRASRAGPSTSAPRGRTEAASSAAGCGADPGDEMTTSTLQKAIDLVTKATEEDKAKNYEEALRLYQHAVEYFLHAIKYEAHSDKAKESIRAKCVQYLDRAEKLKDYLRSKEKHGKKPVKENQSEGKGSDSDSEGDNPEKKKLQEQLMGAVVMEKPNIRWNDVAGLEGAKEALKEAVILPIKFPHLFTGKRTPWRGILLFGPPGTGKSYLAKAVATEANNSTFFSVSSSDLMSKWLGESEKLVKNLFELARQHKPSIIFIDEVDSLCGSRNENESEAARRIKTEFLVQMQGVGNNNDGTLVLGATNIPWVLDSAIRRR

SEQ ID NO: 858684 - protein, 211 aa, Homo sapiens
RSGLRSSLALGLGSRCERPPCPRTALSAHRRASRAGPSTSAPRGRTEAASSAAGCGADPGDEMTTSTLQKAIDLVTKATEEDKAKNYEEALRLYQHAVEYFLHAIKYEAHSDKAKESIRAKCVQYLDRAEKLKDYLRSKEKHGKKPVKENQSEGKGSDSDSEGDNPEKKKLQEQLMALPQRPSDISHSHPPRFTSRAVSSLGEEMVSFRSG

SEQ ID NO: 858685 - protein, 499 aa, Homo sapiens; identical to SEQ ID NO: 858676

SEQ ID NO: 858686 - protein, 426 aa, Homo sapiens; identical to SEQ ID NO: 858681

SEQ ID NO: 858687 - protein, 499 aa, Homo sapiens; identical to SEQ ID NO: 858676

SEQ ID NO: 858688 - protein, 499 aa, Homo sapiens; identical to SEQ ID NO: 858676

SEQ ID NO: 858689 - protein, 426 aa, Homo sapiens; identical to SEQ ID NO: 858681

SEQ ID NO: 858690 - protein, 107 aa, Homo sapiens
MRVRPPGGSKRSSWSRCRGWGITMMGLWFLEPQTSHGCWIRPSGGGLKNEFISPCRRKLPAPRCSGCISGALPTTSRMQTSTSWPGRRKATRARTSASSCGTLSCSP

SEQ ID NO: 858691 - protein, 346 aa, Homo sapiens; identical to SEQ ID NO: 858683

SEQ ID NO: 858692 - protein, 1401 aa, Homo sapiens [sequence omitted]

SEQ ID NO: 858693 - protein, 1401 aa, Homo sapiens [sequence omitted]

SEQ ID NO: 858694 - protein, 1401 aa, Homo sapiens [sequence omitted]

SEQ ID NO: 858695 - protein, 1401 aa, Homo sapiens [sequence omitted]

SEQ ID NO: 858696 - protein, 737 aa, Homo sapiens [sequence omitted]

SEQ ID NO: 858697 - protein, 1323 aa, Homo sapiens
MAPQMYEFHLPLSPEELLKSGGVNQYVVQEVLSIKHLPPQLRAFQAAFRAQGPLAMLQHFDTIYSILHHFRSIDPGLKEDTLEFLIKVVSRHSQELPAILDDTTLSGSDRNAHLNALKMNCYALIRLLESFETMASQTNLVDLDLGGKGKKARTKAAHGFDWEEERQPILQLLTQLLQLDIRHLWNHSIIEEEFVSLVTGCCYRLLENPTINHQKNRPTREAITHLLGVALTRYNHMLSATVKIIQMLQHFEHLAPVLVAAVSLWATDYGMKSIVGEIVREIGQKCPQELSRDPSGTKGFAAFLTELAERVPAILMSSMCILLDHLDGENYMMRNAVLAAMAEMVLQVLSGDQLEAAARDTRDQFLDTLQAHGHDVNSFVRSRVLQLFTRIVQQKALPLTRFQAVVALAVGRLADKSVLVCKNAIQLLASFLANNPFSCKLSDADLAGPLQKETQKLQEMRAQRRTAAASAVLDPEEEWEAMLPELKSTLQQLLQLPQGEEEIPEQIANTETTEDVKGRIYQLLAKASYKKAIILTREATGHFQESEPFSHIDPEESEETRLLNILGLIFKGPAASTQEKNPRESTGNMVTGQTVCKNKPNMSDPEESRGNDELVKQEMLVQYLQDAYSFSRKITEAIGIISKMMYENTTTVVQEVIEFFVMVFQFGVPQALFGVRRMLPLIWSKEPGVREAVLNAYRQLYLNPKGDSARAKAQALIQNLSLLLVDASVGTIQCLEEILCEFVQKDELKPAVTQLLWERATEKVACCPLERCSSVMLLGMMARGKPEIVGSNLDTLVSIGLDEKFPQDYRLAQQVCHAIANISDRRKPSLGKRHPPFRLPQEHRLFERLRETVTKGFVHPDPLWIPFKEVAVTLIYQLAEGPEVICAQILQGCAKQALEKLEEKRTSQEDPKESPAMLPTFLLMNLLSLAGDVALQQLVHLEQAVSGELCRRRVLREEQEHKTKDPKEKNTSSETTMEEELGLVGATADDTEAELIRGICEMELLDGKQTLAAFVPLLLKVCNNPGLYSNPDLSAAASLALGKFCMISATFCDSQLRLLFTMLEKSPLPIVRSNLMVATGDLAIRFPNLVDPWTPHLYARLRDPAQQVRKTAGLVMTHLILKDMVKVKGQVSEMAVLLIDPEPQIAALAKNFFNELSHKGNAIYNLLPDIISRLSDPELGVEEEPFHTIMKQLLSYITKDKQTESLVEKLCQRFRTSRTERQQRDLAYCVSQLPLTERGLRKMLDNFDCFGDKLSDESIFSAFLSVVGKLRRGAKPEGKAIIDEFEQKLRACHTRGLDGIKELEIGQAGSQRAPSAKKPSTGT

SEQ ID NO: 858698 - protein, 1112 aa, Homo sapiens
MAPQMYEFHLPLSPEELLKSGGVNQYVVQEVLSIKHLPPQLRAFQAAFRAQGPLAMLQHFDTIYSILHHFRSIDPGLKEDTLEFLIKVVSRHSQELPAILDDTTLSGSDRNAHLNALKMNCYALIRLLESFETMASQTNLVDLDLGGKGKKARTKAAHGFDWEEERQPILQLLTQLLQLDIRHLWNHSIIEEEFVSLVTGCCYRLLENPTINHQKNRPTREAITHLLGVALTRYNHMLSATVKIIQMLQHFEHLAPVLVAAVSLWATDYGMKSIVGEIVREIGQKCPQELSRDPSGTKGFAAFLTELAERVPAILMSSMCILLDHLDGENYMMRNAVLAAMAEMVLQVLSGDQLEAAARDTRDQFLDTLQAHGHDVNSFVRSRVLQLFTRIVQQKALPLTRFQAVVALAVGRLADKSVLVCKNAIQLLASFLANNPFSCKLSDADLAGPLQKETQKLQEMRAQRRTAAASAVLDPEEEWEAMLPELKSTLQQLLQLPQGEEEIPEQIANTETTEDVKGRIYQLLAKASYKKAIILTREATGHFQESEPFSHIDPEESEETRLLNILGLIFKGPAASTQEKNPRESTGNMVTGQTVCKNKPNMSDPEESRGNDELVKQEMLVQYLQDAYSFSRKITEAIGIISKMMYENTTTVVQEVIEFFVMVFQFGVPQALFGVRRMLPLIWSKEPGVREAVLNAYRQLYLNPKGDSARAKAQALIQNLSLLLVDASVGTIQCLEEILCEFVQKDELKPAVTQLLWERATEKVACCPLERCSSVMLLGMMARGKPEIVGSNLDTLVSIGLDEKFPQDYRLAQQVCHAIANISDRRKPSLGKRHPPFRLPQEHRLFERLRETVTKGFVHPDPLWIPFKEVAVTLIYQLAEGPEVICAQILQGCAKQALEKLEEKRTSQEDPKESPAMLPTFLLMNLLSLAGDVALQQLVHLEQAVSGELCRRRVLREEQEHKTKDPKEKNTSSETTMEEELGLVGATADDTEAELIRGICEMELLDGKQTLAAFVPLLLKVCNNPGLYSNPDLSAAASLALGKFCMISATFCDSQLRLLFTMLEKSPLPIVRSNLMVATGDLAIRFPNLVDPWTPHLYARLRDPAQQVPLCS

SEQ ID NO: 858699 - protein, 890 aa, Homo sapiens
MAPQMYEFHLPLSPEELLKSGGVNQYVVQEVLSIKHLPPQLRAFQAAFRAQGPLAMLQHFDTIYSILHHFRSIDPGLKEDTLEFLIKVVSRHSQELPAILDDTTLSGSDRNAHLNALKMNCYALIRLLESFETMASQTNLVDLDLGGKGKKARTKAAHGFDWEEERQPILQLLTQLLQLDIRHLWNHSIIEEEFVSLVTGCCYRLLENPTINHQKNRPTREAITHLLGVALTRYNHMLSATVKIIQMLQHFEHLAPVLVAAVSLWATDYGMKSIVGEIVREIGQKCPQELSRDPSGTKGFAAFLTELAERVPAILMSSMCILLDHLDGENYMMRNAVLAAMAEMVLQVLSGDQLEAAARDTRDQFLDTLQAHGHDVNSFVRSRVLQLFTRIVQQKALPLTRFQAVVALAVGRLADKSVLVCKNAIQLLASFLANNPFSCKLSDADLAGPLQKETQKLQEMRAQRRTAAASAVLDPEEEWEAMLPELKSTLQQLLQLPQGEEEIPEQIANTETTEDVKGRIYQLLAKASYKKAIILTREATGHFQESEPFSHIDPEESEETRLLNILGLIFKGPAASTQEKNPRESTGNMVTGQTVCKNKPNMSDPEESRGNDELVKQEMLVQYLQDAYSFSRKITEAIGIISKMMYENTTTVVQEVIEFFVMVFQFGVPQALFGVRRMLPLIWSKEPGVREAVLNAYRQLYLNPKGDSARAKAQALIQNLSLLLVDASVGTIQCLEEILCEFVQKDELKPAVTQLLWERATEKVACCPLERCSSVMLLGMMARRGLDGIKELEIGQAGSQRAPSAKKPSTGSRYQPLASTASDNDFVTPEPRRTTRRHPNTQQRASKKKPKVVFSSDESSEEDLSAEMTEDETPKKTTPILRASARRHRS

SEQ ID NO: 858700 - protein, 876 aa, Homo sapiens
MAPQMYEFHLPLSPEELLKSGGVNQYVVQEVLSIKHLPPQLRAFQAAFRAQGPLAMLQHFDTIYSILHHFRSIDPGLKEDTLEFLIKVVSRHSQELPAILDDTTLSGSDRNAHLNALKMNCYALIRLLESFETMASQTNLVDLDLGGKGKKARTKAAHGFDWEEERQPILQLLTQLLQLDIRHLWNHSIIEEEFVSLVTGCCYRLLENPTINHQKNRPTREAITHLLGVALTRYNHMLSATVKIIQMLQHFEHLAPVLVAAVSLWATDYGMKSIVGEIVREIGQKCPQELSRDPSGTKGFAAFLTELAERVPAILMSSMCILLDHLDGENYMMRNAVLAAMAEMVLQVLSGDQLEAAARDTRDQFLDTLQAHGHDVNSFVRSRVLQLFTRIVQQKALPLTRFQAVVALAVGRLADKSVLVCKNAIQLLASFLANNPFSCKLSDADLAGPLQKETQKLQEMRAQRRTAAASAVLDPEEEWEAMLPELKSTLQQLLQLPQGEEEIPEQIANTETTEDVKGRIYQLLAKASYKKAIILTREATGHFQESEPFSHIDPEESEETRLLNILGLIFKGPAASTQEKNPRESTGNMVTGQTVCKNKPNMSDPEESRGNDELVKQEMLVQYLQDAYSFSRKITEAIGIISKMMYENTTTVVQEVIEFFVMVFQFGVPQALFGVRRMLPLIWSKEPGVREAVLNAYRQLYLNPKGDSARAKAQALIQNLSLLLVDASVGTIQCLEEILCEFVQKDELKPAVTQLLWERATEKVACCPLERCSSVMLLGMMARGKPEIVGSNLDTLVSIGLDEKFPQDYRLAQQVCHAIANISDRRKPSLGKRHPPFRLPQEHRLFERLRETVTKGFWSQPQEPNFLESPISKGRL

SEQ ID NO: 858701 - protein, 229 aa, Homo sapiens
  misc_feature (194)..(194): Xaa can be any naturally occurring amino acid
  misc_feature (214)..(214): Xaa can be any naturally occurring amino acid
  misc_feature (226)..(226): Xaa can be any naturally occurring amino acid
MAPQMYEFHLPLSPEELLKSGGVNQYVVQEVLSIKHLPPQLRAFQAAFRAQGPLAMLQHFDTIYSILHHFRSIDPGLKEDTLEFLIKVVSRHSQELPAILDDTTLSGSDRNAHLNALKMNCYALIRLLESFETMASQTNLVDLDLGGKGKKARTKAAHGFDWEEERQPILQLLTQLLQLDIRHLWNHSINLERXKFVQFGLLGLFGLTRPFLGXKSPPILNSPQKXKPA

SEQ ID NO: 858702 - protein, 1377 aa, Homo sapiens
MAPQMYEFHLPLSPEELLKSGGVNQYVVQEVLSIKHLPPQLRAFQAAFRAQGPLAMLQHFDTIYSILHHFRSIDPGLKEDTLEFLIKVVSRHSQELPAILDDTTLSGSDRNAHLNALKMNCYALIRLLESFETMASQTNLVDLDLGGKGKKARTKAAHGFDWEEERQPILQLLTQLLQLDIRHLWNHSIIEEEFVSLVTGCCYRLLENPTINHQKNRPTREAITHLLGVALTRYNHMLSATVKIIQMLQHFEHLAPVLVAAVSLWATDYGMKSIVGEIVREIGQKCPQELSRDPSGTKGFAAFLTELAERVPAILIWRRWCCRFSVAINWKQQPETPETSSWILYKPMAMDVNSFVRSRVLQLFTRIVQQKALPLTRFQAVVALAVGRLADKSVLVCKNAIQLLASFLANNPFSCKLSDADLAGPLQKETQKLQEMRAQRRTAAASAVLDPEEEWEAMLPELKSTLQQLLQLPQGEEEIPEQIANTETTEDVKGRIYQLLAKASYKKAIILTREATGHFQESEPFSHIDPEESEETRLLNILGLIFKGPAASTQEKNPRESTGNMVTGQTVCKNKPNMSDPEESRGNDELVKQEMLVQYLQDAYSFSRKITEAIGIISKMMYENTTTVVQEVIEFFVMVFQFGVPQALFGVRRMLPLIWSKEPGVREAVLNAYRQLYLNPKGDSARAKAQALIQNLSLLLVDASVGTIQCLEEILCEFVQKDELKPAVTQLLWERATEKVACCPLERCSSVMLLGMMARGKPEIVGSNLDTLVSIGLDEKFPQDYRLAQQVCHAIANISDRRKPSLGKRHPPFRLPQEHRLFERLRETVTKGFVHPDPLWIPFKEVAVTLIYQLAEGPEVICAQILQGCAKQALEKLEEKRTSQEDPKESPAMLPTFLLMNLLSLAGDVALQQLVHLEQAVSGELCRRRVLREEQEHKTKDPKEKNTSSETTMEEELGLVGATADDTEAELIRGICEMELLDGKQTLAAFVPLLLKVCNNPGLYSNPDLSAAASLALGKFCMISATFCDSQLRLLFTMLEKSPLPIVRSNLMVATGDLAIRFPNLVDPWTPHLYARLRDPAQQVRKTAGLVMTHLILKDMVKVKGQVSEMAVLLIDPEPQIAALAKNFFNELSHKGNAIYNLLPDIISRLSDPELGVEEEPFHTIMKQLLSYITKDKQTESLVEKLCQRFRTSRTERQQRDLAYCVSQLPLTERGLRKMLDNFDCFGDKLSDESIFSAFLSVVGKLRRGAKPEGKAIIDEFEQKLRACHTRGLDGIKELEIGQAGSQRAPSAKKPSTGSRYQPLASTASDNDFVTPEPRRTTRRHPNTQQRASKKKPKVVFSSDESSEEDLSAEMTEDETPKKTTPILRASARRHRS

SEQ ID NO: 858703 - protein, 1386 aa, Homo sapiens
MAPQMYEFHLPLSPEELLKSGGVNQYVVQEVLSIKHLPPQLRAFQAAFRAQGPLAMLQHFDTIYSILHHFRSIDPGLKEDTLEFLIKVVSRHSQELPAILDDTTLSGSDRNAHLNALKMNCYALIRLLESFETMASQTNLVDLDLGGKGKKARTKAAHGFDWEEERQPILQLLTQLLQLDIRHLWNHSIIEEEFVSLVTGCCYRLLENPTINHQKNRPTREAITHLLGVALTRYNHMLSATVKIIQMLQHFEHLAPVLVAAVSLWATDYGMKSIVGEIVREIGQKCPQELSRDPSGTKGFAAFLTELAERVPAILMSSMCILLDHLDGENYMMRNAVLAAMAEMVLQVLSGDQLEAAARDTRDQFLDTLQAHGHDVNSFVRSRVLQLFTRIVQQKALPLTRFQAVVALAVGRLADKSVLVCKNAIQLLASFLANNPFSCKLSDADLAGPLQKETQKLQEMRAQRRTAAASAVLDPEEEWEAMLPELKSTLQQLLQLPQGEEEIPEQIANTETTEDVKGRIYQLLAKASYKKAIILTREATGHFQESEPFSHIDPEESEETRLLNILGLIFKGPAASTQEKNPRESTGNMVTGQTVCKNKPNMSDPEESRGNDELVKQEMLVQYLQDAYSFSRKITEAIGIISKMMYENTTTVVQEVIEFFVMVFQFGVPQALFGVRRMLPLIWSKEPGVREAVLNAYRQLYLNPKGDSARAKAQALIQNLSLLLVDASVGTIQCLEEILCEFVQKDELKPAVTQLLWERATEKVACCPLERCSSVMLLGMMARGKPEIVGSNLDTLVSIGLDEKFPQDYRLAQQVCHAIANISDRRKPSLGKRHPPFRLPQEHRLFERLRETVTKGFVHPDPLWIPFKEVAVTLIYQLAEGPEVICAQILQGCAKQALEKLEEKRTSQEDPKESPAMLPTFLLMNLLSLAGDVALQQLVHLEQAVSGELCRRRVLREEQEHKTKDPKEKNTSSETTMEEELGLVGATADDTEAELIRGICEMELLDGKQTLAAFVPLLLKVCNNPGLYSNPDLSAAASLALGKFCMISATFCDSQLRLLFTMLEKSPLPIVRNLVDPWTPHLYARLRDPAQQVRKTAGLVMTHLILKDMVKVKGQVSEMAVLLIDPEPQIAALAKNFFNELSHKGNAIYNLLPDIISRLSDPELGVEEEPFHTIMKQLLSYITKDKQTESLVEKLCQRFRTSRTERQQRDLAYCVSQLPLTERGLRKMLDNFDCFGDKLSDESIFSAFLSVVGKLRRGAKPEGKAIIDEFEQKLRACHTRGLDGIKELEIGQAGSQRAPSAKKPSTGSRYQPLASTASDNDFVTPEPRRTTRRHPNTQQRASKKKPKVVFSSDESSEEDLSAEMTEDETPKKTTPILRASARRHRS

SEQ ID NO: 858704 - protein, 1219 aa, Homo sapiens
MAPQMYEFHLPLSPEELLKSGGVNQYVVQEVLSIKHLPPQLRAFQAAFRAQGPLAMLQHFDTIYSILHHFRSIDPGLKEDTLEFLIKVVSRHSQELPAILDDTTLSGSDRNAHLNALKMNCYALIRLLESFETMASQTNLVDLDLGGKGKKARTKAAHGFDWEEERQPILQLLTQLLQLDIRHLWNHSIIEEEFVSLVTGCCYRLLENPTINHQKNRPTREAITHLLGVALTRYNHMLSATVKIIQMLQHFEHLAPVLVAAVSLWATDYGMKSIVGEIVREIGQKCPQELSRDPSGTKGFAAFLTELAERVPAILMSSMCILLDHLDGENYMMRNAVLAAMAEMVLQVLSGDQLEAAARDTRDQFLDTLQAHGHDVNSFVRSRVLQLFTRIVQQKALPLTRFQAVVALAVGRLADKSVLVCKNAIQLLASFLANNPFSCKLSDADLAGPLQKETQKLQEMRAQRRTAAASAVLDPEEEWEAMLPELKSTLQQLLQLPQGEEEIPEQIANTETTEDVKGRIYQLLAKASYKKAIILTREATGHFQESEPFSHIDPEESEETRLLNILGLIFKGPAASTQEKNPRESTGNMVTGQTVCKNKPNMSDPEESRGNDELVKQEMLVQYLQDAYSFSRKITEAIGIISKMMYENTTTVVQEVIEFFVMVFQFGVPQALFGVRRMLPLIWSKEPGVREAVLNAYRQLYLNPKGDSARAKAQALIQNLSLLLVDASVGTIQCLEEILCEFVQKDELKPAVTQLLWERATEKVACCPLERCSSVMLLGMMARGKPEIVGSNLDTLVSIGLDEKFPQDYRLAQQVCHAIANISDRRKPSLGKRHPPFRLPQEHRLFERLRETVTKGFVHPDPLWIPFKEVAVTLIYQLAEGPEVICAQILQGCAKQALEKLEEKRTSQEDPKESPAMLPTFLLMNLLSLAGDVALQQLVHLEQAVSGELCRRRVLREEQEHKTKDPKEKNTSSETTMEEELGLVGATADDTEAELIRGICEMELLDGKQTLAAFVPLLLKVCNNPGLYSNPDLSAAASLALGKFCMISATFCDSQLRLLFTMLEKSPLPIVRSNLMVATGDLAIRFPNLVDPWTPHLYARLRDPAQQVRKTAGLVMTHLILKDMVKVKGQVSEMAVLLIDPEPQIAALAKNFFNELSHKGNAIYNLLPDIISRLSDPELGVEEEPFHTIMKQLLSYITKDKQTESLVEKLCQRFRTSRL

SEQ ID NO: 858705 - protein, 1074 aa, Homo sapiens
  misc_feature (1058)..(1058): Xaa can be any naturally occurring amino acid
  misc_feature (1062)..(1062): Xaa can be any naturally occurring amino acid
MAPQMYEFHLPLSPEELLKSGGVNQYVVQEVLSIKHLPPQLRAFQAAFRAQGPLAMLQHFDTIYSILHHFRSIDPGLKEDTLEFLIKVVSRHSQELPAILDDTTLSGSDRNAHLNALKMNCYALIRLLESFETMASQTNLVDLDLGGKGKKARTKAAHGFDWEEERQPILQLLTQLLQLDIRHLWNHSIIEEEFVSLVTGCCYRLLENPTINHQKNRPTREAITHLLGVALTRYNHMLSATVKIIQMLQHFEHLAPVLVAAVSLWATDYGMKSIVGEIVREIGQKCPQELSRDPSGTKGFAAFLTELAERVPAILMSSMCILLDHLDGENYMMRNAVLAAMAEMVLQVLSGDQLEAAARDTRDQFLDTLQAHGHDVNSFVRSRVLQLFTRIVQQKALPLTRFQAVVALAVGRLADKSVLVCKNAIQLLASFLANNPFSCKLSDADLAGPLQKETQKLQEMRAQRRTAAASAVLDPEEEWEAMLPELKSTLQQLLQLPQGEEEIPEQIANTETTEDVKGRIYQLLAKASYKKAIILTREATGHFQESEPFSHIDPEESEETRLLNILGLIFKGPAASTQEKNPRESTGNMVTGQTVCKNKPNMSDPEESRGNDELVKQEMLVQYLQDAYSFSRKITEAIGIISKMMYENTTTVVQEVIEFFVMVFQFGVPQALFGVRRMLPLIWSKEPGVREAVLNAYRQLYLNPKGDSARAKAQALIQNLSLLLVDASVGTIQCLEEILCEFVQKDELKPAVTQLLWERATEKVACCPLERCSSVMLLGMMARGKPEIVGSNLDTLVSIGLDEKFPQDYRLAQQVCHAIANISDRRKPSLGKRHPPFRLPQEHRLFERLRETVTKGFVHPDPLWIPFKEVAVTLIYQLAEGPEVICAQILQGCAKQALEKLEEKRTSQEDPKESPAMLPTFLLMNLLSLAGDVALQQLVHLEQAVSGELCRRRVLREEQEHKTKDPKEKNTSSETTMEEELGLVGATADDTEAELIRGICEMELLDGKQTLAAFVPLLLKVCNNPGLYSNPDLSAAASLALGKFCMISALFWGIPNFXLFVXPLPGKKVFHFPF

SEQ ID NO: 858706 - protein, 1012 aa, Homo sapiens
MAPQMYEFHLPLSPEELLKSGGVNQYVVQEVLSIKHLPPQLRAFQAAFRAQGPLAMLQHFDTIYSILHHFRSIDPGLKEDTLEFLIKVVSRHSQELPAILDDTTLSGSDRNAHLNALKMNCYALIRLLESFETMASQTNLVDLDLGGKGKKARTKAAHGFDWEEERQPILQLLTQLLQLDIRHLWNHSIIEEEFVSLVTGCCYRLLENPTINHQKNRPTREAITHLLGVALTRYNHMLSATVKIIQMLQHFEHLAPVLVAAVSLWATDYGMKSIVGEIVREIGQKCPQELSRDPSGTKGFAAFLTELAERVPAILMSSMCILLDHLDGENYMMRNAVLAAMAEMVLQVLSGDQLEAAARDTRDQFLDTLQAHGHDVNSFVRSRVLQLFTRIVQQKALPLTRFQAVVALAVGRLADKSVLVCKNAIQLLASFLANNPFSCKLSDADLAGPLQKETQKLQEMRAQRRTAAASAVLDPEEEWEAMLPELKSTLQQLLQLPQGEEEIPEQIANTETTEDVKGRIYQLLAKASYKKAIILTREATGHFQESEPFSHIDPEESEETRLLNILGLIFKGPAASTQEKNPRESTGNMVTGQTVCKNKPNMSDPEESRGNDELVKQEMLVQYLQDAYSFSRKITEAIGIISKMMYENTTTVVQEVIEFFVMVFQFGVPQALFGVRRMLPLIWSKEPGVREAVLNAYRQLYLNPKGDSARAKAQALIQNLSLLLVDASVGTIQCLEEILCEFVQKDELKPAVTQLLWERATEKVACCPLERCSSVMLLGMMARGKPEIVGSNLDTLVSIGLDEKFPQDYRLAQQVCHAIANISDRRKPSLGKRHPPFRLPQEHRLFERLRETVTKGFVHPDPLWIPFKEVAVTLIYQLAEGPEVICAQILQGCAKQALEKLEEKRTSQEDPKESPAMLPTFLLMNLLSLAGDVALQQLVHLEQAVSGELCRRRVLREEQEHKTKDPKEKNTSSETTMEEELGLVGATADDTEAELIRGICEMELLDGKQMLL

SEQ ID NO: 858707 - protein, 32 aa, Homo sapiens
MLPTFLLMNLLSLAGDVALQQLVHLEQAVSGE

SEQ ID NO: 858708 - protein, 187 aa, Homo sapiens
MWSAGDGQRVCRSLLGFSDPSSASASMVASMNQDCLKGLYPLSQRPGFMLSEEADALPRGECSWIRMLVQRMPCLHIYQRFPYPQLLGGFFFLESFTTFCKGSMLCLVPKTKTVFTFSVLLESDQLRAMAGEGMAREGYSEGRMRGGFPQVKVSQRRIEFSPPNHIQHLPNFPQCGMKPLGQSLHFP

SEQ ID NO: 858709 - protein, 785 aa, Homo sapiens
MPKGRQKVPHLDAPLGLPTCLWLELAGLFLLVPWVMGLAGTGGPDGQGTGGPSWAVHLESLEGDGEEETLEQQADALAQAAGLVNAGRIGELQGHYLFVQPAGHRPALEVEAIRQQVEAVLAGHEAVRWHSEQRLLRRAKRSVHFNDPKYPQQWHLNNRRSPGRDINVTGVWERNVTGRGVTVVVVDDGVEHTIQDIAPNYSPEGSYDLNSNDPDPMPHPDVENGNHHGTRCAGEIAAVPNNSFCAVGVAYGSRIAGIRVLDGPLTDSMEAVAFNKHYQINDIYSCSWGPDDDGKTVDGPHQLGKAALQHGVIAGRQGFGSIFVVASGNGGQHNDNCNYDGYANSIYTVTIGAVDEEGRMPFYAEECASMLAVTFSGGDKMLRSIVTTDWDLQKGTGCTEGHTGTSAAAPLAAGMIALMLQVRPCLTWRDVQHIIVFTATRYEDRRAEWVTNEAGFSHSHQHGFGLLNAWRLVNAAKIWTSVPYLASYVSPVLKENKAIPQSPRSLEVLWNVSRMDLEMSGLKTLEHVAVTVSITHPRRGSLELKLFCPSGMMSLIGAPRSMDSDPNGFNDWTFSTVRCWGERARGTYRLVIRDVGDESFQVGILRQWQLTLYGSVWSAVDIRDRQRLLESAMSGKYLHDDFALPCPPGLKIPEEDGYTITPNTLKTLVLVGCFTVFWTVYYMLEVYLSQRNVASNQVCRSGPCHWPHRSRKAKEEGTELESVPLCSSKDPDEVETESRGPPTTSDLLAPDLLEQGDWSLSQNKSALDCPHQHLDVPHGKEEQIC

SEQ ID NO: 858710 - protein, 824 aa, Homo sapiens
MPKGRQKVPHLDAPLGLPTCLWLELAGLFLLVPWVMGLAGTGGPDGQGTGGPSWAVHLESLEGDGEEETLEQQADALAQAAGLVNAGRIGELQGHYLFVQPAGHRPALEVEAIRQQVEAVLAGHEAVRWHSEQRLLRRAKRSVHFNDPKYPQQWHLNNRRSPGRDINVTGVWERNVTGRGVTVVVVDDGVEHTIQDIAPNYSPEGSYDLNSNDPDPMPHPDVENGNHHGTRCAGEIAAVPNNSFCAVGVAYGSRIAGIRVLDGPLTDSMEAVAFNKHYQINDIYSCSWGPDDDGKTVDGPHQLGKAALQHGVIAGRQGFGSIFVVASGNGGQHNDNCNYDGYANSIYTVTIDRTSPACRGPWDFLDVSIPWEHLQAIIWRSPSCLHPTTAGAVDEEGRMPFYAEECASMLAVTFSGGDKMLRSIVTTDWDLQKGTGCTEGHTGTSAAAPLAAGMIALMLQVRPCLTWRDVQHIIVFTATRYEDRRAEWVTNEAGFSHSHQHGFGLLNAWRLVNAAKIWTSVPYLASYVSPVLKENKAIPQSPRSLEVLWNVSRMDLEMSGLKTLEHVAVTVSITHPRRGSLELKLFCPSGMMSLIGAPRSMDSDPNGFNDWTFSTVRCWGERARGTYRLVIRDVGDESFQVGILRQWQLTLYGSVWSAVDIRDRQRLLESAMSGKYLHDDFALPCPPGLKIPEEDGYTITPNTLKTLVLVGCFTVFWTVYYMLEVYLSQRNVASNQVCRSGPCHWPHRSRKAKEEGTELESVPLCSSKDPDEVETESRGPPTTSDLLAPDLLEQGDWSLSQNKSALDCPHQHLDVPHGKEEQIC

SEQ ID NO: 858711 - protein, 785 aa, Homo sapiens; identical to SEQ ID NO: 858709

SEQ ID NO: 858712 - protein, 144 aa, Homo sapiens
MPKGRQKVPHLDAPLGLPTCLWLELAGLFLLVPWVMGLAGTGGPDGQGTGGPSWAVHLESLEGDGEEETLEQQADALAQAAGLVNAGRIGELQGHYLFVQPAGHRPALEVEAIRQQVEAVLAGHEAVRWHSEQRLLITTCWKYI

SEQ ID NO: 858713 - protein, 785 aa, Homo sapiens; identical to SEQ ID NO: 858709

SEQ ID NO: 858714 - protein, 383 aa, Homo sapiens [sequence omitted]

SEQ ID NO: 858715 - protein, 333 aa, Homo sapiens
MPKGRQKVPHLDAPLGLPTCLWLELAGLFLLVPWVMGLAGTGGPDGQGTGGPSWAVHLESLEGDGEEETLEQQADALAQAAGLVNAGRIGELQGHYLFVQPAGHRPALEVEAIRQQVEAVLAGHEAVRWHSEQRLLRRAKRSVHFNDPKYPQQWHLNNRRSPGRDINVTGVWERNVTGRGVTVVVVDDGVEHTIQDIAPNYSPEGSYDLNSNDPDPMPHPDVENGNHHGTRCAGEIAAVPNNSFCAVGVAYGSRIAGIRVLDGPLTDSMEAVAFNKHYQINDIYSCSLLALCRIPGHPRHLSQHCPSRPGSAPTPDTSLNLNTRKEDTRSLEV

SEQ ID NO: 858716 - protein, 204 aa, Homo sapiens
PMSCSLTTLGLEHSLPRPATEPLERPSRSHIAPTEYSQLVPLSSCGCEGLLPLPQATITSHSHPEAGPGLEARTPELQLFSGQLSFWSAAEETKTRPPQARATKPPKPKSSWQRSCISSEKSETPGLPIDFPSCPYALVRLPLRSSLSNQEVRVPQGSSRAKSLPAREWEAWPHPATATLRAWAWHCSGVPLMERGGSRSGPGR

SEQ ID NO: 858717 - protein, 144 aa, Homo sapiens
GDLPLSDSGRGCLSEGQAFRLHSLPLTGIQEFCGPSHCHRAIAAAQALGTRQSGTPCSNTDEETEAPSASSSRPHGEWNSPYQPGKQTSLCHSRDNPLSSCSYLASGILGRDKRLKKGHIKTPSSWSLPSFHHPPASACTLSGL

SEQ ID NO: 858718 - protein, 204 aa, Homo sapiens; identical to SEQ ID NO: 858716

SEQ ID NO: 858719 - protein, 77 aa, Homo sapiens
LQGHYLFVQPAGHRPALEVEAIRQQVEAVLAGHEAVRWHSEQRLLRRAKRSVHFNDPKYPQQWHLVSPVLQFAVSGG

SEQ ID NO: 858720 - protein, 268 aa, Homo sapiens
RGKGHLRSPRGTLPGCFHGYYRRKCCWGKVSSLAHAFHLFLLCSFLRDPNGFNDWTFSTVRCWGERARGTYRLVIRDVGDESFQVGILRQWQLTLYGSVWSAVDIRDRQRLLESAMSGKYLHDDFALPCPPGLKIPEEDGYTITPNTLKTLVLVGCFTVFWTVYYMLEVYLSQRNVASNQVCRSGPCHWPHRSRKAKEEGTELESVPLCSSKDPDEVETESRGPPTTSDLLAPDLLEQGDWSLSQNKSALDCPHQHLDVPHGKEEQIC

SEQ ID NO: 858721 - protein, 785 aa, Homo sapiens; identical to SEQ ID NO: 858709

SEQ ID NO: 858722 - protein, 129 aa, Homo sapiens
QHNDNCNYDGYANKHYQINDITAAWGPDDDGKTVDGPHQLGKAALQHGVIAGRQGFGSIFVVASGNGGQHNDKSCFTRESCGRTAEQMADAHVGGESLGSHCHSSPATTLSSSASAQGNGLPAGGQLSA

SEQ ID NO: 858723 - protein, 676 aa, Homo sapiens
MPKGRQKVPHLDAPLGLPTCLWLELAGLFLLVPWVMGLAGTGGPDGQGTGGPSWAVHLESLEGDGEEETLEQQADALAQAAGLVNAGRIGELQGHYLFVQPAGHRPALEVEAIRQQVEAVLAGHEAVRWHSEQRLLRRAKRSVHFNDPKYPQQWHLNNRRSPGRDINVTGVWERNVTGRGVTVVVVDDGVEHTIQDIAPNYSPEGSYDLNSNDPDPMPHPDVENGNHHGTRCAGEIAAVPNNSFCAVGVAYGSRIAGIRVLDGPLTDSMEAVAFNKHYQINDIYSCSWGPDDDGKTVDGPHQLGKAALQHGVIAGRQGFGSIFVVASGNGGQHNDNCNYDGYANSIYTVTIGAVDEEGRMPFYAEECASMLAVTFSGGDKMLRSIVTTDWDLQKGTGCTEGHTGTSAAAPLAAGMIALMLQVRPCLTWRDVQHIIVFTATRYEDRRAEWVTNEAGFSHSHQHGFGLLNAWRLVNAAKIWTSVPYLASYVSPVLKENKAIPQSPRSLEVLWNVSRMDLEMSGLKTLEHVAVTVSITHPRRGSLELKLFCPSGMMSLIGAPRSMDSDPNGFNDWTFSTVRCWGERARGTYRLVIRDVGDESFQVGILRQWQLTLYGSVWSAVDIRDRQRLLESAMSGKYLHDDFALPCPPGLKIPEEDGYTITPNTLKVLRPEDSSCG

SEQ ID NO: 858724 - protein, 865 aa, Homo sapiens
MPKGRQKVPHLDAPLGLPTCLWLELAGLFLLVPWVMGLAGTGGPDGQGTGGPSWAVHLESLEGDGEEETLEQQADALAQAAGLVNAGRIGELQGHYLFVQPAGHRPALEVEAIRQQVEAVLAGHEAVRWHSEQRLLRRAKRSVHFNDPKYPQQWHLNNRRSPGRDINVTGVWERNVTGRGVTVVVVDDGVEHTIQDIAPNYSPEGSYDLNSNDPDPMPHPDVENGNHHGTRCAGEIAAVPNNSFCAVGVAYGSRIAGIRVLDGPLTDSMEAVAFNKHYQINDIYSCSWGPDDDGKTVDGPHQLGKAALQHGVIAGRQGFGSIFVVASGNGGQHNDNCNYDGYANSIYTVTIGSHPMFLCSCVCVTEGLGHHTSCPSFCVCLNVLSTIISLGSDRTSPACRGPWDFLDVSIPWEHLQAIIWRSPSCLHPTTAGAVDEEGRMPFYAEECASMLAVTFSGGDKMLRSIVTTDWDLQKGTGCTEGHTGTSAAAPLAAGMIALMLQVRPCLTWRDVQHIIVFTATRYEDRRAEWVTNEAGFSHSHQHGFGLLNAWRLVNAAKIWTSVPYLASYVSPVLKENKAIPQSPRSLEVLWNVSRMDLEMSGLKTLEHVAVTVSITHPRRGSLELKLFCPSGMMSLIGAPRSMDSDPNGFNDWTFSTVRCWGERARGTYRLVIRDVGDESFQVGILRQWQLTLYGSVWSAVDIRDRQRLLESAMSGKYLHDDFALPCPPGLKIPEEDGYTITPNTLKTLVLVGCFTVFWTVYYMLEVYLSQRNVASNQVCRSGPCHWPHRSRKAKEEGTELESVPLCSSKDPDEVETESRGPPTTSDLLAPDLLEQGDWSLSQNKSALDCPHQHLDVPHGKEEQIC

SEQ ID NO: 858725 - protein, 268 aa, Homo sapiens; identical to SEQ ID NO: 858720

SEQ ID NO: 858726 - protein, 103 aa, Homo sapiens [sequence omitted]

SEQ ID NO: 858727 - protein, 176 aa, Homo sapiens [sequence omitted]

SEQ ID NO: 858728 - protein, 513 aa, Homo sapiens [sequence omitted]

SEQ ID NO: 858729 - protein, 279 aa, Homo sapiens
GTGRSCPGAVTIASVTEPQSLARAEGTTRVWVRQAKRDGCSQGAGGGPGSGLALSALTDDLPRSSVACHAGLGGPSVAAHLKANDMLSLLQLALCEFPLMLLRFLHKPVGISTVVPIILGHCQAAQSHQGPLHCCHVFAFKEVNSLEHVSLDDPIVLSRLQELSHLLHLLEDHGGWVLGHLHRLGAIRVQAVHQLAQNHAILQPDLEAQAPTVWAAHIRATLQHDPLHQPLLQLLVILLLDFGLHFAAHAIGRTLVGHVWGKLSTDVTLGCCAFSPVFV

SEQ ID NO: 858730 - protein, 333 aa, Homo sapiens
GTGRSCPGAVTIASVTEPQSLARAEGTTRVWVRQAKRDGCSQGAGGGPGSGLALSALTDDLPRSSVACHAGLGGPSVAAHLKANDMLSLLQLALCEFPLMLLRFLHKPVGISTVVPIILGHCQAAQSHQGPLHCCHVFAFKEVNSLEHVSLDDPIVLSRLQELSHLLHLLEDHGGWVLGHLHRLGAIRVQAVHQLAQNHAILQPDLEAQAPTVWAAHIRATLQHDPLHQPLLQLLVILLLDFGLHFAAHAIGRTLVGHVWGKLKQARVEEGGAEGQGAALLSPVPGSLLALCRIPGHPRHLSQHCPSRPGSAPTPDTSLNLNTRKEDTRSLEV

SEQ ID NO: 858731 - protein, 294 aa, Homo sapiens
KIWHHTFYNELRVAPEEHPVLLTEAPLNPKANREKMTQIMFETFNTPAMYVAIQAVLSLYASGRTTGIVMDSGDGVTHTVPIYEGYALPHAILRLDLAGRDLTDYLMKILTERGLAAFHHPRAEREIVRDIKEKLCYVALDFEQEMATAASSSSLEKSYELPDGQVITIGNERFRCPEALFQPSFLGMESCGIHETTFNSIMKCDVDIRKDLYANTVLSGGTTMYPGIADRMQKEITALASSTMKIKLIAPPERKYSVWIGGSILASLSTFQQMWISKQEYDESGPSIVHRKCF

SEQ ID NO: 858732 - protein, 294 aa, Homo sapiens; identical to SEQ ID NO: 858731

SEQ ID NO: 858733 - protein, 294 aa, Homo sapiens; identical to SEQ ID NO: 858731

SEQ ID NO: 858734 - protein, 294 aa, Homo sapiens; identical to SEQ ID NO: 858731

SEQ ID NO: 858735 - protein, 294 aa, Homo sapiens; identical to SEQ ID NO: 858731

SEQ ID NO: 858736 - protein, 320 aa, Homo sapiens
RRGKRFGAGAGLPAAPQVAGRLGLGCPLHLHVFAVVSAMLPLLRCVPRVLGSSVAGLRAAAPASPFRQLLQPAPRLCTRPFGLLSVRAGSERRPGLLRPRGPCACGCGCGSLHTDGDKAFVDFLSDEIKEERKIQKHKTLPKMSGGWELELNGTEAKLVRKVAGEKITVTFNINNSIPPTFDGEEEPSQGQKVEEQEPELTSTPNFVVEVIKNDDGKKALVLDCHYPEDEVGQEDEAESDIFSIREVSFQSTGESEWKDTNYTLNTDSLDWALYDHLMDFLADRGVDNTFADELVELSTALEHQEYITFLEDLKSFVKSQ

SEQ ID NO: 858737 - protein, 73 aa, Homo sapiens
SRGEKSILMFITDFFLTSKYCSLQALYDHLMDFLADRGVDNTFADELVELSTALEHQEYITFLEDLKSFVKSQ

SEQ ID NO: 858738 - protein, 194 aa, Homo sapiens
MQVIVMSATMDVDLFSQYFNGAPVLYLEGRQHPIQVFYTKQPQNDYLHAALVSVFQIHQEAPSSQDILVFLTGQEEIEAMSKTCRDIAKHLPDGCPAMLVLPLYASLPYAQQLRVFQGAPKGIASDHSTKSLNSKTLREYDMCMNTSACKATEVYPDTDIRGKPSRGTKNNGWRRRRGSKKDAGTLNGTTGGRN

SEQ ID NO: 858739 - protein, 320 aa, Homo sapiens; identical to SEQ ID NO: 858736

SEQ ID NO: 858740 - protein, 320 aa, Homo sapiens; identical to SEQ ID NO: 858736

SEQ ID NO: 858741 - protein, 320 aa, Homo sapiens; identical to SEQ ID NO: 858736

SEQ ID NO: 858742 - protein, 320 aa, Homo sapiens; identical to SEQ ID NO: 858736

SEQ ID NO: 858743 - protein, 282 aa, Homo sapiens
MLPLLRCVPRVLGSSVAGLRAAAPASPFRQLLQPAPRLCTRPFGLLSVRAGSERRPGLLRPRGPCACGCGCGSLHTDGDKAFVDFLSDEIKEERKIQKHKTLPKMSGGWELELNGTEAKLVRKVAGEKITVTFNINNSIPPTFDGEEEPSQGQKVEEQEPELTSTPNFVVEVIKNDDGKKALVLDCHYPEDEVGQEDEAESDIFSIREVSFQSTGESEWKDTNYTLNTDSLDWALYDHLMDFLADRGVDNTFADELVELSTALEHQEYITFLEDLKSFVKSQ

SEQ ID NO: 858744 - protein, 314 aa, Homo sapiens
RRGKRFGAGAGLPAAPQVAGRLGLGCPLHLHVFAVVSAMLPLLRCVPRVLGSSVAGLRAAAPASPFRQLLQPAPRLCTRPFGLLSVRAGSERRPGLLRPRGPCACGCGCGSLHTDGDKAFVDFLSDEIKEERKIQKHKTLPKMSGGWELELNGTEAKLVRKVAGEKITVTFNINNSIPPTFDGEEEPSQGQKVEEQEPELTSTPNFVVEVIKNDDGKKALVLDCHYPEDEVGQEDEAESDIFSIREVSFQSTGESEWKDTNYTLNTDSLDWALYDHLMDFLADRGVDNTFADELVERPRRLLFLSLEFGDAYDV

SEQ ID NO: 858745 - protein, 317 aa, Homo sapiens
RRGKRFGAGAGLPAAPQVAGRLGLGCPLHLHVFAVVSAMLPLLRCVPRVLGSSVAGLRAAAPASPFRQLLQPAPRLCTRPFGLLSVRAGSERRPGLLRPRGPCACGCGCGSLHTDGDKAFVDFLSDEIKEERKIQKHKTLPKMSGGWELELNGTEAKLVRKVAGEKITVTFNINNSIPPTFDGEEEPSQGQKVEEQEPELTSTPNFVVEVIKNDDGKKALVLDCHYPEDEVGQEDEAESDIFSIREVSFQSTGESEWKDTNYTLNTDSLDWALYDHLMDFLADRGVDNTFADELVERRRCALFVPSADFYTVTSCWL

SEQ ID NO: 858746 - protein, 312 aa, Homo sapiens
GGGPRCSPVPPYGSACPLYSADCPDYCYVMAGVCCTTMCRSVGSSVAGLRAAAPASPFRQLLQPAPRLCTRPFGLLSVRAGSERRPGLLRPRGPCACGCGCGSLHTDGDKAFVDFLSDEIKEERKIQKHKTLPKMSGGWELELNGTEAKLVRKVAGEKITVTFNINNSIPPTFDGEEEPSQGQKVEEQEPELTSTPNFVVEVIKNDDGKKALVLDCHYPEDEVGQEDEAESDIFSIREVSFQSTGESEWKDTNYTLNTDSLDWALYDHLMDFLADRGVDNTFADELVELSTALEHQEYITFLEDLKSFVKSQ

SEQ ID NO: 858747 - protein, 773 aa, Homo sapiens
MPEEAGFPPAKRFRPGSGPPSRAGSFPPGRQVVMLLTAGSGGRGGGGGRRQQPPLAQPSASPYPEAVELQRRSLPIFQARGQLLAQLRNLDNAVLIGGYTVRFDDVTSEDTRIKFLTDGMLLREAISDSLLRKYSCVILDEAHERTIHTDVLFGVVKAAQKRRKELGKLPLKVIVMSATMDVDLFSQYFNGAPVLYLEGRQHPIQVFYTKQPQNDYLHAALVSVFQIHQEAPSSQDILVFLTGQEEIEAMSKTCRDIAKHLPDGCPAMLVLPLYASLPYAQQLRVFQGAPKGYRKVIISTNIAETSITITGIKYVVDTGMVKAKKYNPDSGLEVLAVQRVSKTQAWQRTGRAGREDSGICYRLYTEDEFEKFDKMTVPEIQRCNLASVMLQLLAMKVPNVLTFDFMSKPSPDHIQAAIAQLDLLGALEHKDDQLTLTPMGRKMAAFPLEPKFAKTILMSPKFHCTEEILTIVSLLSVDSVLHNPPSRREEVQGVRKKFISSEGDHMTLLNIYRTFKNLGGNKDWCKENFVNSKNMTLVAEVRAQLRDICLKVSSGPSVLWVTSCHFVQGDKAFVDFLSDEIKEERKIQKHKTLPKMSGGWELELNGTEAKLVRKVAGEKITVTFNINNSIPPTFDGEEEPSQGQKVEEQEPELTSTPNFVVEVIKNDDGKKALVLDCHYPEDEVGQEDEAESDIFSIREVSFQSTGESEWKDTNYTLNTDSLDWALYDHLMDFLADRGVDNTFADELVELSTALEHQEYITFLEDLKSFVKSQ

SEQ ID NO: 858748 - protein, 359 aa, Homo sapiens
RRGKRFGAGAGLPAAPQVAGRLGLGCPLHLHVFAVVSAMLPLLRCVPRVLGSSVAGLRAAAPASPFRQLLQPAPRLCTRPFGLLSVRAGSERRPGLLRPRGPCACGCGCGSLHTDGDKAFVDFLSDEIKEERKIQKHKTLPKMSGGWELELNGTEAKLVRKVAGEKVLLCLQAGEQWRDLGSLQPPPPRFKQFSCLSLLSSWDYRITVTFNINNSIPPTFDGEEEPSQGQKVEEQEPELTSTPNFVVEVIKNDDGKKALVLDCHYPEDEVGQEDEAESDIFSIREVSFQSTGESEWKDTNYTLNTDSLDWALYDHLMDFLADRGVDNTFADELVELSTALEHQEYITFLEDLKSFVKSQ

SEQ ID NO: 858749 - protein, 653 aa, Homo sapiens
MPEEAGFPPAKRFRPGSGPPSRAGSFPPGRQVVMLLTAGSGGRGGGGGRRQQPPLAQPSASPYPEAVELQRRSLPIFQARGQLLAQLRNLDNAVLIGGYTVRFDDVTSEDTRIKFLTDGMLLREAISDSLLRKYSCVILDEAHERTIHTDVLFGVVKAAQKRRKELGKLPLKVIVMSATMDVDLFSQYFNGAPVLYLEGRQHPIQVFYTKQPQNDYLHAALVSVFQIHQEAPSSQDILVFLTGQEEIEAMSKTCRDIAKHLPDGCPAMLVLPLYASLPYAQQLRVFQGAPKGYRKVIISTNIAETSITITGIKYVVDTGMVKAKKYNPDSGLEVLAVQRVSKTQAWQRTGRAGREDSGICYRLYTEDEFEKFDKMTVPEIQRCNLASVMLQLLAMKVPNVLTFDFMSKPSPDHIQAAIAQLDLLGALEHKDDQLTLTPMGRKMAAFPLEPKFAKTILMSPKFHCTEEILTIVSLLSVDSVLHNPPSRREEVQGVRKKFISSEGDHMTLLNIYRTFKNLGGNKDWCKENFVNSKNMTLVAEVRAQLRDICLKMSMPIASSRGDVESVRRCLAHSLFMSTAELQPDGTYATTDTHQPVAIHPSSVLFHCKPACVVYTELLYTNKCYMRDLCVIDAQWLYEAAPEYFRRKLRTARN

SEQ ID NO: 858750 - protein, 287 aa, Homo sapiens
RRGKRFGAGAGLPAAPQVAGRLGLGCPLHLHVFAVVSAMLPLLRCVPRVLGSSVAGLRAAAPASPFRQLLQPAPRLCTRPFGLLSVRAGSERRPGLLRPRGPCACGCGCGSLHTDGDKAFVDFLSDEIKEERKIQKHKTLPKMSGGWELELNGTEAKLVRKVAGEKITVTFNINNSIPPTFDGEEEPSQGQKVEEQEVGQEDEAESDIFSIREVSFQSTGESEWKDTNYTLNTDSLDWALYDHLMDFLADRGVDNTFADELVELSTALEHQEYITFLEDLKSFVKSQ

SEQ ID NO: 858751 - protein, 653 aa, Homo sapiens; identical to SEQ ID NO: 858749

SEQ ID NO: 858752 - protein, 268 aa, Homo sapiens
RRGKRFGAGAGLPAAPQVAGRLGLGCPLHLHVFAVVSAMLPLLRCVPRVLGSSVAGLRAAAPASPFRQLLQPAPRLCTRPFGLLSVRAGSERRPGLLRPRGPCACGCGCGSLHTDGDKAFVDFLSDEIKEERKIQKHKTLPKMSGGWELELNGTEAKLVRKVAGEKITVTFNINNSIPPTFDGEEEPSQGQKVEEQEPELTSTPNFVVEVIKNDDGKKALVLDCHYPEDEWTRRRGVKPRKQVCTKRAHQRKNRTVVQPAKPLNTSTN

SEQ ID NO: 858753 - protein, 181 aa, Homo sapiens
RRGKRFGAGAGLPAAPQVAGRLGLGCPLHLHVFAVVSAMLPLLRCVPRVLGSSVAGLRAAAPASPFRQLLQPAPRLCTRPFGLLSVRAGSERRPGLLRPRGPCACGCGCGSLHTDGDKAFVDFLSDEIKEERKIQKHKTLPKMSGGWELELNGTEAKLVRKVAGEKRNPRKGRRLKNRSLN

SEQ ID NO: 858754 - protein, 80 aa, Homo sapiens
TMDVDLFSQYFNGAPVLYLEGRQHPIQVFYTKQPQNDYLHAALVSVFQIHQVWCWGQIPEKFSFILQLVVRTLSLEKKSY

SEQ ID NO: 858755 - protein, 320 aa, Homo sapiens; identical to SEQ ID NO: 858736

SEQ ID NO: 858756 - protein, 91 aa, Homo sapiens
TQHRFASGLKANFPDEEVSFQSTGESEWKDTNYTLNTDSLDWALYDHLMDFLADRGVDNTFADELVELSTALEHQEYITFLEDLKSFVKSQ

SEQ ID NO: 858757 - protein, 404 aa, Homo sapiens [sequence omitted]

SEQ ID NO: 858758 - protein, 707 aa, Homo sapiens
MPEEAGFPPAKRFRPGSGPPSRAGSFPPGRQVVMLLTAGSGGRGGGGGRRQQPPLAQPSASPYPEAVELQRRSLPIFQARGQLLAQLRNLDNAVLIGETGSGKTTQIPQYLYEGGISRQGIIAVTQPRRVAAISLATRVSDEKRTELGKLVGYTVRFDDVTSEDTRIKFLTDGMLLREAISDSLLRKYSCVILDEAHERTIHTDVLFGVVKAAQKRRKELGKLPLKVIVMSATMDVDLFSQYFNGAPVLYLEGRQHPIQVFYTKQPQNDYLHAALVSVFQIHQEAPSSQDILVFLTGQEEIEAMSKTCRDIAKHLPDGCPAMLVLPLYASLPYAQQLRVFQGAPKGYRKVIISTNIAETSITITGIKYVVDTGMVKAKKYNPDSGLEVLAVQRVSKTQAWQRTGRAGREDSGICYRLYTEDEFEKFDKMTVPEIQRCNLASVMLQLLAMKVPNVLTFDFMSKPSPDHIQAAIAQLDLLGALEHKDDQLTLTPMGRKMAAFPLEPKFAKTILMSPKFHCTEEILTIVSLLSVDSVLHNPPSRREEVQGVRKKFISSEGDHMTLLNIYRTFKNLGGNKDWCKENFVNSKNMTLVAEVRAQLRDICLKMSMPIASSRGDVESVRRCLAHSLFMSTAELQPDGTYATTDTHQPVAIHPSSVLFHCKPACVVYTELLYTNKCYMRDLCVIDAQWLYEAAPEYFRRKLRTARN

SEQ ID NO: 858759 - protein, 67 aa, Homo sapiens
GICVECIISILPFRFLDWALYDHLMDFLADRGVDNTFADELVELSTALEHQEYITFLEDLKSFVKSQ

SEQ ID NO: 858760 - protein, 67 aa, Homo sapiens
  misc_feature (55)..(55): Xaa can be any naturally occurring amino acid
ASRRAFFAAGQSFCQLNKRKKTPPPTPNISTRIFFSFHPQFGWAPKGELIFRHPXVNKSYSEARHVL

SEQ ID NO: 858761 - protein, 320 aa, Homo sapiens; identical to SEQ ID NO: 858736

SEQ ID NO: 858762 - protein, 320 aa, Homo sapiens; identical to SEQ ID NO: 858736

SEQ ID NO: 858763 - protein, 319 aa, Homo sapiens
RITRQFPVLISLPGLAYVDLVARLLLHQCHVFAVVSAMLPLLRCVPRVLGSSVAGLRAAAPASPFRQLLQPAPRLCTRPFGLLSVRAGSERRPGLLRPRGPCACGCGCGSLHTDGDKAFVDFLSDEIKEERKIQKHKTLPKMSGGWELELNGTEAKLVRKVAGEKITVTFNINNSIPPTFDGEEEPSQGQKVEEQEPELTSTPNFVVEVIKNDDGKKALVLDCHYPEDEVGQEDEAESDIFSIREVSFQSTGESEWKDTNYTLNTDSLDWALYDHLMDFLADRGVDNTFADELVELSTALEHQEYITFLEDLKSFVKSQ

SEQ ID NO: 858764 - protein, 325 aa, Homo sapiens
RRGKRFGAGAGLPAAPQVAGRLGLGCPLHLHVFAVVSAMLPLLRCVPRVLGSSVAGLRAAAPASPFRQLLQPAPRLCTRPFGLLSVRAGSERRPGLLRPRGPCACGCGCGSLHTDGDKAFVDFLSDEIKEERKIQKHKTLPKMSGGWELELNGTEAKLVRKVAGEKITVTFNINNSIPPTFDGEEEPSQGQKVEEQEPELTSTPNFVVEVIKNDDGKKALVLDCHYPEDEVGQEDEAESDIFSIREVSFQSTGESEWKDTNYTLNTDSLDWALYDHLMDFLADRGVDNTFADELVELKTALLLPSVLLPSTLVLLFNIESADGRR

SEQ ID NO: 858765 - protein, 181 aa, Homo sapiens; identical to SEQ ID NO: 858753

SEQ ID NO: 858766 - protein, 292 aa, Homo sapiens
RRGKRFGAGAGLPAAPQVAGRLGLGCPLHLHVFAVVSAMLPLLRCVPRVLGSSVAGLRAAAPASPFRQLLQPAPRLCTRPFGLLSVRAGSERRPGLLRPRGPCACGCGCGSLHTDGDKAFVDFLSDEIKEERKIQKHKTLPKMSGGWELELNGTEAKLVRKVAGEKITVTFNINNSIPPTFDGEEEPSQGQKVEEQEPELTSTPNFVVEVIKNDDGKKALVLDCHYPEDEVGQEDEAESDIFSIREVSFQSTGESEWKDTNYTSAQPWSTRSTLLFLKTSRVLSRASRADRC

SEQ ID NO: 858767 - protein, 116 aa, Homo sapiens
PPARYGCEKTTEGKALVLDCHYPEDEVGQEDEAESDIFSIREVSFQSTGESEWKDTNYTLNTDSLDWALYDHLMDFLADRGVDNTFADELVELSTALEHQEYITFLEDLKSFVKSQ

SEQ ID NO: 858768 - protein, 198 aa, Homo sapiens
RRGKRFGAGAGLPAAPQVAGRLGLGCPLHLHVFAVVSAMLPLLRCVPRVLGSSVAGLRAAAPASPFRQLLQPAPRLCTRPFGLLSVRAGSERRPGLLRPRGPCACGCGCGSLHTDGDKAFVDFLSDEIKEERKIQKHKTLPKMSGGWELELNGTEAKLVRKVAGEKITVTFNINNSIPPTFDGEEEPSQGQKVEEQEP

SEQ ID NO: 858769 - protein, 227 aa, Homo sapiens
MPEEAGFPPAKRFRPGSGPPSRAGSFPPGRQVVMLLTAGSGGRGGGGGRRQQPPLAQPSASPYPEAVELQRRSLPIFQARGQLLAQLRNLDNAVLIGETGSGKTTQIPQYLYEGGISRQGIIAVTQPRRVAAISLATRVSDEKRTELGKLVGYTVRFDDVTSEDTRIKFLTDGMLLREAISDSLLRKYSCVILDEAHERTIHTDVLFGVVKAAQKRRKELGKLPLKV

SEQ ID NO: 858770 - protein, 1211 aa, Homo sapiens
PALQGDSSAQPAEALRPVQPRRPLAEKAAAEERPSYRPPPAPPQPRRRRRRRHCPPSPRRRILNGNMAVPARTCGASRPGPARTARPWPGCGPHPGPGTRRPTSGPPRPLWLLLPLLPLLAAPGASAYSFPQQHTMQHWARRLEQEVDGVMRIFGGVQQLREIYKDNRNLFEVQENEPQKLVEKVAGDIESLLDRKVQALKRLADAAENFQKAHRWQDNIKEEDIVYYDAKADAELDDPESEDVERGSKASTLRLDFIEDPNFKNKVNYSYAAVQIPTDIYKGSTVILNELNWTEALENVFMENRRQDPTLLWQVFGSATGVTRYYPATPWRAPKKIDLYDVRRRPWYIQGASSPKDMVIIVDVSGSVSGLTLKLMKTSVCEMLDTLSDDDYVNVASFNEKAQPVSCFTHLVQANVRNKKVFKEAVQGMVAKGTTGYKAGFEYAFDQLQNSNITRANCNKMIMMFTDGGEDRVQDVFEKYNWPNRTVRVFTFSVGQHNYDVTPLQWMACANKGYYFEIPSIGAIRINTQEYLDVLGRPMVLAGKEAKQVQWTNVYEDALGLGLVVTGTLPVFNLTQDGPGEKKNQLILGVMGIDVALNDIKRLTPNYTLGANGYVFAIDLNGYVLLHPNLKPQTTNFREPVTLDFLDAELEDENKEEIRRSMIDGNKGHKQIRTLVKSLDERYIDEVTRNYTWVPIRSTNYSLGLVLPPYSTFYLQANLSDQILQVKYFEFLLPSSFESEGHVFIAPREYCKDLNASDNNTEFLKNFIELMEKVTPDSKQCNNFLLHNLILDTGITQQLVERVWRDQDLNTYSLLAVFAATDGGITRVFPNKAAEDWTENPEPFNASFYRRSLDNHGYVFKPPHQDALLRPLELENDTVGILVSTAVELSLGRRTLRPAVVGVKLDLEAWAEKFKVLASNRTHQDQPQKCGPNSHCEMDCEVNNEDLLCVLIDDGGFLVLSNQNHQWDQVGRFFSEVDANLMLALYNNSFYTRKESYDYQAACAPQPPGNLGAAPRGVFVPTVADFLNLAWWTSAAAWSLFQQLLYGLIYHSWFQADPAEAEGSPETRESSCVMKQTQYYFGSVNASYNAIIDCGNCSRLFHAQRLTNTNLLFVVAEKPLCSQCEAGRLLQKETHCPADGPEQCELVQRPRYRRGPHICFDYNATEDTSDCGRGASFPPSLGVLVSLQLLLLLGLPPRPQPQVLVHASRRL

SEQ ID NO: 858771 - protein, 1076 aa, Homo sapiens
MQHWARRLEQEVDGVMRIFGGVQQLREIYKDNRNLFEVQENEPQKLVEKVAGDIESLLDRKVQALKRLADAAENFQKAHRWQDNIKEEDIVYYDAKADAELDDPESEDVERGSKASTLRLDFIEDPNFKNKVNYSYAAVQIPTDIYKGSTVILNELNWTEALENVFMENRRQDPTLLWQVFGSATGVTRYYPATPWRAPKKIDLYDVRRRPWYIQGASSPKDMVIIVDVSGSVSGLTLKLMKTSVCEMLDTLSDDDYVNVASFNEKAQPVSCFTHLVQANVRNKKVFKEAVQGMVAKGTTGYKAGFEYAFDQLQNSNITRANCNKMIMMFTDGGEDRVQDVFEKYNWPNRTVRVFTFSVGQHNYDVTPLQWMACANKGYYFEIPSIGAIRINTQEYLDVLGRPMVLAGKEAKQVQWTNVYEDALGLGLVVTGTLPVFNLTQDGPGEKKNQLILGVMGIDVALNDIKRLTPNYTLGANGYVFAIDLNGYVLLHPNLKPQTTNFREPVTLDFLDAELEDENKEEIRRSMIDGNKGHKQIRTLVKSLDERYIDEVTRNYTWVPIRSTNYSLGLVLPPYSTFYLQANLSDQILQVKYFEFLLPSSFESEGHVFIAPREYCKDLNASDNNTEFLKNFIELMEKVTPDSKQCNNFLLHNLILDTGITQQLVERVWRDQDLNTYSLLAVFAATDGGITRVFPNKAAEDWTENPEPFNASFYRRSLDNHGYVFKPPHQDALLRPLELENDTVGILVSTAVELSLGRRTLRPAVVGVKLDLEAWAEKFKVLASNRTHQDQPQKCGPNSHCEMDCEVNNEDLLCVLIDDGGFLVLSNQNHQWDQVGRFFSEVDANLMLALYNNSFYTRKESYDYQAACAPQPPGNLGAAPRGVFVPTVADFLNLAWWTSAAAWSLFQQLLYGLIYHSWFQADPAEAEGSPETRESSCVMKQTQYYFGSVNASYNAIIDCGNCSRLFHAQRLTNTNLLFVVAEKPLCSQCEAGRLLQKETHCPADGPEQCELVQRPRYRRGPHICFDYNATEDTSDCGRGASFPPSLGVLVSLQLLLLLGLPPRPQPQVLVHASRRL

SEQ ID NO: 858772 - protein, 1141 aa, Homo sapiens
MQHWARRLEQEVDGVMRIFGGVQQLREIYKDNRNLFEVQENEPQKLVEKVAGDIESLLDRKVQALKRLADAAENFQKAHRWQDNIKEEDIVYYDAKADAELDDPESEDVERGSKASTLRLDFIEDPNFKNKVNYSYAAVQIPTDIYKGSTVILNELNWTEALENVFMENRRQDPTLLWQVFGSATGVTRYYPATPWRAPKKIDLYDVRRRPWYIQGASSPKDMVIIVDVSGSVSGLTLKLMKTSVCEMLDTLSDDDYVNVASFNEKAQPVSCFTHLVQANVRNKKVFKEAVQGMVAKGTTGYKAGFEYAFDQLQNSNITRANCNKMIMMFTDGGEDRVQDVFEKYNWPNRTVRVFTFSVGQHNYDVTPLQWMACANKGYYFEIPSIGAIRINTQEYLDVLGRPMVLAGKEAKQVQWTNVYEDALGLGLVVTGTLPVFNLTQDGPGEKKNQLILGVMGIDVALNDIKRLTPNYTLGANGYVFAIDLNGYVLLHPNLKPQTTNFREPVTLDFLDAELEDENKEEIRRSMIDGNKGHKQIRTLVKSLDERYIDEVTRNYTWVPIRSTNYSLGLVLPPYSTFYLQANLSDQILQVKYFEFLLPSSFESEGHVFIAPREYCKDLNASDNNTEFLKNFIELMEKVTPDSKQCECLAGQLALGSAQAAWGQPRGTQRPGRCGNKQAQAKGWAWARARSWRRLLVDLKGGGEGGQGAARRCPHPHPSPPVPGNNFLLHNLILDTGITQQLVERVWRDQDLNTSLPLGCSRAAEDWTENPEPFNASFYRRSLDNHGYVFKPPHQDALLRPLELENDTVGILVSTAVELSLGRRTLRPAVVGVKLDLEAWAEKFKVLASNRTHQDQPQKCGPNSHCEMDCEVNNEDLLCVLIDDGGFLVLSNQNHQWDQVGRFFSEVDANLMLALYNNSFYTRKESYDYQAACAPQPPGNLGAAPRGVFVPTVADFLNLAWWTSAAAWSLFQQLLYGLIYHSWFQADPAEAEGSPETRESSCVMKQTQYYFGSVNASYNAIIDCGNCSRLFHAQRLTNTNLLFVVAEKPLCSQCEAGRLLQKETHCPADGPEQCELVQRPRYRRGPHICFDYNATEDTSDCGRGASFPPSLGVLVSLQLLLLLGLPPRPQPQVLVHASRRL

SEQ ID NO: 858773 - protein, 1191 aa, Homo sapiens
MQHWARRLEQEVDGVMRIFGGVQQLREIYKDNRNLFEVQENEPQKLVEKVAGDIESLLDRKVQALKRLADAAENFQKAHRWQDNIKEEDIVYYDAKADAELDDPESEDVERGSKASTLRLDFIEDPNFKNKVNYSYAAVQIPTDIYKGSTVILNELNWTEALENVFMENRRQDPTLLWQVFGSATGVTRYYPATPWRAPKKIDLYDVRRRPWYIQGASSPKDMVIIVDVSGSVSGLTLKLMKTSVCEMLDTLSDDDYVNVASFNEKAQPVSCFTHLVQANVRNKKVFKEAVQGMVAKGTTGYKAGFEYAFDQLQNSNITRANCNKMIMMFTDGGEDRVQDVFEKYNWPNRTVRVFTFSVGQHNYDVTPLQWMACANKGYYFEIPSIGAIRINTQEYLDVLGRPMVLAGKEAKQVQWTNVYEDALGLGLVVTGTLPVFNLTQDGPGEKKNQLILGVMGIDVALNDIKRLTPNYTLGANGYVFAIDLNGYVLLHPNLKPQTTNFREPVTLDFLDAELEDENKEEIRRSMIDGNKGHKQIRTLVKSLDERYIDEVTRNYTWVPIRSTNYSLGLVLPPYSTFYLQANLSDQILQVKYFEFLLPSSFESEGHVFIAPREYCKDLNASDNNTEFLKNFIELMEKVTPDSKQCECLAGQLALGSAQAAWGQPRGTQRPGRCGNKQAQAKGWAWARARSWRRLLVDLKGGGEGGQGAARRCPHPHPSPPVPGNNFLLHNLILDTGITQQLVERVWRDQDLNTSLPLGCSRAAEDWTENPEPFNASFYRRSLDNHGYVFKPPHQDALLRPLELENDTVGILVSTAVELSLGRRTLRPAVVGVKLDLEAWAEKFKVLASNRTHQDQPQKCGPNSHCEMDCEVNNEDLLCVLIDDGGFLVLSNQNHQWDQVGRFFSEVDANLMLALYNNSFYTRKESYDYQAACAPQPPGNLGAAPRGVFVPTVADFLNLAWWTSAAAWSLFQQLLYGLIYHSWFQAGRKGFGGASSSPGPQSELRRLHGEGGVYDRGRPETLPGSVGGAEALWALADPAEAEGSPETRESSCVMKQTQYYFGSVNASYNAIIDCGNCSRLFHAQRLTNTNLLFVVAEKPLCSQCEAGRLLQKETHCPADGPEQCELVQRPRYRRGPHICFDYNATEDTSDCGRGASFPPSLGVLVSLQLLLLLGLPPRPQPQVLVHASRRL

SEQ ID NO: 858774 - protein, 138 aa, Homo sapiens
MKQTQYYFGSVNASYNAIIDCGNCSRLFHAQRLTNTNLLFVVAEKPLCSQCEAGRLLQKETHCPADGPEQCELVQRPRYRRGPHICFDYNATEDTSDCGRGASFPPSLGVLVSLQLLLLLGLPPRPQPQVLVHASRRL

SEQ ID NO: 858775 - protein, 699 aa, Homo sapiens
MQHWARRLEQEVDGVMRIFGGVQQLREIYKDNRNLFEVQENEPQKLVEKVAGDIESLLDRKVQALKRLADAAENFQKAHRWQDNIKEEDIVYYDAKADAELDDPESEDVERGSKASTLRLDFIEDPNFKNKVNYSYAAVQIPTDIYKGSTVILNELNWTEALENVFMENRRQDPTLLWQVFGSATGVTRYYPATPWRAPKKIDLYDVRRRPWYIQGASSPKDMVIIVDVSGSVSGLTLKLMKTSVCEMLDTLSDDDYVNVASFNEKAQPVSCFTHLVQANVRNKKVFKEAVQGMVAKGTTGYKAGFEYAFDQLQNSNITRANCNKMIMMFTDGGEDRVQDVFEKYNWPNRTVRVFTFSVGQHNYDVTPLQWMACANKGYYFEIPSIGAIRINTQEYLDVLGRPMVLAGKEAKQVQWTNVYEDALGLGLVVTGTLPVFNLTQDGPGEKKNQLILGVMGIDVALNDIKRLTPNYTLGANGYVFAIDLNGYVLLHPNLKPQTTNFREPVTLDFLDAELEDENKEEIRRSMIDGNKGHKQIRTLVKSLDERYIDEVTRNYTWVPIRSTNYSLGLVLPPYSTFYLQANLSDQILQVKYFEFLLPSSFESEGHVFIAPREYCKDLNASDNNTEFLKNFIELMEKVTPDSKQCECLAGQLALGSAQAAWGQPRGTQRPGRCGNKQAQAKGWAWARARSWRRLLVEP

SEQ ID NO: 858776 - protein, 83 aa, Homo sapiens
MRIFGGVQQLREIYKDNRNLFEVQENEPQKLVEKVAGDIESLLDRKVQALKVETGGRHCCPSALFLFFFFWGGGSGGVFLFFR

SEQ ID NO: 858777 - protein, 1199 aa, Homo sapiens
PALQGDSSSAARRGAAARAAPEAPRGEGGGGGEAELPPAARCPPSPRRRILNGNMAVPARTCGASRPGPARTARPWPGCGPHPGPGTRRPTSGPPRPLWLLLPLLPLLAAPGASAYSFPQQHTMQHWARRLEQEVDGVMRIFGGVQQLREIYKDNRNLFEVQENEPQKLVEKVAGDIESLLDRKVQALKRLADAAENFQKAHRWQDNIKEEDIVYYDAKADAELDDPESEDVERGSKASTLRLDFIEDPNFKNKVNYSYAAVQIPTDIYKGSTVILNELNWTEALENVFMENRRQDPTLLWQVFGSATGVTRYYPATPWRAPKKIDLYDVRRRPWYIQGASSPKDMVIIVDVSGSVSGLTLKLMKTSVCEMLDTLSDDDYVNVASFNEKAQPVSCFTHLVQANVRNKKVFKEAVQGMVAKGTTGYKAGFEYAFDQLQNSNITRANCNKMIMMFTDGGEDRVQDVFEKYNWPNRTVRVFTFSVGQHNYDVTPLQWMACANKGYYFEIPSIGAIRINTQEYLDVLGRPMVLAGKEAKQVQWTNVYEDALGLGLVVTGTLPVFNLTQDGPGEKKNQLILGVMGIDVALNDIKRLTPNYTLGANGYVFAIDLNGYVLLHPNLKPQTTNFREPVTLDFLDAELEDENKEEIRRSMIDGNKGHKQIRTLVKSLDERYIDEVTRNYTWVPIRSTNYSLGLVLPPYSTFYLQANLSDQILQVKYFEFLLPSSFESEGHVFIAPREYCKDLNASDNNTEFLKNFIELMEKVTPDSKQCNNFLLHNLILDTGITQQLVERVWRDQDLNTYSLLAVFAATDGGITRVFPNKAAEDWTENPEPFNASFYRRSLDNHGYVFKPPHQDALLRPLELENDTVGILVSTAVELSLGRRTLRPAVVGVKLDLEAWAEKFKVLASNRTHQDQPQKCGPNSHCEMDCEVNNEDLLCVLIDDGGFLVLSNQNHQWDQVGRFFSEVDANLMLALYNNSFYTRKESYDYQAACAPQPPGNLGAAPRGVFVPTVADFLNLAWWTSAAAWSLFQQLLYGLIYHSWFQADPAEAEGSPETRESSCVMKQTQYYFGSVNASYNAIIDCGNCSRLFHAQRLTNTNLLFVVAEKPLCSQCEAGRLLQKETHCPADGPEQCELVQRPRYRRGPHICFDYNATEDTSDCGRGASFPPSLGVLVSLQLLLLLGLPPRPQPQVLVHASRRL

SEQ ID NO: 858778 - protein, 1218 aa, Homo sapiens
PALQGDSSAQPAEALRPVQPRRPLAEKAAAEERPSYRPPPAPPQPRRRRRRRHCPPSPRRRILNGNMAVPARTCGASRPGPARTARPWPGCGPHPGPGTRRPTSGPPRPLWLLLPLLPLLAAPGASAYSFPQQHTMQHWARRLEQEVDGVMRIFGGVQQLREIYKDNRNLFEVQENEPQKLVEKVAGDIESLLDRKVQALKRLADAAENFQKAHRWQDNIKEEDIVYYDAKADAELDDPESEDVERGSKASTLRLDFIEDPNFKNKVNYSYAAVQIPTDIYKGSTVILNELNWTEALENVFMENRRQDPTLLWQVFGSATGVTRYYPATPWRAPKKIDLYDVRRRPWYIQGASSPKDMVIIVDVSGSVSGLTLKLMKTSVCEMLDTLSDDDYVNVASFNEKAQPVSCFTHLVQANVRNKKVFKEAVQGMVAKGTTGYKAGFEYAFDQLQNSNITRANCNKMIMMFTDGGEDRVQDVFEKYNWPNRTVRVFTFSVGQHNYDVTPLQWMACANKGYYFEIPSIGAIRINTQEYLDVLGRPMVLAGKEAKQVQWTNVYEDALGLGLVVTGTLPVFNLTQDGPGEKKNQLILGVMGIDVALNDIKRLTPNYTLGANGYVFAIDLNGYVLLHPNLKPQTTNFREPVTLDFLDAELEDENKEEIRRSMIDGNKGHKQIRTLVKSLDERYIDEVTRNYTWVPIRSTNYSLGLVLPPYSTFYLQANLSDQILQVKLPISKLKDFEFLLPSSFESEGHVFIAPREYCKDLNASDNNTEFLKNFIELMEKVTPDSKQCNNFLLHNLILDTGITQQLVERVWRDQDLNTYSLLAVFAATDGGITRVFPNKAAEDWTENPEPFNASFYRRSLDNHGYVFKPPHQDALLRPLELENDTVGILVSTAVELSLGRRTLRPAVVGVKLDLEAWAEKFKVLASNRTHQDQPQKCGPNSHCEMDCEVNNEDLLCVLIDDGGFLVLSNQNHQWDQVGRFFSEVDANLMLALYNNSFYTRKESYDYQAACAPQPPGNLGAAPRGVFVPTVADFLNLAWWTSAAAWSLFQQLLYGLIYHSWFQADPAEAEGSPETRESSCVMKQTQYYFGSVNASYNAIIDCGNCSRLFHAQRLTNTNLLFVVAEKPLCSQCEAGRLLQKETHCPADGPEQCELVQRPRYRRGPHICFDYNATEDTSDCGRGASFPPSLGVLVSLQLLLLLGLPPRPQPQVLVHASRRL

SEQ ID NO: 858779 - protein, 96 aa, Homo sapiens
DGGGSGRGKLNAPPFRAARRLFHAQRLTNTNLLFVVAEKPLCSQCEAGRLEDTSDCGRGASFPPSLGVLVSLQLLLLLGLPPRPQPQVLVHASRRL

SEQ ID NO: 858780 - protein, 699 aa, Homo sapiens; identical to SEQ ID NO: 858775

SEQ ID NO: 858781 - protein, 95 aa, Homo sapiens
SFRSSSSAATSGQAEEARTTHVSSKCCSKVASIPPTDHSGSEPSGTARPSPPQASVTGRERGVDRNGASKGTKLITVQRPRSLLENITALPSHRA

SEQ ID NO: 858782 - protein, 95 aa, Homo sapiens; identical to SEQ ID NO: 858781

SEQ ID NO: 858783 - protein, 95 aa, Homo sapiens; identical to SEQ ID NO: 858781

SEQ ID NO: 858784 - protein, 95 aa, Homo sapiens; identical to SEQ ID NO: 858781

SEQ ID NO: 858785 - protein, 95 aa, Homo sapiens; identical to SEQ ID NO: 858781

SEQ ID NO: 858786 - protein, 82 aa, Homo sapiens
PDEGLGSPRGDRRGDLHLAPWRNRPARIIPLSGEVCSRASVLQFVAWHFVSVFFNLWTLVQPTPRPRGQILSFTITQGSDRV

SEQ ID NO: 858787 - protein, 95 aa, Homo sapiens; identical to SEQ ID NO: 858781

SEQ ID NO: 858788 - protein, 95 aa, Homo sapiens; identical to SEQ ID NO: 858781

SEQ ID NO: 858789 - protein, 272 aa, Homo sapiens
NVRLGTRLGGGMYARKQQRLSDGCHDRRGDSQPYQALKYSSKSHPSSGDHRHEKMRDAGDPSPPNKMLRRSDSPENKYSDSTGHSKAKNVHTHRVRERDGGTSYSPQENSHNHSALHSSNSHSSNPSNNPSKTSDAPYDSADDWSEHISSSGKKYYYNCRTEVSQWEKPKEWLEREQRQKEANKMAVNSFPKDRDYRREVMQATATSGFASGKSTSGDKPVSHSCTTPSTSSASGLNPTSAPPTSASAVPVSPVPQLPPFFGPFLPGPFGPG

SEQ ID NO: 858790 - protein, 647 aa, Homo sapiens
MVMYARKQQRLSDGCHDRRGDSQPYQALKYSSKSHPSSGDHRHEKMRDAGDPSPPNKMLRRSDSPENKYSDSTGHSKAKNVHTHRVRERDGGTSYSPQENSHNHSALHSSNSHSSNPSNNPSKTSDAPYDSADDWSEHISSSGKKYYYNCRTEVSQWEKPKEWLEREQRQKEANKMAVNSFPKDRDYRREVMQATATSGFASGMEDKHSSDASSLLPQNILSQTSRHNDRDYRLPRAETHSSSTPVQHPIKPVVHPTATPSTVPSSPFTLQSDHQPKKSFDANGASTLSKLPTPTSSVPAQKTERKESTSGDKPVSHSCTTPSTSSASGLNPTSAPPTSASAVPVSPVPQSPIPPLLQDPNLLRQLLPALQATLQLNNSNVDISKINEVLTAAVTQASLQSIIHKFLTAGPSAFNITSLISQAAQLSTQAQPSNQSPMSLTSDASSPRSYVSPRISTPQTNTVPIKPLISTPPVSSQPKVSTPVVKQGPVSQSATQQPVTADKQQGHEPVSPRSLQRSSSQRSPSPGPNHTSNSSNASNATVVPQNSSARSTCSLTPALAAHFSENLIKHVQGWPADHAEKQASRLREEAHNMGTIHMSEICTELKNLRSLVRVCEIQATLREQRILFLRQQIKELEKLKNQNSFMV

SEQ ID NO: 858791 - protein, 602 aa, Homo sapiens
MRDAGDPSPPNKMLRRSDSPENKYSDSTGHSKAKNVHTHRVRERDGGTSYSPQENSHNHSALHSSNSHSSNPSNNPSKTSDAPYDSADDWSEHISSSGKKYYYNCRTEVSQWEKPKEWLEREQRQKEANKMAVNSFPKDRDYRREVMQATATSGFASGMEDKHSSDASSLLPQNILSQTSRHNDRDYRLPRAETHSSSTPVQHPIKPVVHPTATPSTVPSSPFTLQSDHQPKKSFDANGASTLSKLPTPTSSVPAQKTERKESTSGDKPVSHSCTTPSTSSASGLNPTSAPPTSASAVPVSPVPQSPIPPLLQDPNLLRQLLPALQATLQLNNSNVDISKINEVLTAAVTQASLQSIIHKFLTAGPSAFNITSLISQAAQLSTQAQPSNQSPMSLTSDASSPRSYVSPRISTPQTNTVPIKPLISTPPVSSQPKVSTPVVKQGPVSQSATQQPVTADKQQGHEPVSPRSLQRSSSQRSPSPGPNHTSNSSNASNATVVPQNSSARSTCSLTPALAAHFSENLIKHVQGWPADHAEKQASRLREEAHNMGTIHMSEICTELKNLRSLVRVCEIQATLREQRILFLRQQIKELEKLKNQNSFMV

SEQ ID NO: 858792 - protein, 342 aa, Homo sapiens
MVMYARKQQRLSDGCHDRRGDSQPYQALKYSSKSHPSSGDHRHEKMRDAGDPSPPNKMLRRSDSPENKYSDSTGHSKAKNVHTHRVRERDGGTSYSPQENSHNHSALHSSNSHSSNPSNNPSKTSDAPYDSADDWSEHISSSGKKYYYNCRTEVSQWEKPKEWLEREQRQKEANKMAVNSFPKDRDYRREVMQATATSGFASGIIPTSVFSNCELKWKTSIPVMPVVCSHRIFCLKQADTMTETTDCQEQRLTVVLRQYSTPSNQWFIQLLPQALFLLVHLRYSLITSQRNHLMLMEHLLYQNCLHPHLLSLHRKQKEKNLHQETNPYHILAQLLPRLLPLD

SEQ ID NO: 858793 - protein, 647 aa, Homo sapiens; identical to SEQ ID NO: 858790

SEQ ID NO: 858794 - protein, 544 aa, Homo sapiens
MVMYARKQQRLSDGCHDRRGDSQPYQALKYSSKSHPSSGDHRHEKMRDAGDPSPPNKMLRRSDSPENKYSDSTGHSKAKNVHTHRVRERDGGTSYSPQENSHNHSALHSSNSHSSNPSNNPSKTSDAPYDSADDWSEHISSSGKKYYYNCRTEVSQWEKPKEWLEREQRQKEANKMAVNSFPKDRDYRREVMQATATSGFASGKSTSGDKPVSHSCTTPSTSSASGLNPTSAPPTSASAVPVSPVPQSPIPPLLQDPNLLRQLLPALQATLQLNNSNVDISKINEVLTAAVTQASLQSIIHKFLTAGPSAFNITSLISQAAQLSTQAQPSNQSPMSLTSDASSPRSYVSPRISTPQTNTVPIKPLISTPPVSSQPKVSTPVVKQGPVSQSATQQPVTADKQQGHEPVSPRSLQRSSSQRSPSPGPNHTSNSSNASNATVVPQNSSARSTCSLTPALAAHFSENLIKHVQGWPADHAEKQASRLREEAHNMGTIHMSEICTELKNLRSLVRVCEIQATLREQRILFLRQQIKELEKLKNQNSFMV

SEQ ID NO: 858795 - protein, 499 aa, Homo sapiens
MRDAGDPSPPNKMLRRSDSPENKYSDSTGHSKAKNVHTHRVRERDGGTSYSPQENSHNHSALHSSNSHSSNPSNNPSKTSDAPYDSADDWSEHISSSGKKYYYNCRTEVSQWEKPKEWLEREQRQKEANKMAVNSFPKDRDYRREVMQATATSGFASGKSTSGDKPVSHSCTTPSTSSASGLNPTSAPPTSASAVPVSPVPQSPIPPLLQDPNLLRQLLPALQATLQLNNSNVDISKINEVLTAAVTQASLQSIIHKFLTAGPSAFNITSLISQAAQLSTQAQPSNQSPMSLTSDASSPRSYVSPRISTPQTNTVPIKPLISTPPVSSQPKVSTPVVKQGPVSQSATQQPVTADKQQGHEPVSPRSLQRSSSQRSPSPGPNHTSNSSNASNATVVPQNSSARSTCSLTPALAAHFSENLIKHVQGWPADHAEKQASRLREEAHNMGTIHMSEICTELKNLRSLVRVCEIQATLREQRILFLRQQIKELEKLKNQNSFMV

SEQ ID NO: 858796 - protein, 647 aa, Homo sapiens; identical to SEQ ID NO: 858790

SEQ ID NO: 858797 - protein, 401 aa, Homo sapiens
MVMYARKQQRLSDGCHDRRGDSQPYQALKYSSKSHPSSGDHRHEKMRDAGDPSPPNKMLRRSDSPENKYSDSTGHSKAKNVHTHRVRERDGGTSYSPQENSHNHTPIPPLLQDPNLLRQLLPALQATLQLNNSNVDISKINEVLTAAVTQASLQSIIHKFLTAGPSAFNITSLISQAAQLSTQAQPSNQSPMSLTSDASSPRSYVSPRISTPQTNTVPIKPLISTPPVSSQPKVSTPVVKQGPVSQSATQQPVTADKQQGHEPVSPRSLQRSSSQRSPSPGPNHTSNSSNASNATVVPQNSSARSTCSLTPALAAHFSENLIKHVQGWPADHAEKQASRLREEAHNMGTIHMSEICTELKNLRSLVRVCEIQATLREQRILFLRQQIKELEKLKNQNSFMV

SEQ ID NO: 858798 - protein, 517 aa, Homo sapiens
MYARKQQRLSDGCHDRRGDSQPYQALKYSSKSHPSSGDHRHEKMRDAGDPSPPNKMLRRSDSPENKYSDSTGHSKAKNVHTHRVRERDGGTSYSPQENSHNHSALHSSNSHSSNPSNNPSKTSDAPYDSADDWSEHISSSGKKYYYNCRTEVSQWEKPKEWLEREQRQKEANKMAVNSFPKDRDYRREVMQATATSGFASGMEDKHSSDASSLLPQNILSQTSRHNDRDYRLPRAETHSSSTPVQHPIKPVVHPTATPSTVPSSPFTLQSDHQPKKSFDANGASTLSKLPTPTSSVPAQKTERKESTSGDKPVSHSCTTPSTSSASGLNPTSAPPTSASAVPVSPVPQSPIPPLLQDPNLLRQLLPALQATLQLNNSNVDISKINEVLTAAVTQASLQSIIHKFLTAGPSAFNITSLISQAAQLSTQAQPSNQSPMSLTSDASSPRSYVSPRISTPQTNTVPIKPLISTPPVSSQPKVSTPVVKQGPVSQSATQQPVTADKQQGHEPVSPRSLQRSR

SEQ ID NO: 858799 - protein, 499 aa, Homo sapiens
MVMYARKQQRLSDGCHDRRGDSQPYQALKYSSKSHPSSGDHRHEKMRDAGDPSPPNKMLRRSDSPENKYSDSTGHSKAKNVHTHRVRERDGGTSYSPQENSHNHSALHSSNSHSSNPSNNPSKTSDAPYDSADDWSEHISSSGKKYYYNCRTEVSQWEKPKEWLEREQRQKEANKMAVNSFPKDRDYRREVMQATATSGFASGMEDKHSSDASSLLPQNILSQTSRHNDRDYRLPRAETHSSSTPVQHPIKPVVHPTATPSTVPSSPFTLQSDHQPKKSFDANGASTLSKLPTPTSSVPAQKTERKESTSGDKPVSHSCTTPSTSSASGLNPTSAPPTSASAVPVSPVPQSPIPPLLQDPNLLRQLLPALQATLQLNNSNVDISKINEVLTAAVTQASLQSIIHKFLTAGPSAFNITSLISQAAQLSTQAQPSNQSPMSLTSDASSPRSYVSPRISTPQTFKMSWYCNNIFDERRLQTPLKNQLSYAFYFSNLSNLILK

SEQ ID NO: 858800 - protein, 487 aa, Homo sapiens
MVMYARKQQRLSDGCHDRRGDSQPYQALKYSSKSHPSSGDHRHEKMRDAGDPSPPNKMLRRSDSPENKYSDSTGHSKAKNVHTHRVRERDGGTSYSPQENSHNHSALHSSNSHSSNPSNNPSKTSDAPYDSADDWSEHISSSGKKYYYNCRTEVSQWEKPKEWLEREQRQKEANKMAVNSFPKDRDYRREVMQATATSGFASGMEDKHSSDASSLLPQNILSQTSRHNDRDYRLPRAETHSSSTPVQHPIKPVVHPTATPSTVPSSPFTLQSDHQPKKSFDANGASTLSKLPTPTSSVPAQKTERKESTSGDKPVSHSCTTPSTSSASGLNPTSAPPTSASAVPVSPVPQSPIPPLLQDPNLLRQLLPALQATLQLNNSNVDISKINEVLTAAVTQASLQSIIHKFLTAGPSAFNITSLISQAAQLSTQAQPSNQSPMSLTSDASSPRSYVSPRISTPQTNTVPIKPLISTPPVSSQPKSTPAWVTQ

SEQ ID NO: 858801 - protein, 393 aa, Homo sapiens
MVMYARKQQRLSDGCHDRRGDSQPYQALKYSSKSHPSSGDHRHEKMRDAGDPSPPNKMLRRSDSPENKYSDSTGHSKAKNVHTHRVRERDGGTSYSPQENSHNHSALHSSNSHSSNPSNNPSKTSDAPYDSADDWSEHISSSGKKYYYNCRTEVSQWEKPKEWLEREQRQKEANKMAVNSFPKDRDYRREVMQATATSGFASGMEDKHSSDASSLLPQNILSQTSRHNDRDYRLPRAETHSSSTPVQHPIKPVVHPTATPSTVPSSPFTLQSDHQPKKSFDANGASTLSKLPTPTSSVPAQKTERKESTSGDKPVSHSCTTPSTSSASGLNPTSAPPTSASAVPVSPVPQSPIPPLLQDPNLLRQLLPALQATLQLNNSNVDISKINEEGKSS

SEQ ID NO: 858802 - protein, 137 aa, Homo sapiens
MVMYARKQQRLSDGCHDRRGDSQPYQALKYSSKSHPSSGDHRHEKMRDAGDPSPPNKMLRRSDSPENKYSDSTGHSKAKNVHTHRVRERDGGTSYSPQENSHNHSALHSSNSHSSNPSNNPSKTSDAMYPSRCKYVL

SEQ ID NO: 858803 - protein, 296 aa, Homo sapiens
MVMYARKQQRLSDGCHDRRGDSQPYQALKYSSKSHPSSGDHRHEKMRDAGDPSPPNKMLRRSDSPENKYSDSTGHSKAKNVHTHRVRERDGGTSYSPQENSHNHSALHSSNSHSSNPSNNPSKTSDAPYDSADDWSEHISSSGKKYYYNCRTEVSQWEKPKEWLEREQRQKEANKMAVNSFPKDRDYRREVMQATATSGFASGMEDKHSSDASSLLPQNILSQTSRHNDRDYRLPRAETHSSSTPVQHPIKPVVHPTATPIQEHPVLRDLQRDLDCHTIIMGHSTVNIRHINETDR

SEQ ID NO: 858804 - protein, 206 aa, Homo sapiens
MVMYARKQQRLSDGCHDRRGDSQPYQALKYSSKSHPSSGDHRHEKMRDAGDPSPPNKMLRRSDSPENKYSDSTGHSKAKNVHTHRVRERDGGTSYSPQENSHNHSALHSSNSHSSNPSNNPSKTSDAPYDSADDWSEHISSSGKKYYYNCRTEVSQWEKPKEWLEREQRQKEANKMAVNSFPKDRDYRREVMQATATSGFASGSKY

SEQ ID NO: 858805 - protein, 147 aa, Homo sapiens
MVMYARKQQRLSDGCHDRRGDSQPYQALKYSSKSHPSSGDHRHEKMRDAGDPSPPNKMLRRSDSPENKYSDSTGHSKAKNVHTHRVRERDGGTSYSPQENSHNHSALHSSNSHSSNPSNNPSKTSDASKYYKHVQYGFFGIFCKKKK

SEQ ID NO: 858806 - protein, 602 aa, Homo sapiens; identical to SEQ ID NO: 858791

SEQ ID NO: 858807 - protein, 647 aa, Homo sapiens; identical to SEQ ID NO: 858790

SEQ ID NO: 858808 - protein, 653 aa, Homo sapiens
MVMYARKQQRLSDGCHDRRGDSQPYQGGDVLQALKYSSKSHPSSGDHRHEKMRDAGDPSPPNKMLRRSDSPENKYSDSTGHSKAKNVHTHRVRERDGGTSYSPQENSHNHSALHSSNSHSSNPSNNPSKTSDAPYDSADDWSEHISSSGKKYYYNCRTEVSQWEKPKEWLEREQRQKEANKMAVNSFPKDRDYRREVMQATATSGFASGMEDKHSSDASSLLPQNILSQTSRHNDRDYRLPRAETHSSSTPVQHPIKPVVHPTATPSTVPSSPFTLQSDHQPKKSFDANGASTLSKLPTPTSSVPAQKTERKESTSGDKPVSHSCTTPSTSSASGLNPTSAPPTSASAVPVSPVPQSPIPPLLQDPNLLRQLLPALQATLQLNNSNVDISKINEVLTAAVTQASLQSIIHKFLTAGPSAFNITSLISQAAQLSTQAQPSNQSPMSLTSDASSPRSYVSPRISTPQTNTVPIKPLISTPPVSSQPKVSTPVVKQGPVSQSATQQPVTADKQQGHEPVSPRSLQRSSSQRSPSPGPNHTSNSSNASNATVVPQNSSARSTCSLTPALAAHFSENLIKHVQGWPADHAEKQASRLREEAHNMGTIHMSEICTELKNLRSLVRVCEIQATLREQRILFLRQQIKELEKLKNQNSFMV

SEQ ID NO: 858809 - protein, 602 aa, Homo sapiens; identical to SEQ ID NO: 858791

SEQ ID NO: 858810 - protein, 624 aa, Homo sapiens
MAVNSFPKDRDYKKRGDHRHEKMRDAGDPSPPNKMLRRSDSPENKYSDSTGHSKAKNVHTHRVRERDGGTSYSPQENSHNHSALHSSNSHSSNPSNNPSKTSDAPYDSADDWSEHISSSGKKYYYNCRTEVSQWEKPKEWLEREQRQKEANKMAVNSFPKDRDYRREVMQATATSGFASGMEDKHSSDASSLLPQNILSQTSRHNDRDYRLPRAETHSSSTPVQHPIKPVVHPTATPSTVPSSPFTLQSDHQPKKSFDANGASTLSKLPTPTSSVPAQKTERKESTSGDKPVSHSCTTPSTSSASGLNPTSAPPTSASAVPVSPVPQSPIPPLLQDPNLLRQLLPALQATLQLNNSNVDISKINEVLTAAVTQASLQSIIHKFLTAGPSAFNITSLISQAAQLSTQAQPSNQSPMSLTSDASSPRSYVSPRISTPQTNTVPIKPLISTPPVSSQPKVSTPVVKQGPVSQSATQQPVTADKQQGHEPVSPRSLQRSSSQRSPSPGPNHTSNSSNASNATVVPQNSSARSTCSLTPALAAHFSENLIKHVQGWPADHAEKQASRLREEAHNMGTIHMSEICTELKNLRSLVRVCEIQATLREQRILFLRQQIKELEKLKNQNSFMV

SEQ ID NO: 858811 - protein, 438 aa, Homo sapiens [sequence omitted]

SEQ ID NO: 858812 - protein, 523 aa, Homo sapiens
ANSARGRRRRRTRRRRLRARPPFAAALPPPRHTLTGRALMVMYARKQQRLSDGVNSFPKDRDYRREVMQATATSGFASGMEDKHSSDASSLLPQNILSQTSRHNDRDYRLPRAETHSSSTPVQHPIKPVVHPTATPSTVPSSPFTLQSDHQPKKSFDANGASTLSKLPTPTSSVPAQKTERKESTSGDKPVSHSCTTPSTSSASGLNPTSAPPTSASAVPVSPVPQSPIPPLLQDPNLLRQLLPALQATLQLNNSNVDISKINEVLTAAVTQASLQSIIHKFLTAGPSAFNITSLISQAAQLSTQAQPSNQSPMSLTSDASSPRSYVSPRISTPQTNTVPIKPLISTPPVSSQPKVSTPVVKQGPVSQSATQQPVTADKQQGHEPVSPRSLQRSSSQRSPSPGPNHTSNSSNASNATVVPQNSSARSTCSLTPALAAHFSENLIKHVQGWPADHAEKQASRLREEAHNMGTIHMSEICTELKNLRSLVRVCEIQATLREQRILFLRQQIKELEKLKNQNSFMV

SEQ ID NO: 858813 - protein, 553 aa, Homo sapiens
NVRLGTRLGGGMYARKQQRLSDGCHDRRGDSQPYQALKYSSKSHPSSGDHRHEKMRDAGDPSPPNKMLRRSDSPENKYSDSTGHSKAKNVHTHRVRERDGGTSYSPQENSHNHSALHSSNSHSSNPSNNPSKTSDAPYDSADDWSEHISSSGKKYYYNCRTEVSQWEKPKEWLEREQRQKEANKMAVNSFPKDRDYRREVMQATATSGFASGKSTSGDKPVSHSCTTPSTSSASGLNPTSAPPTSASAVPVSPVPQSPIPPLLQDPNLLRQLLPALQATLQLNNSNVDISKINEVLTAAVTQASLQSIIHKFLTAGPSAFNITSLISQAAQLSTQAQPSNQSPMSLTSDASSPRSYVSPRISTPQTNTVPIKPLISTPPVSSQPKVSTPVVKQGPVSQSATQQPVTADKQQGHEPVSPRSLQRSSSQRSPSPGPNHTSNSSNASNATVVPQNSSARSTCSLTPALAAHFSENLIKHVQGWPADHAEKQASRLREEAHNMGTIHMSEICTELKNLRSLVRVCEIQATLREQRILFLRQQIKELEKLKNQNSFMV

SEQ ID NO: 858814 - protein, 544 aa, Homo sapiens; identical to SEQ ID NO: 858794

SEQ ID NO: 858815 - protein, 688 aa, Homo sapiens
MVMYARKQQRLSDGCHDRRGDSQPYQALKYSSKSHPSSGDHRHEKMRDAGDPSPPNKMLRRSDSPENKYSDSTGHSKAKNVHTHRVRERDGGTSYSPQENSHNHSALHSSNSHSSNPSNNPSKTSDAPYDSADDWSEHISSSGKKYYYNCRTEVSQWEKPKEWLEREQRQKEANKMAVNSFPKDRDYRREVMQATATSGFASGMEDKHSSDASSLLPQNILSQTSRHNDRDYRLPRAETHSSSTPVQHPIKPVVHPTATPSTVPSSPFTLQSDHQPKKSFDANGASTLSKLPTPTSSVPAQKTERKESTSGDKPVSHSCTTPSTSSASGLNPTSAPPTSASAVPVSPVPQSPIPPLLQDPNLLRQLLPALQATLQLNNSNVDISKINEVLTAAVTQASLQSIIHKFLTAGPSAFNITSLISQAAQLSTQAQPSNQSPMSLTSDASSPRSYVSPRISTPQTNTVPIKPLISTPPVSSQPKVSTPVVKQGPVSQSATQQPVTADKQQGHEPVSPRSLQRSSSQRSPSPGPNHTSNSSNASNATVVPQNSSARSTCSLTPALAAHFSENLIKHVQGWPADHAEKQASRLREEAHNMGTIHMSEICTELKNLRSLVRVCEIQATLREQRILFLRQQIKELEKLKTGTVNLLPNLNIFELHLSRLWTVKLGKGNDKGTGSVRVNSGERYKIDL

SEQ ID NO: 858816 - protein, 625 aa, Homo sapiens
MVMYARKQQRLSDGCHDRRGDSQPYQALKYSSKSHPSSGDHRHEKMRDAGDPSPPNKMLRRSDSPENKYSDSTGHSKAKNVHTHRVRERDGGTSYSPQENSHNHSALHSSNSHSSNPSNNPSKTSDAPYDSADDWSEHISSSGKKYYYNCRTEVSQWEKPKEWLEREQRQKEANKMAVNSFPKDRDYRREVMQATATSGFASGMEDKHSSDASSLLPQNILSQTSRHNDRDYRLPRAETHSSSTPVQHPIKPVVHPTATPSTVPSSPFTLQSDHQPKKSFDANGASTLSKLPTPTSSVPAQKTERKESTSGDKPVSHSCTTPSTSSASGLNPTSAPPTSASAVPVSPVPQSPIPPLLQDPNLLRQLLPALQATLQLNNSNVDISKINEVLTAAVTQASLQSIIHKFLTAGPSAFNITSLISQAAQLSTQAQPSNQSPMSLTSDASSPRSYVSPRISTPQTNTVPIKPLISTPPVSSQPKVSTPVVKQGPVSQSATQQPVTADKQQGHEPVSPRSLQRSSSQRSPSPGPNHTSNSSNASNATVVPQNSSARSTCSLTPALAAHFSENLIKHVQGWPADHAEKQASRLREEAHNMGTIHMSEICTELKNLRSLVRVCEIQATLREQR

SEQ ID NO: 858817 - protein, 393 aa, Homo sapiens; identical to SEQ ID NO: 858801

SEQ ID NO: 858818 - protein, 390 aa, Homo sapiens
MVMYARKQQRLSDGCHDRRGDSQPYQALKYSSKSHPSSGDHRHEKMRDAGDPSPPNKMLRRSDSPENKYSDSTGHSKAKNVHTHRVRERDGGTSYSPQENSHNHSALHSSNSHSSNPSNNPSKTSDAPYDSADDWSEHISSSGKKYYYNCRTEVSQWEKPKEWLEREQRQKEANKMAVNSFPKDRDYRREVMQATATSGFASGMEDKHSSDASSLLPQNILSQTSRHNDRDYRLPRAETHSSSTPVQHPIKPVVHPTATPSTVPSSPFTLQSDHQPKKSFDANGASTLSKLPTPTSSVPAQKTERKESTSGDKPVSHSCTTPSTSSASGLNPTSAPPTSASAVPVSPVPQSPIPPLLQDPNLLRQLLPALQATLQLNNSNVDISKINEDS

SEQ ID NO: 858819 - protein, 384 aa, Homo sapiens
MVMYARKQQRLSDGCHDRRGDSQPYQALKYSSKSHPSSGDHRHEKMRDAGDPSPPNKMLRRSDSPENKYSDSTGHSKAKNVHTHRVRERDGGTSYSPQENSHNHSALHSSNSHSSNPSNNPSKTSDAPYDSADDWSEHISSSGKKYYYNCRTEVSQWEKPKEWLEREQRQKEANKMAVNSFPKDRDYRREVMQATATSGFASGKSTSGDKPVSHSCTTPSTSSASGLNPTSAPPTSASAVPVSPVPQSPIPPLLQDPNLLRQLLPALQATLQLNNSNVDISKINEVLTAAVTQASLQSIIHKFLTAGPSAFNITSLISQAAQLSTQAQPSNQSPMSLTSDASSPRSYVSPRISTPQTNTVPIKPLISTPPVSSQPKSTPAWVTQ

SEQ ID NO: 858820 - protein, 166 aa, Homo sapiens
MVMYARKQQRLSDGCHDRRGDSQPYQALKYSSKSHPSSGDHRHEKMRDAGDPSPPNKMLRRSDSPENKYSDSTGHSKAKNVHTHRVRERDGGTSYSPQENSHNHSALHSSNSHSSNPSNNPSKTSDAPYDSADDWSEHISSSGKKYYYNCRTEVSQWEKPKEWLER

SEQ ID NO: 858821 - protein, 153 aa, Homo sapiens
GRAGGRAGTQCGGERGPGFAAFRPLRPFRRLRVCAVCVRGSALGRSVGLPRGGAAGAPFSSSPAPHPRRVLCRCLLFLFFSCHDRRGDSQPYQVPAEAGVEGLEGAGGGREGLLLERRPQKSIQALRCNTSETSTADPLKIPGLVPLALSSKV

SEQ ID NO: 858822 - protein, 190 aa, Homo sapiens
MSSDASQGVITTPPPPSMPHKERYFDRINENDPEYIRERNMSPDLRQDFNMMEQRKRVTQILQSPAFREDLECLIQEQMKKGHNPTGLLALQQIADYIMANSFSGFSSPPLSLGMVTPINDLPGADTSSYVKGEKLTRCKLASLYRLVDLFGWAHLANTYISVRISKEQDHIIIIPRGLSFSEATASNLV

SEQ ID NO: 858823 - protein, 139 aa, Homo sapiens
MKKGHNPTGLLALQQIADYIMANSFSGFSSPPLSLGMVTPINDLPGADTSSYVKGEKLTRCKLASLYRLVDLFGWAHLANTYISVRISKEQDHIIIIPRGLSFSEATASNLVKVNIIGEVVDQGSRCFTICFSKSYLIQ

SEQ ID NO: 858824 - protein, 674 aa, Homo sapiens
MSSDASQGVITTPPPPSMPHKERYFDRINENDPEYIRERNMSPDLRQDFNMMEQRKRVTQILQSPAFREDLECLIQEQMKKGHNPTGLLALQQIADYIMANSFSGFSSPPLSLGMVTPINDLPGADTSSYVKGEKLTRCKLASLYRLVDLFGWAHLANTYISVRISKEQDHIIIIPRGLSFSEATASNLVKVNIIGEVVDQGSTNLKIDHTGFSPHAAIYSTRPDVKCVIHIHTLATAAVSSMKCGILPISQESLLLGDVAYYDYQGSLEEQEERIQLQKVLGPSCKVLVLRNHGVVALGETLEEAFHYIFNVQLACEIQVQALAGAGGVDNLHVLDFQKYKAFTYTVAASGGGGVNMGSHQKWKVGEIEFEGLMRTLDNLGYRTGYAYRHPLIREKPRHKSDVEIPATVTAFSFEDDTVPLSPLKYMAQRQQREKTRWLNSPNTYMKVNVPEESRNGETSPRTKITWMKAEDSSKVSGGTPIKIEDPNQFVPLNTNPNEVLEKRNKIREQNRYDLKTAGPQSQLLAGIVVDKPPSTMQFEDDDHGPPAPPNPFSHLTEGELEEYKRTIERKQQGLEENHELFSKSFISMEVPVMVVNGKDDMHDVEDELAKRVSRLSTSTTIENIEITIKSPEKIEEVLSPEGSPSKSPSKKKKKFRTPSFLKKNKKKEKVEA

SEQ ID NO: 858825 - protein, 706 aa, Homo sapiens
MSSDASQGVITTPPPPSMPHKERYFDRINENDPEYIRERNMSPDLRQDFNMMEQRKRVTQILQSPAFREDLECLIQEQMKKGHNPTGLLALQQIADYIMANSFSGFSSPPLSLGMVTPINDLPGADTSSYVKGEKLTRCKLASLYRLVDLFGWAHLANTYISVRISKEQDHIIIIPRGLSFSEATASNLVKVNIIGEVVDQGSTNLKIDHTGFSPHAAIYSTRPDVKCVIHIHTLATAAVSSMKCGILPISQESLLLGDVAYYDYQGSLEEQEERIQLQKVLGPSCKVLVLRNHGVVALGETLEEAFHYIFNVQLACEIQVQALAGAGGVDNLHVLDFQKYKAFTYTVAASGGGGVNMGSHQKWKVGEIEFEGLMRTLDNLGYRTGYAYRHPLIREKPRHKSDVEIPATVTAFSFEDDTVPLSPLKYMAQRQQREKTRWLNSPNTYMKVNVPEESRNGETSPRTKITWMKAEDSSKVSGGTPIKIEDPNQFVPLNTNPNEVLEKRNKIREQNRYDLKTAGPQSQLLAGIVVDKPPSTMQFEDDDHGPPAPPNPFSHLTEGELEEYKRTIERKQQGLEDAEQELLSDDASSVSQIQSQTQSPQNVPEKLEENHELFSKSFISMEVPVMVVNGKDDMHDVEDELAKRVSRLSTSTTIENIEITIKSPEKIEEVLSPEGSPSKSPSKKKKKFRTPSFLKKNKKKEKVEA

SEQ ID NO: 858826 - protein, 596 aa, Homo sapiens
MKKGHNPTGLLALQQIADYIMANSFSGFSSPPLSLGMVTPINDLPGADTSSYVKGEKLTRCKLASLYRLVDLFGWAHLANTYISVRISKEQDHIIIIPRGLSFSEATASNLVKVNIIGEVVDQGSTNLKIDHTGFSPHAAIYSTRPDVKCVIHIHTLATAAVSSMKCGILPISQESLLLGDVAYYDYQGSLEEQEERIQLQKVLGPSCKVLVLRNHGVVALGETLEEAFHYIFNVQLACEIQVQALAGAGGVDNLHVLDFQKYKAFTYTVAASGGGGVNMGSHQKWKVGEIEFEGLMRTLDNLGYRTGYAYRHPLIREKPRHKSDVEIPATVTAFSFEDDTVPLSPLKYMAQRQQREKTRWLNSPNTYMKVNVPEESRNGETSPRTKITWMKAEDSSKVSGGTPIKIEDPNQFVPLNTNPNEVLEKRNKIREQNRYDLKTAGPQSQLLAGIVVDKPPSTMQFEDDDHGPPAPPNPFSHLTEGELEEYKRTIERKQQGLEENHELFSKSFISMEVPVMVVNGKDDMHDVEDELAKRVSRLSTSTTIENIEITIKSPEKIEEVLSPEGSPSKSPSKKKKKFRTPSFLKKNKKKEKVEA

SEQ ID NO: 858827 - protein, 657 aa, Homo sapiens
MPHKERYFDRINENDPEYIRERNMSPDLRQDFNMMEQRKRVTQILQSPAFREDLECLIQEQMKKGHNPTGLLALQQIADYIMANSFSGFSSPPLSLGMVTPINDLPGADTSSYVKGEKLTRCKLASLYRLVDLFGWAHLANTYISVRISKEQDHIIIIPRGLSFSEATASNLVKVNIIGEVVDQGSTNLKIDHTGFSPHAAIYSTRPDVKCVIHIHTLATAAVSSMKCGILPISQESLLLGDVAYYDYQGSLEEQEERIQLQKVLGPSCKVLVLRNHGVVALGETLEEAFHYIFNVQLACEIQVQALAGAGGVDNLHVLDFQKYKAFTYTVAASGGGGVNMGSHQKWKVGEIEFEGLMRTLDNLGYRTGYAYRHPLIREKPRHKSDVEIPATVTAFSFEDDTVPLSPLKYMAQRQQREKTRWLNSPNTYMKVNVPEESRNGETSPRTKITWMKAEDSSKVSGGTPIKIEDPNQFVPLNTNPNEVLEKRNKIREQNRYDLKTAGPQSQLLAGIVVDKPPSTMQFEDDDHGPPAPPNPFSHLTEGELEEYKRTIERKQQGLEENHELFSKSFISMEVPVMVVNGKDDMHDVEDELAKRVSRLSTSTTIENIEITIKSPEKIEEVLSPEGSPSKSPSKKKKKFRTPSFLKKNKKKEKVEA

SEQ ID NO: 858828 - protein, 667 aa, Homo sapiens
MSSDASQGVITTPPPPSMPHKERYFDRINENDPEYIRERNMSPDLRQDFNMMEQRKRVTQILQSPAFREDLECLIQEQMKKGHNPTGLLALQQIADYIMANSFSGFSSPPLSLGMVTPINDLPGADTSSYVKGEKLTRCKLASLYRLVDLFGWAHLANTYISVRISKEQDHIIIIPRGLSFSEATASNLVKVNIIGEVVDQGSTNLKIDHTGFSPHAAIYSTRPDVKCVIHIHTLATAAVSSMKCGILPISQESLLLGDVAYYDYQGSLEEQEERIQLQKVLGPSCKVLVLRNHGVVALGETLEEAFHYIFNVQLACEIQVQALAGAGGVDNLHVLDFQKYKAFTYTVAASGGGGVNMGSHQKWKVGEIEFEGLMRTLDNLGYRTGYAYRHPLIREKPRHKSDVEIPATVTAFSFEDDTVPLSPLKYMAQRQQREKTRWLNSPNTYMKVNVPEESRNGETSPRTKITWMKAEDSSKVSGGTPIKIEDPNQFVPLNTNPNEIREQNRYDLKTAGPQSQLLAGIVVDKPPSTMQFEDDDHGPPAPPNPFSHLTEGELEEYKRTIERKQQGLEENHELFSKSFISMEVPVMVVNGKDDMHDVEDELAKRVSRLSTSTTIENIEITIKSPEKIEEVLSPEGSPSKSPSKKKKKFRTPSFLKKNKKKEKVEA

SEQ ID NO: 858829 - protein, 621 aa, Homo sapiens
MLVKLVSNSPPQAFREDLECLIQEQMKKGHNPTGLLALQQIADYIMANSFSGFSSPPLSLGMVTPINDLPGADTSSYVKGEKLTRCKLASLYRLVDLFGWAHLANTYISVRISKEQDHIIIIPRGLSFSEATASNLVKVNIIGEVVDQGSTNLKIDHTGFSPHAAIYSTRPDVKCVIHIHTLATAAVSSMKCGILPISQESLLLGDVAYYDYQGSLEEQEERIQLQKVLGPSCKVLVLRNHGVVALGETLEEAFHYIFNVQLACEIQVQALAGAGGVDNLHVLDFQKYKAFTYTVAASGGGGVNMGSHQKWKVGEIEFEGLMRTLDNLGYRTGYAYRHPLIREKPRHKSDVEIPATVTAFSFEDDTVPLSPLKYMAQRQQREKTRWLNSPNTYMKVNVPEESRNGETSPRTKITWMKAEDSSKVSGGTPIKIEDPNQFVPLNTNPNEVLEKRNKIREQNRYDLKTAGPQSQLLAGIVVDKPPSTMQFEDDDHGPPAPPNPFSHLTEGELEEYKRTIERKQQGLEENHELFSKSFISMEVPVMVVNGKDDMHDVEDELAKRVSRLSTSTTIENIEITIKSPEKIEEVLSPEGSPSKSPSKKKKKFRTPSFLKKNKKKEKVEA

SEQ ID NO: 858830 - protein, 596 aa, Homo sapiens; identical to SEQ ID NO: 858826

SEQ ID NO: 858831 - protein, 432 aa, Homo sapiens
MKCGILPISQESLLLGDVAYYDYQGSLEEQEERIQLQKVLGPSCKVLVLRNHGVVALGETLEEAFHYIFNVQLACEIQVQALAGAGGVDNLHVLDFQKYKAFTYTVAASGGGGVNMGSHQKWKVGEIEFEGLMRTLDNLGYRTGYAYRHPLIREKPRHKSDVEIPATVTAFSFEDDTVPLSPLKYMAQRQQREKTRWLNSPNTYMKVNVPEESRNGETSPRTKITWMKAEDSSKVSGGTPIKIEDPNQFVPLNTNPNEVLEKRNKIREQNRYDLKTAGPQSQLLAGIVVDKPPSTMQFEDDDHGPPAPPNPFSHLTEGELEEYKRTIERKQQGLEENHELFSKSFISMEVPVMVVNGKDDMHDVEDELAKRVSRLSTSTTIENIEITIKSPEKIEEVLSPEGSPSKSPSKKKKKFRTPSFLKKNKKKEKVEA

SEQ ID NO: 858832 - protein, 596 aa, Homo sapiens; identical to SEQ ID NO: 858826

SEQ ID NO: 858833 - protein, 317 aa, Homo sapiens
MGSHQKWKVGEIEFEGLMRTLDNLGYRTGYAYRHPLIREKPRHKSDVEIPATVTAFSFEDDTVPLSPLKYMAQRQQREKTRWLNSPNTYMKVNVPEESRNGETSPRTKITWMKAEDSSKVSGGTPIKIEDPNQFVPLNTNPNEVLEKRNKIREQNRYDLKTAGPQSQLLAGIVVDKPPSTMQFEDDDHGPPAPPNPFSHLTEGELEEYKRTIERKQQGLEENHELFSKSFISMEVPVMVVNGKDDMHDVEDELAKRVSRLSTSTTIENIEITIKSPEKIEEVLSPEGSPSKSPSKKKKKFRTPSFLKKNKKKEKVEA

SEQ ID NO: 858834 - protein, 206 aa, Homo sapiens
MKAEDSSKVSGGTPIKIEDPNQFVPLNTNPNEVLEKRNKIREQNRYDLKTAGPQSQLLAGIVVDKPPSTMQFEDDDHGPPAPPNPFSHLTEGELEEYKRTIERKQQGLEENHELFSKSFISMEVPVMVVNGKDDMHDVEDELAKRVSRLSTSTTIENIEITIKSPEKIEEVLSPEGSPSKSPSKKKKKFRTPSFLKKNKKKEKVEA

SEQ ID NO: 858835 - protein, 139 aa, Homo sapiens
MAFNYNSYPTDAEQELLSDDASSVSQIQSQTQSPQNVPEKLEENHELFSKSFISMEVPVMVVNGKDDMHDVEDELAKRVSRLSTSTTIENIEITIKSPEKIEEVLSPEGSPSKSPSKKKKKFRTPSFLKKNKKKEKVEA

SEQ ID NO: 858836 - protein, 452 aa, Homo sapiens
MSSDASQGVITTPPPPSMPHKERYFDRINENDPEYIRERNMSPDLRQDFNMMEQRKRVTQILQSPAFREDLECLIQEQMKKGHNPTGLLALQQIADYIMANSFSGFSSPPLSLGMVTPINDLPGADTSSYVKGEKLTRCKLASLYRLVDLFGWAHLANTYISVRISKEQDHIIIIPRGLSFSEATASNLVKVNIIGEVVDQGSTNLKIDHTGFSPHAAIYSTRPDVKCVIHIHTLATAAVSSMKCGILPISQESLLLGDVAYYDYQGSLEEQEERIQLQKVLGPSCKVLVLRNHGVVALGETLEEAFHYIFNVQLACEIQVQALAGAGGVDNLHVLDFQKYKAFTYTVAASGGGGVNMGSHQKWKVGEIEFEGLMRTLDNLGYRTGYAYRHPLIREKPRHKSDVEIPATVTAFLEASVHSSLIMPGHTWKQCYSNLHEYCLGLAEPPPNLFS

SEQ ID NO: 858837 - protein, 353 aa, Homo sapiens
MSSDASQGVITTPPPPSMPHKERYFDRINENDPEYIRERNMSPDLRQDFNMMEQRKRVTQILQSPAFREDLECLIQEQMKKGHNPTGLLALQQIADYIMANSFSGFSSPPLSLGMVTPINDLPGADTSSYVKGEKLTRCKLASLYRLVDLFGWAHLANTYISVRISKEQDHIIIIPRGLSFSEATASNLVKVNIIGEVVDQGSTNLKIDHTGFSPHAAIYSTRPDVKCVIHIHTLATAAVSSMKCGILPISQESLLLGDVAYYDYQGSLEEQEERIQLQKVLGPSCKVLVLRNHGVVALGETLEEAFHYIFNVQLACEIQVQALAGAGGVLYQPFILTRFSTMAFNKVHVFLV

SEQ ID NO: 858838 - protein, 111 aa, Homo sapiens
MSSDASQGVITTPPPPSMPHKERYFDRINENDPEYIRERNMSPDLRQDFNMMEQRKRVTQILQSPAFREDLECLIQEQMKKGHNPTVILALWEAKAGGSLEARSSRPAWAT

SEQ ID NO: 858839 - protein, 251 aa, Homo sapiens
MSSDASQGVITTPPPPSMPHKERYFDRINENDPEYIRERNMSPDLRQDFNMMEQRKRVTQILQSPAFREDLECLIQEQMKKGHNPTGLLALQQIADYIMANSFSGFSSPPLSLGMVTPINDLPGADTSSYVKGEKLTRCKLASLYRLVDLFGWAHLANTYISKESRHVTKTHLIINSPEGYSFFCKAYQLPSWLKVTYSYGAAVLDPGVLHLEQLAPSGMSRPPVCNLFARAWMVRVVVDHPYAFAHRGIP

SEQ ID NO: 858840 - protein, 674 aa, Homo sapiens; identical to SEQ ID NO: 858824

SEQ ID NO: 858841 - protein, 674 aa, Homo sapiens; identical to SEQ ID NO: 858824

SEQ ID NO: 858842 - protein, 432 aa, Homo sapiens; identical to SEQ ID NO: 858831

SEQ ID NO: 858843 - protein, 674 aa, Homo sapiens; identical to SEQ ID NO: 858824

SEQ ID NO: 858844 - protein, 674 aa, Homo sapiens; identical to SEQ ID NO: 858824

SEQ ID NO: 858845 - protein, 674 aa, Homo sapiens; identical to SEQ ID NO: 858824

SEQ ID NO: 858846 - protein, 620 aa, Homo sapiens [sequence omitted]

SEQ ID NO: 858847 - protein, 620 aa, Homo sapiens [sequence omitted]

SEQ ID NO: 858848 - protein, 326 aa, Homo sapiens
MSSDASRVNMGSHQKWKVGEIEFEGLMRTLDNLGYRTGYAYRHPLIREKPRHKSDVEIPATVTAFSFEDDTVPLSPLKYMAQRQQREKTRWLNSPNTYMKVNVPEESRNGETSPRTKITWMKAEDSSKVSGGTPIKIEDPNQFVPLNTNPNEVLEKRNKIREQNRYDLKTAGPQSQLLAGIVVDKPPSTMQFEDDDHGPPAPPNPFSHLTEGELEEYKRTIERKQQGLEENHELFSKSFISMEVPVMVVNGKDDMHDVEDELAKRVSRLSTSTTIENIEITIKSPEKIEEVLSPEGSPSKSPSKKKKKFRTPSFLKKNKKKEKVEA

SEQ ID NO: 858849 - protein, 247 aa, Homo sapiens [sequence omitted]

SEQ ID NO: 858850 - protein, 668 aa, Homo sapiens
MSSDASQGVITTPPPPSMPHKERYFDRINENDPEYIRERNMSPDLRQDFNMMEQRKRVTQILQSPAFREDLECLIQEQMKKGHNPTGLLALQQIADYIMANSFSGFSSPPLSLGMVTPINDLPGADTSSYVKGEKLTRCKLASLYRLVDLFGWAHLANTYISVRISKEQDHIIIIPRGLSFSEATASNLVKVNIIGEVVDQGSTNLKIDHTGFSPHAAIYSTRPDVKCVIHIHTLATAAVSSMKCGILPISQESLLLGDVAYYDYQGSLEEQEERIQLQKVLGPSCKVLVLRNHGVVALGETLEEAFHYIFNVQLACEIQVQALAGAGGVDNLHVLDFQKYKAFTYTVAASGGGGVNMGSHQKWKVGEIEFEGLMRTLDNLGYRTGYAYRHPLIREKPRHKSDVEIPATVTAFSFEDDTVPLSPLKYMAQRQQREKTRWLNSPNTYMKVNVPEESRNGETSPRTKITWMKAEDSSKVSGGTPIKIEDPNQFVPLNTNPNEVLEKRNKIREQNRYDLKTAGPQSQLLAGIVVDKPPSTMQFEDDDHGPPAPPNPFSHLTEGELEEYKRTIERKQQGLEENHELFSKSFISMEVPVMVVNGKDDMHDVEDELAKRVSRLSTSTTIENIEITINPVMVVNGKDDMHDVEDELAKRVSRLSTSTTIVISMFS

SEQ ID NO: 858851 - protein, 426 aa, Homo sapiens
MSSDASQGVITTPPPPSMPHKERYFDRINENDPEYIRERNMSPDLRQDFNMMEQRKRVTQILQSPAFREDLECLIQEQMKKGHNPTGLLALQQIADYIMANSFSGFSSPPLSLGMVTPINDLPGADTSSYVKGEKLTRCKLASLYRLVDLFGWAHLANTYISVRISKEQDHIIIIPRGLSFSEATASNLVKVNIIGEVVDQGSTNLKIDHTGFSPHAAIYSTRPDVKCVIHIHTLATAAVSSMKCGILPISQESLLLGDVAYYDYQGSLEEQEERIQLQKVLGPSCKVLVLRNHGVVALGETLEEAFHYIFNVQLACEIQVQALAGAGGVDNLHVLDFQKYKAFTYTVAASGGGGVNMGSHQKWKVGEIEFEGLMRTLDNLVGCKIEVKLGFNVFRFKSRCFHFCRTCSILFQKLSLALGKHFIVI

SEQ ID NO: 858852 - protein, 328 aa, Homo sapiens [sequence omitted]

SEQ ID NO: 858853 - protein, 684 aa, Homo sapiens
MWVLLRSGYPLRILLPLRGEWMGRRGLPRNLAPGPPRRRYRKETLQALDMPVLPVTATEIRQYLRGHGIPFQDGHSCLRALSPFAESSQLKGQTGVTTSFSLFIDKTTGHFLCMTSLAEGSWEDFQASVEGRGDGAREGFLLSKAPEFEDSEEVRRIWNRAIPLWELPDQEEVQLADTMFGLTKVTDDTLKRFSVRYLRPARSLVFPWFSPGGSGLRGLKLLEAKCQGDGVSYEETTIPRPSAYHNLFGLPLISRRDAEVVLTSRELDSLALNQSTGLPTLTLPRGTTCLPPALLPYLEQFRRIVFWLGDDLRSWEAAKLFARKLNPKRCFLVRPGDQQPRPLEALNGGFNLSRILRTALPAWHKSIVSFRQLREEVLGELSNVEQAAGLRWSRFPDLNRILKGHRKGELTVFTGPTGSGKTTFISEYALDLCSQGVNTLWGSFEISNVRLARVMLTQFAEGRLEDQLDKYDHWADRFEDLPLYFMTFHGQQSIRTVIDTMQHAVYVYDICHVIIDNLQFMMGHEQLSTDRIAAQDYIIGVFRKFATDNNCHVTLVIHPRKEDDDKELQTASIFGSAKASQEADNVLILQDRKLVTGPGKRYLQVSKNRFDGDVGVFPLEFNKNSLTFSIPPKNKARLKKIKDDTGPVAKKPSSGKKGATTQNSEICSGQAPTPDQPDTSKRSK

SEQ ID NO: 858854 - protein, 792 aa, Homo sapiens
MWVLLRSGYPLRILLPLRGEWMGRRGLPRNLAPGPPRRRYRKETLQALDMPVLPVTATEIRQYLRGHGIPFQDGHSCLRALSPFAESSQLKGQTGVTTSFSLFIDKTTGHFLCMTSLAEGSWEDFQASVEGRGDGAREGFLLSKAPEFEDSEEVRRIWNRAIPLWELPDQEEVQLADTMFGLTKVTDDTLKRFSVRYLRPARSLVFPWFSPGGSGLRGLKLLEAKCQGDGVSYEETTIPRPSAYHNLFGLPLISRRDAEVVLTSRELDSLALNQSTGLPTLTLPRGTTCLPPALLPYLEQFRRIVFWLGDDLRSWEAAKLFARKLNPKRCFLVRPGDQQPRPLEALNGGFNLSRILRTALPAWHKSIVSFRQLREEVLGELSNVEQAAGLRWSRFPDLNRILKGHRKGELTVFTGPTGSGKTTFISEYALDLCSQGVNTLWGSFEISNVRLARVMLTQFAEGRLEDQLDKYDHWADRFEDLPLYFMTFHGQQSIRTVIDTMQHAVYVYDICHVIIDNLQFMMGHEQLSTDRDGDILSCLAGARLDIQHTLLRQLASRHTCCALLFSEMCAGTYHPHVYHMEVWGMAAGCMDRDLSVSPWVEGGRVGCGSLWGDVNGSRVCVCSCPSVSDKLFVLLGWRRIAAQDYIIGVFRKFATDNNCHVTLVIHPRKEDDDKELQTASIFGSAKASQEADNVLILQDRKLVTGPGKRYLQVSKNRFDGDVGVFPLEFNKNSLTFSIPPKNKARLKKIKDDTGPVAKKPSSGKKGATTQNSEICSGQAPTPDQPDTSKRSK

SEQ ID NO: 858855 - protein, 351 aa, Homo sapiens
LLHIATQSVVENAGQEAARSPARRHSYSLEAAEPKQRGEGGGTKPRGFRFRDDRSRSFASEVKRVACAGDSRCRRSGREKSGPTGSGKTTFISEYALDLCSQGVNTLWGSFEISNVRLARVMLTQFAEGRLEDQLDKYDHWADRFEDLPLYFMTFHGQQSIRTVIDTMQHAVYVYDICHVIIDNLQFMMGHEQLSTDRIAAQDYIIGVFRKFATDNNCHVTLVIHPRKEDDDKELQTASIFGSAKASQEADNVLILQDRKLVTGPGKRYLQVSKNRFDGDVGVFPLEFNKNSLTFSIPPKNKARLKKIKDDTGPVAKKPSSGKKGATTQNSEICSGQAPTPDQPDTSKRSK

SEQ ID NO: 858856 - protein, 582 aa, Homo sapiens
MWVLLRSGYPLRILLPLRGEWMGRRGLPRNLAPGPPRRRYRKETLQALDMPVLPVTATEIRQYLRGHGIPFQDGHSCLRALSPFAESSQLKGQTGVTTSFSLFIDKTTGHFLCMTSLAEGSWEDFQASVEGRGDGAREGFLLSKAPEFEDSEEVRRIWNRAIPLWELPDQEEVQLADTMFGLTKVTDDTLKRFSVRYLRPARSLVFPWFSPGGSGLRGLKLLEAKCQGDGVSYEETTIPRPSAYHNLFGLPLISRRDAEVVLTSRELDSLALNQSTGLPTLTLPRGTTCLPPALLPYLEQFRRIVFWLGDDLRSWEAAKLFARKLNPKRCFLVRPGDQQPRPLEALNGGFNLSRILRTALPAWHKSIVSFRQLREEVLGELSNVEQAAGLRWSRFPDLNRILKGHRKGELTVFTGPTGSGKTTFISEYALDLCSQGVNTLWGSFEISNVRLARVMLTQFAEGRLEDQLDKYDHWADRFEDLPLYFMTFHGQQSIRTVIDTMQHAVYVYDICHVIIDNLQFMMGHEQLSTDRIAAQDYIIGVFRKFATDNNCHVTLVIHPRKEDDDKELQTASIFGSAKVSGL

SEQ ID NO: 858857 - protein, 249 aa, Homo sapiens
LLHIATQSVVENAGQEAARSPARRHSYSLEAAEPKQRGEGGGTKPRGFRFRDDRSRSFASEVKRVACAGDSRCRRSGREKSGPTGSGKTTFISEYALDLCSQGVNTLWGSFEISNVRLARVMLTQFAEGRLEDQLDKYDHWADRFEDLPLYFMTFHGQQSIRTVIDTMQHAVYVYDICHVIIDNLQFMMGHEQLSTDRIAAQDYIIGVFRKFATDNNCHVTLVIHPRKEDDDKELQTASIFGSAKVSGL

SEQ ID NO: 858858 - protein, 210 aa, Homo sapiens
LLHIATQSVVENAGQEAARSPARRHSYSLEAAEPKQRGEGGGTKPRGFRFRDDRSRSFASEVKGVNTLWGSFEISNVRLARVMLTQFAEGRLEDQLDKYDHWADRFEDLPLYFMTFHGQQSIRTVIDTMQHAVYVYDICHVIIDNLQFMMGHEQLSTDRIAAQDYIIGVFRKFATDNNCHVTLVIHPRKEDDDKELQTASIFGSAKVSGL

SEQ ID NO: 858859 - protein, 82 aa, Homo sapiens
LLHIATQSVVENAGQEAARSPARRHSYSLEAAEPKQRGEGGGTKPRGFRFRDDRSRSFASEVKASSMCGRLTLPAKWEREKW

SEQ ID NO: 858860 - protein, 582 aa, Homo sapiens; identical to SEQ ID NO: 858856

SEQ ID NO: 858861 - protein, 230 aa, Homo sapiens
MLTQFAEGRLEDQLDKYDHWADRFEDLPLYFMTFHGQQSIRTVIDTMQHAVYVYDICHVIIDNLQFMMGHEQLSTDRIAAQDYIIGVFRKFATDNNCHVTLVIHPRKEDDDKELQTASIFGSAKASQEADNVLILQDRKLVTGPGKRYLQVSKNRFDGDVGVFPLEFNKNSLTFSIPPKNKARLKKIKDDTGPVAKKPSSGKKGATTQNSEICSGQAPTPDQPDTSKRSK

SEQ ID NO: 858862 - protein, 582 aa, Homo sapiens; identical to SEQ ID NO: 858856

SEQ ID NO: 858863 - protein, 225 aa, Homo sapiens
MCAGTYHPHVYHMEVWGMAAGCMDRDLSVSPWVEGGRVGCGSLWGDVNGSRVCVCSCPSVSDKLFVLLGWRRIAAQDYIIGVFRKFATDNNCHVTLVIHPRKEDDDKELQTASIFGSAKASQEADNVLILQDRKLVTGPGKRYLQVSKNRFDGDVGVFPLEFNKNSLTFSIPPKNKARLKKIKDDTGPVAKKPSSGKKGATTQNSEICSGQAPTPDQPDTSKRSK

SEQ ID NO: 858864 - protein, 184 aa, Homo sapiens [sequence omitted]

SEQ ID NO: 858865 - protein, 351 aa, Homo sapiens; identical to SEQ ID NO: 858855

SEQ ID NO: 858866 - protein, 116 aa, Homo sapiens
MRKLFSFGRRLGQALLSSMDQEYAGPGYDIRDWELRKIHRAAIKGDAAEVERCLTRRFRDLDARDRKDRTVLHLACAHGRVQVVTLLLHRRCQIDICDRLNRTPLMKVYSSQLFQH

SEQ ID NO: 858867 - protein, 374 aa, Homo sapiens
MRKLFSFGRRLGQALLSSMDQEYAGPGYDIRDWELRKIHRAAIKGDAAEVERCLTRRFRDLDARDRKDRTVLHLACAHGRVQVVTLLLHRRCQIDICDRLNRTPLMKAVHSQEEACAIVLLECGANPNIEDIYGNTALHYAVYNKGTSLAERLLSHHANIEALNKEGNTPLLFAINSRRQHMVEFLLKNQANIHAVDNFKRTALILAVQHNLSSIVTLLLQQNIRISSQDMFGQTAEDYALCSDLRSIRQQILEHKNKMLKNHLRNDNQEAAAMKNESFKTQGASSKVSLYHQSGVQWHDLRLLQPSPPRFKQFSCLSLPRSWDNRHMRPCPETAAMKPANLKKRKERAKEHNLKVASEEKQERLQRSENKQPQ

SEQ ID NO: 858868 - protein, 32 aa, Homo sapiens
MLLTPQSLFWFPFISLTFLWGAAQSGHLRFDE

SEQ ID NO: 858869 - protein, 134 aa, Homo sapiens
GRAAILSLLGHLRRRRVPVTGVFLPHTPGRQGAPVRLQVIAVIGPSLGLGGSLPSPEVGHSTPGCWLWPCPRSAPLQDETGRAGGTGLGARPPSLQPRVPRQGAQLVRGLSFCPHQFSCVALVAFLGGRWGDVG

SEQ ID NO: 858870 - protein, 32 aa, Homo sapiens
MLLTPQSLFWFPFISLTFLWAAAQSGHLRFDE

SEQ ID NO: 858871 - protein, 120 aa, Homo sapiens
VLPPLTGHTKKISQHLSDRGEQWPSSSRQELLRSCAYRLYVMKNTQEDFVTVTCCFFCASVTSVGKRDFLLAPACWRSACLSFQSDPSISLLPEGKERWARQRTELEAVHLGNGTVRPYL

SEQ ID NO: 858872 - protein, 100 aa, Homo sapiens
IMASRGTVLIGEAEVEAGCGRRRQWRRRHGRACRGASWEPSPTRNPVRLTCSSTRKMYQPMMSSSAEAAATAAMVPRMDPCCLGDPGLTAREHSGSAPGE

SEQ ID NO: 858873 - protein, 114 aa, Homo sapiens
  misc_feature (44)..(44): Xaa can be any naturally occurring amino acid
  misc_feature (109)..(109): Xaa can be any naturally occurring amino acid
KDTPSSHHDWGASAEPGDHHGLIWATSEKHGSGWSFRDAGGTLXGLEEGRVFVLPCIQQIQRISLNTLTLNVKSEKVYTRHGVPISVTGIAQVKIQGGRNKGDVGRPQXYFPFS

SEQ ID NO: 858874 - protein, 184 aa, Homo sapiens
IHALVSSPYCRAAGGREFTSDYETARIARREKELEARVRKPAEAERYKLERLAEAEKSQLIMQAEAEAASVRMRGEAEAFAIGARARAEAEQMAKKAEAFQLYQEAAQLDMLLEKLPQVAEEISGPLTSANKITLVSSGSGTMGAAKVTGEVLDILTRLPESVERLTGVSISQVRSQVGAEENC

SEQ ID NO: 858875 - protein, 207 aa, Homo sapiens
MTSRSTPAEHRLTWPISFRWPVAKTKQQIEEQRVQVQVVERAQQVAVQEQEIARREKELEARVRKPAEAERYKLERLAEAEKSQLIMQAEAEAASVRMRGEAEAFAIGARARAEAEQMAKKAEAFQLYQEAAQLDMLLEKLPQVAEEISGPLTSANKITLVSSGSGTMGAAKVTGEVLDILTRLPESVERLTGVSISQVNHKPLRTA

SEQ ID NO: 858876 - protein, 207 aa, Homo sapiens; identical to SEQ ID NO: 858875

SEQ ID NO: 858877 - protein, 207 aa, Homo sapiens; identical to SEQ ID NO: 858875

SEQ ID NO: 858878 - protein, 207 aa, Homo sapiens; identical to SEQ ID NO: 858875

SEQ ID NO: 858879 - protein, 168 aa, Homo sapiens
MLAAACQMFLGKTEAEIAHIALETLEGHQRAIMAHMTVEEIYKDRQKFSEQVFKVASSDLVNMGISVVSYTLKDIHDDQDYLHSLGKARTAQVQKDARIGEAEAKRDAGIREAKAKQEKVSAQYLSEIEMAKAQRDYELKKAAYDIEVNTRRAQADLAYQLQVASGQD

SEQ ID NO: 858880 - protein, 207 aa, Homo sapiens; identical to SEQ ID NO: 858875

SEQ ID NO: 858881 - protein, 201 aa, Homo sapiens
MTSRSTPAEHRLTWPISFRWPQIEEQRVQVQVVERAQQVAVQEQEIARREKELEARVRKPAEAERYKLERLAEAEKSQLIMQAEAEAASVRMRGEAEAFAIGARARAEAEQMAKKAEAFQLYQEAAQLDMLLEKLPQVAEEISGPLTSANKITLVSSGSGTMGAAKVTGEVLDILTRLPESVERLTGVSISQVNHKPLRTA

SEQ ID NO: 858882 - protein, 207 aa, Homo sapiens; identical to SEQ ID NO: 858875

SEQ ID NO: 858883 - protein, 207 aa, Homo sapiens; identical to SEQ ID NO: 858875

SEQ ID NO: 858884 - protein, 209 aa, Homo sapiens
MTSRSTPAEHRLTWPISFRWPVAKTKQQIEEQRVQVQVVERAQQVAVQEQEIARREKELEARVRKPAEAERYKLERLAEAEKSQLIMQAEAEAASVRMRGEAEAFAIGARARAEAEQMAKKAEAFQLYQEAAQLDMLLEKLPQVAEEISGPLTSANKITLVSSGSGTMGAAKVTGEVLDILTRLPESVERLTGVSISQVRSQVGAEENC

SEQ ID NO: 858885 - protein, 177 aa, Homo sapiens
MLAAACQMFLGKTEAEIAHIALETLEGHQRAIMAHMTVEEIYKDRQKFSEQVFKVASSDLVNMGISVVSYTLKDIHDDQDYLHSLGKARTAQVQKDARIGEAEAKRDAGIREAKAKQEKVSAQYLSEIEMAKAQRDYELKKAAYDIEVNTRRAQADLAYQLQVASGRGDQWSLDFSQ

SEQ ID NO: 858886 - protein, 177 aa, Homo sapiens; identical to SEQ ID NO: 858885

SEQ ID NO: 858887 - protein, 168 aa, Homo sapiens; identical to SEQ ID NO: 858879

SEQ ID NO: 858888 - protein, 183 aa, Homo sapiens
MLAAACQMFLGKTEAEIAHIALETLEGHQRAIMAHMTVEEIYKDRQKFSEQVFKVASSDLVNMGISVVSYTLKDIHDDQDYLHSLGKARTAQVQKDARIGEAEAKRDAGIREAKAKQEKVSAQYLSEIEMAKAQRDYELKKAAYDIEVNTRRAQADLAYQLQVATKTTQMRTRSVRDDTMDPL

SEQ ID NO: 858889 - protein, 172 aa, Homo sapiens
MLAAACQMFLGKTEAEIAHIALETLEGHQRAIMAHMTVEEIYKDRQKFSEQVFKVASSDLVNMGISVVSYTLKDIHDDQDYLHSLGKARTAQVQKDARIGEAEAKRDAGIREAKAKQEKVSAQYGSTGHSNSPARECGKTHRREHLPGESQAFENSLSLQPSQMPSLIAEVA

SEQ ID NO: 858890 - protein, 128 aa, Homo sapiens
MFFTCGPNEAMVVSGFCRSPPVMVAGGRVFVLPCIQQIQRISLNTLTLNVKSEKVYTRHGVPISVTGIAQVKLSEPFPHSPLPHHPLSQTLRHLLATVFSTLACREVPLLVSSFPGTPRHLPPPPFFP

SEQ ID NO: 858891 - protein, 112 aa, Homo sapiens
MFFTCGPNEAMVVSGFCRSPPVMVAGGRVFVLPCIQQIQRISLNTLTLNVKSEKVYTRHGVPISVTGIAQVKLSEPFPHSPLPHHPLSQTLRHLLATTIWKDVKMRGAQGPH

SEQ ID NO: 858892 - protein, 75 aa, Homo sapiens
GVGALEDPRWPVAEEISGPLTSANKITLVSSGSGTMGAAKVTGEVLDILTRLPESVERLTGVSISQVNHKPLRTA

SEQ ID NO: 858893 - protein, 207 aa, Homo sapiens; identical to SEQ ID NO: 858875

SEQ ID NO: 858894 - protein, 247 aa, Homo sapiens
MFFTCGPNEAMVVSGFCRSPPVMVAGGRVFVLPCIQQIQRISLNTLTLNVKSEKVYTRHGVPISVTGIAQVKIQGQNKEMLAAACQMFLGKTEAEIAHIALETLEGHQRAIMAHMTVEEIYKDRQKFSEQVFKVASSDLVNMGISVVSYTLKDIHDDQDYLHSLGKARTAQVQKDARIGEAEAKRDAGIREAKAKQEKVSAQYLSEIEMAKAQRDYELKKAAYDIEVNTRRAQADLAYQLQVASGQD

SEQ ID NO: 858895 - protein, 207 aa, Homo sapiens; identical to SEQ ID NO: 858875

SEQ ID NO: 858896 - protein, 168 aa, Homo sapiens; identical to SEQ ID NO: 858879

SEQ ID NO: 858897 - protein, 340 aa, Homo sapiens
MFFTCGPNEAMVVSGFCRSPPVMVAGGRVFVLPCIQQIQRISLNTLTLNVKSEKVYTRHGVPISVTGIAQVKIQGQNKEMLAAACQMFLGKTEAEIAHIALETLEGHQRAIMAHMTVEEIYKDRQKFSEQVFKVASSDLVNMGISVVSYTLKDIHDDQDYLHSLGKARTAQVQKDARIGEAEAKRDAGIREAKAKQEKVSAQYLSEIEMAKAQRDYELKKAAYDIEVNTRRAQADLAYQLQVATRAEAEQMAKKAEAFQLYQEAAQLDMLLEKLPQVAEEISGPLTSANKITLVSSGSGTMGAAKVTGEVLDILTRLPESVERLTGVSISQVNHKPLRTA

SEQ ID NO: 858898 - protein, 256 aa, Homo sapiens
MFFTCGPNEAMVVSGFCRSPPVMVAGGRVFVLPCIQQIQRISLNTLTLNVKSEKVYTRHGVPISVTGIAQVKIQGQNKEMLAAACQMFLGKTEAEIAHIALETLEGHQRAIMAHMTVEEIYKDRQKFSEQVFKVASSDLVNMGISVVSYTLKDIHDDQDYLHSLGKARTAQVQKDARIGEAEAKRDAGIREAKAKQEKVSAQYLSEIEMAKAQRDYELKKAAYDIEVNTRRAQADLAYQLQVASGRGDQWSLDFSQ

SEQ ID NO: 858899 - protein, 168 aa, Homo sapiens; identical to SEQ ID NO: 858879

SEQ ID NO: 858900 - protein, 75 aa, Homo sapiens; identical to SEQ ID NO: 858892

SEQ ID NO: 858901 - protein, 251 aa, Homo sapiens
  misc_feature (130)..(130): Xaa can be any naturally occurring amino acid
  misc_feature (189)..(189): Xaa can be any naturally occurring amino acid
MLAAACQMFLGKTEAEIAHIALETLEGHQRAIMAHMTVEEIYKDRQKFSEQVFKVASSDLVNMGISVVSYTLKDIHDDQDYLHSLGKARTAQVQKDARIGEAEAKRDAGIRKLKPTMGGTHRGVCSMYLXFGKGKFPGTAMGPRAQRDYELKKAAYDIEVNTRRAQADLAYQLQVATFWGPPYSKRLQXVAKTKQQIEEQRVQVQVVERAQQVAVQEQEEVLDILTRLPESVERLTGVSISQVNHKPLRTA

SEQ ID NO: 858902 - protein, 128 aa, Homo sapiens; identical to SEQ ID NO: 858890

SEQ ID NO: 858903 - protein, 86 aa, Homo sapiens
VLSGGCCLIGDFLFLMISVNLTSILNPQMRGEAEAFAIGARARAEAEQMAKKAEAFQLYQEAAQLDMLLEKLPQVWRSCGHQERRK

SEQ ID NO: 858904 - protein, 185 aa, Homo sapiens
KSESMGLWECEGSGSAPPDASTGASAAQSPVSDYRACTDGHSKKDVPVPYSLAMAKGFSTSILPQSAMITSFRGLSRLSVLVLSTFSGPARGKGAQRCCQVARMELFDFGTCAQPRRSRRSRSISTRSARGPTMGAGLDVWQLIPTGWSVEGAQPSPSGTSDPPHPPPSSPSGRHRSTSPSTRTW

SEQ ID NO: 858905 - protein, 341 aa, Homo sapiens
MERAVPLAVPLGQTEVFQALQRLHMTIFSQSVSPCGKFLAAGNNYGQIAIFSLSSALSSEAKEESKKPVVTFQAHDGPVYSMVSTDRHLLSAGDGEVKAWLWAEMLKKGCKELWRRQPPYRTSLEVPEINALLLVPKENSLILAGGDCQLHTMDLETGTFTRVLRGHTDYIHCLALRERSPEVLSGGEDGAVRLWDLRTAKEVQTIEVYKHEECSRPHNGRWIGCLATDSDWMVCGGGPALTLWHLRSSTPTTIFPIRAPQKHVTFYQDLILSAGQGRCVNQWQLSGELKAQVPGSSPGLLSLSLNQQPAAPECKVLTAAGNSCRVDVFTNLGYRAFSLSF

SEQ ID NO: 858906 - protein, 341 aa, Homo sapiens; identical to SEQ ID NO: 858905

SEQ ID NO: 858907 - protein, 281 aa, Homo sapiens
MERAVPLAVPLGQTEVFQALQRLHMTIFSQSVSPCGKFLAAGNNYGQIAIFSLSSALSSEAKEESKKPVVTFQAHDGPVYSMVSTDRHLLSAGDGEVKAWLWAEMLKKGCKELWRRQPPYRTSLEVPEINALLLVPKENSLILAGGDCQLHTMDLETGTFTRVLRGHTDYIHCLALRERSPEVLSGGEDGAVRLWEPMMALSIASVSTDRHLLSAGDGEMKAWLWDGDAQEGLEGAVASSASHTGPAWKCLRSTALLLVPKENSIILAGGDCQKHVTFSDT

SEQ ID NO: 858908 - protein, 260 aa, Homo sapiens [sequence omitted]

SEQ ID NO: 858909 - protein, 260 aa, Homo sapiens [sequence omitted]

SEQ ID NO: 858910 - protein, 332 aa, Homo sapiens
MERAVPLAVPLGQTEVFQALQRLHMTIFSQSVSPCGKFLAAGNNYGQIAIFSLSSALSSEAKEETHDGPVYSMVSTDRHLLSAGDGEVKAWLWAEMLKKGCKELWRRQPPYRTSLEVPEINALLLVPKENSLILAGGDCQLHTMDLETGTFTRVLRGHTDYIHCLALRERSPEVLSGGEDGAVRLWDLRTAKEVQTIEVYKHEECSRPHNGRWIGCLATDSDWMVCGGGPALTLWHLRSSTPTTIFPIRAPQKHVTFYQDLILSAGQGRCVNQWQLSGELKAQVPGSSPGLLSLSLNQQPAAPECKVLTAAGNSCRVDVFTNLGYRAFSLSF

SEQ ID NO: 858911 - protein, 369 aa, Homo sapiens
MERAVPLAVPLGQTEVFQALQRLHMTIFSQSVSPCGKFLAAGNNYGQIAIFSLSSALSSEAKEESKKPVVTFQAHDGPVYSMVSTDRHLLSAGDGEVKAWLWAEMLKKVRSRAWERAGVPGPRESLGGHLVLSLLKGCKELWRRQPPYRTSLEVPEINALLLVPKENSLILAGGDCQLHTMDLETGTFTRVLRGHTDYIHCLALRERSPEVLSGGEDGAVRLWDLRTAKEVQTIEVYKHEECSRPHNGRWIGCLATDSDWMVCGGGPALTLWHLRSSTPTTIFPIRAPQKHVTFYQDLILSAGQGRCVNQWQLSGELKAQVPGSSPGLLSLSLNQQPAAPECKVLTAAGNSCRVDVFTNLGYRAFSLSF

SEQ ID NO: 858912 - protein, 199 aa, Homo sapiens
MERAVPLAVPLGQTEVFQALQRLHMTIFSQSVSPCGKFLAAGNNYGQIAIFSLSSALSSEAKEESKKPVVTFQAHDGPVYSMVSTDRHLLSAGDGEVKAWLWAEMLKKGCKELWRRQPPYRTSLEVPEINALLLVPKDTPSQLRVLECFSFSFFFFFYNKVSGFFTMLFLSMNGGQIGGVIYILLCPILIHKYPAPSLP

SEQ ID NO: 858913 - protein, 189 aa, Homo sapiens [sequence omitted]

SEQ ID NO: 858914 - protein, 167 aa, Homo sapiens
  misc_feature (8)..(8): Xaa can be any naturally occurring amino acid
DRLVAPRXKDQVARMELFDFGDLRTAKEVQTIEVYKHEECSRPHNGRWIGCLATDSDWMVCGGGPALTLWHLRSSTPTTIFPIRAPQKHVTFYQDLILSAGQGRCVNQWQLSGELKAQVPGSSPGLLSLSLNQQPAAPECKVLTAAGNSCRVDVFTNLGYRAFSLSF

SEQ ID NO: 858915 - protein, 341 aa, Homo sapiens; identical to SEQ ID NO: 858905

SEQ ID NO: 858916 - protein, 341 aa, Homo sapiens; identical to SEQ ID NO: 858905

SEQ ID NO: 858917 - protein, 341 aa, Homo sapiens; identical to SEQ ID NO: 858905

SEQ ID NO: 858918 - protein, 347 aa, Homo sapiens
MERAVPLAVPLGQTEVFQALQRLHMTIFSQSVSPCGKFLAAGNNYGQIAIFSLSSALSSEAKEESKKPVVTFQVLHFSLAHDGPVYSMVSTDRHLLSAGDGEVKAWLWAEMLKKGCKELWRRQPPYRTSLEVPEINALLLVPKENSLILAGGDCQLHTMDLETGTFTRVLRGHTDYIHCLALRERSPEVLSGGEDGAVRLWDLRTAKEVQTIEVYKHEECSRPHNGRWIGCLATDSDWMVCGGGPALTLWHLRSSTPTTIFPIRAPQKHVTFYQDLILSAGQGRCVNQWQLSGELKAQVPGSSPGLLSLSLNQQPAAPECKVLTAAGNSCRVDVFTNLGYRAFSLSF

SEQ ID NO: 858919 - protein, 347 aa, Homo sapiens; identical to SEQ ID NO: 858918

SEQ ID NO: 858920 - protein, 189 aa, Homo sapiens [sequence omitted]

SEQ ID NO: 858921 - protein, 211 aa, Homo sapiens
PHPAPPQENSLILAGGDCQLHTMDLETGTFTRVLRGHTDYIHCLALRERSPEVLSGGEDGAVRLWDLRTAKEVQTIEVYKHEECSRPHNGRWIGCLATDSDWMVCGGGPALTLWHLRSSTPTTIFPIRAPQKHVTFYQDLILSAGQGRCVNQWQLSGELKAQVPGSSPGLLSLSLNQQPAAPECKVLTAAGNSCRVDVFTNLGYRAFSLSF

SEQ ID NO: 858922 - protein, 559 aa, Homo sapiens
MRKFAYCKVVLATSLIWVLLDMFLLLYFSECNKCDEKKERGLPAGDVLEPVQKPHEGPGEMGKPVVIPKEDQEKMKEMFKINQFNLMASEMIALNRSLPDVRLEGCKTKVYPDNLPTTSVVIVFHNEAWSTLLRTVHSVINRSPRHMIEEIVLVDDASERDFLKRPLESYVKKLKVPVHVIRMEQRSGLIRARLKGAAVSKGQVITFLDAHCECTVGWLEPLLARIKHDRRTVVCPIIDVISDDTFEYMAGSDMTYGGFNWKLNFRWYPVPQREMDRRKGDRTLPVRTPTMAGGLFSIDRDYFQEIGTYDAGMDIWGGENLEISFRIWQCGGTLEIVTCSHVGHVFRKATPYTFPGGTGQIINKNNRRLAEVWMDEFKNFFYIISPGVTKVDYGDISSRVGLRHKLQCKPFSWYLENIYPDSQIPRHYFSLGEIRNVETNQCLDNMARKENEKVGIFNCHGMGGNQVFSYTANKEIRTDDLCLDVSKLNGPVTMLKCHHLKGNQLWEYDPVKLTLQHVNSNQCLDKATEEDSQVPSIRDCNGSRSQQWLLRNVTLPEIF

SEQ ID NO: 858923 - protein, 559 aa, Homo sapiens; identical to SEQ ID NO: 858922

SEQ ID NO: 858924 - protein, 499 aa, Homo sapiens [sequence omitted]

SEQ ID NO: 858925 - protein, 559 aa, Homo sapiens; identical to SEQ ID NO: 858922

SEQ ID NO: 858926 - protein, 541 aa, Homo sapiens
MRKFAYCKVVLATSLIWVLLDMFLLLYFSECNKCDEKKERGLPAGDVLEPVQKPHEGPGEMGKPVVIPKEDQEKMKEMFKINQFNLMASEMIALNRSLPDVRLEGCKTKVYPDNLPTTSVVIVFHNEAWSTLLRTVHSVINRSPRHMIEEIVLVDDASERDFLKRPLESYVKKLKVPVHVIRMEQRSGLIRARFECTVGWLEPLLARIKHDRRTVVCPIIDVISDDTFEYMAGSDMTYGGFNWKLNFRWYPVPQREMDRRKGDRTLPVRTPTMAGGLFSIDRDYFQEIGTYDAGMDIWGGENLEISFRIWQCGGTLEIVTCSHVGHVFRKATPYTFPGGTGQIINKNNRRLAEVWMDEFKNFFYIISPGVTKVDYGDISSRVGLRHKLQCKPFSWYLENIYPDSQIPRHYFSLGEIRNVETNQCLDNMARKENEKVGIFNCHGMGGNQVFSYTANKEIRTDDLCLDVSKLNGPVTMLKCHHLKGNQLWEYDPVKLTLQHVNSNQCLDKATEEDSQVPSIRDCNGSRSQQWLLRNVTLPEIF

SEQ ID NO: 858927 - protein, 399 aa, Homo sapiens
MRKFAYCKVVLATSLIWVLLDMFLLLYFSECNKCDEKKERGLPAGDVLEPVQKPHEGPGEMGKPVVIPKEDQEKMKEMFKINQFNLMASEMIALNRSLPDVRLEGCKTKVYPDNLPTTSVVIVFHNEAWSTLLRTVHSVINRSPRHMIEEIVLVDDASERDFLKRPLESYVKKLKVPVHVIRMEQRSGLIRARLKGAAVSKGQVITFLDAHCECTVGWLEPLLARIKHDRRTVVCPIIDVISDDTFEYMAGSDMTYGGFNWKLNFRWYPVPQREMDRRKGDRTLPVRTPTMAGGLFSIDRDYFQEIGTYDAGMDIWGGENLEISFRIWQCGGTLEIVTCSHVGHVFRKATPYTFPGGTGQIINKNKCYKGRLWRYIVKSWSKTQTTMQTFFLVPREYIS

SEQ ID NO: 858928 - protein, 114 aa, Homo sapiens
MARKENEKVGIFNCHGMGGNQVFSYTANKEIRTDDLCLDVSKLNGPVTMLKCHHLKGNQLWEYDPVKLTLQHVNSNQCLDKATEEDSQVPSIRDCNGSRSQQWLLRNVTLPEIF

SEQ ID NO: 858929 - protein, 559 aa, Homo sapiens; identical to SEQ ID NO: 858922

SEQ ID NO: 858930 - protein, 559 aa, Homo sapiens; identical to SEQ ID NO: 858922

SEQ ID NO: 858931 - protein, 559 aa, Homo sapiens; identical to SEQ ID NO: 858922

SEQ ID NO: 858932 - protein, 280 aa, Homo sapiens
VHFSYGEQDRRKGDHLAFRHSSSFQEIGTYDAGMDIWGGENLEISFRIWQCGGTLEIVTCSHVGHVFRKATPYTFPGGTGQIINKNNRRLAEVWMDEFKNFFYIISPGVTKVDYGDISSRVGLRHKLQCKPFSWYLENIYPDSQIPRHYFSLGEIRNVETNQCLDNMARKENEKVGIFNCHGMGGNQVFSYTANKEIRTDDLCLDVSKLNGPVTMLKCHHLKGNQLWEYDPVKLTLQHVNSNQCLDKATEEDSQVPSIRDCNGSRSQQWLLRNVTLPEIF

SEQ ID NO: 858933 - protein, 361 aa, Homo sapiens
MRKFAYCKVVLATSLIWVLLDMFLLLYFSECNKCDEKKERGLPAGDVLEPVQKPHEGPGEMGKPVVIPKEDQEKMKEMFKINQFNLMASEMIALNRSLPDVRLEGCKTKVYPDNLPTTSVVIVFHNEAWSTLLRTVHSVINRSPRHMIEEIVLVDDASERDFLKRPLESYVKKLKVPVHVIRMEQRSGLIRARLKGAAVSKGQVITFLDAHCECTVGWLEPLLARIKHDRRTVVCPIIDVISDDTFEYMAGSDMTYGGFNWKLNFRWYPVPQREMDRRKGDRTLPVRTPTMAGGLFSIDRDYFQEIGTYDAGMDIWGGENLEISFRIWQCGGTLEIVTCSHVGHVFRKATPYTFPGGWRLQ

SEQ ID NO: 858934 - protein, 124 aa, Homo sapiens
REGHRGLRSAGSGFQLPTTQTSTGVRGAGRPPPDSGPRVGNVSARKLAEWFFGWRLNLASLRRPSPANAYPASTGGCAVPLVTVITVHGRLRIPTPCSEEGSEATPACGVGGRASGTPEGVVAR

SEQ ID NO: 858935 - protein, 99 aa, Homo sapiens
REGHRGLRSAGSGFQLPTTQTSTGVRGAGRPPPDSGPRVGNNNFGPPGVYARYEVYLCPPSSSKDGHVNKFRHCDDCHKKQHYEVECKRITLAAAGAGG

SEQ ID NO: 858936 - protein, 124 aa, Homo sapiens; identical to SEQ ID NO: 858934

SEQ ID NO: 858937 - protein, 152 aa, Homo sapiens
MANCERTFIAIKPDGVQRGLVGEIIKRFEQKGFRLVGLKFMQASEDLLKEHYVDLKDRPFFAGLVKYMHSGPVVAMVWEGLNVVKTGRVMLGETNPADSKPGTIRGDFCIQVGRNIIHGSDSVESAEKEIGLWFHPEELVDYTSCAQNWIYE

SEQ ID NO: 858938 - protein, 121 aa, Homo sapiens
YRLVRGWCLNRPWEDLLKEHYVDLKDRPFFAGLVKYMHSGPVVAMVWEGLNVVKTGRVMLGETNPADSKPGTIRGDFCIQVGRNIIHGSDSVESAEKEIGLWFHPEELVDYTSCAQNWIYE

SEQ ID NO: 858939 - protein, 152 aa, Homo sapiens; identical to SEQ ID NO: 858937

SEQ ID NO: 858940 - protein, 152 aa, Homo sapiens; identical to SEQ ID NO: 858937

SEQ ID NO: 858941 - protein, 188 aa, Homo sapiens
AEAFRACKCCEPRGSRARFGCWRLQPEFKPKQLEGTMANCERTFIAIKPDGVQRGLVGEIIKRFEQKGFRLVGLKFMQASEDLLKEHYVDLKDRPFFAGLVKYMHSGPVVAMVWEGLNVVKTGRVMLGETNPADSKPGTIRGDFCIQVGRNIIHGSDSVESAEKEIGLWFHPEELVDYTSCAQNWIYE

SEQ ID NO: 858942 - protein, 188 aa, Homo sapiens; identical to SEQ ID NO: 858941

SEQ ID NO: 858943 - protein, 188 aa, Homo sapiens; identical to SEQ ID NO: 858941

SEQ ID NO: 858944 - protein, 188 aa, Homo sapiens; identical to SEQ ID NO: 858941

SEQ ID NO: 858945 - protein, 190 aa, Homo sapiens
SARYEAGCLKCCEPRGSRARFGCWRLQPEFKPKQLEGTMANCERTFIAIKPDGVQRGLVGEIIKRFEQKGFRLVGLKFMQASEDLLKEHYVDLKDRPFFAGLVKYMHSGPVVAMVWEGLNVVKTGRVMLGETNPADSKPGTIRGDFCIQVGRNIIHGSDSVESAEKEIGLWFHPEELVDYTSCAQNWIYE

SEQ ID NO: 858946 - protein, 177 aa, Homo sapiens
MVLLSTLGIVFQGEGPPISSCDTGTMANCERTFIAIKPDGVQRGLVGEIIKRFEQKGFRLVGLKFMQASEDLLKEHYVDLKDRPFFAGLVKYMHSGPVVAMVWEGLNVVKTGRVMLGETNPADSKPGTIRGDFCIQVGRNIIHGSDSVESAEKEIGLWFHPEELVDYTSCAQNWIYE

SEQ ID NO: 858947 - protein, 177 aa, Homo sapiens; identical to SEQ ID NO: 858946

SEQ ID NO: 858948 - protein, 177 aa, Homo sapiens; identical to SEQ ID NO: 858946

SEQ ID NO: 858949 - protein, 177 aa, Homo sapiens; identical to SEQ ID NO: 858946

SEQ ID NO: 858950 - protein, 188 aa, Homo sapiens; identical to SEQ ID NO: 858941

SEQ ID NO: 858951 - protein, 129 aa, Homo sapiens
MELNLFHRRESNLNSITNFTAEDLLKEHYVDLKDRPFFAGLVKYMHSGPVVAMVWEGLNVVKTGRVMLGETNPADSKPGTIRGDFCIQVGRNIIHGSDSVESAEKEIGLWFHPEELVDYTSCAQNWIYE

SEQ ID NO: 858952 - protein, 89 aa, Homo sapiens
AAYGADMAKSKNHTTHNQSRKWHRNGIKKPRSQRYESLKGVDPKFLRNMLLAKKHNKKGLKKMQANNAKAMSARAEAIKALVKPKEVSP

SEQ ID NO: 858953 - protein, 190 aa, Homo sapiens; identical to SEQ ID NO: 858945

SEQ ID NO: 858954 - protein, 188 aa, Homo sapiens; identical to SEQ ID NO: 858941

SEQ ID NO: 858955 - protein, 188 aa, Homo sapiens; identical to SEQ ID NO: 858941

SEQ ID NO: 858956 - protein, 188 aa, Homo sapiens; identical to SEQ ID NO: 858941

SEQ ID NO: 858957 - protein, 177 aa, Homo sapiens; identical to SEQ ID NO: 858946

SEQ ID NO: 858958 - protein, 177 aa, Homo sapiens; identical to SEQ ID NO: 858946

SEQ ID NO: 858959 - protein, 177 aa, Homo sapiens; identical to SEQ ID NO: 858946

SEQ ID NO: 858960 - protein, 150 aa, Homo sapiens
AEAFRACKCCEPRGSRARFGCWRLQPEFKPKQLEGTMANCERTFIAIKPDGVQRGLVGEIIKRFEQKGFRLVGLKFMQASEDLLKEHYVDLKDRPFFAGLVKYMHSGPVVAMVWEGLNVVKTGRVMLGETNPADSKPGTIRGDFCIQVGR

SEQ ID NO: 858961 - protein, 606 aa, Homo sapiens [sequence omitted]

SEQ ID NO: 858962 - protein, 186 aa, Homo sapiens
MEPPRGPPANGAEPSRAVGTVKVYLPNKQRTVVTVRDGMSVYDSLDKALKVRGLNQDCCVVYRLIKGRKTVTAWDTAIAPLDGEELIVEVLEDVPLTMHNFVRKTFFSLAFCDFCLKFLFHGFRCQTCGYKFHQHCSSKVPTVCVDMSTNRQQFYHSVQDLSGGSRQHEAPSNRPLNELLTPQGPR

SEQ ID NO: 858963 - protein, 418 aa, Homo sapiens
MEPPRGPPANGAEPSRAVGTVKVYLPNKQRTVVTVRDGMSVYDSLDKALKVRGLNQDCCVVYRLIKGRKTVTAWDTAIAPLDGEELIVEVLEDVPLTMHNFVRKTFFSLAFCDFCLKFLFHGFRCQTCGYKFHQHCSSKVPTVCVDMSTNRQQFYHSVQDLSGGSRQHEAPSNRPLNELLTPQGPSPRTQHCDPEHVPPISPGPAQVLRAYRRSADFRRAARQQSICVSQHRPPHGTHKLIQAHMAPGVFSSLMLPGKIERGSDGKPPHGGRHPKHTAKAAVPRGARKRSPTICHKRSTQGTRAKAAERAHTSMGAEETRDPTHVATKTLDAVNTSELTRATLTREGNPPPKLEEVAQLRLRTKDSRGTRSGRVGDTSSYQEGTRARIGRHVGPAKRSPHTRVPTPQQVRQAPGLSNH

SEQ ID NO: 858964 - protein, 48 aa, Homo sapiens
AAAYYYYCSEFKLLTMYGPMWILGGPFCVSPAIQGLLSFFTKKHRILL

SEQ ID NO: 858965 - protein, 643 aa, Homo sapiens
MEPPRGPPANGAEPSRAVGTVKVYLPNKQRTVVTVRDGMSVYDSLDKALKVRGLNQDCCVVYRLIKGRKTVTAWDTAIAPLDGEELIVEVLEDVPLTMHNFVRKTFFSLAFCDFCLKFLFHGFRCQTCGYKFHQHCSSKVPTVCVDMSTNRQQGAQPGVGGGMGSTEAQPRGPYRQLTVSPCFIPFMPSRFYHSVQDLSGGSRQHEAPSNRPLNELLTPQGPSPRTQHCDPEHFPFPAPANAPLQRIRSTSTPNVHMVSTTAPMDSNLIQLTGQSFSTDAAGSRGGSDGTPRGSPSPASVSSGRKSPHSKSPAEQRERKSLADDKKKVKNLGYRDSGYYWEVPPSEVQLLKRIGTGSFGTVFRGRWHGDVAVKVLKVSQPTAEQAQAFKNEMQVLRKTRHVNILLFMGFMTRPGFAIITQWCEGSSLYHHLHVADTRFDMVQLIDVARQTAQGMDYLHAKNIIHRDLKSNNIFLHEGLTVKIGDFGLATVKTRWSGAQPLEQPSGSVLWMAAEVIRMQDPNPYSFQSDVYAYGVVLYELMTGSLPYSHIGCRDQIIFMVGRGYLSPDLSKISSNCPKAMRRLLSDCLKFQREERPLFPQILATIELLQRSLPKIERSASEPSLHRTQADELPACLLSAARLVP

SEQ ID NO: 858966 - protein, 572 aa, Homo sapiens
  misc_feature (21)..(21): Xaa can be any naturally occurring amino acid
MLGALKIPQTVLAVASTLYFXSIGCRTMYEVTLVLRGSATDANMNPLDGEELIVEVLEDVPLTMHNFVRKTFFSLAFCDFCLKFLFHGFRCQTCGYKFHQHCSSKVPTVCVDMSTNRQQFYHSVQDLSGGSRQHEAPSNRPLNELLTPQGPSPRTQHCDPEHFPFPAPANAPLQRIRSTSTPNVHMVSTTAPMDSNLIQLTGQSFSTDAAGSRGGSDGTPRGSPSPASVSSGRKSPHSKSPAEQRERKSLADDKKKVKNLGYRDSGYYWEVPPSEVQLLKRIGTGSFGTVFRGRWHGDVAVKVLKVSQPTAEQAQAFKNEMQVLRKTRHVNILLFMGFMTRPGFAIITQWCEGSSLYHHLHVADTRFDMVQLIDVARQTAQGMDYLHAKNIIHRDLKSNNIFLHEGLTVKIGDFGLATVKTRWSGAQPLEQPSGSVLWMAAEVIRMQDPNPYSFQSDVYAYGVVLYELMTGSLPYSHIGCRDQIIFMVGRGYLSPDLSKISSNCPKAMRRLLSDCLKFQREERPLFPQILATIELLQRSLPKIERSASEPSLHRTQADELPACLLSAARLVP

SEQ ID NO: 858967 - protein, 395 aa, Homo sapiens
RTRHSNWDFSSPTAPMDSNLIQLTGQSFSTDAAGSRGGSDGTPRGSPSPASVSSGRKSPHSKSPAEQRERKSLADDKKKVKNLGYRDSGYYWEVPPSEVQLLKRIGTGSFGTVFRGRWHGDVAVKVLKVSQPTAEQAQAFKNEMQVLRKTRHVNILLFMGFMTRPGFAIITQWCEGSSLYHHLHVADTRFDMVQLIDVARQTAQGMDYLHAKNIIHRDLKSNNIFLHEGLTVKIGDFGLATVKTRWSGAQPLEQPSGSVLWMAAEVIRMQDPNPYSFQSDVYAYGVVLYELMTGSLPYSHIGCRDQIIFMVGRGYLSPDLSKISSNCPKAMRRLLSDCLKFQREERPLFPQILATIELLQRSLPKIERSASEPSLHRTQADELPACLLSAARLVP

SEQ ID NO: 858968 - protein, 533 aa, Homo sapiens
MEPPRGPPANGAEPSRAVGTVKVYLPNKQRTVVTVRDGMSVYDSLDKALKVRGLNQDCCVVYRLIKGRKTVTAWDTAIAPLDGEELIVEVLEDVPLTMHNFVRKTFFSLAFCDFCLKFLFHGFRCQTCGYKFHQHCSSKVPTVCVDMSTNRQQFYHSVQDLSGGSRQHEAPSNRPLNELLTPQGPSPRTQHCDPEHFPFPAPANAPLQRIRSTSTPNVHMVSTTAPMDSNLIQLTGQSFSTDAAGSRGGSDGTPRGSPSPASVSSGRKSPHSKSPAEQRERKSLADDKKKVKNLGYRDSGYYWEVPPSEVQLLKRIGTGSFGTVFRGRWHGDVAVKVLKVSQPTAEQAQAFKNEMQVLRKTRHVNILLFMGFMTRPGFAIITQWCEGSSLYHHLHVADTRFDMVQLIDVARQTAQGMDYLHAKNIIHRDLKSNNIFLHEGLTVKIGDFGLATVKTRWSGAQPLEQPSGSVLWMAAEVIRMQDTYGQVILIIAHVLTSSISIRPSKLNLRTHSQSHIILSQGHECSGTELNCIL

SEQ ID NO: 858969 - protein, 241 aa, Homo sapiens
KFQREERPLFPQILATIELLQRSLPKIERSASEPSLHRTQADEFLPAYSAQPALCLRPRPSHQGANLSPPRQGALPTSQSMFVSALMLPQDPPFTQPLEQPSGSVLWMAAEVIRMQDPNPYSFQSDVYAYGVVLYELMTGSLPYSHIGCRDQIIFMVGRGYLSPDLSKISSNCPKAMRRLLSDCLKFQREERPLFPQILATIELLQRSLPKIERSASEPSLHRTQADELPACLLSAARLVP

SEQ ID NO: 858970 - protein, 418 aa, Homo sapiens
MEPPRGPPANGAEPSRAVGTVKVYLPNKQRTVVTVRDGMSVYDSLDKALKVRGLNQDCCVVYRLIKGRKTVTAWDTAIAPLDGEELIVEVLEDVPLTMHNFVRKTFFSLAFCDFCLKFLFHGFRCQTCGYKFHQHCSSKVPTVCVDMSTNRQQFYHSVQDLSGGSRQHEAPSNRPLNELLTPQGPSPRTQHCDPEHVPPISPGPAQVLRAYRRSADFHVQLANSPYVSANTGPPMELTSSSKLTWHQEFSAPDAARKIERGSDGKPPHGGRHPKHTAKAAVPRGARKRSPTICHKRSTQGTRAKAAERAHTSMGAEETRDPTHVATKTLDAVNTSELTRATLTREGNPPPKLEEVAQLRLRTKDSRGTRSGRVGDTSSYQEGTRARIGRHVGPAKRSPHTRVPTPQQVRQAPGLSNHW

SEQ ID NO: 858971 - protein, 186 aa, Homo sapiens; identical to SEQ ID NO: 858962

SEQ ID NO: 858972 - protein, 186 aa, Homo sapiens; identical to SEQ ID NO: 858962

SEQ ID NO: 858973 - protein, 137 aa, Homo sapiens
GTNGNLPGRVRGMAIRSPCSGSLTLADIFLHEGLTVKIGDFGLATVKTRWSGAQPLEQPSGSVLWMAAEVIRMQDPNPYSFQSDVYAYGVVLYELMTGSLPYSHIGCRDQVSPTPYPQFPGLRDPLRHPYPTSPPLH

SEQ ID NO: 858974 - protein, 748 aa, Homo sapiens
MEPPRGPPANGAEPSRAVGTVKVYLPNKQRTVVTVRDGMSVYDSLDKALKVRGLNQDCCVVYRLIKGRKTVTAWDTAIAPLDGEELIVEVLEDVPLTMHNFVRKTFFSLAFCDFCLKFLFHGFRCQTCGYKFHQHCSSKVPTVCVDMSTNRQQFYHSVQDLSGGSRQHEAPSNRPLNELLTPQGPSPRTQHCDPEHFPFPAPANAPLQRIRSTSTPNVHMVSTTAPMDSNLIQLTGQSFSTDAAGSRGGSDGTPRGSPSPASVSSGRKSPHSKSPAEQRERKSLADDKKKVKNLGYRDSGYYWEVPPSEVQLLKRIGTGSFGTVFRGRWHGDVAVKVLKVSQPTAEQAQAFKNEMQVLRKTRHVNILLFMGFMTRPGFAIITQWCEGSSLYHHLHVADTRFDMVQLIDVARQTAQGMDYLHAKNIIHRDLKSNNIFLHEGLTVKIGDFGLATVKTRWSGAQPLEQPSGSVLWMAAEVIRMQDPNPYSFQSDVYAYGVVLYELMTGSLPYSHIGCRDQIIFMVGRGYLSPDLSKISSNCPKAMRRLLSDCLKFQREERPLFPQGHSPRLSGVPRNPPCTAPRPMSCLPAYSAQPALCLRPRPSHQGANLSPPRQGALPTSQSMFVSALMLPQDPPFPTLGDEGVPMCFSSSSGIGGPPPKTEPPVSSIIWFPLGFGDTSKFWELLHLQWLGFVAGIPLRTSLEFVPDVPSTGFWGSQHPMWILGGPFCVSPAIQGLLSFFTKKHRILLG

SEQ ID NO: 858975 - protein, 606 aa, Homo sapiens [sequence omitted]

SEQ ID NO: 858976 - protein, 544 aa, Homo sapiens
MEPPRGPPANGAEPSRAVGTVKVYLPNKQRTVVTVRDGMSVYDSLDKALKVRGLNQDCCVVYRLIKGRKTVTAWDTAIAPLDGEELIVEVLEDVPLTMHNFVRKTFFSLAFCDFCLKFLFHGFRCQTCGYKFHQHCSSKVPTVCVDMSTNRQQFYHSVQDLSGGSRQHEAPSNRPLNELLTPQGPSPRTQHCDPEHFPFPAPANAPLQRIRSTSTPNVHMVSTTAPMDSNLIQLTGQSFSTDAAGSRGGSDGTPRGSPSPASVSSGRKSPHSKSPAEQRERKSLADDKKKVKNLGYRDSGYYWEVPPSEVQLLKRIGTGSFGTVFRGRWHGDVAVKVLKVSQPTAEQAQAFKNEMQVLRKTRHVNILLFMGFMTRPGFAIITQWCEGSSLYHHLHVADTRFDMVQLIDVARQTAQGMDYLHAKNIIHRDLKSNNIFLHEGLTVKIGDFGLATVKTRWSGAQPLEQPSGSVLWMAAEVIRMQDPNPYSFQSDVYAYGVVLYELMTGSLPYSHIGCRDQVSPTPYPQFPGLRDPLRHPYPTSPPLH

SEQ ID NO: 858977 - protein, 134 aa, Homo sapiens [sequence omitted]

SEQ ID NO: 858978 - protein, 127 aa, Homo sapiens [sequence omitted]

SEQ ID NO: 858979 - protein, 103 aa, Homo sapiens
TQPGPHQQVLTSTRDFLCELTPTPLYRISPALHLSCSVQPHPLYLSSATLVTILPWDLCTCCVLHPEHKHHHSLRVSSCPLAEAHAAGRACQAERIAHTKALS

SEQ ID NO: 858980 - protein, 107 aa, Homo sapiens
DLVAVDLQWSKPTSGFFPRLPTNLPSCCGEMSLPSTSSVKISRPFGMGSASISRRCLHSKSSLLSSLVSVSVDNWSLFRANSDLGSPFSRAFFNPLGTVVFPSVHSA

SEQ ID NO: 858981 - protein, 113 aa, Homo sapiens
MEGRVQLMKALLARPLRPAARRWRNPIPFPETFDGDTDRLPEFIVQTSSYMFVDENTFSNDALKVTFLITRLTGPALQWVIPYIKKESPLLSDYRGFLAEMKRVFGWEEDEDF

SEQ ID NO: 858982 - protein, 141 aa, Homo sapiens
MKPLPCPYRGGGLGHQGMRYWGDLKAWELGISISSKTTGPLHSCHLEFLGELNVCSLKCVPCSVEVESGKGSNREGCPQLSGDFRREGAAAGLVPSSRVEISKGLHLCYPWEGKDRTTPSVFLDIRDHKSGFQWFLDRVSL

SEQ ID NO: 858983 - protein, 547 aa, Homo sapiens
MTKTDPAPMAPPPRGEEEEEEEEDEPVPEAPSPTQERRQKPVVHPSAPAPLPKDYAFTFFDPNDPACQEILFDPQTTIPELFAIVRQWVPQVQHKIDVIGNEILRRGCHVNDRDGLTDMTLLHYACKAGAHGVGDPAAAVRLSQQLLALGADVTLRSRWTNMNALHYAAYFDVPDLVRVLLKGARPRVVNSTCSDFNHGSALHIAASSLCLGAAKCLLEHGANPALRNRKGQVPAEVVPDPMDMSLDKAEAALVAKELRTLLEEAVPLSCALPKVTLPNYDNVPGNLMLSALGLRLGDRVLLDGQKTGTLRFCGTTEFASGQWVGVELDEPEGKNDGSVGGVRYFICPPKQGLFASVSKISKAVDAPPSSVTSTPRTPRMDFSRVTGKGRREHKGKKKTPSSPSLGSLQQRDGAKAEVGDQVLVAGQKQGIVRFYGKTDFAPGYWYGIELDQPTGKHDGSVFGVRYFTCPPRHGVFAPASRIQRIGGSTDSPGDSVGAKKVHQVTMTQPKRTFTTVRTPKDIASENSISRLLFCCWFPWMLRAEMQS

SEQ ID NO: 858984 - protein, 649 aa, Homo sapiens
LSAPTPCRRLGLVPFSLSPLPPPSRPLTPTPHCSHSLPSLHFGPQRCLPEIQLRGGHPGPWKLLGAWTLEPAGHPLQLTSASRICLKAAPNSAPAPRGPPRTMTKTDPAPMAPPPRGEEEEEEEEDEPVPEAPSPTQERRQKPVVHPSAPAPLPKDYAFTFFDPNDPACQEILFDPQTTIPELFAIVRQWVPQVQHKIDVIGNEILRRGCHVNDRDGLTDMTLLHYACKAGAHGVGDPAAAVRLSQQLLALGADVTLRSRWTNMNALHYAAYFDVPDLVRVLLKGARPRVVNSTCSDFNHGSALHIAASSLCLGAAKCLLEHGANPALRNRKGQVPAEVVPDPMDMSLDKAEAALVAKELRTLLEEAVPLSCALPKVTLPNYDNVPGNLMLSALGLRLGDRVLLDGQKTGTLRFCGTTEFASGQWVGVELDEPEGKNDGSVGGVRYFICPPKQGLFASVSKISKAVDAPPSSVTSTPRTPRMDFSRVTGKGRREHKGKKKTPSSPSLGSLQQRDGAKAEVGDQVLVAGQKQGIVRFYGKTDFAPGYWYGIELDQPTGKHDGSVFGVRYFTCPPRHGVFAPASRIQRIGGSTDSPGDSVGAKKVHQVTMTQPKRTFTTVRTPKDIASENSISRLLFCCWFPWMLRAEMQS

SEQ ID NO: 858985 - protein, 520 aa, Homo sapiens
MAKTYSSPTEAGRRGSVAWGDLGPLATPAFTFFDPNDPACQEILFDPQTTIPELFAIVRQWVPQVQHKIDVIGNEILRRGCHVNDRDGLTDMTLLHYACKAGAHGVGDPAAAVRLSQQLLALGADVTLRSRWTNMNALHYAAYFDVPDLVRVLLKGARPRVVNSTCSDFNHGSALHIAASSLCLGAAKCLLEHGANPALRNRKGQVPAEVVPDPMDMSLDKAEAALVAKELRTLLEEAVPLSCALPKVTLPNYDNVPGNLMLSALGLRLGDRVLLDGQKTGTLRFCGTTEFASGQWVGVELDEPEGKNDGSVGGVRYFICPPKQGLFASVSKISKAVDAPPSSVTSTPRTPRMDFSRVTGKGRREHKGKKKTPSSPSLGSLQQRDGAKAEVGDQVLVAGQKQGIVRFYGKTDFAPGYWYGIELDQPTGKHDGSVFGVRYFTCPPRHGVFAPASRIQRIGGSTDSPGDSVGAKKVHQVTMTQPKRTFTTVRTPKDIASENSISRLLFCCWFPWMLRAEMQS

SEQ ID NO: 858986 - protein, 547 aa, Homo sapiens; identical to SEQ ID NO: 858983

SEQ ID NO: 858987 - protein, 547 aa, Homo sapiens; identical to SEQ ID NO: 858983

SEQ ID NO: 858988 - protein, 547 aa, Homo sapiens; identical to SEQ ID NO: 858983

SEQ ID NO: 858989 - protein, 323 aa, Homo sapiens
MTKTDPAPMAPPPRGEEEEEEEEDEPVPEAPSPTQERRQKPVVHPSAPAPLPKDYAFTFFDPNDPACQEILFDPQTTIPELFAIVRQWVPQVQHKIDVIGNEILRRGCHVNDRDGLTDMTLLHYACKAGAHGVGDPAAAVRLSQQLLALGADVTLRSRWTNMNALHYAAYFDVPDLVRVLLKGARPRVVNSTCSDFNHGSALHIAASSLCLGAAKCLLEHGANPALRNRKGQVPAEVVPDPMDMSLDKAEAALVAKELRTLLEEAVPLSCALPKVTLPNYDNVPGNLMLSALGLRLGDRVLLDGQKVRGWDVCLHGGWGWDSA

SEQ ID NO: 858990 - protein, 102 aa, Homo sapiens
MAHCSLHIPGLSDPPLESGSCGPGTVARACHLSSLGGLVSGSLEATGPMQVQNQAERSGHLQSSKILTFGQAWRLKSVMSALCEAEMYGSLELRSWIPAWAR

SEQ ID NO: 858991 - protein, 102 aa, Homo sapiens
MESLSPRLECNSVIWAHCYVCLSGSSNSPASASQVAGITGAHHHTWLIFVFLVQMGFHHVGQAGLELLTSGDLPTSASQSAGITGVSYHTWPQISSSYKDTS

SEQ ID NO: 858992 - protein, 1426 aa, Homo sapiens
AVGWAREGTLQVKRWGRKRRRGATVSSRGLRPSAPIFPELESDPGLAGHPGKAGVIVQMETQLQSIFEEVVKTEVIEEAFPGMFMDTPEDEKTKLISCLGAFRQFWGGLSQESHEQCIQWIVKFIHGQHSPKRISFLYDCLAMAVETGLLPPRLVCESLINSDTLEWERTQLWALTFKLVRKIIGGVDYKGVRDLLKVILEKILTIPNTVSSAVVQQLLAAREVIAYILERNACLLPAYFAVTEIRKLYPEGKLPHWLLGNLVSDFVDTFRPTARINSICGRCSLLPVVNNSGAICNSWKLDPATLRFPLKGLLPYDKDLFEPQTALLRYVLEQPYSRDMVCNMLGLNKQHKQRCPVLEDQLVDLVVYAMERSETEEKFDDGGTSQLLWQHLSSQLIFFVLFQFASFPHMVLSLHQKLAGRGLIKGRDHLMWVLLQFISGSIQKNALADFLPVMKLFDLLYPEKEYIPVPDINKPQSTHAFAMTCIWIHLNRKAQNDNSKLQIPIPHSLRLHHEFLQQSLRNKSLQMNDYKIALLCNAYSTNSECFTLPMGALVETIYGNGIMRIPLPGTNCMASGSITPLPMNLLDSLTVHAKMSLIHSIATRVIKLAHAKSSVALAPALVETYSRLLVYMEIESLGIKGFISQLLPTVFKSHAWGILHTLLEMFSYRMHHIQPHYRVQLLSHLHTLAAVAQTNQNQLHLCVESTALRLITALGSSEVQPQFTRFLSDPKTVLSAESEELNRALILTLARATHVTDFFTGSDSIQGTWCKDILQTIMSFTPHNWASHTLSCFPGPLQAFFKQNNVPQESRFNLKKNVEEEYRKWKSMSNENDIITHFSMQGSPPLFLCLLWKMLLETDHINQIGYRVLERIGARALVAHVRTFADFLVYEFSTSAGGQQLNKCIEILNDMVWKYNIVTLDRLILCLAMRSHEGNEAQVCYFIIQLLLLKPNDFRNRVSDFVKENSPEHWLQNDWHTKHMNYHKKYPEKLYFEGLAEQVDPPVQIQSPYLPIYFGNVCLRFLPVFDIVIHRFLELLPVSKSLETLLDHLGGLYKFHDRPVTYLYNTLHYYEMHLRDRAFLKRKLVHAIIGSLKDNRPQGWCLSDTYLKCAMNAREENPWVPDDTYYCRLIGRLVDTMAGKSPGPFPNCDWRFNEFPNPAAHALHVTCVELMALAVSGKEVGNALLNVVLKSQPLVPRENITAWMNAIGLIITALPEPYWIVLHDRIVSVISSPSLTSETEWVGYPFRLFDFTACHQSYSEMSCSYTLALAHAVWHHSSIGQLSLIPKFLTEVLLPIVKTEFQLLYVYHLVGPFLQRFQQERTRCMIEIGVAFYDMLLNVDQCSTHLNYMDPICDFLYHMKYMFTGDSVKEQVEKIICNLKPALKLRLRFITHISKMEPAAVPPQAMNSGSPAPQSNQVPVSLPVTQ

SEQ ID NO: 858993 - protein, 938 aa, Homo sapiens
AVGWAREGTLQVKRWGRKRRRGATVSSRGLRPSAPIFPELESDPGLAGHPGKAGVIVQMETQLQSIFEEVVKTEVIEEAFPGMFMDTPEDEKTKLISCLGAFRQFWGGLSQESHEQCIQWIVKFIHGQHSPKRISFLYDCLAMAVETGLLPPRLVCESLINSDTLEWERTQLWALTFKLVRKIIGGVDYKGVRDLLKVILEKILTIPNTVSSAVVQQLLAAREVIAYILERNACLLPAYFAVTEIRKLYPEGKLPHWLLGNLVSDFVDTFRPTARINSICGRCSLLPVVNNSGAICNSWKLDPATLRFPLKGLLPYDKDLFEPQTALLRYVLEQPYSRDMVCNMLGLNKQHKQRCPVLEDQLVDLVVYAMERSETEEKFDDGGTSQLLWQHLSSQLIFFVLFQFASFPHMVLSLHQKLAGRGLIKGRDHLMWVLLQFISGSIQKNALADFLPVMKLFDLLYPEKEYIPVPDINKPQSTHAFAMTCIWIHLNRKAQNDNSKLQIPIPHSLRLHHEFLQQSLRNKSLQMNDYKIALLCNAYSTNSECFTLPMGALVETIYGNGIMRIPLPGTNCMASGSITPLPMNLLDSLTVHAKMSLIHSIATRVIKLAHAKSSVALAPALVETYSRLLVYMEIESLGIKGFISQLLPTVFKSHAWGILHTLLEMFSYRMHHIQPHYRVQLLSHLHTLAAVAQTNQNQLHLCVESTALRLITALGSSEVQPQFTRFLSDPKTVLSAESEELNRALILTLARATHVTDFFTGSDSIQGTWCKDILQTIMSFTPHNWASHTLSCFPGPLQAFFKQNNVPQESRFNLKKNVEEEYRKWKSMSNENDIITHFSMQGSPPLFLCLLWKMLLETDHINQIGYRVLERIGARALVAHVRTFADFLVYEFSTSAGGQQLNKCIEILNDMVWKYNIVTLDRLILCLVRINTFLSLFS

SEQ ID NO: 858994 - protein, 1005 aa, Homo sapiens
AVGWAREGTLQVKRWGRKRRRGATVSSRGLRPSAPIFPELESDPGLAGHPGKAGVIVQMETQLQSIFEEVVKTEVIEEAFPGMFMDTPEDEKTKLISCLGAFRQFWGGLSQESHEQCIQWIVKFIHGQHSPKRISFLYDCLAMAVETGLLPPRLVCESLINSDTLEWERTQLWALTFKLVRKIIGGVDYKGVRDLLKVILEKILTIPNTVSSAVVQQLLAAREVIAYILERNACLLPAYFAVTEIRKLYPEGKLPHWLLGNLVSDFVDTFRPTARINSICGRCSLLPVVNNSGAICNSWKLDPATLRFPLKGLLPYDKDLFEPQTALLRYVLEQPYSRDMVCNMLGLNKQHKQRCPVLEDQLVDLVVYAMERSETEEKFDDGGTSQLLWQHLSSQLIFFVLFQFASFPHMVLSLHQKLAGRGLIKGRDHLMWVLLQFISGSIQKNALADFLPVMKLFDLLYPEKEYIPVPDINKPQSTHAFAMTCIWIHLNRKAQNDNSKLQIPIPHSLRLHHEFLQQSLRNKSLQMNDYKIALLCNAYSTNSECFTLPMGALVETIYGNGIMRIPLPGTNCMASGSITPLPMNLLDSLTVHAKMSLIHSIATRVIKLAHAKSSVALAPALVETYSRLLVYMEIESLGIKGFISQLLPTVFKSHAWGILHTLLEMFSYRMHHIQPHYRVQLLSHLHTLAAVAQTNQNQLHLCVESTALRLITALGSSEVQPQFTRFLSDPKTVLSAESEELNRALILTLARATHVTDFFTGSDSIQGTWCKDILQTIMSFTPHNWASHTLSCFPGPLQAFFKQNNVPQESRFNLKKNVEEEYRKWKSMSNENDIITHFSMQGSPPLFLCLLWKMLLETDHINQIGYRVLERIGARALVAHVRTFADFLVYEFSTSAGGQQLNKCIEILNDMVWKYNIVTLDRLILCLAMRSHEGNEAQVCYFIIQLLLLKPNDFRNRVSDFVKENSPEHWLQNDWHTKHMNYHKVLVLIGISNSPFKAILEYLMK

SEQ ID NO: 858995 - protein, 1408 aa, Homo sapiens
AVGWAREGTLQVKRWGRKRRRGATVSSRGLRPSAPIFPELESDPGLAGHPGKAGVIVQMETQLQSIFEEVVKTEVIEEAFPGMFMDTPEDEKTKLISCLGAFRQFWGGLSQESHEQCIQWIVKFIHGQHSPKRISFLYDCLAMAVETGLLPPRLVCESLINSDTLEWERTQLWALTFKLVRKIIGGVDYKGVRDLLKVILEKILTIPNTVSSAVVQQLLAAREVIAYILERNACLLPAYFAVTEIRKLYPEGKLPHWLLGNLVSDFVDTFRPTARINSICGRCSLLPVVNNSGAICNSWKLDPATLRFPLKGLLPYDKDLFEPQTALLRYVLEQPYSRDMVCNMLGLNKQHKQRCPVLEDQLVDLVVYAMERSETEEKFDDGGTSQLLWQHLSSQLIFFVLFQFASFPHMVLSLHQKLAGRGLIKGRDHLMWVLLQFISGSIQKNALADFLPVMKLFDLLYPEKEYIPVPDINKPQSTHAFAMTCIWIHLNRKAQNDNSKLQIPIPHSLRLHHEFLQQSLRNKSLQMNDYKIALLCNAYSTNSECFTLPMGALVETIYGNGIMRIPLPGTNCMASGSITPLPMNLLDSLTVHAKMSLIHSIATRVIKLAHAKSSVALAPALVETYSRLLVYMEIESLGIKGFISQLLPTVFKSHAWGILHTLLEMFSYRMHHIQPHYRVQLLSHLHTLAAVAQTNQNQLHLCVESTALRLITALGSSEVQPQFTRFLSDPLARATHVTDFFTGSDSIQGTWCKDILQTIMSFTPHNWASHTLSCFPGPLQAFFKQNNVPQESRFNLKKNVEEEYRKWKSMSNENDIITHFSMQGSPPLFLCLLWKMLLETDHINQIGYRVLERIGARALVAHVRTFADFLVYEFSTSAGGQQLNKCIEILNDMVWKYNIVTLDRLILCLAMRSHEGNEAQVCYFIIQLLLLKPNDFRNRVSDFVKENSPEHWLQNDWHTKHMNYHKKYPEKLYFEGLAEQVDPPVQIQSPYLPIYFGNVCLRFLPVFDIVIHRFLELLPVSKSLETLLDHLGGLYKFHDRPVTYLYNTLHYYEMHLRDRAFLKRKLVHAIIGSLKDNRPQGWCLSDTYLKCAMNAREENPWVPDDTYYCRLIGRLVDTMAGKSPGPFPNCDWRFNEFPNPAAHALHVTCVELMALAVSGKEVGNALLNVVLKSQPLVPRENITAWMNAIGLIITALPEPYWIVLHDRIVSVISSPSLTSETEWVGYPFRLFDFTACHQSYSEMSCSYTLALAHAVWHHSSIGQLSLIPKFLTEVLLPIVKTEFQLLYVYHLVGPFLQRFQQERTRCMIEIGVAFYDMLLNVDQCSTHLNYMDPICDFLYHMKYMFTGDSVKEQVEKIICNLKPALKLRLRFITHISKMEPAAVPPQAMNSGSPAPQSNQVPVSLPVTQ

SEQ ID NO: 858996 - protein, 1422 aa, Homo sapiens
AVGWAREGTLQVKRWGRKRRRGATVSSRGLRPSAPIFPELESDPGLAGHPGKAGVIVQMETQLQSIFEEVVKTEVIEEAFPGMFMDTPEDEKTKLISCLGAFRQFWGGLSQESHEQCIQWIVKFIHGQHSPKRISFLYDCLAMAVETGLLPPRLVCESLINSDTLEWERTQLWALTFKLVRKIIGGVDYKGVRDLLKVILEKILTIPNTVSSAVVQQLLAAREVIAYILERNACLLPAYFAVTEIRKLYPEGKLPHWLLGNLVSDFVDTFRPTARINSICGRCSLLPVVNNSGAICNSWKLDPATLRFPLKGLLPYDKDLFEPQTALLRYVLEQPYSRDMVCNMLGLNKQHKQRCPVLEDQLVDLVVYAMERSETEEKFDDGGTSQLLWQHLSSQLIFFVLFQFASFPHMVLSLHQKLAGRGLIKGRDHLMWVLLQFISGSIQKNALADFLPVMKLFDLLYPEKEYIPVPDINKPQSTHAFAMTCIWIHLNRKAQNDNSKLQIPIPHSLRLHHEFLQQSLRNKSLQMNDYKIALLCNAYSTNSECFTLPMGALVETIYGNGIMRIPLPGTNCMASGSITPLPMNLLDSLTVHAKMSLIHSIATRVIKLAHAKSSVALAPALVETYSRLLVYMEIESLGIKGFISQLLPTVFKSHAWGILHTLLEMFSYRMHHIQPHYRVQLLSHLHTLAAVAQTNQNQLHLCVESTALRLITALGSSEVQPQFTRFLSDPKTVLSAESEELNRALILTLARATHVTDFFTGSDSIQGTWCKDILQTIMSFTPHNWASHTLSCFPGPLQAFFKQNNVPQESRFNLKKNVEEEYRKWKSMSNENDIITHFSMQGSPPLFLCLLWKMLLETDHINQIGYRVLERIGARALVAHVRTFADFLVYEFSTSAGGQQLNKCIEILNDMVWKYNIVTLDRLILCLAMRSHEGNEAQVCYFIIQLLLLKPNDFRNRVSDFVKENSPEHWLQNDWHTKHMNYHKKYPEKLYFEGLAEQVDPPVQIQSPYLPIYFGNVCLRFLPVFDIVIHRFLELLPVSKSLETLLDHLGGLYKFHDRPVTYLYNTLHYYEMHLRDRAFLKRKLVHAIIGSLKDNRPQGWCLSDTYLKCAMNAREENPWVPDDTYYCRLIGRLVDTMAGKSPGPFPNCDWRFNEFPNPAAHALHVTCVELMALAVSGKEVGNALLNVVLKSQPLVPRENITAWMNAIGLIITALPEPYWIVLHDRIVSVISSPSLTSETEWVGYPFRLFDFTACHQSYSEMSCSYTLALAHAVWHHSSIGQLSLIPKFLTEVLLPIVKTEFQLLYVYHLVGPFLQRFQQERTRCMIEIGVAFYDMLLNVDQCSTHLNYMDPICDFLYHMKYMFTGDSVKEQVEKIICNLKPALKLRLRFITHISKMEPAAVPPQAMNSGSPAPQSNQVDTLT

SEQ ID NO: 858997 - protein, 1417 aa, Homo sapiens
AVGWAREGTLQVKRWGRKRRRGATVSSRGLRPSAPIFPELESDPGLAGHPGKAGVIVQMETQLQSIFEEVVKTEVIEEAFPGMFMDTPEDEKTKLISCLGAFRQFWGGLSQESHEQCIQWIVKFIHGQHSPKRISFLYDCLAMAVETGLLPPRLVCESLINSDTLEWERTQLWALTFKLVRKIIGGVDYKGVRDLLKVILEKILTIPNTVSSAVVQQLLAAREVIAYILERNACLLPAYFAVTEIRKLYPEGKLPHWLLGNLVSDFVDTFRPTARINSICGRCSLLPVVNNSGAICNSWKLDPATLRFPLKGLLPYDKDLFEPQTALLRYVLEQPYSRDMVCNMLGLNKQHKQRCPVLEDQLVDLVVYAMERSETEEKFDDGGTSQLLWQHLSSQLIFFVLFQFASFPHMVLSLHQKLAGRGLIKGRDHLMWVLLQFISGSIQKNALADFLPVMKLFDLLYPEKEYIPVPDINKPQSTHAFAMTCIWIHLNRKAQNDNSKLQIPIPHSLRLHHEFLQQSLRNKSLQMNDYKIALLCNAYSTNSECFTLPMGALVETIYGNGIMRIPLPGTNCMASGSITPLPMNLLDSLTVHAKMSLIHSIATRVIKLAHAKSSVALAPALVETYSRLLVYMEIESLGIKGFISQLLPTVFKSHAWGILHTLLEMFSYRMHHIQPHYRVQLLSHLHTLAAVAQTNQNQLHLCVESTALRLITALGSSEVQPQFTRFLSDPKTVLSAESEELNRALILTLARATHVTDFFTGSDSIQGTWCKDILQTIMSFTPHNWASHTLSCFPGPLQAFFKQNNVPQESRFNLKKNVEEEYRKWKSMSNENDIITHFSMQGSPPLFLCLLWKMLLETDHINQIGYRVLERIGARALVAHVRTFADFLVYEFSTSAGGQQLNKCIEILNDMVWKYNIVTLDRLILCLAMRSHEGNEAQVCYFIIQLLLLKPNDFRNRVSDFVKENSPEHWLQNDWHTKHMNYHKKYPEKLYFEGLAEQVDPPVQIQSPYLPIYFGNVCLRFLPVFDIVIHRFLELLPVSKSLETLLDHLGGLYKFHDRPVTYLYNTLHYYEMHLRDRAFLKRKLVHAIIGSLKDNRPQGWCLSDTYLKCAMNAREENPWVPDDTYYCRLIGRLVDTMAGKSPGPFPNCDWRFNEFPNPAAHALHVTCVELMALAVSGKEVGNALLNVVLKSQPLVPRENITAWMNAIGLIITALPEPYWIVLHDRIVSVISSPSLTSETEWVGYPFRLFDFTACHQSYSEMSCSYTLALAHAVWHHSSIGQLSLIPKFLTEVLLPIVKTEFQLLYVYHLVGPFLQRFQQERTRCMIEIGVAFYDMLLNVDQCSTHLNYMDPICDFLYHMKYMFTGDSVKEQVEKIICNLKPALKLRLRFITHISKMEPAAVPPQAMNSGSPAPQSNQ

SEQ ID NO: 858998 - protein, 1217 aa, Homo sapiens
AVGWAREGTLQVKRWGRKRRRGATVSSRGLRPSAPIFPELESDPGLAGHPGKAGVIVQMETQLQSIFEEVVKTEVIEEAFPGMFMDTPEDEKTKLISCLGAFRQFWGGLSQESHEQCIQWIVKFIHGQHSPKRISFLYDCLAMAVETGLLPPRLVCESLINSDTLEWERTQLWALTFKLVRKIIGGVDYKGVRDLLKVILEKILTIPNTVSSAVVQQLLAAREVIAYILERNACLLPAYFAVTEIRKLYPEGKLPHWLLGNLVSDFVDTFRPTARINSICGRCSLLPVVNNSGAICNSWKLDPATLRFPLKGLLPYDKDLFEPQTALLRYVLEQPYSRDMVCNMLGLNKQHKQRCPVLEDQLVDLVVYAMERSETEEKFDDGGTSQLLWQHLSSQLIFFVLFQFASFPHMVLSLHQKLAGRGLIKGRDHLMWVLLQFISGSIQKNALADFLPVMKLFDLLYPEKEYIPVPDINKPQSTHAFAMTCIWIHLNRKAQNDNSKLQIPIPHSLRLHHEFLQQSLRNKSLQMNDYKIALLCNAYSTNSECFTLPMGALVETIYGNGIMRIPLPGTNCMASGSITPLPMNLLDSLTVHAKMSLIHSIATRVIKLAHAKSSVALAPALVETYSRLLVYMEIESLGIKGFISQLLPTVFKSHAWGILHTLLEMFSYRMHHIQPHYRVQLLSHLHTLAAVAQTNQNQLHLCVESTALRLITALGSSEVQPQFTRFLSDPKTVLSAESEELNRALILTLARATHVTDFFTGSDSIQGTWCKDILQTIMSFTPHNWASHTLSCFPGPLQAFFKQNNVPQESRFNLKKNVEEEYRKWKSMSNENDIITHFSMQGSPPLFLCLLWKMLLETDHINQIGYRVLERIGARALVAHVRTFADFLVYEFSTSAGGQQLNKCIEILNDMVWKYNIVTLDRLILCLAMRSHEGNEAQVCYFIIQLLLLKPNDFRNRVSDFVKENSPEHWLQNDWHTKHMNYHKKYPEKLYFEGLAEQVDPPVQIQSPYLPIYFGNVCLRFLPVFDIVIHRFLELLPVSKSLETLLDHLGGLYKFHDRPVTYLYNTLHYYEMHLRDRAFLKRKLVHAIIGSLKDNRPQGWCLSDTYLKCAMNAREENPWVPDDTYYCRLIGRLVDTMAGKSPGPFPNCDWRFNEFPNPAAHALHVTCVELMALAVSGKEVGNALLNVVLKSQPLVPRENITAWMNAIGLIITALPVS

SEQ ID NO: 858999 - protein, 1417 aa, Homo sapiens; identical to SEQ ID NO: 858997

SEQ ID NO: 859000 - protein, 430 aa, Homo sapiens
AVGWAREGTLQVKRWGRKRRRGATVSSRGLRPSAPIFPELESDPGLAGHPGKAGVIVQMETQLQSIFEEVVKTEVIEEAFPGMFMDTPEDEKTKLISCLGAFRQFWGGLSQESHEQCIQWIVKFIHGQHSPKRISFLYDCLAMAVETGLLPPRLVCESLINSDTLEWERTQLWALTFKLVRKIIGGVDYKGVRDLLKVILEKILTIPNTVSSAVVQQLLAAREVIAYILERNACLLPAYFAVTEIRKLYPEGKLPHWLLGNLVSDFVDTFRPTARINSICGRCSLLPVVNNSGAICNSWKLDPATLRFPLKGLLPYDKDLFEPQTALLRYVLEQPYSRDMVCNMLGLNKQHKQRCPVLEDQLVDLVVYAMERSETEEKFDDGGTSQLLWQHLSSQLIFFVLFQFASFPHMVLSLHQKVCTKSYGRSDFTC

SEQ ID NO: 859001 - protein, 318 aa, Homo sapiens
MWLPLLLGALLWAVLWLLRDRQSLPASNAFVFITGCDSGFGRLLALQLDQRGFRVLASCLTPSGAEDLQRVASSRLHTTLLDITDPQSVQQAAKWVEMHVKEAGLFGLVNNAGVAGIIGPTPWLTRDDFQRVLNVNTMGPIGVTLALLPLLQQARGRVINITSVLGRLAANGGGYCVSKFGLEAFSDSLRRDVAHFGIRVSIVEPGFFRTPVTNLESLEKTLQACWARLPPATQAHYGGAFLTKYLKMQQRIMNLICDPDLTKVSRCLEHALTARHPRTRYSPGWDAKLLWLPASYLPASLVDAVLTWVLPKPAQAVY

SEQ ID NO: 859002 - protein, 324 aa, Homo sapiens
RSSFRSRRGPGVPSPQPDVTMLSRLLKEHQAKQNERKELQEKRRREAITAATCLTEALVDHLNVGVAQAYMNQRKLDHEVKTLQVQAAQFAKQTGQWIGMVENFNQALKGLFGLVNNAGVAGIIGPTPWLTRDDFQRVLNVNTMGPIGVTLALLPLLQQARGRVINITSVLGRLAANGGGYCVSKFGLEAFSDSLRRDVAHFGIRVSIVEPGFFRTPVTNLESLEKTLQACWARLPPATQAHYGGAFLTKYLKMQQRIMNLICDPDLTKVSRCLEHALTARHPRTRYSPGWDAKLLWLPASYLPASLVDAVLTWVLPKPAQAVY

SEQ ID NO: 859003 - protein, 124 aa, Homo sapiens
CGKLKGQFEEKQFSDAPRKKRELWECLTYPQHPFHLPTGLFGLVNNAGVAGIIGPTPWLTRDDFQRVLNVNTMGPIGVTLALLPLLQQARGRVINITSVLGRLAANGGGYCVSKFGLEAFSDSL

SEQ ID NO: 859004 - protein, 92 aa, Homo sapiens
KMGWSEEGKLIATTYGAADLKMQQRIMNLICDPDLTKVSRCLEHALTARHPRTRYSPGWDAKLLWLPASYLPASLVDAVLTWVLPKPAQAVY

SEQ ID NO: 859005 - protein, 256 aa, Homo sapiens
DAWVDPRVGGVVLFPWQARLYDRDVASAAPEKAENPAGHGSKEVKGKTHTYYQVLIDARDCPHISQRSQTEAVTFLANHDDSRALYAIPGLDYVSHEDILPYTSTDQVPIQHELFERFLLYDQTKAPPFVARETLRAWQEKNHPWLELSDVHRETTENIRVTVIPFYMGMREAQNSHVYWWRYCIRLENLDSDVVQLRERHWRIFSLSGTLETVRGRGVVGRVSILGLVILVLCGKPGGLAHGFLLLCCYRQRLTL

SEQ ID NO: 859006 - protein, 214 aa, Homo sapiens
CSELRGGTRRAKRAGTPRGAVWDWGGTPPGRGSGSVSAAGRALGRDMAACTARRALAVGSRWWSRSLTGARWPRPLCAAAGAGAFSPASTTTTRRHLSSRNRPEGKVLETVGVFEVPKQNGKYETGQLFLHSIFGYRGVVLFPWQARLYDRDVASAAPEKAENPAGHGSKEVKGKTHTYYQVLIDARDCPHIVSKQDGWAWGSSPWKVLHPNGD

SEQ ID NO: 859007 - protein, 414 aa, Homo sapiens
CSELRGGTRRAKRAGTPRGAVWDWGGTPPGRGSGSVSAAGRALGRDMAACTARRALAVGSRWWSRSLTGARWPRPLCAAAGAGAFSPASTTTTRRHLSSRNRPEGKVLETVGVFEVPKQNGKYETGQLFLHSIFGYRGVVLFPWQARLYDRDVASAAPEKAENPAGHGSKEVKGKTHTYYQVLIDARDCPHISQRSQTEAVTFLANHDDSRALYAIPGLDYVSHEDILPYTSTDQVPIQHELFERFLLYDQTKAPPFVARETLRAWQEKNHPWLELSDVHRETTENIRVTVIPFYMGMREAQNSHVYWWRYCIRLENLDSDVVQLRERHWRIFSLSGTLETVRGRGVVGREPVLSKEQPAFQYSSHVSLQASSGHMWGTFRFERPDGSHFDVRIPPFSLESNKDEKTPPSGLHW

SEQ ID NO: 859008 - protein, 414 aa, Homo sapiens; identical to SEQ ID NO: 859007

SEQ ID NO: 859009 - protein, 414 aa, Homo sapiens; identical to SEQ ID NO: 859007

SEQ ID NO: 859010 - protein, 414 aa, Homo sapiens; identical to SEQ ID NO: 859007

SEQ ID NO: 859011 - protein, 414 aa, Homo sapiens; identical to SEQ ID NO: 859007

SEQ ID NO: 859012 - protein, 381 aa, Homo sapiens
DAWVDPRVGGGTPPGRGSGSVSAAGRALGRDMAACTARRALAVGSRWWSRSLTGARWPRPLCAAAGAGAFSPASTTTTRRHLSSRNRPEGKVLETVGVFEVPKQNGKYETGQLFLHSIFGYRGVVLFPWQARLYDRDVASAAPEKAENPAGHGSKEVKGSQRSQTEAVTFLANHDDSRALYAIPGLDYVSHEDILPYTSTDQVPIQHELFERFLLYDQTKAPPFVARETLRAWQEKNHPWLELSDVHRETTENIRVTVIPFYMGMREAQNSHVYWWRYCIRLENLDSDVVQLRERHWRIFSLSGTLETVRGRGVVGREPVLSKEQPAFQYSSHVSLQASSGHMWGTFRFERPDGSHFDVRIPPFSLESNKDEKTPPSGLHW

SEQ ID NO: 859013 - protein, 265 aa, Homo sapiens
  misc_feature (1)..(1): Xaa can be any naturally occurring amino acid
  misc_feature (23)..(24): Xaa can be any naturally occurring amino acid
  misc_feature (29)..(30): Xaa can be any naturally occurring amino acid
XSQLFTGFCSPPRKEKPRCLAPXXESKIXXLSVLINARNCPHFSQRSQTEAVTFLANHDDSRALYAIPGLDYVSHEDILPYTSTDQVPIQHELFERFLLYDQTKAPPFVARETLRAWQEKNHPWLELSDVHRETTENIRVTVIPFYMGMREAQNSHVYWWRYCIRLENLDSDVVQLRERHWRIFSLSGTLETVRGRGVVGREPVLSKEQPAFQYSSHVSLQASSGHMWGTFRFERPDGSHFDVRIPPFSLESNKDEKTPPSGLHW

SEQ ID NO: 859014 - protein, 366 aa, Homo sapiens
CSELRGGTRRAKRAGTPRGAVWDWGGTPPGRGSGSVSAAGRALGRDMAACTARRALAVGSRWWSRSLTGARWPRPLCAAAGAGAFSPASTTTTRRHLSSRNRPEGKVLETVGVFEVPKQNGKYETGQLFLHSIFGYRGVVLFPWQARLYDRDVASAAPEKAENPAGHGSKEVKGKTHTYYQVLIDARDCPHISQRSQTEAVTFLANHDDSRALYAIPGLDYVSHEDILPYTSTDQVPIQHELFERFLLYDQTKAPPFVARETLRAWQEKNHPWLELSDVHRETTENIRVTVIPFYMGMREAQNSHVYWWRYCIRLENLDSDVVQLRERHWRIFSLSGTLETVRGRGVVGRDRVSLCHPGWSAVVRP

SEQ ID NO: 859015 - protein, 384 aa, Homo sapiens
CSELRGGTRRAKRAGTPRGAVWDWGGTPPGRGSGSVSAAGRALGRDMAACTARRALAVGSRWWSRSLTGARWPRPLCAAAGAGAFSPASTTTTRRHLSSRNRPEGKVLETVGVFEVPKQNGKYETGQLFLHSIFGYRGVVLFPWQARLYDRDVASAAPEKAENPAGHGSKEVKGKTHTYYQVLIDARDCPHISQRSQTEAVTFLANHDDSRALYAIPGLDYVSHEDILPYTSTDQVPIQHELFERFLLYDQTKAPPFVARETLRAWQEKNHPWLELSDVHRETTENIRVTVIPFYMGMREAQNSHVYWWRYCIRLENLDSDVVQLRERHWRIFSLSGTLETVRGRGVVGRVSILGLVILVLCGKPGGLAHGFLLLCCYRQRLTL

SEQ ID NO: 859016 - protein, 76 aa, Homo sapiens
WRYCIRLENLDSDVVQLRERHWRIFSLSGTLETVRGRGVVGRVSILGLVILVLCGKPGGLAHGFLLLCCYRQRLTL

SEQ ID NO: 859017 - protein, 357 aa, Homo sapiens
DAWVDPRVGGGTPPGRGSGSVSAAGRALGRDMAACTARRALAVGSRWWSRSLTGARWPRPLCAAAGAGAFSPASTTTTRRHLSSRNRPEGKVLETVGVFEVPKQNGKYETGQLFLHSIFGYRGVVLFPWQARLYDRDVASAAPEKAENPAGHGSKEVKGKTHTYYQVLIDARDCPHISQRSQTEAVTFLANHDDSRALYAIPGLDYVSHEDILPYTSTDQVPIQHELFERFLLYDQTKAPPFVARETLRAWQEKNHPWLELSDVHRETTENIRVTVIPFYMGMREAQNSSGTGGLLNRWELERDVGQPGAAEGFGSGLGMAARFGGRSRGHVGGALIGQNAVRERTSAGQSTNGGGE

SEQ ID NO: 859018 - protein, 414 aa, Homo sapiens; identical to SEQ ID NO: 859007

SEQ ID NO: 859019 - protein, 399 aa, Homo sapiens
DAWVDPRVGGGTPPGRGSGSVSAAGRALGRDMAACTARRALAVGSRWWSRSLTGARWPRPLCAAAGAGAFSPASTTTTRRHLSSRNRPEGKVLETVGVFEVPKQNGKYETGQLFLHSIFGYRGVVLFPWQARLYDRDVASAAPEKAENPAGHGSKEVKGKTHTYYQVLIDARDCPHISQRSQTEAVTFLANHDDSRALYAIPGLDYVSHEDILPYTSTDQVPIQHELFERFLLYDQTKAPPFVARETLRAWQEKNHPWLELSDVHRETTENIRVTVIPFYMGMREAQNSHVYWWRYCIRLENLDSDVVQLRERHWRIFSLSGTLETVRGRGVVGREPVLSKEQPAFQYSSHVSLQASSGHMWGTFRFERPDGSHFDVRIPPFSLESNKDEKTPPSGLHW

SEQ ID NO: 859020 - protein, 414 aa, Homo sapiens; identical to SEQ ID NO: 859007

SEQ ID NO: 859021 - protein, 414 aa, Homo sapiens; identical to SEQ ID NO: 859007

SEQ ID NO: 859022 - protein, 414 aa, Homo sapiens; identical to SEQ ID NO: 859007

SEQ ID NO: 859023 - protein, 414 aa, Homo sapiens; identical to SEQ ID NO: 859007

SEQ ID NO: 859024 - protein, 414 aa, Homo sapiens; identical to SEQ ID NO: 859007

SEQ ID NO: 859025 - protein, 414 aa, Homo sapiens; identical to SEQ ID NO: 859007

SEQ ID NO: 859026 - protein, 419 aa, Homo sapiens
CSELRGGTRRAKRAGTPRGAVWDWGGTPPGRGSGSVSAAGRALGRDMAACTARRALAVGSRWWSRSLTGARWPRPLCAAAGAGAFSPASTTTTRRHLSSRNRPEGKVLETVGVFEVPKQNGKYETGQLFLHSIFGYRGVVLFPWQARLYDRDVASAAPEKAENPAGHGSKEVKGKTHTYYQVLIDARDCPHISQRSQTEAVTFLANHDDSRALYAIPGLDYVSHEDILPYTSTDQVPIQHELFERFLLYDQTKAPPFVARETLRAWQEKNHPWLELSDVHRETTENIRVTVIPFYMGMREAQNSGNQCYPRSSLRSSIAATSRCRLPVGTCGARSALKDLMAPTLMFGFLPSPWKAIKMRRHHPQAFTGRPAEAPSAQAWSPGRTTLIPQLLQNSSLPIMGHSGSLNLIVGFFLWGGVV

SEQ ID NO: 859027 - protein, 372 aa, Homo sapiens
CSELRGGTRRAKRAGTPRGAVWDWGGTPPGRGSGSVSAAGRALGRDMAACTARRALAVGSRWWSRSLTGARWPRPLCAAAGAGAFSPASTTTTRRHLSSRNRPEGKVLETVGVFEVPKQNGKYETGQLFLHSIFGYRGVVLFPWQARLYDRDVASAAPEKAENPAGHGSKEVKGKTHTYYQVLIDARDCPHISQRSQTEAVTFLANHDDSRALYAIPGLDYVSHEDILPYTSTDQVPIQHELFERFLLYDQTKAPPFVARETLRAWQEKNHPWLELSDVHRETTENIRVTVIPFYMGMREAQNSSGTGGLLNRWELERDVGQPGAAEGFGSGLGMAARFGGRSRGHVGGALIGQNAVRERTSAGQSTNGGGE

SEQ ID NO: 859028 - protein, 159 aa, Homo sapiens
TATRPRSRGRGPGAHRPISGNMATEHVNGNGTEEPMDTTSAVIHSENFQTLLDAGLPQKVAEKLDEIYVAGLVAHSDLDERAIEALKEFNEDGALAVLQQFKDSDLSHVQNKSAFLCGVMKTYRQREKQGTKVADSSKGPDEAKIKVCLSILPLVLKSF

SEQ ID NO: 859029 - protein, 562 aa, Homo sapiens
MATEHVNGNGTEEPMDTTSAVIHSENFQTLLDAGLPQKVAEKLDEIYVAGLVAHSDLDERAIEALKEFNEDGALAVLQQFKDSDLSHVQNKSAFLCGVMKTYRQREKQGTKVADSSKGPDEAKIKALLERTGYTLDVTTGQRKYGGPPPDSVYSGQQPSVGTEIFVGKIPRDLFEDELVPLFEKAGPIWDLRLMMDPLTGLNRGYAFVTFCTKEAAQEAVKLYNNHEIRSGKHIGVCISVANNRLFVGSIPKSKTKEQILEEFSQVTEGLTDVILYHQPDDKKKNRGFCFLEYEDHKTAAQARRRLMSGKVKVWGNVGTVEWADPIEDPDPEVMAKVKVLFVRNLANTVTEEILEKAFSQFGKLERVKKLKDYAFIHFDERDGAVKAMEEMNGKDLEGENIEIVFAKPPDQKRKERKAQRQAAKNQMYDDYYYYGPPHMPPPTRGRGRGGRGGYGYPPDYYGYEDYYDYYGYDYHNYRGGYEDPYYGYEDFQVGARGRGGRGARGAAPSRGRGAAPPRGRAGYSQRGGPGSARGVRGARGGAQQQRGRGQGKGVEAGPDLLQ

SEQ ID NO: 859030 - protein, 623 aa, Homo sapiens
MATEHVNGNGTEEPMDTTSAVIHSENFQTLLDAGLPQKVAEKLDEIYVAGLVAHSDLDERAIEALKEFNEDGALAVLQQFKDSDLSHVQNKSAFLCGVMKTYRQREKQGTKVADSSKGPDEAKIKALLERTGYTLDVTTGQRKYGGPPPDSVYSGQQPSVGTEIFVGKIPRDLFEDELVPLFEKAGPIWDLRLMMDPLTGLNRGYAFVTFCTKEAAQEAVKLYNNHEIRSGKHIGVCISVANNRLFVGSIPKSKTKEQILEEFSKVTEGLTDVILYHQPDDKKKNRGFCFLEYEDHKTAAQARRRLMSGKVKVWGNVGTVEWADPIEDPDPEVMAKVKVLFVRNLANTVTEEILEKAFSQFGKLERVKKLKDYAFIHFDERDGAVKAMEEMNGKDLEGENIEIVFAKPPDQKRKERKAQRQAAKNQMYDDYYYYGPPHMPPPTRGRGRGGRGGYGYPPDYYGYEDYYDYYGYDYHNYRGGYEDPYYGYEDFQVGARGRGGRGARGAAPSRGRGAAPPRGRAGYSQRGGPGSARGVRGARGGAQQQRGRGVRGARGGRGGNVGGKRKADGYNQPDSKRRQTNNQNWGSQPIAQQPLQGGDHSGNYGYKSENQEFYQDTFGQQWK

SEQ ID NO: 859031 - protein, 562 aa, Homo sapiens
MATEHVNGNGTEEPMDTTSAVIHSENFQTLLDAGLPQKVAEKLDEIYVAGLVAHSDLDERAIEALKEFNEDGALAVLQQFKDSDLSHVQNKSAFLCGVMKTYRQREKQGTKVADSSKGPDEAKIKALLERTGYTLDVTTGQRKYGGPPPDSVYSGQQPSVGTEIFVGKIPRDLFEDELVPLFEKAGPIWDLRLMMDPLTGLNRGYAFVTFCTKEAAQEAVKLYNNHEIRSGKHIGVCISVANNRLFVGSIPKSKTKEQILEEFSKVTEGLTDVILYHQPDDKKKNRGFCFLEYEDHKTAAQARRRLMSGKVKVWGNVGTVEWADPIEDPDPEVMAKVKVLFVRNLANTVTEEILEKAFSQFGKLERVKKLKDYAFIHFDERDGAVKAMEEMNGKDLEGENIEIVFAKPPDQKRKERKAQRQAAKNQMYDDYYYYGPPHMPPPTRGRGRGGRGGYGYPPDYYGYEDYYDYYGYDYHNYRGGYEDPYYGYEDFQVGARGRGGRGARGAAPSRGRGAAPPRGRAGYSQRGGPGSARGVRGARGGAQQQRGRGQGKGVEAGPDLLQ

SEQ ID NO: 859032 - protein, 562 aa, Homo sapiens; identical to SEQ ID NO: 859031

SEQ ID NO: 859033 - protein, 562 aa, Homo sapiens; identical to SEQ ID NO: 859031

SEQ ID NO: 859034 - protein, 605 aa, Homo sapiens
MATEHVNGNGTEEPMDTTSAVIHSENFQTLLDAGLPQKVAEKLDEIYVAGLVAHSDLDERAIEALKEFNEDGALAVLQQFKDSDLSHVQNKSAFLCGVMKTYRQREKQGTKVADSSKGPDEAKIKALLERTGYTLDVTTGQRKYGGPPPDSVYSGQQPSVGTEIFVGKIPRDLFEDELVPLFEKAGPIWDLRLMMDPLTGLNRGYAFVTFCTKEAAQEAVKLYNNHEIRSGKHIGVCISVANNRLFVGSIPKSKTKEQILEEFSKVTEGLTDVILYHQPDDKKKNRGFCFLEYEDHKTAAQARRRLMSGKVKVWGNVGTVEWADPIEDPDPEVMAKVKVLFVRNLANTVTEEILEKAFSQFGKLERVKKLKDYAFIHFDERDGAVKAMEEMNGKDLEGENIEIVFAKPPDQKRKERKAQRQAAKNQMYDDYYYYGPPHMPPPTRGRGRGGRGGYGYPPDYYGYEDYYDYYGYDYHNYRGGYEDPYYGYEDFQVGARGRGGRGARGAAPSRGRGAAPPRGRAGYSQRGGPGSARGVRGARGGAQQQRGRGVRGARGGRGGNVGGKRKADGYNQPDSKRRQTNNQNWGSQPIAQQPLQAGKRGRGRS

SEQ ID NO: 859035 - protein, 355 aa, Homo sapiens
MATEHVNGNGTEEPMDTTSAVIHSENFQTLLDAGLPQKVAEKLDEIYVAGLVAHSDLDERAIEALKEFNEDGALAVLQQFKDSDLSHVQNKSAFLCGVMKTYRQREKQGTKVADSSKGPDEAKIKALLERTGYTLDVTTGQRKYGGPPPDSVYSGQQPSVGTEIFVGKIPRDLFEDELVPLFEKAGPIWDLRLMMDPLTGLNRGYAFVTFCTKEAAQEAVKLYNNHEIRSGKHIGVCISVANNRLFVGSIPKSKTKEQILEEFSKVTEGLTDVILYHQPDDKKKNRGFCFLEYEDHKTAAQVKVLFVRNLANTVTEEILEKAFSQFGKLERVKKLKDYAFIHFDERDGAVKLWKK

SEQ ID NO: 859036 - protein, 298 aa, Homo sapiens
MATEHVNGNGTEEPMDTTSAVIHSENFQTLLDAGLPQKVAEKLDEIYVAGLVAHSDLDERAIEALKEFNEDGALAVLQQFKDSDLSHVQNKSAFLCGVMKTYRQREKQGTKVADSSKGPDEAKIKALLERTGYTLDVTTGQRKYGGPPPDSVYSGQQPSVGTEIFVGKIPRDLFEDELVPLFEKAGPIWDLRLMMDPLTGLNRGYAFVTFCTKEAAQEAVKLYNNHEIRSGKHIGVCISVANNRLFVGSIPKSKTKEQILEEFSKVTEGLTDVIYTTNRETEKNRRLLSGYESNTASS

SEQ ID NO: 859037 - protein, 182 aa, Homo sapiens
MATEHVNGNGTEEPMDTTSAVIHSENFQTLLDAGLPQKVAEKLDEIYVAGLVAHSDLDERAIEALKEFNEDGALAVLQQFKDSDLSHVQNKSAFLCGVMKTYRQREKQGTKVADSSKGPDEAKIKALLERTGYTLDVTTGQRKYGGPPPDSVYSGQQPSVGTEFVGEKIPRDLFEGVNFVST

SEQ ID NO: 859038 - protein, 562 aa, Homo sapiens; identical to SEQ ID NO: 859031

SEQ ID NO: 859039 - protein, 154 aa, Homo sapiens
HEEREREREKEQQKIKCMTITTIMVHLICPLQQEVEGVEVEVVMDILQIIMDMKIIMIIMVMITITIVVDMKIHTMVMKIFKLELEEGVVEEQGVLLHPEVVGLLLPAVEPVIHREEVLDQQEAFEVREEVPNNKEAAGREKGSRPVLTCYNED

SEQ ID NO: 859040 - protein, 562 aa, Homo sapiens; identical to SEQ ID NO: 859031

SEQ ID NO: 859041 - protein, 562 aa, Homo sapiens; identical to SEQ ID NO: 859031

SEQ ID NO: 859042 - protein, 623 aa, Homo sapiens; identical to SEQ ID NO: 859030

SEQ ID NO: 859043 - protein, 372 aa, Homo sapiens
MATEHVNGNGTEEPMDTTSAVIHSENFQTLLDAGLPQKVAEKLDEIYVAGLVAHSDLDERAIEALKEFNEDGALAVLQQFKDSDLSHVQNKSAFLCGVMKTYRQREKQGTKVADSSKGPDEAKIKALLERTGYTLDVTTGQRKYGGPPPDSVYSGQQPSVGTEIFVGKIPRDLFEDELVPLFEKAGPIWDLRLMMDPLTGLNRGYAFVTFCTKEAAQEAVKLYNNHEIRSGKHIGVCISVANNRLFVGSIPKSKTKEQILEEFSKVTEGLTDVILYHQPDDKKKNRGFCFLEYEDHKTAAQARRRLMSGKVKVWGNVGTVEWADPIEDPDPEVMAKVKVLFVRNLANTVTEEILEKAFSQFGKHGIKYGTLN

SEQ ID NO: 859044 - protein, 588 aa, Homo sapiens
MATEHVNGNGTEEPMDTTSAVIHSENFQTLLDAGLPQKVAEKLDEIYVAGLVAHSDLDERAIEALKEFNEDGALAVLQQFKDSDLSHVQNKSAFLCGVMKTYRQREKQGTKVADSSKGPDEAKIKALLERTGYTLDVTTGQRKYGGPPPDSVYSGQQPSVGTEIFVGKIPRDLFEDELVPLFEKAGPIWDLRLMMDPLTGLNRGYAFVTFCTKEAAQEAVKLYNNHEIRSGKHIGVCISVANNRLFVGSIPKSKTKEQILEEFSKVTEGLTDVILYHQPDDKKKNRGFCFLEYEDHKTAAQVKVLFVRNLANTVTEEILEKAFSQFGKLERVKKLKDYAFIHFDERDGAVKAMEEMNGKDLEGENIEIVFAKPPDQKRKERKAQRQAAKNQMYDDYYYYGPPHMPPPTRGRGRGGRGGYGYPPDYYGYEDYYDYYGYDYHNYRGGYEDPYYGYEDFQVGARGRGGRGARGAAPSRGRGAAPPRGRAGYSQRGGPGSARGVRGARGGAQQQRGRGVRGARGGRGGNVGGKRKADGYNQPDSKRRQTNNQNWGSQPIAQQPLQGGDHSGNYGYKSENQEFYQDTFGQQWK

SEQ ID NO: 859045 - protein, 507 aa, Homo sapiens
MATEHVNGNGTEEPMDTTSAVIHSENFQTLLDAGLPQKVAEKLDEIYVAGLVAHSDLDERAIEALKEFNEDGALAVLQQFKDSDLSHVQNKSAFLCGVMKTYRQREKQGTKVADSSKGPDEAKIKALLERTGYTLDVTTGQRKYGGPPPDSVYSGQQPSVGTEIFVGKIPRDLFEDELVPLFEKAGPIWDLRLMMDPLTGLNRGYAFVTFCTKEAAQEAVKLYNNHEIRSGKHIGVCISVANNRLFVGSIPKSKTKEQILEEFSKVTEGLTDVILYHQPDDKKKNRGFCFLEYEDHKTAAQARRRLMSGKVKVWGNVGTVEWADPIEDPDPEVMAKVKVLFVRNLANTVTEEILEKAFSQFGKLERVKKLKDYAFIHFDERDGAVKAMEEMNGKDLEGENIEIVFAKPPDQKRKERKAQRQAAKNQMYDDYYYYGPPHMPPPTRGRGRGGRGGYGYPPDYYGYEDYYDYYGYDYHNYRGGYEDPYYGYEDFQNVFQQKSFITPSMVS

SEQ ID NO: 859046 - protein, 138 aa, Homo sapiens [sequence omitted]

SEQ ID NO: 859047 - protein, 134 aa, Homo sapiens
MLGPACAVGQRHGRLPWARLFQPSIQLARQGFPVGKGLAAALENKRTVIEQQPVLCEVFCRDRKVLREGERLTLPQLADTYETLAYSTCLASGLTNDSREHRNQILRMDDQNHQCTCSNQMFGARYYGYTKNIK

SEQ ID NO: 859048 - protein, 569 aa, Homo sapiens
MKKKLVVLGLLAVVLVLVIVGLCLWLPSASKEPDNHVYTRAAVAADAKQCSKIGRDALRDGGSAVDAAIAALLCVGLMNAHSMGIGGGLFLTIYNSTTRKAEVINAREVAPRLAFATMFNSSEQSQKGGLSVAVPGEIRGYELAHQRHGRLPWARLFQPSIQLARQGFPVGKGLAAALENKRTVIEQQPVLCEVFCRDRKVLREGERLTLPQLADTYETLAIEGAQAFYNGSLTAQIVKDIQAAGGIVTAEDLNNYRAELIEHPLNISLGDAVLYMPSAPLSGPVLALILNILKGYNFSRESVESPEQKGLTYHRIVEAFRFAYAKRTLLGDPKFVDVTEVVRNMTSEFFAAQLRAQISDDTTHPISYYKPEFYTPDDGGTAHLSVVAEDGSAVSATSTINLYFGSKVRSPVSGILFNNEMDDFSSPSITNEFGVPPSPANFIQPGKQPLSSMCPTIMVGQDGQVRMVVGAAGGTQITTATALAIIYNLWFGYDVKRAVEEPRLHNQLLPNVTTVERNIDQAVTAALETRHHHTQIASTFIAVVQAIVRTAGGWAAASDSRKGGEPAGY

SEQ ID NO: 859049 - protein, 569 aa, Homo sapiens; identical to SEQ ID NO: 859048

SEQ ID NO: 859050 - protein, 569 aa, Homo sapiens; identical to SEQ ID NO: 859048

SEQ ID NO: 859051 - protein, 576 aa, Homo sapiens
MKKKLVVLGLLAVVLVLVIVGLCLWLPSASKEPDNHVYTRAAVAADAKQCSKIGRDALRDGGSAVDAAIAALLCVGLMNAHSMGIGGGLFLTIYNSTTRKAEVINAREVAPRLAFATMFNSSEQSQKGGLSVAVPGEIRGYELAHQRHGRLPWARLFQPSIQLARQGFPVGKGLAAALENKRTVIEQQPVLCEVFCRDRKVLREGERLTLPQLADTYETLAIEGAQAFYNGSLTAQIVKDIQAAGGIVTAEDLNNYRAELIEHPLNISLGDAVLYMPSAPLSGPVLALILNILKGYNFSRESVESPEQKGLTYHRIVEAFRFAYAKRTLLGDPKFVDVTEASSGVWQVVRNMTSEFFAAQLRAQISDDTTHPISYYKPEFYTPDDGGTAHLSVVAEDGSAVSATSTINLYFGSKVRSPVSGILFNNEMDDFSSPSITNEFGVPPSPANFIQPGKQPLSSMCPTIMVGQDGQVRMVVGAAGGTQITTATALAIIYNLWFGYDVKRAVEEPRLHNQLLPNVTTVERNIDQAVTAALETRHHHTQIASTFIAVVQAIVRTAGGWAAASDSRKGGEPAGY

SEQ ID NO: 859052 - protein, 569 aa, Homo sapiens; identical to SEQ ID NO: 859048

SEQ ID NO: 859053 - protein, 229 aa, Homo sapiens
MKKKLVVLGLLAVVLVLVIVGLCLWLPSASKEPDNHVYTRAAVAADAKQCSKIGRDALRDGGSAVDAAIAALLCVGLMNAHSMGIGGGLFLTIYNSTTRKAEVINAREVAPRLAFATMFNSSEQSQKGGLSVAVPGEIRGYELAHQRHGRLPWARLFQPSIQLARQGFPVGKGLAAALENKRTVIEQQPVLCEVFCRDRKVLREGERLTLPQLADTYETLAYSTCRPAV

SEQ ID NO: 859054 - protein, 75 aa, Homo sapiens
MNTAHASQKEQKEKKKGGARKTERDESKRQSTRRGKRKRKPEEDKEKGDAEQQRRKDTRKTEKKKRDGRKKRKER

SEQ ID NO: 859055 - protein, 569 aa, Homo sapiens; identical to SEQ ID NO: 859048

SEQ ID NO: 859056 - protein, 569 aa, Homo sapiens; identical to SEQ ID NO: 859048

SEQ ID NO: 859057 - protein, 225 aa, Homo sapiens
MTSEFFAAQLRAQISDDTTHPISYYKPEFYTPDDGGTAHLSVVAEDGSAVSATSTINLYFGSKVRSPVSGILFNNEMDDFSSPSITNEFGVPPSPANFIQPGKQPLSSMCPTIMVGQDGQVRMVVGAAGGTQITTATALAIIYNLWFGYDVKRAVEEPRLHNQLLPNVTTVERNIDQAVTAALETRHHHTQIASTFIAVVQAIVRTAGGWAAASDSRKGGEPAGY

SEQ ID NO: 859058 - protein, 238 aa, Homo sapiens
DRESDWSCKVVRNMTSEFFAAQLRAQISDDTTHPISYYKPEFYTPDDGGTAHLSVVAEDGSAVSATSTINLYFGSKVRSPVSGILFNNEMDDFSSPSITNEFGVPPSPANFIQPGKQPLSSMCPTIMVGQDGQVRMVVGAAGGTQITTATALAIIYNLWFGYDVKRAVEEPRLHNQLLPNVTTVERNIDQAVTAALETRHHHTQIASTFIAVVQAIVRTAGGWAAASDSRKGGEPAGY

SEQ ID NO: 859059 - protein, 184 aa, Homo sapiens
MSRTAYTVGALLLLLGTLLPAAEGKKKGSQGAIPPPDKAQHNDSEQTQSPQQPGSRNRGRGQGRGTAMPGEEVLESSQEALHVTERKYLKRDWCKTQPLKQTIHEEGCNSRTIINRFCYGQCNSFYIPRHIRKEEGSFQSCSFCKPKKFTTMMVTLNCPELQPPTKKKRVTRVKQCRCISIDLD

SEQ ID NO: 859060 - protein, 135 aa, Homo sapiens
MYGGGGGASPGGSGRGRTQRHASKAQAPRTRRTDRERKYLKRDWCKTQPLKQTIHEEGCNSRTIINRFCYGQCNSFYIPRHIRKEEGSFQSCSFCKPKKFTTMMVTLNCPELQPPTKKKRVTRVKQCRCISIDLD

SEQ ID NO: 859061 - protein, 184 aa, Homo sapiens; identical to SEQ ID NO: 859059

SEQ ID NO: 859062 - protein, 184 aa, Homo sapiens; identical to SEQ ID NO: 859059

SEQ ID NO: 859063 - protein, 235 aa, Homo sapiens
MDVRRLKVNELREELQRRGLDTRGLKAELAERLQAALEAEEPDDERELDADDEPGRPGHINEEVETEGGSELEGTAQPPPPGLQPHAEPGGYSGPDGHYAMDNITRQNQFYDTQVIKQENESGYERRPLEMEQQQAYRPEMKTEMKQGAPTSFLPPEASQLKPDRQQFQSRKRPYEENRGRGYFEHREDRRWVYEAAVTLALVGFYIHSLVLAGDICTNLEGLSKDSLCFHTLPV

SEQ ID NO: 859064 - protein, 244 aa, Homo sapiens
MDKMRVMGLRRQRNYAGRWDVLIQQATQCLNRLIQIAARKKRNYILDQTNVYGSAQRRKMRPFEGFQRKAIVICPTDEDLKDRTIKRTDEEGKDVPDHAVLEMKANFTLPDVGDFLDEVLFIELQREEADKLVRQYNEEGRKAGPPPEKRFDNRGGGGFRGRGGGGGFQRYENRGPPGGNRGGFQNRGGGSGGGGNYRGGFNRSGGGGYSQNRWGNNNTSTQSAHRPQEAPKARTGHQPPHSRR

SEQ ID NO: 859065 - protein, 134 aa, Homo sapiens
MDVRRLKVNELREELQRRGLDTRGLKAELAERLQAALEAEEPDDERELDADDEPGRPGHINEEVETEGGSELEGTAQPPPPGLQPHAEPGGYSGPDGHYAMDNITRQNQFYDTQVIKQENESMVVRACNPSYSE

SEQ ID NO: 859066 - protein, 856 aa, Homo sapiens
MDVRRLKVNELREELQRRGLDTRGLKAELAERLQAALEAEEPDDERELDADDEPGRPGHINEEVETEGGSELEGTAQPPPPGLQPHAEPGGYSGPDGHYAMDNITRQNQFYDTQVIKQENESGYERRPLEMEQQQAYRPEMKTEMKQGAPTSFLPPEASQLKPDRQQFQSRKRPYEENRGRGYFEHREDRRGRSPQPPAEEDEDDFDDTLVAIDTYNCDLHFKVARDRSSGYPLTIEGFAYLWSGARASYGVRRGRVCFEMKINEEISVKHLPSTEPDPHVVRIGWSLDSCSTQLGEEPFSYGYGGTGKKSTNSRFENYGDKFAENDVIGCFADFECGNDVELSFTKNGKWMGIAFRIQKEALGGQALYPHVLVKNCAVEFNFGQRAEPYCSVLPGFTFIQHLPLSERIRGTVGPKSKAECEILMMVGLPAAGKTTWAIKHAASNPSKKYNILGTNAIMDKMRVMGLRRQRNYAGRWDVLIQQATQCLNRLIQIAARKKRNYILDQTNVYGSAQRRKMRPFEGFQRKAIVICPTDEDLKDRTIKRTDEEGKDVPDHAVLEMKANFTLPDVGDFLDEVLFIELQREEADKLVRQYNEEGRKAGPPPEKRFDNRGGGGFRGRGGGGGFQRYENRGPPGGNRGGFQNRGGGSGGGGNYRGGFNRSGGGGYSQNRWGNNNRDNNNSNNRGSYNRAPQQQPPPQQPPPPQPPPQQPPPPPSYSPARNPPGASTYNKNSNIPGSSANTSTPTVSSYSPPQPSYSQPPYNQGGYSQGYTAPPPPPPPPPAYNYGSYGGYNPAPYTPPPPPTAQTYPQPSYNQYQQYAQQWNQYYQNQGQWPPYYGNYDYGSYSGNTQGGTSTQ

SEQ ID NO: 859067 - protein, 756 aa, Homo sapiens
MDNITRQNQFYDTQVIKQENESGYERRPLEMEQQQAYRPEMKTEMKQGAPTSFLPPEASQLKPDRQQFQSRKRPYEENRGRGYFEHREDRRGRSPQPPAEEDEDDFDDTLVAIDTYNCDLHFKVARDRSSGYPLTIEGFAYLWSGARASYGVRRGRVCFEMKINEEISVKHLPSTEPDPHVVRIGWSLDSCSTQLGEEPFSYGYGGTGKKSTNSRFENYGDKFAENDVIGCFADFECGNDVELSFTKNGKWMGIAFRIQKEALGGQALYPHVLVKNCAVEFNFGQRAEPYCSVLPGFTFIQHLPLSERIRGTVGPKSKAECEILMMVGLPAAGKTTWAIKHAASNPSKKYNILGTNAIMDKMRVMGLRRQRNYAGRWDVLIQQATQCLNRLIQIAARKKRNYILDQTNVYGSAQRRKMRPFEGFQRKAIVICPTDEDLKDRTIKRTDEEGKDVPDHAVLEMKANFTLPDVGDFLDEVLFIELQREEADKLVRQYNEEGRKAGPPPEKRFDNRGGGGFRGRGGGGGFQRYENRGPPGGNRGGFQNRGGGSGGGGNYRGGFNRSGGGGYSQNRWGNNNRDNNNSNNRGSYNRAPQQQPPPQQPPPPQPPPQQPPPPPSYSPARNPPGASTYNKNSNIPGSSANTSTPTVSSYSPPQPSYSQPPYNQGGYSQGYTAPPPPPPPPPAYNYGSYGGYNPAPYTPPPPPTAQTYPQPSYNQYQQYAQQWNQYYQNQGQWPPYYGNYDYGSYSGNTQGGTSTQ

SEQ ID NO: 859068 - protein, 756 aa, Homo sapiens; identical to SEQ ID NO: 859067

SEQ ID NO: 859069 - protein, 856 aa, Homo sapiens; identical to SEQ ID NO: 859066

SEQ ID NO: 859070 - protein, 856 aa, Homo sapiens; identical to SEQ ID NO: 859066

SEQ ID NO: 859071 - protein, 707 aa, Homo sapiens
NYRLGTRLGVNRPRHRQQFQSRKRPYEENRGRGYFEHREDRRGRSPQPPAEEDEDDFDDTLVAIDTYNCDLHFKVARDRSSGYPLTIEGFAYLWSGARASYGVRRGRVCFEMKINEEISVKHLPSTEPDPHVVRIGWSLDSCSTQLGEEPFSYGYGGTGKKSTNSRFENYGDKFAENDVIGCFADFECGNDVELSFTKNGKWMGIAFRIQKEALGGQALYPHVLVKNCAVEFNFGQRAEPYCSVLPGFTFIQHLPLSERIRGTVGPKSKAECEILMMVGLPAAGKTTWAIKHAASNPSKKYNILGTNAIMDKMRVMGLRRQRNYAGRWDVLIQQATQCLNRLIQIAARKKRNYILDQTNVYGSAQRRKMRPFEGFQRKAIVICPTDEDLKDRTIKRTDEEGKDVPDHAVLEMKANFTLPDVGDFLDEVLFIELQREEADKLVRQYNEEGRKAGPPPEKRFDNRGGGGFRGRGGGGGFQRYENRGPPGGNRGGFQNRGGGSGGGGNYRGGFNRSGGGGYSQNRWGNNNRDNNNSNNRGSYNRAPQQQPPPQQPPPPQPPPQQPPPPPSYSPARNPPGASTYNKNSNIPGSSANTSTPTVSSYSPPQPSYSQPPYNQGGYSQGYTAPPPPPPPPPAYNYGSYGGYNPAPYTPPPPPTAQTYPQPSYNQYQQYAQQWNQYYQNQGQWPPYYGNYDYGSYSGNTQGGTSTQ

SEQ ID NO: 859072 - protein, 856 aa, Homo sapiens; identical to SEQ ID NO: 859066

SEQ ID NO: 859073 - protein, 596 aa, Homo sapiens [sequence omitted]

SEQ ID NO: 859074 - protein, 761 aa, Homo sapiens
MDVRRLKVNELREELQRRGLDTRGLKAELAERLQAALEAEEPDDERELDADDEPGRPGHINEEVETEGGSELEGTAQPPPPGLQPHAEPGGYSGPDGHYAMDNITRQNQFYDTQVIKQENESGYERRPLEMEQQQAYRPEMKTEMKQGAPTSFLPPEASQLKPDRQQFQSRKRPYEENRGRGYFEHREDRRGRSPQPPAEEDEDDFDDTLVAIDTYNCDLHFKVARDRSSGYPLTIEGFAYLWSGARASYGVRRGRVCFEMKINEEISVKHLPSTEPDPHVVRIGWSLDSCSTQLGEEPFSYGYGGTGKKSTNSRFENYGDKFAENDVIGCFADFECGNDVELSFTKNGKWMGIAFRIQKEALGGQALYPHVLVKNCAVEFNFGQRAEPYCSVLPGFTFIQHLPLSERIRGTVGPKSKAECEILMMVGLPAAGKTTWAIKHAASNPSKKYNILGTNAIMDKMRVMGLRRQRNYAGRWDVLIQQATQCLNRLIQIAARKKRNYILDQTNVYGSAQRRKMRPFEGFQRKAIVICPTDEDLKDRTIKRTDEEGKDVPDHAVLEMKANFTLPDVGDFLDEVLFIELQREEADKLVRQYNEEGRKAGPPPEKRFDNRGGGGFRGRGGGGGFQRYENRGPPGGNRGGFQNRGGGSGGGGNYRGGFNRSGGGGYSQNRWGNNNRDNNNSNNRGSYNRAPQQQPPPQQPPPELQPATLQPGRLQPGLHSPTASTSTTTCLQLWELRRLQPGPLYPTATPHRTDLPSAQL

SEQ ID NO: 859075 - protein, 757 aa, Homo sapiens
MDNITRQNQFYDTQVIKQENESGYERRPLEMEQQQAYRPEMKTEMKQGAPTSFLPPEASQLKPDRQQFQSRKRPYEENRGRGYFEHREDRRGRSPQPPAEEDEDDFDDTLVAIDTYNCDLHFKVARDRSSGYPLTIEGFAYLWSGARASYGVRRGRVCFEMKINEEISVKHLPSTEPDPHVVRIGWSLDSCSTQLGEEPFSYGYGGTGKKSTNSRFENYGDKFAENDVIGCFADFECGNDVELSFTKNGKWMGIAFRIQKEALGGQALYPHVLVKNCAVEFNFGQRAEPYCSVLPGFTFIQHLPLSERIRGTVGPKSKAECEILMMVGLPAAGKTTWAIKHAASNPSKKYNILGTNAIMDKMRVMGLRRQRNYAGRWDVLIQQATQCLNRLIQIAARKKRNYILDQTNVYGSAQRRKMRPFEGFQRKAIVICPTDEDLKDRTIKRTDEEGKDVPDHAVLEMKEANFTLPDVGDFLDEVLFIELQREEADKLVRQYNEEGRKAGPPPEKRFDNRGGGGFRGRGGGGGFQRYENRGPPGGNRGGFQNRGGGSGGGGNYRGGFNRSGGGGYSQNRWGNNNRDNNNSNNRGSYNRAPQQQPPPQQPPPPQPPPQQPPPPPSYSPARNPPGASTYNKNSNIPGSSANTSTPTVSSYSPPQPSYSQPPYNQGGYSQGYTAPPPPPPPPPAYNYGSYGGYNPAPYTPPPPPTAQTYPQPSYNQYQQYAQQWNQYYQNQGQWPPYYGNYDYGSYSGNTQGGTSTQ

SEQ ID NO: 859076 - protein, 815 aa, Homo sapiens
MDVRRLKVNELREELQRRGLDTRGLKAELAERLQAALEAEEPDDERELDADDEPGRPGHINEEVETEGGSELEGTAQPPPPGLQPHAEPGGYSGPDGHYAMDNITRQNQFYDTQVIKQENESGYERRPLEMEQQQAYRPEMKTEMKQGAPTSFLPPEASQLKPDRQQFQSRKRPYEENRGRGYFEHREDRRGRSPQPPAEEDEDDFDDTLVAIDTYNCDLHFKVARDRSSGYPLTIEGFAYLWSGARASYGVRRGRVCFEMKINEEISVKHLPSTEPDPHVVRIGWSLDSCSTQLGEEPFSYGYGGTGKKSTNSRFENYGDKFAENDVIGCFADFECGNDVELSFTKNGKWMGIAFRIQKEALGGQALYPHVLVKNCAVEFNFGQRAEPYCSVLPGFTFIQHLPLSERIRGTVGPKSKAECEILMMVGLPAAGKTTWAIKHAASNPSKKYNILGTNAIMDKMRVMGLRRQRNYAGRWDVLIQQATQCLNRLIQIAARKKRNYILDQTNVYGSAQRRKMRPFEGFQRKAIVICPTDEDLKDRTIKRTDEEGKDVPDHAVLEMKANFTLPDVGDFLDEVLFIELQREEADKLVRQYNEEGRKAGPPPEKRFDNRGGGGFRGRGGGGGFQRYENRGPPGGNRGGFQNRGGGSGGGGNYRGGFNRSGGGGYSQNRWGNNNRDNNNSNNRGSYNRAPQQQPPPQQPPPPQPPPQQPPPPPSYSPARNPPGASTYNKNSNIPGSSANTSTPTVSSYSPPQPSYSQPPYNQGGYSQGYTAPPPPPPPPPAYNYGSYGGYNPAPYTHKEQTKEKNTEDSFNSL

SEQ ID NO: 859077 - protein, 736 aa, Homo sapiens
MDVRRLKVNELREELQRRGLDTRGLKAELAERLQAALEAEEPDDERELDADDEPGRPGHINEEVETEGGSELEGTAQPPPPGLQPHAEPGGYSGPDGHYAMDNITRQNQFYDTQVIKQENESGYERRPLEMEQQQAYRPEMKTEMKQGAPTSFLPPEASQLKPDRQQFQSRKRPYEENRGRGYFEHREDRRGRSPQPPAEEDEDDFDDTLVAIDTYNCDLHFKVARDRSSGYPLTIEGFAYLWSGARASYGVRRGRVCFEMKINEEISVKHLPSTEPDPHVVRIGWSLDSCSTQLGEEPFSYGYGGTGKKSTNSRFENYGDKFAENDVIGCFADFECGNDVELSFTKNGKWMGIAFRIQKEALGGQALYPHVLVKNCAVEFNFGQRAEPYCSVLPGFTFIQHLPLSERIRGTVGPKSKAECEILMMVGLPAAGKTTWAIKHAASNPSKKYNILGTNAIMDKMRVMGLRRQRNYAGRWDVLIQQATQCLNRLIQIAARKKRNYILDQTNVYGSAQRRKMRPFEGFQRKAIVICPTDEDLKDRTIKRTDEEGKDVPDHAVLEMKANFTLPDVGDFLDEVLFIELQREEADKLVRQYNEEGRKAGPPPEKRFDNRGGGGFRGRGGGGGFQRYENRGPPGGNRGGFQNRGGGSGGGGNYRGGFNRSGGGGYSQNRWGNNNRDNNNSNNRGSYNRAPQQQPPPQQPPPPQPPPQQPPPPPSYSPARNPRSPRCQTQKLFLQ

SEQ ID NO: 859078 - protein, 409 aa, Homo sapiens
MDVRRLKVNELREELQRRGLDTRGLKAELAERLQAALEAEEPDDERELDADDEPGRPGHINEEVETEGGSELEGTAQPPPPGLQPHAEPGGYSGPDGHYAMDNITRQNQFYDTQKANFTLPDVGDFLDEVLFIELQREEADKLVRQYNEEGRKAGPPPEKRFDNRGGGGFRGRGGGGGFQRYENRGPPGGNRGGFQNRGGGSGGGGNYRGGFNRSGGGGYSQNRWGNNNRDNNNSNNRGSYNRAPQQQPPPQQPPPPQPPPQQPPPPPSYSPARNPPGASTYNKNSNIPGSSANTSTPTVSSYSPPQPSYSQPPYNQGGYSQGYTAPPPPPPPPPAYNYGSYGGYNPAPYTPPPPPTAQTYPQPSYNQYQQYAQQWNQYYQNQGQWPPYYGNYDYGSYSGNTQGGTSTQ

SEQ ID NO: 859079 - protein, 323 aa, Homo sapiens
MDVRRLKVNELREELQRRGLDTRGLKAELAERLQAALEAEEPDDERELDADDEPGRPGHINEEVETEGGSELEGTAQPPPPGLHRGRGGGGGFQRYENRGPPGGNRGGFQNRGGGSGGGGNYRGGFNRSGGGGYSQNRWGNNNRDNNNSNNRGSYNRAPQQQPPPQQPPPPQPPPQQPPPPPSYSPARNPPGASTYNKNSNIPGSSANTSTPTVSSYSPPQPSYSQPPYNQGGYSQGYTAPPPPPPPPPAYNYGSYGGYNPAPYTPPPPPTAQTYPQPSYNQYQQYAQQWNQYYQNQGQWPPYYGNYDYGSYSGNTQGGTSTQ

SEQ ID NO: 859080 - protein, 390 aa, Homo sapiens
MGFCHVGQAGLELLTSGDPPASASQSAGITGVSHRARPSVFVFLIHYSSFLHLLPSGRPLFWVEGTRLQKVLTSSSCSLWGTSFLLANFTLPDVGDFLDEVLFIELQREEADKLVRQYNEEGRKAGPPPEKRFDNRGGGGFRGRGGGGGFQRYENRGPPGGNRGGFQNRGGGSGGGGNYRGGFNRSGGGGYSQNRWGNNNRDNNNSNNRGSYNRAPQQQPPPQQPPPPQPPPQQPPPPPSYSPARNPPGASTYNKNSNIPGSSANTSTPTVSSYSPPQSFGFFPSTFQPSYSQPPYNQGGYSQGYTAPPPPPPPPPAYNYGSYGGYNPAPYTPPPPPTAQTYPQPSYNQYQQYAQQWNQYYQNQGQWPPYYGNYDYGSYSGNTQGGTSTQ

SEQ ID NO: 859081 - protein, 564 aa, Homo sapiens
MDVRRLKVNELREELQRRGLDTRGLKAELAERLQAALEAEEPDDERELDADDEPGRPGHINEEVETEGGSELEGTAQPPPPGLQPHAEPGGYSGPDGHYAMDNITRQNQFYDTQVIKQENESGYERRPLEMEQQQAYRPEMKTEMKQGAPTSFLPPEASQLKPDRQQFQSRKRPYEENRGRGYFEHREDRRGRSPQPPAEEDEDDFDDTLVAIDTYNCDLHFKVARDRSSGYPLTIEGFAYLWSGARASYGVRRGRVCFEMKINEEISVKHLPSTEPDPHVVRIGWSLDSCSTQLGEEPFSYGYGGTGKKSTNSRFENYGDKFAENDVIGCFADFECGNDVELSFTKNGKWMGIAFRIQKEALGGQALYPHVLVKNCAVEFNFGQRAEPYCSVLPGFTFIQHLPLSERIRGTVGPKSKAECEILMMVGLPAAGKTTWAIKHAASNPSKKYNILGTNAIMDKMRVMGLRRQRNYAGRWDVLIQQATQCLNRLIQIAARKKRNYILDQTNVYGSAQRRKMRPFEGFQRKAIVICPTDEDLKDRTIKRTDEEGKDVPDHAVLEMKER

SEQ ID NO: 859082 - protein, 285 aa, Homo sapiens
VLLLVMWLVVLLLVVMVVVGSITVGGDGGGVVVLLFRGRGGGGGFQRYENRGPPGGNRGGFQNRGGGSGGGGNYRGGFNRSGGGGYSQNRWGNNNRDNNNSNNRGSYNRAPQQQPPPQQPPPPQPPPQQPPPPPSYSPARNPPGASTYNKNSNIPGSSANTSTPTVSSYSPPQSFGFFPSTFQPSYSQPPYNQGGYSQGYTAPPPPPPPPPAYNYGSYGGYNPAPYTPPPPPTAQTYPQPSYNQYQQYAQQWNQYYQNQGQWPPYYGNYDYGSYSGNTQGGTSTQ

SEQ ID NO: 859083 - protein, 251 aa, Homo sapiens
MDVRRLKVNELREELQRRGLDTRGLKAELAERLQAALEAEEPDDERELDADDEPGRPGHINEEVETEGGSELEGTAQPPPPGLQPHAEPGGYSGPDGHYAMDNITRQNQFYDTQVIKQENESGYERRPLEMEQQQAYRPEMKTEMKQGAPTSFLPPEASQLKPDRQQFQTPPPPPPPAYNYGSYGGYNPAPYTPPPPPTAQTYPQPSYNQYQQYAQQWNQYYQNQGQWPPYYGNYDYGSYSGNTQGGTSTQ

SEQ ID NO: 859084 - protein, 239 aa, Homo sapiens
LGSRYWRLSQGCCCSYCRCWPLWGSEQGCSWVVAVAAGVVAVVASSAMNRDNNNSNNRGSYNRAPQQQPPPQQPPPPQPPPQQPPPPPSYSPARNPPGASTYNKNSNIPGSSANTSTPTVSSYSPPQSFGFFPSTFQPSYSQPPYNQGGYSQGYTAPPPPPPPPPAYNYGSYGGYNPAPYTPPPPPTAQTYPQPSYNQYQQYAQQWNQYYQNQGQWPPYYGNYDYGSYSGNTQGGTSTQ

SEQ ID NO: 859085 - protein, 66 aa, Homo sapiens
VLIQFELCIPSVDLIYILPSPSYNQYQQYAQQWNQYYQNQGQWPPYYGNYDYGSYSGNTQGGTSTQ

SEQ ID NO: 859086 - protein, 109 aa, Homo sapiens
THEHTAHKRTAPHTHAHTGASTYNKNSNIPGSSANTSTPTVSSYSPPQPSYSQPPYNQGGYSQGYTAPPPPPPPPPAYNYGSYGGYNPAPYTHKEQTKEKNTEDSFNSL

SEQ ID NO: 859087 - protein, 108 aa, Homo sapiens
GKKSTNSRFENYGDKFAENDVIGCFAVSASSLWELAEPDVGLQTSFSGYLYPLSAPYPATLAILLCLCLTDWNVYCHFVGNSVIPSPLVLCAKFSDDTLKRFGDFRCA

SEQ ID NO: 859088 - protein, 131 aa, Homo sapiens
RELAYVDTIAVVSLVTLVFVHHPPWLVCMLIVAAVLVVLRVCMFMSRVDCSVHVAPPSFCVPYDRCCTYATSFSVLGRVLSSLCKYCFINGVEKSGSKTNAGGQTFTPNKSPWGNTIHAEGKFCPHTLNLL

SEQ ID NO: 859089 - protein, 153 aa, Homo sapiens
GRGWRGGFRTVGIGDRKLLSGAEESRKNKRFSVWVGEGLENGDPRVRSSVGLAVVLAQRVGWGVGSRVSRVGKECPGVRGCESSEEGGSWNMPLDAILGVLLFGCHGQYYQAEPILRYPSHQTRKRVGLPGARPKSFSYSDTLYFYFPLTHMF

SEQ ID NO: 859090 - protein, 756 aa, Homo sapiens; identical to SEQ ID NO: 859067

SEQ ID NO: 859091 - protein, 756 aa, Homo sapiens; identical to SEQ ID NO: 859067

SEQ ID NO: 859092 - protein, 756 aa, Homo sapiens; identical to SEQ ID NO: 859067

SEQ ID NO: 859093 - protein, 866 aa, Homo sapiens
MDVRRLKVNELREELQRRGLDTRGLKAELAERLQAALEAEEPDDERELDADDEPGRPGHINEEVETEGGSELEGTAQPPPPGLQPHAEPGGYSGPDGHYAMDNITRQNQFYDTQVIKQENESGYERRPLEMEQQQAYRPEMKTEMKQGAPTSFLPPEASQLKPDRQQFQSRKRPYEENRGRGYFEHREDRRGRSPQPPAEEDEDDFDDTLVAIDTYNCDLHFKVARDRSSGYPLTIEGFAYLWSGARASYGVRRGRVCFEMKINEEISVKHLPSTEPDPHVVRIGWSLDSCSTQLGEEPFSYGYGGTGKKSTNSRFENYGDKFAENDVIGCFADFECGNDVELSFTKNGKWMGIAFRIQKEALGGQALYPHVLVKNCAVEFNFGQRAEPYCSVLPGFTFIQHLPLSERIRGTVGPKSKAECEILMMVGLPAAGKTTWAIKHAASNPSKKYNILGTNAIMDKMRVMGLRRQRNYAGRWDVLIQQATQCLNRLIQIAARKKRNYILDQTNVYGSAQRRKMRPFEGFQRKAIVICPTDEDLKDRTIKRTDEEGKDVPDHAVLEMKANFTLPDVGDFLDEVLFIELQREEADKLVRQYNEEGRKAGPPPEKRFDNRGGGGFRGRGGGGGFQRYENRGPPGGNRGGFQNRGGGSGGGGNYRGGFNRSGGGGYSQNRWGNNNRDNNNSNNRGSYNRAPQQQPPPQQPPPPQPPPQQPPPPPSYSPARNPPGASTYNKNSNIPGSSANTSTPTVSSYSPPQSFGFFPSTFQPSYSQPPYNQGGYSQGYTAPPPPPPPPPAYNYGSYGGYNPAPYTPPPPPTAQTYPQPSYNQYQQYAQQWNQYYQNQGQWPPYYGNYDYGSYSGNTQGGTSTQ

SEQ ID NO: 859094 - protein, 653 aa, Homo sapiens
NWLGTRPGFRDTYNCDLHFKVARDRSSGYPLTIEGFAYLWSGARASYGVRRGRVCFEMKINEEISVKHLPSTEPDPHVVRIGWSLDSCSTQLGEEPFSYGYGGTGKKSTNSRFENYGDKFAENDVIGCFADFECGNDVELSFTKNGKWMGIAFRIQKEALGGQALYPHVLVKNCAVEFNFGQRAEPYCSVLPGFTFIQHLPLSERIRGTVGPKSKAECEILMMVGLPAAGKTTWAIKHAASNPSKKYNILGTNAIMDKMRVMGLRRQRNYAGRWDVLIQQATQCLNRLIQIAARKKRNYILDQTNVYGSAQRRKMRPFEGFQRKAIVICPTDEDLKDRTIKRTDEEGKDVPDHAVLEMKANFTLPDVGDFLDEVLFIELQREEADKLVRQYNEEGRKAGPPPEKRFDNRGGGGFRGRGGGGGFQRYENRGPPGGNRGGFQNRGGGSGGGGNYRGGFNRSGGGGYSQNRWGNNNRDNNNSNNRGSYNRAPQQQPPPQQPPPPQPPPQQPPPPPSYSPARNPPGASTYNKNSNIPGSSANTSTPTVSSYSPPQPSYSQPPYNQGGYSQGYTAPPPPPPPPPAYNYGSYGGYNPAPYTPPPPPTAQTYPQPSYNQYQQYAQQWNQYYQNQGQWPPYYGNYDYGSYSGNTQGGTSTQ

SEQ ID NO: 859095 - protein, 595 aa, Homo sapiens
MGPPRGRGIITDQTADDPHVVRIGWSLDSCSTQLGEEPFSYGYGGTGKKSTNSRFENYGDKFAENDVIGCFADFECGNDVELSFTKNGKWMGIAFRIQKEALGGQALYPHVLVKNCAVEFNFGQRAEPYCSVLPGFTFIQHLPLSERIRGTVGPKSKAECEILMMVGLPAAGKTTWAIKHAASNPSKKYNILGTNAIMDKMRVMGLRRQRNYAGRWDVLIQQATQCLNRLIQIAARKKRNYILDQTNVYGSAQRRKMRPFEGFQRKAIVICPTDEDLKDRTIKRTDEEGKDVPDHAVLEMKANFTLPDVGDFLDEVLFIELQREEADKLVRQYNEEGRKAGPPPEKRFDNRGGGGFRGRGGGGGFQRYENRGPPGGNRGGFQNRGGGSGGGGNYRGGFNRSGGGGYSQNRWGNNNRDNNNSNNRGSYNRAPQQQPPPQQPPPPQPPPQQPPPPPSYSPARNPPGASTYNKNSNIPGSSANTSTPTVSSYSPPQPSYSQPPYNQGGYSQGYTAPPPPPPPPPAYNYGSYGGYNPAPYTPPPPPTAQTYPQPSYNQYQQYAQQWNQYYQNQGQWPPYYGNYDYGSYSGNTQGGTSTQ

SEQ ID NO: 859096 - protein, 857 aa, Homo sapiens
MDVRRLKVNELREELQRRGLDTRGLKAELAERLQAALEAEEPDDERELDADDEPGRPGHINEEVETEGGSELEGTAQPPPPGLQPHAEPGGYSGPDGHYAMDNITRQNQFYDTQVIKQENESGYERRPLEMEQQQAYRPEMKTEMKQGAPTSFLPPEASQLKPDRQQFQSRKRPYEENRGRGYFEHREDRRGRSPQPPAEEDEDDFDDTLVAIDTYNCDLHFKVARDRSSGYPLTIEGFAYLWSGARASYGVRRGRVCFEMKINEEISVKHLPSTEPDPHVVRIGWSLDSCSTQLGEEPFSYGYGGTGKKSTNSRFENYGDKFAENDVIGCFADFECGNDVELSFTKNGKWMGIAFRIQKEALGGQALYPHVLVKNCAVEFNFGQRAEPYCSVLPGFTFIQHLPLSERIRGTVGPKSKAECEILMMVGLPAAGKTTWAIKHAASNPSKKYNILGTNAIMDKMRVMGLRRQRNYAGRWDVLIQQATQCLNRLIQIAARKKRNYILDQTNVYGSAQRRKMRPFEGFQRKAIVICPTDEDLKDRTIKRTDEEGKDVPDHAVLEMKEANFTLPDVGDFLDEVLFIELQREEADKLVRQYNEEGRKAGPPPEKRFDNRGGGGFRGRGGGGGFQRYENRGPPGGNRGGFQNRGGGSGGGGNYRGGFNRSGGGGYSQNRWGNNNRDNNNSNNRGSYNRAPQQQPPPQQPPPPQPPPQQPPPPPSYSPARNPPGASTYNKNSNIPGSSANTSTPTVSSYSPPQPSYSQPPYNQGGYSQGYTAPPPPPPPPPAYNYGSYGGYNPAPYTPPPPPTAQTYPQPSYNQYQQYAQQWNQYYQNQGQWPPYYGNYDYGSYSGNTQGGTSTQ

SEQ ID NO: 859097 - protein, 813 aa, Homo sapiens
  misc_feature (810)..(812): Xaa can be any naturally occurring amino acid
MDVRRLKVNELREELQRRGLDTRGLKAELAERLQAALEAEEPDDERELDADDEPGRPGHINEEVETEGGSELEGTAQPPPPGLQPHAEPGGYSGPDGHYAMDNITRQNQFYDTQVIKQENESGYERRPLEMEQQQAYRPEMKTEMKQGAPTSFLPPEASQLKPDRQQFQSRKRPYEENRGRGYFEHREDRRGRSPQPPAEEDEDDFDDTLVAIDTYNCDLHFKVARDRSSGYPLTIEGFAYLWSGARASYGVRRGRVCFEMKINEEISVKHLPSTEPDPHVVRIGWSLDSCSTQLGEEPFSYGYGGTGKKSTNSRFENYGDKFAENDVIGCFADFECGNDVELSFTKNGKWMGIAFRIQKEALGGQALYPHVLVKNCAVEFNFGQRAEPYCSVLPGFTFIQHLPLSERIRGTVGPKSKAECEILMMVGLPAAGKTTWAIKHAASNPSKKYNILGTNAIMDKMRVMGLRRQRNYAGRWDVLIQQATQCLNRLIQIAARKKRNYILDQTNVYGSAQRRKMRPFEGFQRKAIVICPTDEDLKDRTIKRTDEEGKDVPDHAVLEMKANFTLPDVGDFLDEVLFIELQREEADKLVRQYNEEGRKAGPPPEKRFDNRGGGGFRGRGGGGGFQRYENRGPPGGNRGGFQNRGGGSGGGGNYRGGFNRSGGGGYSQNRWGNNNRDNNNSNNRGSYNRAPQQQPPPQQPPPPQPPPQQPPPPPSYSPARNPPGASTYNKNSNIPGSSANTSTPTVSSYSPPQPSYSQPPYNQGGYSQGYTAPPPPPPPPPAYNYGSYGGYNPAPYTPPPPPTAQTYPXXXP

SEQ ID NO: 859098 - protein, 748 aa, Homo sapiens
MDVRRLKVNELREELQRRGLDTRGLKAELAERLQAALEAEEPDDERELDADDEPGRPGHINEEVETEGGSELEGTAQPPPPGLQPHAEPGGYSGPDGHYAMDNITRQNQFYDTQVIKQENESGYERRPLEMEQQQAYRPEMKTEMKQGAPTSFLPPEASQLKPDRQQFQSRKRPYEENRGRGYFEHREDRRGRSPQPPAEEDEDDFDDTLVAIDTYNCDLHFKVARDRSSGYPLTIEGFAYLWSGARASYGVRRGRVCFEMKINEEISVKHLPSTEPDPHVVRIGWSLDSCSTQLGEEPFSYGYGGTGKKSTNSRFENYGDKFAENDVIGCFADFECGNDVELSFTKNGKWMGIAFRIQKEALGGQALYPHVLVKNCAVEFNFGQRAEPYCSVLPGFTFIQHLPLSERIRGTVGPKSKAECEILMMVGLPAAGKTTWAIKHAASNPSKKYNILGTNAIMDKMRVMGLRRQRNYAGRWDVLIQQATQCLNRLIQIAARKKRNYILDQTNVYGSAQRRKMRPFEGFQRKAIVICPTDEDLKDRTIKRTDEEGKDVPDHAVLEMKANFTLPDVGDFLDEVLFIELQREEADKLVRQYNEEGRKAGPPPEKRFDNRGGGGFRGRGGGGGFQRYENRGPPGGNRGGFQNRGGGSGGGGNYRGGFNRSGGGGYSQNRWGNNNRDNNNSNNRGSYNRAPQQQPPPQQPPPPQPPPQQPPPPPSYSPARNPQGSYKERHPGQAYRTHESKLKSCFP

SEQ ID NO: 859099 - protein, 380 aa, Homo sapiens
MGFCHVGQAGLELLTSGDPPASASQSAGITGVSHRARPSVFVFLIHYSSFLHLLPSGRPLFWVEGTRLQKVLTSSSCSLWGTSFLLANFTLPDVGDFLDEVLFIELQREEADKLVRQYNEEGRKAGPPPEKRFDNRGGGGFRGRGGGGGFQRYENRGPPGGNRGGFQNRGGGSGGGGNYRGGFNRSGGGGYSQNRWGNNNRDNNNSNNRGSYNRAPQQQPPPQQPPPPQPPPQQPPPPPSYSPARNPPGASTYNKNSNIPGSSANTSTPTVSSYSPPQPSYSQPPYNQGGYSQGYTAPPPPPPPPPAYNYGSYGGYNPAPYTPPPPPTAQTYPQPSYNQYQQYAQQWNQYYQNQGQWPPYYGNYDYGSYSGNTQGGTSTQ

SEQ ID NO: 859100 - protein, 165 aa, Homo sapiens
MDVRRLKVNELREELQRRGLDTRGLKAELAERLQAALEAEEPDDERELDADDEPGRPGHINEEPSYSQPPYNQGGYSQGYTAPPPPPPPPPAYNYGSYGGYNPAPYTPPPPPTAQTYPQPSYNQYQQYAQQWNQYYQNQGQWPPYYGNYDYGSYSGNTQGGTSTQ

SEQ ID NO: 859101 - protein, 191 aa, Homo sapiens
IRSRYRGWVAARDNNNSNNRGSYNRAPQQQPPPQQPPPPQPPPQQPPPPPSYSPARNPPGASTYNKNSNIPGSSANTSTPTVSSYSPPQPSYSQPPYNQGGYSQGYTAPPPPPPPPPAYNYGSYGGYNPAPYTPPPPPTAQTYPQPSYNQYQQYAQQWNQYYQNQGQWPPYYGNYDYGSYSGNTQGGTSTQ

SEQ ID NO: 859102 - protein, 192 aa, Homo sapiens
NYRLGTRLGVNRPRPGAAGVVVASSAMKTEDPLEATVAAPQPPPQQPPPPPSYSPARNPPGASTYNKNSNIPGSSANTSTPTVSSYSPPQPSYSQPPYNQGGYSQGYTAPPPPPPPPPAYNYGSYGGYNPAPYTPPPPPTAQTYPQPSYNQYQQYAQQWNQYYQNQGQWPPYYGNYDYGSYSGNTQGGTSTQ

SEQ ID NO: 859103 - protein, 164 aa, Homo sapiens
LGSRYWRLSQGCCCSYCRCWPLWGSEQGCSWVVAVAAGVVAVVASSAMKTSTPTVSSYSPPQPSYSQPPYNQGGYSQGYTAPPPPPPPPPAYNYGSYGGYNPAPYTPPPPPTAQTYPQPSYNQYQQYAQQWNQYYQNQGQWPPYYGNYDYGSYSGNTQGGTSTQ

SEQ ID NO: 859104 - protein, 575 aa, Homo sapiens
MDVRRLKVNELREELQRRGLDTRGLKAELAERLQAALEAEEPDDERELDADDEPGRPGHINEEVETEGGSELEGTAQPPPPGLQPHAEPGGYSGPDGHYAMDNITRQNQFYDTQVIKQENESGYERRPLEMEQQQAYRPEMKTEMKQGAPTSFLPPEASQLKPDRQQFQSRKRPYEENRGRGYFEHREDRRGRSPQPPAEEDEDDFDDTLVAIDTYNCDLHFKVARDRSSGYPLTIEGFAYLWSGARASYGVRRGRVCFEMKINEEISVKHLPSTEPDPHVVRIGWSLDSCSTQLGEEPFSYGYGGTGKKSTNSRFENYGDKFAENDVIGCFADFECGNDVELSFTKNGKWMGIAFRIQKEALGGQALYPHVLVKNCAVEFNFGQRAEPYCSVLPGFTFIQHLPLSERIRGTVGPKSKAECEILMMVGLPAAGKTTWAIKHAASNPSKKYNILGTNAIMDKMRVMGLRRQRNYAGRWDVLIQQATQCLNRLIQIAARKKRNYILDQTNVYGSAQRRKMRPFEGFQRKAIVICPTDEDLKDRTIKRTDEEGKDVPDHAVLEMKGSPRCQTQKLFLQ

SEQ ID NO: 859105 - protein, 143 aa, Homo sapiens
MDVRRLKVNELREELQRRGLDTRGLKAELAERLQAALEAEEPDDERELDADDEPGRPGHINEEVETEGGSELEGTAQPPPPGLQPHAEPGGYSGPDGHYAMDNITRQNQFYDTQVIKQENESVSQVPDPKAFPTVIPFIFTSP

SEQ ID NO: 859106 - protein, 112 aa, Homo sapiens
  misc_feature (22)..(22): Xaa can be any naturally occurring amino acid
PLSRKKGGGGVLGFSPPFPNHXFLYKATLLAFYFIFLRVLHRAQSGRGWGTKPSPQHWERPGHSCCSRSPQAVSKRQHWPLASVLPCPTPRTGYGLLGPRLLLLGLLEGQCL

SEQ ID NO: 859107 - protein, 111 aa, Homo sapiens [sequence omitted]

SEQ ID NO: 859108 - protein, 126 aa, Homo sapiens
PKFEGCGRFVTPLADPTPHWPGQLVLSRRLGPGSPSVRVGPWTPVQRRGNRTIQKRNLRLRKRVRDPSSPCGHGTDRVDHRLRDRAKTPEAGHLGSCRAPPHESSLCLCQSFSSFFAAVSFPVNHG

SEQ ID NO: 859109 - protein, 301 aa, Homo sapiens
MELSDVTLIEGVGNEVMVVAGVVVLILALVLAWLSTYVADSGSNQLLGAIVSAGDTSVLHLGHVDHLVAGQGNPEPTELPHPSEGNDEKAEEAGEGRGDSTGEAGAGGGVEPSLEHLLDIQGLPKRQAGAGSSSPEAPLRSEDSTCLPPSPGLITVRLKFLNDTEELAVARPEDTVGALKSKYFPGQESQMKLIYQGRLLQDPARTLRSLNITDNCVIHCHRSPPGSAVPGPSASLAPSATEPPSLGVNVGSLMVPVFVVLLGVVWYFRINYRQFFTAPATVSLVGVTVFFSFLVFGMYGR

SEQ ID NO: 859110 - protein, 301 aa, Homo sapiens; identical to SEQ ID NO: 859109

SEQ ID NO: 859111 - protein, 301 aa, Homo sapiens; identical to SEQ ID NO: 859109

SEQ ID NO: 859112 - protein, 321 aa, Homo sapiens
MISRHLQNNLMSVDPASSQAMELSDVTLIEGVGNEVMVVAGVVVLILALVLAWLSTYVADSGSNQLLGAIVSAGDTSVLHLGHVDHLVAGQGNPEPTELPHPSEGNDEKAEEAGEGRGDSTGEAGAGGGVEPSLEHLLDIQGLPKRQAGAGSSSPEAPLRSEDSTCLPPSPGLITVRLKFLNDTEELAVARPEDTVGALKSKYFPGQESQMKLIYQGRLLQDPARTLRSLNITDNCVIHCHRSPPGSAVPGPSASLAPSATEPPSLGVNVGSLMVPVFVVLLGVVWYFRINYRQFFTAPATVSLVGVTVFFSFLVFGMYGR

SEQ ID NO: 859113 - protein, 301 aa, Homo sapiens; identical to SEQ ID NO: 859109

SEQ ID NO: 859114 - protein, 312 aa, Homo sapiens
MDSVDPASSQAMELSDVTLIEGVGNEVMVVAGVVVLILALVLAWLSTYVADSGSNQLLGAIVSAGDTSVLHLGHVDHLVAGQGNPEPTELPHPSEGNDEKAEEAGEGRGDSTGEAGAGGGVEPSLEHLLDIQGLPKRQAGAGSSSPEAPLRSEDSTCLPPSPGLITVRLKFLNDTEELAVARPEDTVGALKSKYFPGQESQMKLIYQGRLLQDPARTLRSLNITDNCVIHCHRSPPGSAVPGPSASLAPSATEPPSLGVNVGSLMVPVFVVLLGVVWYFRINYRQFFTAPATVSLVGVTVFFSFLVFGMYGR

SEQ ID NO: 859115 - protein, 312 aa, Homo sapiens; identical to SEQ ID NO: 859114

SEQ ID NO: 859116 - protein, 386 aa, Homo sapiens
GEAGRDRTLNRIADCQPFSRPLRKDESRGRPGEVKTFSLVFSDNSLSNYWGIILDTSVPREIHTILVYQESNRKMDSVDPASSQAMELSDVTLIEGVGNEVMVVAGVVVLILALVLAWLSTYVADSGSNQLLGAIVSAGDTSVLHLGHVDHLVAGQGNPEPTELPHPSEGNDEKAEEAGEGRGDSTGEAGAGGGVEPSLEHLLDIQGLPKRQAGAGSSSPEAPLRSEDSTCLPPSPGLITVRLKFLNDTEELAVARPEDTVGALKSKYFPGQESQMKLIYQGRLLQDPARTLRSLNITDNCVIHCHRSPPGSAVPGPSASLAPSATEPPSLGVNVGSLMVPVFVVLLGVVWYFRINYRQFFTAPATVSLVGVTVFFSFLVFGMYGR

SEQ ID NO: 859117 - protein, 301 aa, Homo sapiens; identical to SEQ ID NO: 859109

SEQ ID NO: 859118 - protein, 301 aa, Homo sapiens; identical to SEQ ID NO: 859109

SEQ ID NO: 859119 - protein, 118 aa, Homo sapiens
MISRHLQNNLMSVDPASSQAMELSDVTLIEGVGNEVMVVAGVVVLILALVLAWLSTYVADSGSNQLLGAIVSAGDTSVLHLGHVDHLVAGQGNPEPTELPHPSEEDKQVQAAAVQRPP

SEQ ID NO: 859120 - protein, 183 aa, Homo sapiens
GEAGRDRTLNRIADCQPFSRPLRKDESRGRPGEVKTFSLVFSDNSLSNYWGIILDTSVPREIHTILVYQESNRKMDSVDPASSQAMELSDVTLIEGVGNEVMVVAGVVVLILALVLAWLSTYVADSGSNQLLGAIVSAGDTSVLHLGHVDHLVAGQGNPEPTELPHPSEEDKQVQAAAVQRPP

SEQ ID NO: 859121 - protein, 111 aa, Homo sapiens [sequence omitted]

SEQ ID NO: 859122 - protein, 111 aa, Homo sapiens [sequence omitted]

SEQ ID NO: 859123 - protein, 126 aa, Homo sapiens; identical to SEQ ID NO: 859108

SEQ ID NO: 859124 - protein, 301 aa, Homo sapiens; identical to SEQ ID NO: 859109

SEQ ID NO: 859125 - protein, 317 aa, Homo sapiens
MELSDVTLIEGVGNEVMVVAGVVVLILALVLAWLSTYVADSGSNQLLGAIVSAGDTSVLHLGHVDHLVAGQGNPEPTELPHPSEGNDEKAEEAGEGRGDSTGEAGAGGGVEPSLEHLLDIQGLPKRQAGAGSSSPEAPLRSEDSTCLPPSPGLITVRLKFLNDTEELAVARPEDTVGALKRVSGLGSGKLLVLIPQPLVASKEAGADMGAAAKCKIQPLPRAGRYFLRNTPFRPGAVAPGTLGGRGGCITRLGVRDQPDQHGETPSLLNIQKSAGRGGARLQSQLLRRLRQENRLNPGGGGCSEPRLRHCTPAWATE

SEQ ID NO: 859126 - protein, 111 aa, Homo sapiens
MELSDVTLIEGVGNEVMVVAGVVVLILALVLAWLSTYVADSGSNQLLGAIVSAGDTSVLHLGHVDHLVAGQGNPEPTELPHPSEGSSEGVQSCWPSSVGSLGSEIPSHLWF

SEQ ID NO: 859127 - protein, 126 aa, Homo sapiens; identical to SEQ ID NO: 859108

SEQ ID NO: 859128 - protein, 111 aa, Homo sapiens [sequence omitted]

SEQ ID NO: 859129 - protein, 111 aa, Homo sapiens [sequence omitted]

SEQ ID NO: 859130 - protein, 111 aa, Homo sapiens [sequence omitted]

SEQ ID NO: 859131 - protein, 111 aa, Homo sapiens [sequence omitted]

SEQ ID NO: 859132 - protein, 321 aa, Homo sapiens; identical to SEQ ID NO: 859112

SEQ ID NO: 859133 - protein, 321 aa, Homo sapiens; identical to SEQ ID NO: 859112

SEQ ID NO: 859134 - protein, 312 aa, Homo sapiens; identical to SEQ ID NO: 859114

SEQ ID NO: 859135 - protein, 301 aa, Homo sapiens; identical to SEQ ID NO: 859109

SEQ ID NO: 859136 - protein, 409 aa, Homo sapiens
MSTCSPVPCGRTAREQHYYYWAAFSKWGIRSGVIVSKLMYNRLINPVAVSYMCPSHSLPEGIYDVFRIGVITVNTLIKQITYIVVCEIRLAILAQGRMEGRLCMILPYCMRVEMVLMTADRLVGKVVAGVVVLILALVLAWLSTYVADSGSNQLLGAIVSAGDTSVLHLGHVDHLVAGQGNPEPTELPHPSEGNDEKAEEAGEGRGDSTGEAGAGGGVEPSLEHLLDIQGLPKRQAGAGSSSPEAPLRSEDSTCLPPSPGLITVRLKFLNDTEELAVARPEDTVGALKSKYFPGQESQMKLIYQGRLLQDPARTLRSLNITDNCVIHCHRSPPGSAVPGPSASLAPSATEPPSLGVNVGSLMVPVFVVLLGVVWYFRINYRQFFTAPATVSLVGVTVFFSFLVFGMYGR

SEQ ID NO: 859137 - protein, 111 aa, Homo sapiens [sequence omitted]

SEQ ID NO: 859138 - protein, 111 aa, Homo sapiens [sequence omitted]

SEQ ID NO: 859139 - protein, 126 aa, Homo sapiens; identical to SEQ ID NO: 859108

SEQ ID NO: 859140 - protein, 143 aa, Homo sapiens
WSRPVCLLIPHPLSFLPCLSSLHKYFPGQESQMKLIYQGRLLQDPARTLRSLNITDNCVIHCHRSPPGSAVPGPSASLAPSATEPPSLGVNVGSLMVPVFVVLLGVVWYFRINYRQFFTAPATVSLVGVTVFFSFLVFGMYGR

SEQ ID NO: 859141 - protein, 301 aa, Homo sapiens; identical to SEQ ID NO: 859109

SEQ ID NO: 859142 - protein, 255 aa, Homo sapiens
MELSDVTLIEGVGNEVMVVAGVVVLILALVLAWLSTYVADSGSNQLLGAIVSAGDTSVLHLGHVDHLVAGQGNPEPTELPHPSEGNDEKAEEAGEGRGDSTGEAGAGGGVEPSLEHLLDIQGLPKRQAGAGSSSPEAPLRSEDSTCLPPSPGLITVRLKFLNDTEELAVARPEDTVGALKSKYFPGQESQMKLIYQGRLLQDPARTLRSLNITDNCVIHCHRSPPGSAGSSEGVQSCWPSSVGSLGSEIPSHLWF

SEQ ID NO: 859143 - protein, 302 aa, Homo sapiens
MELSDVTLIEGVGNEVMVVAGVVVLILALVLAWLSTYVADSGSNQLLGAIVSAGDTSVLHLGHVDHLVAGQGNPEPTELPHPSEGNDEKAEEAGEGRGDSTGEAGAGGGVEPSLEHLLDIQGLPKRQAGAGSSSPEAPLRSEDSTCLPPSPGLITVRLKFLNDTEELAVARPEDTVGALKSKYFPGQESQMKLIYQGRLLQDPARTLRSLNITDNCVIHCHRSPPGSAEQQSRGPPEIWDSTCLPPSPGLITVRLKFLNDTEELAVARPEDTVGALKSKYSPGQESQMKLIYQGSICSARHP

SEQ ID NO: 859144 - protein, 126 aa, Homo sapiens; identical to SEQ ID NO: 859108

SEQ ID NO: 859145 - protein, 335 aa, Homo sapiens
MAEGGSPDGRAGPGSAGRNLKEWLREQFCDHPLEHCEDTRLHDAAYVGDLQTLRSLLQEESYRSRINEKSVWCCGWLPCTPLRIAATAGHGSCVDFLIRKGAEVDLVDVKGQTALYVAVVNGHLESTQILLEAGADPNGSRHHRSTPVYHASRVGRADILKALIRYGADVDVNHHLTPDVQPRFSRRLTSLVVCPLYISAAYHNLQCFRLLLLAGANPDFNCNGPVNTQGFYRGSPGCVMDAVLRHGCEAAFVSLLVEFGANLNLVKWESLGPESRGRRKVDPEALQVFKEARSVPRTLLCLCRVAVRRALGKHRLHLIPSLPLPDPIKKFLLHE

SEQ ID NO: 859146 - protein, 335 aa, Homo sapiens; identical to SEQ ID NO: 859145

SEQ ID NO: 859147 - protein, 912 aa, Homo sapiens
MKGTKRRKIRRKRKEKRKKKRKRRKKGPSKATVKAMQEALAKLKEEEERQKREEEERIKRLEELEAKRKEEERLEQEKRERKKQKEKERKERLKKEGKLLTKSQREARARAEATLKLLQAQGVEVPSKDSLPKKRPIYEDKKRKKIPQQLESKEVSESMELCAAVEVMEQGVPEKEETPPPVEPEEEEDTEDAGLDDWEAMASDEETEKVEGNTVHIEVKENPEEEEEEEEEEEEDEESEEEEEEEGESEGSEGDEEDEKVSDEKDSGKTLDKKPSKEMSSDSEYDSDDDRTKEERAYDKAKRRIEKRRLEHSKNVNTEKLRAPIICVLGHVDTGKTKILDKLRHTHVQDGEAGGITQQIGATNVPLEAINEQTKMIKNFDRENVRIPGMLIIDTPGHESFSNLRNRGSSLCDIAILVVDIMHGLEPQTIESINLLKSKKCPFIVALNKIDRLYDWKKSPDSDVAATLKKQKKNTKDEFEERAKAIIVEFAQQGLNAALFYENKDPRTFVSLVPTSAHTGDGMGSLIYLLVELTQTMLSKRLAHCEELRAQVMEVKALPGMGTTIDVILINGRLKEGDTIIVPGVEGPIVTQIRGLLLPPPMKELRVKNQYEKHKEVEAAQGVKILGKDLEKTLAGLPLLVAYKEDEIPVLKDELIHELKQTLNAIKLEEKGVYVQASTLGSLEALLEFLKTSEVPYAGINIGPVHKKDVMKASVMLEHDPQYAVILAFDVRIERDAQEMADSLGVRIFSAEIIYHLFDAFTKYRQDYKKQKQEEFKHIAVFPCKIKILPQYIFNSRDPIVMGVTVEAGQVKQGTPMCVPSKNFVDIGIVTSIEINHKQVDVAKKGQEVCVKIEPIPGESPKMFGRHFEATDILVSKISRQSIDALKDWFRDEMQKSDWQLIVELKKVFEII

SEQ ID NO: 859148 - protein, 101 aa, Homo sapiens
SRALRPHAEAAGRCACALRTDTICVLFQCAGLWRAGCERRQHEGKRAERRPKSAGRQWVCERPNRGAGATSAIDKQWGRNRKTRAKTAPRMTLILMPWLQK

SEQ ID NO: 859149 - protein, 97 aa, Homo sapiens
VEPEEEEDTEDAGLDDWEAMASDEEKKKRKRRKKGPSKATVKAMQEALAKLKEEEERQKREEEERIKRLEELEAKRKEEERVYKKKEKVKRDSDEEM

SEQ ID NO: 859150 - protein, 912 aa, Homo sapiens; identical to SEQ ID NO: 859147

SEQ ID NO: 859151 - protein, 912 aa, Homo sapiens; identical to SEQ ID NO: 859147

SEQ ID NO: 859152 - protein, 912 aa, Homo sapiens; identical to SEQ ID NO: 859147

SEQ ID NO: 859153 - protein, 892 aa, Homo sapiens
MKGTKRRKIRRKRKEKRKKKRKRRKKGPSKATVKAMQEALAKLKEEEERQKREEEERIKRLEELEAKRKEEERLEQEKRERKKQKEKERKERLKKEGKLLTKSQREARARAEATLKLLQAQGVEVPSKDSLPKKRPIYEDKKRKKIPQQLESKEVSESMELCAAVEVMEQGVPEKEETPPPVEPEEEEDTEDAGLDDWEAMASDEETEKVEGNTVHIEVKENPEEEEEEEEEEEEDEESEEEEEEEGESEGSEGDEEDEKVSDEKDSGKTLDKKPSKEMSSDSEYDSDDDRTKEERAYDKAKRRIEKRRLEHSKNVNTEKLRAPIICVLGHVDTGKTKILDKLRHTHVQDGEAGGITQQIGATNVPLEAINEQTKMIKNFDRENVRIPGMLIIDTPGHESFSNLRNRGSSLCDIAILVVDIMHGLEPQTIESINLLKSKKCPFIVALNKIDRLYDWKKSPDSDVAATLKKQKKNTKDEFEERAKAIIVEFAQQGLNAALFYENKDPRTFVSLVPTSAHTGDGMGSLIYLLVELTQTMLSKRLAHCEELRAQVMEVKALPGMGTTIDVILINGRLKEGDTIIVPGVEGPIVTQIRGLLLPPPMKELRVKNQYEKHKEVEAAQGVKILGKDLEKTLAGLPLLVAYKEDEIPVLKDELIHELKQTLNAIKLEEKGVYVQASTLGSLEALLEFLKTSEVPYAGINIGPVHKKDVMKASVMLEHDPQYAVILAFDVRIERDAQEMADSLGVRIFSAEIIYHLFDAFTKYRQDYKKQKQEEFKHIAVFPCKIKILPQYIFNSRDPIVMGVTVEAGQVKQGTPMCVPSKNFVDIGIVTSIEINHKQVDVAKKGQEVCVKIEPIPISRQSIDALKDWFRDEMQKSDWQLIVELKKVFEII

SEQ ID NO: 859154 - protein, 775 aa, Homo sapiens
  misc_feature (684)..(684): Xaa can be any naturally occurring amino acid
MKGTKRRKIRRKRKEKRKKKRKRRKKGPSKATVKAMQEALAKLKEEEERQKREEEERIKRLEELEAKRKEEERLEQEKRERKKQKEKERKERLKKEGKLLTKSQREARARAEATLKLLQAQGVEVPSKDSLPKKRPIYEDKKRKKIPQQLESKEVSESMELCAAVEVMEQGVPEKEETPPPVEPEEEEDTEDAGLDDWEAMASDEETEKVEGNTVHIEVKENPEEEEEEEEEEEEDEESEEEEEEEGESEGSEGDEEDEKVSDEKDSGKTLDKKPSKEMSSDSEYDSDDDRTKEERAYDKAKRRIEKRRLEHSKNVNTEKLRAPIICVLGHVDTGKTKILDKLRHTHVQDGEAGGITQQIGATNVPLEAINEQTKMIKNFDRENVRIPGMLIIDTPGHESFSNLRNRGSSLCDIAILVVDIMHGLEPQTIESINLLKSKKCPFIVALNKIDRLYDWKKSPDSDVAATLKKQKKNTKDEFEERAKAIIVEFAQQGLNAALFYENKDPRTFVSLVPTSAHTGDGMGSLIYLLVELTQTMLSKRLAHCEELRAQVMEVKALPGMGTTIDVILINGRLKEGDTIIVPGVEGPIVTQIRGLLLPPPMKELRVKNQYEKLEELEAKRKEEERLEQEKRERKKQKEKERKERLKKEGKLLTKSQREARARAEATLKLLQAQGVEVPSKDSXPKKRPIYEAKKKKDKKKKKGEKEEKEKEKKKGPSKATVKAMQEALAKLKEEEERQKREEEERIKRLEELEAKRKEEERLEQEKRERKKQKK

SEQ ID NO: 859155 - protein, 309 aa, Homo sapiens
MGKKQKNKSEDSTKDDIDLDALAAEIEGAGAAKEQEPQKSKGKKKKEKKKQDFDEDDILKELEELSLEAQGIKADRETVAVKPTENNEEEFTSKDKKKKGQKGKKQSFDDNDSEELEDKDSKSKKTAKPKVEMYSGSDDDDDFNKLPKKAKGKAQKSNKKWDGSEEDEDNSKKIKERSRINSSGESGDESDEFLQSRKGQKKNQKNKPGPNIESGNEDDDASFKIKTVAQKKAEKKERERKKRDEEKAKLRKLKEKEELETGKKDQSKQKESQRKFEEETVKSKVTVDTGVIPASEEKAETPTAARRRQ

SEQ ID NO: 859156 - protein, 309 aa, Homo sapiens; identical to SEQ ID NO: 859155

SEQ ID NO: 859157 - protein, 912 aa, Homo sapiens; identical to SEQ ID NO: 859147

SEQ ID NO: 859158 - protein, 915 aa, Homo sapiens
MMTPPSKLRQWPKRRQKRRRKKKRKRRKKGPSKATVKAMQEALAKLKEEEERQKREEEERIKRLEELEAKRKEEERLEQEKRERKKQKEKERKERLKKEGKLLTKSQREARARAEATLKLLQAQGVEVPSKDSLPKKRPIYEDKKRKKIPQQLESKEVSESMELCAAVEVMEQGVPEKEETPPPVEPEEEEDTEDAGLDDWEAMASDEETEKVEGNTVHIEVKENPEEEEEEEEEEEEDEESEEEEEEEGESEGSEGDEEDEKVSDEKDSGKTLDKKPSKEMSSDSEYDSDDDRTKEERAYDKAKRRIEKRRLEHSKNVNTEKLRAPIICVLGHVDTGKTKILDKLRHTHVQDGEAGGITQQIGATNVPLEAINEQTKMIKNFDRENVRIPGMLIIDTPGHESFSNLRNRGSSLCDIAILVVDIMHGLEPQTIESINLLKSKKCPFIVALNKIDRLYDWKKSPDSDVAATLKKQKKNTKDEFEERAKAIIVEFAQQGLNAALFYENKDPRTFVSLVPTSAHTGDGMGSLIYLLVELTQTMLSKRLAHCEELRAQVMEVKALPGMGTTIDVILINGRLKEGDTIIVPGVEGPIVTQIRGLLLPPPMKELRVKNQYEKHKEVEAAQGVKILGKDLEKTLAGLPLLVAYKEDEIPVLKDELIHELKQTLNAIKLEEKGVYVQASTLGSLEALLEFLKTSEVPYAGINIGPVHKKDVMKASVMLEHDPQYAVILAFDVRIERDAQEMADSLGVRIFSAEIIYHLFDAFTKYRQDYKKQKQEEFKHIAVFPCKIKILPQYIFNSRDPIVMGVTVEAGQVKQGTPMCVPSKNFVDIGIVTSIEINHKQVDVAKKGQEVCVKIEPIPGESPKMFGRHFEATDILVSKISRQSIDALKDWFRDEMQKSDWQLIVELKKVFEII

SEQ ID NO: 859159 - protein, 912 aa, Homo sapiens; identical to SEQ ID NO: 859147

SEQ ID NO: 859160 - protein, 754 aa, Homo sapiens [sequence omitted]

SEQ ID NO: 859161 - protein, 915 aa, Homo sapiens; identical to SEQ ID NO: 859158

SEQ ID NO: 859162 - protein, 309 aa, Homo sapiens; identical to SEQ ID NO: 859155

SEQ ID NO: 859163 - protein, 724 aa, Homo sapiens
TTRRGRVGRPTRSASDEETEKVEGNTVHIEVKENPEEEEEEEEEEEEDEESEEEEEEEGESEGSEGDEEDEKVSDEKDSGKTLDKKPSKEMSSDSEYDSDDDRTKEERAYDKAKRRIEKRRLEHSKNVNTEKLRAPIICVLGHVDTGKTKILDKLRHTHVQDGEAGGITQQIGATNVPLEAINEQTKMIKNFDRENVRIPGMLIIDTPGHESFSNLRNRGSSLCDIAILVVDIMHGLEPQTIESINLLKSKKCPFIVALNKIDRLYDWKKSPDSDVAATLKKQKKNTKDEFEERAKAIIVEFAQQGLNAALFYENKDPRTFVSLVPTSAHTGDGMGSLIYLLVELTQTMLSKRLAHCEELRAQVMEVKALPGMGTTIDVILINGRLKEGDTIIVPGVEGPIVTQIRGLLLPPPMKELRVKNQYEKHKEVEAAQGVKILGKDLEKTLAGLPLLVAYKEDEIPVLKDELIHELKQTLNAIKLEEKGVYVQASTLGSLEALLEFLKTSEVPYAGINIGPVHKKDVMKASVMLEHDPQYAVILAFDVRIERDAQEMADSLGVRIFSAEIIYHLFDAFTKYRQDYKKQKQEEFKHIAVFPCKIKILPQYIFNSRDPIVMGVTVEAGQVKQGTPMCVPSKNFVDIGIVTSIEINHKQVDVAKKGQEVCVKIEPIPGESPKMFGRHFEATDILVSKISRQSIDALKDWFRDEMQKSDWQLIVELKKVFEII

SEQ ID NO: 859164 - protein, 514 aa, Homo sapiens
MNLSNLRNRGSSLCDIAILVVDIMHGLEPQTIESINLLKSKKCPFIVALNKIDRLYDWKKSPDSDVAATLKKQKKNTKDEFEERAKAIIVEFAQQGLNAALFYENKDPRTFVSLVPTSAHTGDGMGSLIYLLVELTQTMLSKRLAHCEELRAQVMEVKALPGMGTTIDVILINGRLKEGDTIIVPGVEGPIVTQIRGLLLPPPMKELRVKNQYEKHKEVEAAQGVKILGKDLEKTLAGLPLLVAYKEDEIPVLKDELIHELKQTLNAIKLEEKGVYVQASTLGSLEALLEFLKTSEVPYAGINIGPVHKKDVMKASVMLEHDPQYAVILAFDVRIERDAQEMADSLGVRIFSAEIIYHLFDAFTKYRQDYKKQKQEEFKHIAVFPCKIKILPQYIFNSRDPIVMGVTVEAGQVKQGTPMCVPSKNFVDIGIVTSIEINHKQVDVAKKGQEVCVKIEPIPGESPKMFGRHFEATDILVSKISRQSIDALKDWFRDEMQKSDWQLIVELKKVFEII

SEQ ID NO: 859165 - protein, 143 aa, Homo sapiens
SFSLLTFEATLKLLQAQGVEVPSKDSLPKKRPIYEDKKRKKIPQQLESKEVSESMELCAAVEVMEQGVPEKEETPPPVEPEEEEDTEDAGLDDWEAMASDEETEKEEEDSTKDDIDLDALAAEIEGAGAAKEQEPQKSKGKKR

SEQ ID NO: 859166 - protein, 44 aa, Homo sapiens
KKQKEKERKERLKKEGKLLTKSQREARARAEATLKLLQAQGEWY

SEQ ID NO: 859167 - protein, 212 aa, Homo sapiens
MGKKQKNKSEDSTKDDIDLDALAAEIEGAGAAKEQEPQKSKGKKKKEKKKQDFDEDDILKELEELSLEAQGIKADRETVAVKPTENNEEEFTSKDKKKKGQKGKKQSFDDNDSEELEDKDSKSKKTAKPKVEMYSGSDDDDDFNKLPKKAKGKAQKSNKKWDGSEEDEDNSKKIKERSRINSSGESGDESDEFLQSRKGQKIGKRRLIRDEI

SEQ ID NO: 859168 - protein, 68 aa, Homo sapiens
NRQPSSHDWEDSFLQVSMALDSQLTENKDSQPGDSGSVRDRIEGLGPRAPLTSNGEETEKQERRQHQG

SEQ ID NO: 859169 - protein, 62 aa, Homo sapiens
IYRKSYSPLPTLGSLEALLEFLKTSEVPYAGINIGPVHKKDVMKASVMLEHDPQYAVISGLA

SEQ ID NO: 859170 - protein, 309 aa, Homo sapiens; identical to SEQ ID NO: 859155

SEQ ID NO: 859171 - protein, 309 aa, Homo sapiens; identical to SEQ ID NO: 859155

SEQ ID NO: 859172 - protein, 927 aa, Homo sapiens
YYYYTGARRRQKGTTMKGTKRRKIRRKRKEKRKKKRKRRKKGPSKATVKAMQEALAKLKEEEERQKREEEERIKRLEELEAKRKEEERLEQEKRERKKQKEKERKERLKKEGKLLTKSQREARARAEATLKLLQAQGVEVPSKDSLPKKRPIYEDKKRKKIPQQLESKEVSESMELCAAVEVMEQGVPEKEETPPPVEPEEEEDTEDAGLDDWEAMASDEETEKVEGNTVHIEVKENPEEEEEEEEEEEEDEESEEEEEEEGESEGSEGDEEDEKVSDEKDSGKTLDKKPSKEMSSDSEYDSDDDRTKEERAYDKAKRRIEKRRLEHSKNVNTEKLRAPIICVLGHVDTGKTKILDKLRHTHVQDGEAGGITQQIGATNVPLEAINEQTKMIKNFDRENVRIPGMLIIDTPGHESFSNLRNRGSSLCDIAILVVDIMHGLEPQTIESINLLKSKKCPFIVALNKIDRLYDWKKSPDSDVAATLKKQKKNTKDEFEERAKAIIVEFAQQGLNAALFYENKDPRTFVSLVPTSAHTGDGMGSLIYLLVELTQTMLSKRLAHCEELRAQVMEVKALPGMGTTIDVILINGRLKEGDTIIVPGVEGPIVTQIRGLLLPPPMKELRVKNQYEKHKEVEAAQGVKILGKDLEKTLAGLPLLVAYKEDEIPVLKDELIHELKQTLNAIKLEEKGVYVQASTLGSLEALLEFLKTSEVPYAGINIGPVHKKDVMKASVMLEHDPQYAVILAFDVRIERDAQEMADSLGVRIFSAEIIYHLFDAFTKYRQDYKKQKQEEFKHIAVFPCKIKILPQYIFNSRDPIVMGVTVEAGQVKQGTPMCVPSKNFVDIGIVTSIEINHKQVDVAKKGQEVCVKIEPIPGESPKMFGRHFEATDILVSKISRQSIDALKDWFRDEMQKSDWQLIVELKKVFEII

SEQ ID NO: 859173 - protein, 912 aa, Homo sapiens; identical to SEQ ID NO: 859147

SEQ ID NO: 859174 - protein, 309 aa, Homo sapiens; identical to SEQ ID NO: 859155

SEQ ID NO: 859175 - protein, 309 aa, Homo sapiens; identical to SEQ ID NO: 859155

SEQ ID NO: 859176 - protein, 544 aa, Homo sapiens
QAVIQTQMIKNFDRENVRIPGMLIIDTPGHESFSNLRNRGSSLCDIAILVVDIMHGLEPQTIESINLLKSKKCPFIVALNKIDRLYDWKKSPDSDVAATLKKQKKNTKDEFEERAKAIIVEFAQQGLNAALFYENKDPRTFVSLVPTSAHTGDGMGSLIYLLVELTQTMLSKRLAHCEELRAQVMEVKALPGMGTTIDVILINGRLKEGDTIIVPGVEGPIVTQIRGLLLPPPMKELRVKNQYEKHKEVEAAQGVKILGKDLEKTLAGLPLLVAYKEDEIPVLKDELIHELKQTLNAIKLEEKGVYVQASTLGSLEALLEFLKTSEVPYAGINIGPVHKKDVMKASVMLEHDPQYAVILAFDVRIERDAQEMADSLGVRIFSAEIIYHLFDAFTKYRQDYKKQKQEEFKHIAVFPCKIKILPQYIFNSRDPIVMGVTVEAGQVKQGTPMCVPSKNFVDIGIVTSIEINHKQVDVAKKGQEVCVKIEPIPGESPKMFGRHFEATDILVSKISRQSIDALKDWFRDEMQKSDWQLIVELKKVFEII

SEQ ID NO: 859177 - protein, 173 aa, Homo sapiens
MGKKQKNKSEDSTKDDIDLDALAAEIEGAGAAKEQEPQKSKGKKKKEKKKQDFDEDDILKELEELSLEAQGIKADRETVAVKPTENNEEEFTSKDKKKKGQKGKKQSFDDILKELEELSLEAQGIKADRETVAVKPTENNEEEFTSKDKKKKGQKELVLPKNRSLKSQKGKKK

SEQ ID NO: 859178 - protein, 150 aa, Homo sapiens
MADSGLLLKWGSCRSTWLRVRKARPQLILSRRPRRRLGSLRWCGRRRLRRRLLQAQAAGVDWREGARQVSRAAAARRPNTATPSPIPSPTPASEPESEPELESASSCHRPLLIPPVRPVGPGRALLLLPVEQMTGVGRCRIFLLSVPLCC

SEQ ID NO: 859179 - protein, 702 aa, Homo sapiens [sequence omitted]

SEQ ID NO: 859180 - protein, 702 aa, Homo sapiens [sequence omitted]

SEQ ID NO: 859181 - protein, 702 aa, Homo sapiens [sequence omitted]

SEQ ID NO: 859182 - protein, 415 aa, Homo sapiens
MFVSHSEEVDGCPVILVCGSQDVGKSTFNRYLINHLLNSLPCVDYLECDLGQTEFTPPGCISLLNITEPVLGPPFTHLRTPQKMVYYGKPSCKNNYENYIDIVKYVFSAYKRESPLIVNTMGWVSDQGLLLLIDLIRLLSPSHVVQFRSDHSKYMPDLTPQYVDDMDGLYTKSKTKMRNRRFRLAAFADALEFADEEKESPVEFTGHKLIGVYTDFAFRITPRNRESHNKILRDLSILSYLSQLQPPMPKPLSPLHSLTPYQVPFNAVALRITHSDVAPTHILYAVNASWVGLCKIQDDVRGYTNGPILLAQTPICDCLGFGICRGIDMEKRLYHILTPVPPEELRTVNCLLVGAIAIPHCVLKCQRGIEGTVPYVTTDYNFKLPGASEKIGAREPEEAHKEKPYRRPKFCRKMK

SEQ ID NO: 859183 - protein, 512 aa, Homo sapiens
MADSGLLLKWGSCRSTWLRVRKARPQLILSRRPRRRLGSLRWCGRRRLRRRLLQAQAAGVDWREGARQVSRAAAARRPNTATPSPIPSPTPASEPESEPELESASSCHRPLLIPPVRPVGPGRALLLLPVEQGFTFSGICRVTCLYGQVQVFGFTISQGQPAQDIFSVYTHSCLSIHALHYSQPEKSKKELKREARNLLKSHLNLDDRRWSMQNFSPQCSIVLLEHLKTATVNFITSYPGSSYIFVQESPTPQIKPEYLALRSVGIRREKKRKGLQLTESTLSALEELVNVSCEEVDGCPVILVCGSQDVGKSTFNRYLINHLLNSLPCVDYLECDLGQTEFTPPGCISLLNITEPVLGPPFTHLRTPQKMVYYGKPSCKNNYENYIDIVKYVFSAYKRESPLIVNTMGWVSDQGLLLLIDLIRLLSPSHVVQFRSDHSKYMPDLTPQYVDDMDGLYTKSKTKMRNRRFRLAAFADALEFADEEKESPVEFTGHKLIGVYTDFAFRITPRNR

SEQ ID NO: 859184 - protein, 531 aa, Homo sapiens
MEPRAVAEAVETGEEDVIMEALRSYNQEHSQSFTFDDAQQEDRKRLAELLVSVLEQGLPPSHRVIWLQSVRILSRDRNCLDPFTSRQSLQALACYADISVSEGSVPESADMDVVLESLKCLCNLVLSSPVAQMLAAEARLVVKLTERVGLYRERSFPHDVQFFDLRLLFLLTALRTDVRQQLFQELKGVRLLTDTLELTLGVTPEGNPPPTLLPSQETERAMEILKVLFNITLDSIKGEVDEEDAALYRHLGTLLRHCVMIATAGDRTEEFHGHAVNLLGNLPLKCLDVLLTLEPHGDSTEFMGVNMDVIRALLIFLEKRLHKTHRLKESVAPVLSVLTECARMHRPARKFLKAQVLPPLRDVRTRPEVGEMLRNKLVRLMTHLDTDVKRVAAEFLFVLCSESVPRFIKYTGYGNAAGLLAARGLMAGGRPEGQYSEDEDTDTDEYKEAKASINPVTGRVEEKPPNPMEGMTEEQKEHEAMKLVTMFDKLSRNRVIQPMGMSPRGHLTSLQDAMCETMEQQLSSDPDSDPD

SEQ ID NO: 859185 - protein, 421 aa, Homo sapiens
MDVVLESLKCLCNLVLSSPVAQMLAAEARLVVKLTERVGLYRERSFPHDVQFFDLRLLFLLTALRTDVRQQLFQELKGVRLLTDTLELTLGVTPEGNPPPTLLPSQETERAMEILKVLFNITLDSIKGEVDEEDAALYRHLGTLLRHCVMIATAGDRTEEFHGHAVNLLGNLPLKCLDVLLTLEPHGDSTEFMGVNMDVIRALLIFLEKRLHKTHRLKESVAPVLSVLTECARMHRPARKFLKAQVLPPLRDVRTRPEVGEMLRNKLVRLMTHLDTDVKRVAAEFLFVLCSESVPRFIKYTGYGNAAGLLAARGLMAGGRPEGQYSEDEDTDTDEYKEAKASINPVTGRVEEKPPNPMEGMTEEQKEHEAMKLVTMFDKLSRNRVIQPMGMSPRGHLTSLQDAMCETMEQQLSSDPDSDPD

SEQ ID NO: 859186 - protein, 537 aa, Homo sapiens
MEPRAVAEAVETGEEDVIMEALRSYNQEHSQSFTFDDAQQEDRKRLAELLVSVLEQGLPPSHRVIWLQSVRILSRDRNCLDPFTSRQSLQALACYADISVSEGSVPESADMDVVLESLKCLCNLVLSSPVAQMLAAEARLVVKLTERVGLYRERSFPHDVQFFDLRLLFLLTALRTDVRQQLFQELKGVRLLTDTLELTLGVTPEGNPPPTLLPSQETERAMEILKVLFNITLDSIKGEVDEEDAALYRHLGTLLRHCVMIATAGDRTEEFHGHAVNLLGNLPLKCLDVLLTLEPHGDSTEFMGVNMDVIRALLIFLEKRLHKTHRLKESVAPVLSVLTECARMHRPARKFLKAQGWPPPQVLPPLRDVRTRPEVGEMLRNKLVRLMTHLDTDVKRVAAEFLFVLCSESVPRFIKYTGYGNAAGLLAARGLMAGGRPEGQYSEDEDTDTDEYKEAKASINPVTGRVEEKPPNPMEGMTEEQKEHEAMKLVTMFDKLSRNRVIQPMGMSPRGHLTSLQDAMCETMEQQLSSDPDSDPD

SEQ ID NO: 859187 - protein, 481 aa, Homo sapiens
GGTTKLRLGTRLRVIWLQSVRILSRDRNCLDPFTSRQSLQALACYADISVSEGSVPESADMDVVLESLKCLCNLVLSSPVAQMLAAEARLVVKLTERVGLYRERSFPHDVQFFDLRLLFLLTALRTDVRQQLFQELKGVRLLTDTLELTLGVTPEGNPPPTLLPSQETERAMEILKVLFNITLDSIKGEVDEEDAALYRHLGTLLRHCVMIATAGDRTEEFHGHAVNLLGNLPLKCLDVLLTLEPHGDSTEFMGVNMDVIRALLIFLEKRLHKTHRLKESVAPVLSVLTECARMHRPARKFLKAQVLPPLRDVRTRPEVGEMLRNKLVRLMTHLDTDVKRVAAEFLFVLCSESVPRFIKYTGYGNAAGLLAARGLMAGGRPEGQYSEDEDTDTDEYKEAKASINPVTGRVEEKPPNPMEGMTEEQKEHEAMKLVTMFDKLSRNRVIQPMGMSPRGHLTSLQDAMCETMEQQLSSDPDSDPD

SEQ ID NO: 859188 - protein, 557 aa, Homo sapiens
MEPRAVAEAVETGEEDVIMEALRSYNQEHSQSFTFDDAQQEDRKRLAELLVSVLEQGLPPSHRVIWLQSVRILSRDRNCLDPFTSRQSLQALACYADISVSEGSVPESADMDVVLESLKCLCNLVLSSPVAQMLAAEARLVVKLTERVGLYRERSFPHDVQFFDLRLLFLLTALRTDVRQQLFQELKGVRLLTDTLELTLGVTPEGNPPPTLLPSQETERAMEILKVLFNITLDSIKGEVDEEDAALYRHLGTLLRHCVMIATAGDRTEEFHGHAVNLLGNLPLKCLDVLLTLEPHGDSTEFMGVNMDVIRALLIFLEKRLHKTHRLKESVAPVLSVLTECARMHRPARKFLKAQVLPPLRDVRTRPEVGEMLRNKLVRLMTHLDTDVKRVAAEFLFVLCSESGELWRPRSQPTPPQPGLHTDLCLAPAVPRFIKYTGYGNAAGLLAARGLMAGGRPEGQYSEDEDTDTDEYKEAKASINPVTGRVEEKPPNPMEGMTEEQKEHEAMKLVTMFDKLSRNRVIQPMGMSPRGHLTSLQDAMCETMEQQLSSDPDSDPD

SEQ ID NO: 859189 - protein, 531 aa, Homo sapiens; identical to SEQ ID NO: 859184

SEQ ID NO: 859190 - protein, 225 aa, Homo sapiens [sequence omitted]

SEQ ID NO: 859191 - protein, 132 aa, Homo sapiens
MEPRAVAEAVETGEEDVIMEALRSYNQEHSQSFTFDDAQQEDRKRLAELLVSVLEQGLPPSHRVIWLQSVRILSRDRNCLDPFTSRQSLQALANRVIQPMGMSPRGHLTSLQDAMCETMEQQLSSDPDSDPD

SEQ ID NO: 859192 - protein, 118 aa, Homo sapiens
MPCARLWSSSSPRTLTRTLTEDGSSSAPPSGLVLLPETSLGLQPGEATSHWIHTRPHFSILETPSLDSRSVHDLPLVQFLISGLQRSSCARTQAQPRIPQTKYFLLSAPRGMCSEAAA

SEQ ID NO: 859193 - protein, 421 aa, Homo sapiens; identical to SEQ ID NO: 859185

SEQ ID NO: 859194 - protein, 421 aa, Homo sapiens; identical to SEQ ID NO: 859185

SEQ ID NO: 859195 - protein, 483 aa, Homo sapiens
RPALPPPTVCIVRSRVIWLQSVRILSRDRNCLDPFTSRQSLQALACYADISVSEGSVPESADMDVVLESLKCLCNLVLSSPVAQMLAAEARLVVKLTERVGLYRERSFPHDVQFFDLRLLFLLTALRTDVRQQLFQELKGVRLLTDTLELTLGVTPEGNPPPTLLPSQETERAMEILKVLFNITLDSIKGEVDEEDAALYRHLGTLLRHCVMIATAGDRTEEFHGHAVNLLGNLPLKCLDVLLTLEPHGDSTEFMGVNMDVIRALLIFLEKRLHKTHRLKESVAPVLSVLTECARMHRPARKFLKAQVLPPLRDVRTRPEVGEMLRNKLVRLMTHLDTDVKRVAAEFLFVLCSESVPRFIKYTGYGNAAGLLAARGLMAGGRPEGQYSEDEDTDTDEYKEAKASINPVTGRVEEKPPNPMEGMTEEQKEHEAMKLVTMFDKLSRNRVIQPMGMSPRGHLTSLQDAMCETMEQQLSSDPDSDPD

SEQ ID NO: 859196 - protein, 610 aa, Homo sapiens
MEPRAVAEAVETGEEDVIMEALRSYNQEHSQSFTFDDAQQEDRKRLAELLVSVLEQGLPPSHRVIWLQSVRILSRDRNCLDPFTSRQSLQALACYADISVSEGSVPESADMDVVLESLKCLCNLVLSSPVAQMLAAEARLVVKLTERVGLYRERSFPHDVQFFDLRLLFLLTALRTDVRQQLFQELKGVRLLTDTLELTLGVTPEGNPPPTLLPSQETERAMEILKVLFNITLDSIKGEVDEEDAALYRHLGTLLRHCVMIATAGDRTEEFHGHAVNLLGNLPLKCLDVLLTLEPHGDSTEFMGVNMDVIRALLIFLEKRLHKTHRLKESVAPVLSVLTECARMHRPARKFLKAQVLPPLRDVRTRPEVGEMLRNKLVRLMTHLDTDVKRVAAEFLFVLCSESVPRFIKYTGYGNAAGLLAARGLMAGGRPEGQYSEDEDTDTDEYKEAKASINPVTGRVEEKPPNPMEGMTEEQKEHEAMKLVTMFDKLSRMPCARLWSSSSPRTLTRTLTEDGSSSAPPSGLVLLPETSLGLQPGEATSHWIHTRPHFSILETPSLDSRSVHDLPLVQFLISGLQRSSCARTQAQPRIPQTKYFLLSAPRGMCSEAAA

SEQ ID NO: 859197 - protein, 531 aa, Homo sapiens; identical to SEQ ID NO: 859184

SEQ ID NO: 859198 - protein, 531 aa, Homo sapiens; identical to SEQ ID NO: 859184

SEQ ID NO: 859199 - protein, 531 aa, Homo sapiens; identical to SEQ ID NO: 859184

SEQ ID NO: 859200 - protein, 155 aa, Homo sapiens
MVRGLRLNSADVKRVAAEFLFVLCSESVPRFIKYTGYGNAAGLLAARGLMAGGRPEGQYSEDEDTDTDEYKEAKASINPVTGRVEEKPPNPMEGMTEEQKEHEAMKLVTMFDKLSRNRVIQPMGMSPRGHLTSLQDAMCETMEQQLSSDPDSDPD

SEQ ID NO: 859201 - protein, 94 aa, Homo sapiens
RVTNAFPTFHPLGNSINPVTGRVEEKPPNPMEGMTEEQKEHEAMKLVTMFDKLSRNRVIQPMGMSPRGHLTSLQDAMCETMEQQLSSDPDSDPD

SEQ ID NO: 859202 - protein, 597 aa, Homo sapiens
MAASTSMVPVAVTAAVAPVLSINSDFSDLREIKKQLLLIAGLTRERGLLHSSKWSAELAFSLPALPLAELQPPPPITEEDAQDMDAYTLAKAYFDVKEYDRAAHFLHGCNSKKAYFLYMYSRYLSGEKKKDDETVDSLGPLEKGQVKNEALRELRVELSKKHQARELDGFGLYLYGVVLRKLDLVKEAIDVFVEATHVLPLHWGAWLELCNLITDKEMLKFLSLPDTWMKEFFLAHIYTELQLIEEALQKYQNLIDVGFSKSSYIVSQIAVAYHNIRDIDKALSIFNELRKQDPYRIENMDTFSNLLYVRSMKSELSYLAHNLCEIDKYRVETCCVIGNYYSLRSQHEKAALYFQRALKLNPRYLGAWTLMGHEYMEMKNTSAAIQAYRHAIEVNKRDYRAWYGLGQTYEILKMPFYCLYYYRRAHQLRPNDSRMLVALGECYEKLNQLVEAKKCYWRAYAVGDVEKMALVKLAKLHEQLTESEQAAQCYIKYIQDIYSCGEIVEHLEESTAFRYLAQYYFKCKLWDEASTCAQKCCAFNDTREEGKALLRQILQLRNQGETPTTEVPAPFFLPASLSANNTPTRRVSPLNLSSVTP

SEQ ID NO: 859203 - protein, 151 aa, Homo sapiens
MAASTSMVPVAVTAAVAPVLSINSDFSDLREIKKQLLLIAGLTRERGLLHSSKWSAELAFSLPALPLAELQPPPPITEEDAQDMDAYTLAKAYFDVKEYDRAAHFLHGCNSKKAYFLYMYSRYLVRAILKCHSAFSETSIFRTNGKVKSFK

SEQ ID NO: 859204 - protein, 234 aa, Homo sapiens
MAASTSMVPVAVTAAVAPVLSINSDFSDLREIKKQLLLIAGLTRERGLLHSSKWSAELAFSLPALPLAELQPPPPITEEDAQDMDAYTLAKAYFDVKEYDRAAHFLHGCNSKKAYFLYMYSRYLSGEKKKDDETVDSLGPLEKGQVKNEALRELRVELSKKHQARELDGFGLYLYGVVLRKLDLVKEAIDVFVEATHVLPLHWGAWLELCNLITDKEMVNCDELCEKPSASSLL

SEQ ID NO: 859205 - protein, 571 aa, Homo sapiens
MAASTSMVPVAVTAAVAPVLSINSDFSDLREIKKQLLLIAGLTRERGLLHSSKWSAELAFSLPALPLAELQPPPPITEEDAQDMDAYTLAKAYFDVKEYDRAAHFLHGCNSKKAYFLYMYSRYLSGEKKKDDETVDSLGPLEKGQVKNEALRELRVELSKKHQARELDGFGLYLYGVVLRKLDLVKEAIDVFVEATHVLPLHWGAWLELCNLITDKEMLKFLSLPDTWMKEFFLAHIYTELQLIEEALQKYQNLIDVGFSKSSYIVSQIAVAYHNIRDIDKALSIFNELRKQDPYRIENMDTFSNLLYVRSMKSELSYLAHNLCEIDKYRVETCCVIGNYYSLRSQHEKAALYFQRALKLNPRYLGAWTLMGHEYMEMKNTSAAIQAYRHAIEVNKRDYRAWYGLGQTYEILKMPFYCLYYYRRAHQLRPNDSRMLVALGECYEKLNQLVEAKKCYWRAYAVGDVEKMALVKLAKLHEQLTESEQAAQCYIKYIQDIYSCGEIVEHLEESTAFRYLAQYYFKCKLWDEASTCAQKCCAFNDTREEGKALLRQILQLRNQGETLYPELAVGH

SEQ ID NO: 859206 - protein, 151 aa, Homo sapiens; identical to SEQ ID NO: 859203

SEQ ID NO: 859207 - protein, 409 aa, Homo sapiens
MDLDFISTHVLPLHWGAWLELCNLITDKEMLKFLSLPDTWMKEFFLAHIYTELQLIEEALQKYQNLIDVGFSKSSYIVSQIAVAYHNIRDIDKALSIFNELRKQDPYRIENMDTFSNLLYVRSMKSELSYLAHNLCEIDKYRVETCCVIGNYYSLRSQHEKAALYFQRALKLNPRYLGAWTLMGHEYMEMKNTSAAIQAYRHAIEVNKRDYRAWYGLGQTYEILKMPFYCLYYYRRAHQLRPNDSRMLVALGECYEKLNQLVEAKKCYWRAYAVGDVEKMALVKLAKLHEQLTESEQAAQCYIKYIQDIYSCGEIVEHLEESTAFRYLAQYYFKCKLWDEASTCAQKCCAFNDTREEGKALLRQILQLRNQGETPTTEVPAPFFLPASLSANNTPTRRVSPLNLSSVTP

SEQ ID NO: 859208 - protein, 151 aa, Homo sapiens; identical to SEQ ID NO: 859203

SEQ ID NO: 859209 - protein, 681 aa, Homo sapiens
MFRKKKKKRPEISAPQNFQHRVHTSFDPKEGKFVGLPPQWQNILDTLRRPKPVVDPSRITRVQLQPMKTVVRGSAMPVDGYISGLLNDIQKLSVISSNTLRGRSPTSRRRAQSLGLLGDEHWATDPDMYLQSPQSERTDPHGLYLSCNGGTPAGHKQMPWPEPQSPRVLPNGLAAKAQSLGPAEFQGASQRCLQLGACLQSSPPGASPPTGTNRHGMKAAKHGSEEARPQSCLVGSATGRPGGEGSPSPKTRESSLKRRLFRSMFLSTAATAPPSSSKPGPPPQSKPNSSFRPPQKDNPPSLVAKAQSLPSDQPVGTFSPLTTSDTSSPQKSLRTAPATGQLPGRSSPAGSPRTWHAQISTSNLYLPQDPTVAKGALAGEDTGVVTHEQFKAALRMVVDQGDPRLLLDSYVKIGEGSTGIVCLAREKHSGRQVAVKMMDLRKQQRRELLFNEVVIMRDYQHFNVVEMYKSYLVGEELWVLMEFLQGGALTDIVSQVRLNEEQIATVCEAVLQALAYLHAQGVIHRDIKSDSILLTLDGRVKLSDFGFCAQISKDVPKRKSLVGTPYWMAPEVISRSLYATEVDIWSLGIMVIEMVDGEPPYFSDSPVQAMKRLRDSPPPKLKNSHKVSPVLRDFLERMLVRDPQERATAQELLDHPFLLQTGLPECLVPLIQLYRKQTSTC

SEQ ID NO: 859210 - protein, 681 aa, Homo sapiens; identical to SEQ ID NO: 859209

SEQ ID NO: 859211 - protein, 681 aa, Homo sapiens; identical to SEQ ID NO: 859209

SEQ ID NO: 859212 - protein, 258 aa, Homo sapiens
MATANFGKIQIGIYVEIKRSDGRIHQAMVTSLNEDNESVTVEWIENGDTKGKEIDLESIFSLNPDLVPDEEIEPSPETPPPPASSAKVNKIVKNRRTVASIKNDPPSRDNRVVGSARARPSQFPEQSSSAQQNARRKSNCVKEVEKLQEKREKRRLQQQELREKRAQQKKNLCGAALRTPRKRFLKNTRVGAAGAPHEVKAHPGHRAAPREKTRARHQGGVSPHKKRPARTRSVLEHTKGFRGTHGSHSGVQQGDDKY

SEQ ID NO: 859213 - protein, 706 aa, Homo sapiens
MATANFGKIQIGIYVEIKRSDGRIHQAMVTSLNEDNESVTVEWIENGDTKGKEIDLESIFSLNPDLVPDEEIEPSPETPPPPASSAKVNKIVKNRRTVASIKNDPPSRDNRVVGSARARPSQFPEQSSSAQQNGSVSDISPVQAAKKEFGPPSRRKSNCVKEVEKLQEKREKRRLQQQELREKRAQDVDATNPNYEIMCMIRDFRGSLDYRPLTTADPIDEHRICVCVRKRPLNKKETQMKDLDVITIPSKDVVMVHEPKQKVDLTRYLENQTFRFDYAFDDSAPNEMVYRFTARPLVETIFERGMATCFAYGQTGSGKTHTMGGDFSGKNQDCSKGIYALAARDVFLMLKKPNYKKLELQVYATFFEIYSGKVFDLLNRKTKLRVLEDGKQQVQVVGLQEREVKCVEDVLKLIDIGNSCRTSGQTSANAHSSRSHAVFQIILRRKGKLHGKFSLIDLAGNERGADTSSADRQTRLEGAEINKSLLALKECIRALGRNKPHTPFRASKLTQVLRDSFIGENSRTCMIATISPGMASCENTLNTLRYANRVKELTVDPTAAGDVRPIMHHPPNQIDDLETQWGVGSSPQRDDLKLLCEQNEEEVSPQLFTFHEAVSQMVEMEEQVVEDHRAVFQESIRWLEDEKALLEMTEEVDYDVDSYATQLEAILEQKIDILTELRDKVKSFRAALQEEEQASKQINPKRPRAL

SEQ ID NO: 859214 - protein, 706 aa, Homo sapiens; identical to SEQ ID NO: 859213

SEQ ID NO: 859215 - protein, 687 aa, Homo sapiens
MATANFGKIQIGIYVEIKRSDGRIHQAMVTSLNEDNESVTVEWIENGDTKGKEIDLESIFSLNPDLVPDEEIEPSPETPPPPASSAKVNKIVKNRRTVASIKNDPPSRDNRVVGSARARPSQFPEQSSSAQQNARRKSNCVKEVEKLQEKREKRRLQQQELREKRAQDVDATNPNYEIMCMIRDFRGSLDYRPLTTADPIDEHRICVCVRKRPLNKKETQMKDLDVITIPSKDVVMVHEPKQKVDLTRYLENQTFRFDYAFDDSAPNEMVYRFTARPLVETIFERGMATCFAYGQTGSGKTHTMGGDFSGKNQDCSKGIYALAARDVFLMLKKPNYKKLELQVYATFFEIYSGKVFDLLNRKTKLRVLEDGKQQVQVVGLQEREVKCVEDVLKLIDIGNSCRTSGQTSANAHSSRSHAVFQIILRRKGKLHGKFSLIDLAGNERGADTSSADRQTRLEGAEINKSLLALKECIRALGRNKPHTPFRASKLTQVLRDSFIGENSRTCMIATISPGMASCENTLNTLRYANRVKELTVDPTAAGDVRPIMHHPPNQIDDLETQWGVGSSPQRDDLKLLCEQNEEEVSPQLFTFHEAVSQMVEMEEQVVEDHRAVFQESIRWLEDEKALLEMTEEVDYDVDSYATQLEAILEQKIDILTELRDKVKSFRAALQEEEQASKQINPKRPRAL

SEQ ID NO: 859216 - protein, 684 aa, Homo sapiens
TRGSTHAIRIYVEIKRSDGRIHQAMVTSLNEDNESVTVEWIENGDTKGKEIDLESIFSLNPDLVPDEEIEPSPETPPPPASSAKVNKIVKNRRTVASIKNDPPSRDNRVVGSARARPSQFPEQSSSAQQNARRKSNCVKEVEKLQEKREKRRLQQQELREKRAQDVDATNPNYEIMCMIRDFRGSLDYRPLTTADPIDEHRICVCVRKRPLNKKETQMKDLDVITIPSKDVVMVHEPKQKVDLTRYLENQTFRFDYAFDDSAPNEMVYRFTARPLVETIFERGMATCFAYGQTGSGKTHTMGGDFSGKNQDCSKGIYALAARDVFLMLKKPNYKKLELQVYATFFEIYSGKVFDLLNRKTKLRVLEDGKQQVQVVGLQEREVKCVEDVLKLIDIGNSCRTSGQTSANAHSSRSHAVFQIILRRKGKLHGKFSLIDLAGNERGADTSSADRQTRLEGAEINKSLLALKECIRALGRNKPHTPFRASKLTQVLRDSFIGENSRTCMIATISPGMASCENTLNTLRYANRVKELTVDPTAAGDVRPIMHHPPNQIDDLETQWGVGSSPQRDDLKLLCEQNEEEVSPQLFTFHEAVSQMVEMEEQVVEDHRAVFQESIRWLEDEKALLEMTEEVDYDVDSYATQLEAILEQKIDILTELRDKVKSFRAALQEEEQASKQINPKRPRAL

SEQ ID NO: 859217 - protein, 369 aa, Homo sapiens
MKFLTARDVFLMLKKPNYKKLELQVYATFFEIYSGKVFDLLNRKTKLRVLEDGKQQVQVVGLQEREVKCVEDVLKLIDIGNSCRTSGQTSANAHSSRSHAVFQIILRRKGKLHGKFSLIDLAGNERGADTSSADRQTRLEGAEINKSLLALKECIRALGRNKPHTPFRASKLTQVLRDSFIGENSRTCMIATISPGMASCENTLNTLRYANRVKELTVDPTAAGDVRPIMHHPPNQIDDLETQWGVGSSPQRDDLKLLCEQNEEEVSPQLFTFHEAVSQMVEMEEQVVEDHRAVFQESIRWLEDEKALLEMTEEVDYDVDSYATQLEAILEQKIDILTELRDKVKSFRAALQEEEQASKQINPKRPRAL

SEQ ID NO: 859218 - protein, 706 aa, Homo sapiens; identical to SEQ ID NO: 859213

SEQ ID NO: 859219 - protein, 154 aa, Homo sapiens
MATANFGKIQIGIYVEIKRSDGRIHQAMVTSLNEDNESVTVEWIENGDTKGKEIDLESIFSLNPDLVPDEEIEPSPETPPPPASSAKVNKIVKNRRTVASIKNDPPSRDNRVVGSARARPSQFPEQSSSAQQNGSVSDISPVQAAKKEFGPPCM

SEQ ID NO: 859220 - protein, 745 aa, Homo sapiens
MATANFGKIQIGIYVEIKRSDGRIHQAMVTSLNEDNESVTVEWIENGDTKGKEIDLESIFSLNPDLVPDEEIEPSPETPPPPASSAKVNKIVKNRRTVASIKNDPPSRDNRVVGSARARPSQFPEQSSSAQQNGSVSDISPVQAAKKEFGPPSRRKSNCVKEVEKLQEKREKRRLQQQELREKRAQDVDATNPNYEIMCMIRDFRGSLDYRPLTTADPIDEHRICVCVRKRPLNKKETQMKDLDVITIPSKDVVMVHEPKQKVDLTRYLENQTFRFDYAFDDSAPNEMVYRFTARPLVETIFERGMATCFAYGQTGSGKTHTMGGDFSGKNQDCSKGIYALAARDVFLMLKKPNYKKLELQVYATFFEIYSGKVFDLLNRKTKLRVLEDGKQQVQVVGLQEREVKCVEDVLKLIDIGNSCRTSGQTSANAHSSRSHAVFQIILRRKGKLHGKFSLIDLAGNERGADTSSADRQTRLEGAEINKSLLALKECIRALGRNKPHTPFRASKLTQVLRDSFIGENSRTCMIATISPGMASCENTLNTLRYANRVKEFGISPSDIPFSQGSGSRPDLSPSYEYDDFSPSVTKVVKELTVDPTAAGDVRPIMHHPPNQIDDLETQWGVGSSPQRDDLKLLCEQNEEEVSPQLFTFHEAVSQMVEMEEQVVEDHRAVFQESIRWLEDEKALLEMTEEVDYDVDSYATQLEAILEQKIDILTELRDKVKSFRAALQEEEQASKQINPKRPRAL

SEQ ID NO: 859221 - protein, 690 aa, Homo sapiens
MHTTSGRIHQAMVTSLNEDNESVTVEWIENGDTKGKEIDLESIFSLNPDLVPDEEIEPSPETPPPPASSAKVNKIVKNRRTVASIKNDPPSRDNRVVGSARARPSQFPEQSSSAQQNGSVSDISPVQAAKKEFGPPSRRKSNCVKEVEKLQEKREKRRLQQQELREKRAQDVDATNPNYEIMCMIRDFRGSLDYRPLTTADPIDEHRICVCVRKRPLNKKETQMKDLDVITIPSKDVVMVHEPKQKVDLTRYLENQTFRFDYAFDDSAPNEMVYRFTARPLVETIFERGMATCFAYGQTGSGKTHTMGGDFSGKNQDCSKGIYALAARDVFLMLKKPNYKKLELQVYATFFEIYSGKVFDLLNRKTKLRVLEDGKQQVQVVGLQEREVKCVEDVLKLIDIGNSCRTSGQTSANAHSSRSHAVFQIILRRKGKLHGKFSLIDLAGNERGADTSSADRQTRLEGAEINKSLLALKECIRALGRNKPHTPFRASKLTQVLRDSFIGENSRTCMIATISPGMASCENTLNTLRYANRVKELTVDPTAAGDVRPIMHHPPNQIDDLETQWGVGSSPQRDDLKLLCEQNEEEVSPQLFTFHEAVSQMVEMEEQVVEDHRAVFQESIRWLEDEKALLEMTEEVDYDVDSYATQLEAILEQKIDILTELRDKVKSFRAALQEEEQASKQINPKRPRAL

SEQ ID NO: 859222 - protein, 706 aa, Homo sapiens; identical to SEQ ID NO: 859213

SEQ ID NO: 859223 - protein, 706 aa, Homo sapiens; identical to SEQ ID NO: 859213

SEQ ID NO: 859224 - protein, 953 aa, Homo sapiens
MITSAAGIISLLDEDEPQLKEFALHKLNAVVNDFWAEISESVDKIEVLYEDEGFRSRQFAALVASKVFYHLGAFEESLNYALGAGDLFNVNDNSEYVETIIAKCIDHYTKQCVENADLPEGEKKPIDQRLEGIVNKMFQRCLDDHKYKQAIGIALETRRLDVFEKTILESNDVPGMLAYSLKLCMSLMQNKQFRNKVLRVLVKIYMNLEKPDFINVCQCLIFLDDPQAVSDILEKLVKEDNLLMAYQICFDLYESASQQFLSSVIQNLRTVGTPIASVPGSTNTGTVPGSEKDSDSMETEEKTSSAFVGKTPEASPEPKDQTLKMIKILSGEMAIELHLQFLIRNNNTDLMILKNTKDAVRNSVCHTATVIANSFMHCGTTSDQFLRDNLEWLARATNWAKFTATASLGVIHKGHEKEALQLMATYLPKDTSPGSAYQEGGGLYALGLIHANHGGDIIDYLLNQLKNASNDIVRHGGSLGLGLAAMGTARQDVYDLLKTNLYQDDAVTGEAAGLALGLVMLGSKNAQAIEDMVGYAQETQHEKILRGLAVGIALVMYGRMEEADALIESLCRDKDPILRRSGMYTVAMAYCGSGNNKAIRRLLHVAVSDVNDDVRRAAVESLGFILFRTPEQCPSVVSLLSESYNPHVRYGAAMALGICCAGTGNKEAINLLEPMTNDPVNYVRQGALIASALIMIQQTEITCPKVNQFRQLYSKVINDKHDDVMAKFGAILAQGILDAGGHNVTISLQSRTGHTHMPSVVGVLVFTQFWFWFPLSHFLSLAYTPTCVIGLNKDLKMPKVQYKSNCKPSTFAYPAPLEVPKEKEKEKVSTAVLSITAKAKKKEKEKEKKEEEKMEVDEAEKKEEKEKKKEPEPNFQLLDNPARVMPAQLKVLTMPETCRYQPFKPLSIGGIIILKDTSEDIEELVEPVAAHGPKIEEEEQEPEPPEPFEYIDD

SEQ ID NO: 859225 - protein, 138 aa, Homo sapiens
MITSAAGIISLLDEDEPQLKEFALHKLNAVVNDFWAEISESVDKIEVLYEDEGFRSRQFAALVASKVFYHLGAFEESLNYALGAGDLFNVNDNSEYVETIIAKCIDHYTKQCVENADLPEGEKKPKVPRPCFCFLKVL

SEQ ID NO: 859226 - protein, 953 aa, Homo sapiens; identical to SEQ ID NO: 859224

SEQ ID NO: 859227 - protein, 953 aa, Homo sapiens; identical to SEQ ID NO: 859224

SEQ ID NO: 859228 - protein, 953 aa, Homo sapiens; identical to SEQ ID NO: 859224

SEQ ID NO: 859229 - protein, 849 aa, Homo sapiens
MITSAAGIISLLDEDEPQLKEFALHKLNAVVNDFWAEISESVDKIEVLYEDEGFRSRQFAALVASKVFYHLGAFEESLNYALGAGDLFNVNDNSEYVETIIAKCIDHYTKQCVENADLPEGEKKPIDQRLEGIVNKMFQRCLDDHKYKQAIGIALETRRLDVFEKTILESNDVPGMLAYSLKLCMSLMQNKQFRNKVLRVLVKIYMNLEKPDFINVCQCLIFLDDPQAVSDILEKLVKEDNLLMAYQICFDLYESASQQFLSSVIQNLRTVGTPIASVPGSTNTGTVPGSEKDSDSMETEEKTSSAFVGKTPEASPEPKDQTLKMIKILSGEMAIELHLQFLIRNNNTDLMILKNTKDAVRNSVCHTATVIANSFMHCGTTSDQFLRDNLEWLARATNWAKFTATASLGVIHKGHEKEALQLMATYLPKDTSPGSAYQEGGGLYALGLIHANHGGDIIDYLLNQLKNASNDIVRHGGSLGLGLAAMGTARQDVYDLLKTNLYQDDAVTGEAAGLALGLVMLGSKNAQAIEDMVGYAQETQHEKILRGLAVGIALVMYGRMEEADALIESLCRDKDPILRRSGMYTVAMAYCGSGNNKAIRRLLHVAVSDVNDDVRRAAVESLGFILFRTPEQCPSVVSLLSESYNPHVRYGAAMALGICCAGTGNKEAINLLEPMTNDPVNYVRQGALIASALIMIQQTEITCPKVNQFRQLYSKVINDKHDDVMAKFGAILAQGILDAGGHNVTISLQSRTGHTHMPSVVGVLVFTQFWFWFPLSHFLSLAYTPTCVIGLNKDLKMPKVQYKSNCKPSTFAYPAPLEVPKEKEKEKVSTAVLSITAKAKKKEKEKEKR

SEQ ID NO: 859230 - protein, 959 aa, Homo sapiens [sequence omitted]

SEQ ID NO: 859231 - protein, 911 aa, Homo sapiens
MITSAAGIISLLDEDEPQLKEFALHKLNAVVNDFWAEISESVDKIEVLYEDEGFRSRQFAALVASKVFYHLGAFEESLNYALGAGDLFNVNDNSEYVETIIGNYRLSAKCIDHYTKQCVENADLPEGEKKPIDQRLEGIVNKMFQRCLDDHKYKQAIGIALETRRLDVFEKTILESNDVPGMLAYSLKLCMSLMQNKQFRNKVLRVLVKIYMNLEKPDFINVCQNLRTVGTPIASVPGSTNTGTVPGSEKDSDSMETEEKTSSAFVGKTPEASPEPKDQTLKMIKILSGEMAIELHLQFLIRNNNTDLMILKNTKDAVRNSVCHTATVIANSFMHCGTTSDQFLRDNLEWLARATNWAKFTATASLGVIHKGHEKEALQLMATYLPKDTSPGSAYQEGGGLYALGLIHANHGGDIIDYLLNQLKNASNDIVRHGGSLGLGLAAMGTARQDVYDLLKTNLYQDDAVTGEAAGLALGLVMLGSKNAQAIEDMVGYAQETQHEKILRGLAVGIALVMYGRMEEADALIESLCRDKDPILRRSGMYTVAMAYCGSGNNKAIRRLLHVAVSDVNDDVRRAAVESLGFILFRTPEQCPSVVSLLSESYNPHVRYGAAMALGICCAGTGNKEAINLLEPMTNDPVNYVRQGALIASALIMIQQTEITCPKVNQFRQLYSKVINDKHDDVMAKFGAILAQGILDAGGHNVTISLQSRTGHTHMPSVVGVLVFTQFWFWFPLSHFLSLAYTPTCVIGLNKDLKMPKVQYKSNCKPSTFAYPAPLEVPKEKEKEKVSTAVLSITAKAKKKEKEKEKKEEEKMEVDEAEKKEEKEKKKEPEPNFQLLDNPARVMPAQLKVLTMPETCRYQPFKPLSIGGIIILKDTSEDIEELVEPVAAHGPKIEEEEQEPEPPEPFEYIDD

SEQ ID NO: 859232 - protein, 970 aa, Homo sapiens
MITSAAGIISLLDEDEPQLKEFALHKLNAVVNDFWAEISESVDKIEVLYEDEGFRSRQFAALVASKVFYHLGAFEESLNYALGAGDLFNVNDNSEYVETIIAKCIDHYTKQCVENADLPEGEKKPIDQRLEGIVNKMFQRCLDDHKYKQAIGIALETRRLDVFEKTILESNDVPGMLAYSLKLCMSLMQNKQFRNKVLRVLVKIYMNLEKPDFINVCQCLIFLDDPQAVSDILEKLVKEDNLLMAYQICFDLYESASQQFLSSVIQNLRTVGTPIASVPGSTNTGTVPGSEKDSDSMETEEKTSSAFVGKTPEASPEPKDQTLKMIKILSGEMAIELHLQFLIRNNNTDLMILKNTKDAVRNSVCHTATVIANSFMHCGTTSDQFLRDNLEWLARATNWAKFTATASLGVIHKGHEKEALQLMATYLPKDTSPGSAYQEGGGLYALGLIHANHGGDIIDYLLNQLKNASNDIVRHGGSLGLGLAAMGTARQDVYDLLKTNLYQDDAVTGEAAGLALGLVMLGSKNAQAIEDMVGYAQETQHEKILRGLAVGIALVMYGRMEEADALIESLCRDKDPILRRSGMYTVAMAYCGSGNNKAIRRLLHVAVSDVNDDVRRAAVESLGFILFRTPEQCPSVVSLLSESYNPHVRYGAAMALGICCAGTGNKEAINLLEPMTNDPVNYVRQGALIASALIMIQQTEITCPKVNQFRQLYSKVINDKHDDVMAKFGAILAQGILDAGSECHNLLAVQDWAYWMRGHNVTISLQSRTGHTHMPSVVGVLVFTQFWFWFPLSHFLSLAYTPTCVIGLNKDLKMPKVQYKSNCKPSTFAYPAPLEVPKEKEKEKVSTAVLSITAKAKKKEKEKEKKEEEKMEVDEAEKKEEKEKKKEPEPNFQLLDNPARVMPAQLKVLTMPETCRYQPFKPLSIGGIIILKDTSEDIEELVEPVAAHGPKIEEEEQEPEPPEPFEYIDD

SEQ ID NO: 859233 - protein, 857 aa, Homo sapiens
MITSAAGIISLLDEDEPQLKEFALHKLNAVVNDFWAEISESVDKIEVLYEDEGFRSRQFAALVASKVFYHLGAFEESLNYALGAGDLFNVNDNSEYVETIIAKCIDHYTKQCVENADLPEGEKKPIDQRLEGIVNKMFQRCLDDHKYKQAIGIALETRRLDVFEKTILESNDVPGMLAYSLKLCMSLMQNKQFRNKVLRVLVKIYMNLEKPDFINVCQCLIFLDDPQAVSDILEKLVKEDNLLMAYQICFDLYESASQQFLSSVIQNLRTVGTPIASVPGSTNTGTVPGSEKDSDSMETEEKTSSAFVGKTPEASPEPKDQTLKMIKILSGEMAIELHLQFLIRNNNTDLMILKNTKDAVRNSVCHTATVIANSFMHCGTTSDQFLRDNLEWLARATNWAKFTATASLGVIHKGHEKEALQLMATYLPKDTSPGSAYQEGGGLYALGLIHANHGGDIIDYLLNQLKNASNDIVRHGGSLGLGLAAMGTARQDVYDLLKTNLYQDDAVTGEAAGLALGLVMLGSKNAQAIEDMVGYAQETQHEKILRGLAVGIALVMYGRMEEADALIESLCRDKDPILRRSGMYTVAMAYCGSGNNKAIRRLLHVAVSDVNDDVRRAAVESLGFILFRTPEQCPSVVSLLSESYNPHVRYGAAMALGICCAGTGNKEAINLLEPMTNDPVNYVRQGALIASALIMIQQTEITCPKVNQFRQLYSKVINDKHDDVMAKFGAILAQGILDAGGHNVTISLQSRTGHTHMPSVVGVLVFTQFWFWFPLSHFLSLAYTPTCVIGLNKDLKMPKVQYKSNCKPSTFAYPAPLEVPKEKEKEKQNKKAYIKDIAHKDVAERHAEALGKAEQLN

SEQ ID NO: 859234 - protein, 366 aa, Homo sapiens
MAYCGSGNNKAIRRLLHVAVSDVNDDVRRAAVESLGFILFRTPEQCPSVVSLLSESYNPHVRYGAAMALGICCAGTGNKEAINLLEPMTNDPVNYVRQGALIASALIMIQQTEITCPKVNQFRQLYSKVINDKHDDVMAKFGAILAQGILDAGGHNVTISLQSRTGHTHMPSVVGVLVFTQFWFWFPLSHFLSLAYTPTCVIGLNKDLKMPKVQYKSNCKPSTFAYPAPLEVPKEKEKEKVSTAVLSITAKAKKKEKEKEKKEEEKMEVDEAEKKEEKEKKKEPEPNFQLLDNPARVMPAQLKVLTMPETCRYQPFKPLSIGGIIILKDTSEDIEELVEPVAAHGPKIEEEEQEPEPPEPFEYIDD

SEQ ID NO: 859235 - protein, 830 aa, Homo sapiens
MITSAAGIISLLDEDEPQLKEFALHKLNAVVNDFWAEISESVDKIEVLYEDEGFRSRQFAALVASKVFYHLGAFEESLNYALGAGDLFNVNDNSEYVETIIAKCIDHYTKQCVENADLPEGEKKPIDQRLEGIVNKMFQRCLDDHKYKQAIGIALETRRLDVFEKTILESNDVPGMLAYSLKLCMSLMQNKQFRNKVLRVLVKIYMNLEKPDFINVCQCLIFLDDPQAVSDILEKLVKEDNLLMAYQICFDLYESASQQFLSSVIQNLRTVGTPIASVPGSTNTGTVPGSEKDSDSMETEEKTSSAFVGKTPEASPEPKDQTLKMIKILSGEMAIELHLQFLIRNNNTDLMILKNTKDAVRNSVCHTATVIANSFMHCGTTSDQFLRDNLEWLARATNWAKFTATASLGVIHKGHEKEALQLMATYLPKDTSPGSAYQEGGGLYALGLIHANHGGDIIDYLLNQLKNASNDIVRHGGSLGLGLAAMGTARQDVYDLLKTNLYQDDAVTGEAAGLALGLVMLGSKNAQAIEDMVGYAQETQHEKILRGLAVGIALVMYGRMEEADALIESLCRDKDPILRRSGMYTVAMAYCGSGNNKAIRRLLHVAVSDVNDDVRRAAVESLGFILFRTPEQCPSVVSLLSESYNPHVRYGAAMALGICCAGTGNKEAINLLEPMTNDPVNYVRQGALIASALIMIQQTEITCPKVNQFRQLYSKVINDKHDDVMAKFGAILAQGILDAGGHNVTISLQSRTGHTHMPSVVGVLVFTQFWFWFPLSHFLSLAYTPTCVIGLNKDLKVSTAVLSITAKAKKKEKEKEKKEEEKMEVVGINW

SEQ ID NO: 859236 - protein, 413 aa, Homo sapiens
MITSAAGIISLLDEDEPQLKEFALHKLNAVVNDFWAEISESVDKIEVLYEDEGFRSRQFAALVASKVFYHLGAFEESLNYALGAGDLFNVNDNSEYVETIIAKCIDHYTKQCVENADLPEGEKKPIDQRLEGIVNKMFQRCLDDHKYKQAIGIALETRRLDVFEKTILESNDVPGMLAYSLKLCMSLMQNKQFRNKVLRVLVKIYMNLEKPDFINVCQCLIFLDDPQAVSDILEKLVKEDNLLMAYQICFDLYESASQQFLSSVIQNLRTVGTPIASVPGSTNTGTVPGSEKDSDSMETEEKTSSAFVGKTPEASPEPKDQTLKMIKILSGEMAIELHLQFLIRNNNTDLMILKNTKDAVRNSVCHTATVIANSFMHCGTTSDQFLSFGSGFLFHTSCHWLIPLPVSLALTRT

SEQ ID NO: 859237 - protein, 763 aa, Homo sapiens
MITSAAGIISLLDEDEPQLKEFALHKLNAVVNDFWAEISESVDKIEVLYEDEGFRSRQFAALVASKVFYHLGAFEESLNYALGAGDLFNVNDNSEYVETIIAKCIDHYTKQCVENADLPEGEKKPIDQRLEGIVNKMFQRCLDDHKYKQAIGIALETRRLDVFEKTILESNDVPGMLAYSLKLCMSLMQNKQFRNKVLRVLVKIYMNLEKPDFINVCQCLIFLDDPQAVSDILEKLVKEDNLLMAYQICFDLYESASQQFLSSVIQNLRTVGTPIASVPGSTNTGTVPGSEKDSDSMETEEKTSSAFVGKTPEASPEPKDQTLKMIKILSGEMAIELHLQFLIRNNNTDLMILKNTKDAVRNSVCHTATVIANSFMHCGTTSDQFLRDNLEWLARATNWAKFTATASLGVIHKGHEKEALQLMATYLPKDTSPGSAYQEGGGLYALGLIHANHGGDIIDYLLNQLKNASNDIVRHGGSLGLGLAAMGTARQDVYDLLKTNLYQDDAVTGEAAGLALGLVMLGSKNAQAIEDMVGYAQETQHEKILRGLAVGIALVMYGRMEEADALIESLCRDKDPILRRSGMYTVAMAYCGSGNNKAIRRLLHVAVSDVNDDVRRAAVESLGFILFRTPEQCPSVVSLLSESYNPHVRYGAAMALGICCAGTGNKEAINLLEPMTNDPVNYVRQGALIASALIMIQQTEITCPKVNQFRQLYSKLSIGGIIILKDTSEDIEELVEPVAAHGPKIEEEEQEPEPPEPFEYIDD

SEQ ID NO: 859238 - protein, 699 aa, Homo sapiens
MITSAAGIISLLDEDEPQLKEFALHKLNAVVNDFWAEISESVDKIEVLYEDEGFRSRQFAALVASKVFYHLGAFEESLNYALGAGDLFNVNDNSEYVETIIAKCIDHYTKQCVENADLPEGEKKPIDQRLEGIVNKMFQRCLDDHKYKQAIGIALETRRLDVFEKTILESNDVPGMLAYSLKLCMSLMQNKQFRNKVLRVLVKIYMNLEKPDFINVCQCLIFLDDPQAVSDILEKLVKEDNLLMAYQICFDLYESASQQFLSSVIQNLRTVGTPIASVPGSTNTGTVPGSEKDSDSMETEEKTSSAFVGKTPEASPEPKDQTLKMIKILSGEMAIELHLQFLIRNNNTDLMILKNTKDAVRNSVCHTATVIANSFMHCGTTSDQFLRDNLEWLARATNWAKFTATASLGVIHKGHEKEALQLMATYLPKDTSPGSAYQEGGGLYALGLIHANHGGDIIDYLLNQLKNASNDIVRHGGSLGLGLAAMGTARQDVYDLLKTNLYQDDAVTGEAAGLALGLVMLGSKNAQAIEDMVGYAQETQHEKILRGLAVGIALVMYGRMEEADALIESLCRDKDPILRRSGMYTVAMAYCGSGNNKAIRRLLHVAVSDVNDDVRRAAVESLGFILFRTPEQCPSVVSLLSESYNPHVRYGAAMALGICCAGTGNKVKPTANGVSSFLAPDCFPSPQNLCNSCKNTSAM

SEQ ID NO: 859239 - protein, 229 aa, Homo sapiens
MAKFGAILAQGILDAGGHNVTISLQSRTGHTHMPSVVGVLVFTQFWFWFPLSHFLSLAYTPTCVIGLNKDLKMPKVQYKSNCKPSTFAYPAPLEVPKEKEKEKVSTAVLSITAKAKKKEKEKEKKEEEKMEVDEAEKKEEKEKKKEPEPNFQLLDNPARVMPAQLKVLTMPETCRYQPFKPLSIGGIIILKDTSEDIEELVEPVAAHGPKIEEEEQEPEPPEPFEYIDD

SEQ ID NO: 859240 - protein, 141 aa, Homo sapiens
MSVRDYNSLPCSFPQVSTAVLSITAKAKKKEKEKEKKEEEKMEVDEAEKKEEKEKKKEPEPNFQLLDNPARVMPAQLKVLTMPETCRYQPFKPLSIGGIIILKDTSEDIEELVEPVAAHGPKIEEEEQEPEPPEPFEYIDD

SEQ ID NO: 859241 - protein, 173 aa, Homo sapiens
MITSAAGIISLLDEDEPQLKEFALHKLNAVVNDFWAEISESVDKIEVLYEDEGFRSRQFAALVASKVFYHLGAFEESLNYALGAGDLFNVNDNSEYVETIIAKCIDHYTKQCVENADLPEGEKKPIDQRLEGIVNKMFQRCLDDHKYKQAIGIALETRRLDVFEKTILESNSK

SEQ ID NO: 859242 - protein, 953 aa, Homo sapiens; identical to SEQ ID NO: 859224

SEQ ID NO: 859243 - protein, 953 aa, Homo sapiens; identical to SEQ ID NO: 859224

SEQ ID NO: 859244 - protein, 953 aa, Homo sapiens; identical to SEQ ID NO: 859224

SEQ ID NO: 859245 - protein, 955 aa, Homo sapiens
MTHRGRVELIFVFWMNDEPQLKEFALHKLNAVVNDFWAEISESVDKIEVLYEDEGFRSRQFAALVASKVFYHLGAFEESLNYALGAGDLFNVNDNSEYVETIIAKCIDHYTKQCVENADLPEGEKKPIDQRLEGIVNKMFQRCLDDHKYKQAIGIALETRRLDVFEKTILESNDVPGMLAYSLKLCMSLMQNKQFRNKVLRVLVKIYMNLEKPDFINVCQCLIFLDDPQAVSDILEKLVKEDNLLMAYQICFDLYESASQQFLSSVIQNLRTVGTPIASVPGSTNTGTVPGSEKDSDSMETEEKTSSAFVGKTPEASPEPKDQTLKMIKILSGEMAIELHLQFLIRNNNTDLMILKNTKDAVRNSVCHTATVIANSFMHCGTTSDQFLRDNLEWLARATNWAKFTATASLGVIHKGHEKEALQLMATYLPKDTSPGSAYQEGGGLYALGLIHANHGGDIIDYLLNQLKNASNDIVRHGGSLGLGLAAMGTARQDVYDLLKTNLYQDDAVTGEAAGLALGLVMLGSKNAQAIEDMVGYAQETQHEKILRGLAVGIALVMYGRMEEADALIESLCRDKDPILRRSGMYTVAMAYCGSGNNKAIRRLLHVAVSDVNDDVRRAAVESLGFILFRTPEQCPSVVSLLSESYNPHVRYGAAMALGICCAGTGNKEAINLLEPMTNDPVNYVRQGALIASALIMIQQTEITCPKVNQFRQLYSKVINDKHDDVMAKFGAILAQGILDAGGHNVTISLQSRTGHTHMPSVVGVLVFTQFWFWFPLSHFLSLAYTPTCVIGLNKDLKMPKVQYKSNCKPSTFAYPAPLEVPKEKEKEKVSTAVLSITAKAKKKEKEKEKKEEEKMEVDEAEKKEEKEKKKEPEPNFQLLDNPARVMPAQLKVLTMPETCRYQPFKPLSIGGIIILKDTSEDIEELVEPVAAHGPKIEEEEQEPEPPEPFEYIDD

SEQ ID NO: 859246 - protein, 633 aa, Homo sapiens
MITSAAGIISLLDEDEPQLKEFALHKLNAVVNDFWAEISESVDKIEVLYEDEGFRSRQFAALVASKVFYHLGAFEESLNYALGAGDLFNVNDNSEYVETIIAKCIDHYTKQCVENADLPEGEKKPIDQRLEGIVNKMFQRCLDDHKYKQAIGIALETRRLDVFEKTILESNDVPGMLAYSLKLCMSLMQNKQFRNKVLRVLVKIYMNLEKPDFINVCQCLIFLDDPQAVSDILEKLVKEDNLLMAYQICFDLYESASQQFLSSVIQNLRTVGTPIASVPGSTNTGTVPGSEKDSDSMETEEKTSSAFVGKTPEASPEPKDQTLKMIKILSGEMAIELHLQFLIRNNNTDLMILKNTKDAVRNSVCHTATVIANSFMHCGTTSDQFLRDNLEWLARATNWAKFTATASLGVIHKGHEKEALQLMATYLPKDTSPGSAYQEGGGLYALGLIHANHGGDIIDYLLNQLKNASNDIVRHGGSLGLGLAAMGTARQDVYDLLKTNLYQDDAVTGEAAGLALGLVMLGSKNAQAIEDMVGYAQETQHEKILRGLAVGIALVMYGRMEEADALIESLCRDKDPILRRSGMYTVAMAYCGSGNNKAIRRLLHVAVSDVNDDVRRAAVESLGFILFRKPLIC

SEQ ID NO: 859247 - protein, 828 aa, Homo sapiens
MITSAAGIISLLDEDEPQLKEFALHKLNAVVNDFWAEISESVDKIEVLYEDEGFRSRQFAALVASKVFYHLGAFEESLNYALGAGDLFNVNDNSEYVETIIAKCIDHYTKQCVENADLPEGEKKPIDQRLEGIVNKMFQRCLDDHKYKQAIGIALETRRLDVFEKTILESNDVPGMLAYSLKLCMSLMQNKQFRNKVLRVLVKIYMNLEKPDFINVCQCLIFLDDPQAVSDILEKLVKEDNLLMAYQICFDLYESASQQFLSSVIQNLRTVGTPIASVPGSTNTGTVPGSEKDSDSMETEEKTSSAFVGKTPEASPEPKDQTLKMIKILSGEMAIELHLQFLIRNNNTDLMILKNTKDAVRNSVCHTATVIANSFMHCGTTSDQFLRDNLEWLARATNWAKFTATASLGVIHKGHEKEALQLMATYLPKDTSPGSAYQEGGGLYALGLIHANHGGDIIDYLLNQLKNASNDIVRHGGSLGLGLAAMGTARQDVYDLLKTNLYQDDAVTGEAAGLALGLVMLGSKNAQAIEDMVGYAQETQHEKILRGLAVGIALVMYGRMEEADALIESLCRDKDPILRRSGMYTVAMAYCGSGNNKAIRRLLHVAVSDVNDDVRRAAVESLGFILFRTPEQCPSVVSLLSESYNPHVRYGAAMALGICCAGTGNKEAINLLEPMTNDPVNYVRQGALIASALIMIQQTEITCPKVNQFRQLYSKVINDKHDDVMAKFGAILAQGILDAGGHNVTISLQSRTGHTHMPSVVGVLVFTQFWFWFPLSHFLSLAYTPTCVIGLNKDLKMPKVQYKSNCKPSTFAYPAPLEVPKEKEKEKR

SEQ ID NO: 859248 - protein, 452 aa, Homo sapiens
HFTRYLPGEAAGLALGLVMLGSKNAQAIEDMVGYAQETQHEKILRGLAVGIALVMYGRMEEADALIESLCRDKDPILRRSGMYTVAMAYCGSGNNKAIRRLLHVAVSDVNDDVRRAAVESLGFILFRTPEQCPSVVSLLSESYNPHVRYGAAMALGICCAGTGNKEAINLLEPMTNDPVNYVRQGALIASALIMIQQTEITCPKVNQFRQLYSKVINDKHDDVMAKFGAILAQGILDAGGHNVTISLQSRTGHTHMPSVVGVLVFTQFWFWFPLSHFLSLAYTPTCVIGLNKDLKMPKVQYKSNCKPSTFAYPAPLEVPKEKEKEKVSTAVLSITAKAKKKEKEKEKKEEEKMEVDEAEKKEEKEKKKEPEPNFQLLDNPARVMPAQLKVLTMPETCRYQPFKPLSIGGIIILKDTSEDIEELVEPVAAHGPKIEEEEQEPEPPEPFEYIDD

SEQ ID NO: 859249 - protein, 411 aa, Homo sapiens
MASSRFCLEAYKLLIRLFVLSLSGLGTPLCGKDPILRRSGMYTVAMAYCGSGNNKAIRRLLHVAVSDVNDDVRRAAVESLGFILFRTPEQCPSVVSLLSESYNPHVRYGAAMALGICCAGTGNKEAINLLEPMTNDPVNYVRQGALIASALIMIQQTEITCPKVNQFRQLYSKVINDKHDDVMAKFGAILAQGILDAGGHNVTISLQSRTGHTHMPSVVGVLVFTQFWFWFPLSHFLSLAYTPTCVIGLNKDLKMPKVQYKSNCKPSTFAYPAPLEVPKEKEKEKVSTAVLSITAKAKKKEKEKEKKEEEKMEVDEAEKKEEKEKKKEPEPNFQLLDNPARVMPAQLKVLTMPETCRYQPFKPLSIGGIIILKDTSEDIEELVEPVAAHGPKIEEEEQEPEPPEPFEYIDD

SEQ ID NO: 859250 - protein, 749 aa, Homo sapiens
MITSAAGIISLLDEDEPQLKEFALHKLNAVVNDFWAEISESVDKIEVLYEDEGFRSRQFAALVASKVFYHLGAFEESLNYALGAGDLFNVNDNSEYVETIIAKCIDHYTKQCVENADLPEGEKKPIDQRLEGIVNKMFQRCLDDHKYKQAIGIALETRRLDVFEKTILESNDVPGMLAYSLKLCMSLMQNKQFRNKVLRVLVKIYMNLEKPDFINVCQCLIFLDDPQAVSDILEKLVKEDNLLMAYQICFDLYESASQQFLSSVIQNLRTVGTPIASVPGSTNTGTVPGSEKDSDSMETEEKTSSAFVGKTPEASPEPKDQTLKMIKILSGEMAIELHLQFLIRNNNTDLMILKNTKDAVRNSVCHTATVIANSFMHCGTTSDQFLRDNLEWLARATNWAKFTATASLGVIHKGHEKEALQLMATYLPKDTSPGSAYQEGGGLYALGLIHANHGGDIIDYLLNQLKNASNDIVRHGGSLGLGLAAMGTARQDVYDLLKTNLYQDDAVTGEAAGLALGLVMLGSKNAQAIEDMVGYAQETQHEKILRGLAVGIALVMYGRMEEADALIESLCRDKDPILRRSGMYTVAMAYCGSGNNKAIRRLLHVAVSDVNDDVRRAAVESLGFILFRTPEQCPSVVSLLSESYNPHVRYGAAMALGICCAGTGNKEAINLLEPMTNDPVNYVRQGALIASALIMIQQTEITCPKVNQFRQLYSKVINDKHDDVMAKFGAILAQGILDAVLDCKEIVTL

SEQ ID NO: 859251 - protein, 740 aa, Homo sapiens
MITSAAGIISLLDEDEPQLKEFALHKLNAVVNDFWAEISESVDKIEVLYEDEGFRSRQFAALVASKVFYHLGAFEESLNYALGAGDLFNVNDNSEYVETIIAKCIDHYTKQCVENADLPEGEKKPIDQRLEGIVNKMFQRCLDDHKYKQAIGIALETRRLDVFEKTILESNDVPGMLAYSLKLCMSLMQNKQFRNKVLRVLVKIYMNLEKPDFINVCQCLIFLDDPQAVSDILEKLVKEDNLLMAYQICFDLYESASQQFLSSVIQNLRTVGTPIASVPGSTNTGTVPGSEKDSDSMETEEKTSSAFVGKTPEASPEPKDQTLKMIKILSGEMAIELHLQFLIRNNNTDLMILKNTKDAVRNSVCHTATVIANSFMHCGTTSDQFLRDNLEWLARATNWAKFTATASLGVIHKGHEKEALQLMATYLPKDTSPGSAYQEGGGLYALGLIHANHGGDIIDYLLNQLKNASNDIVRHGGSLGLGLAAMGTARQDVYDLLKTNLYQDDAVTGEAAGLALGLVMLGSKNAQAIEDMVGYAQETQHEKILRGLAVGIALVMYGRMEEADALIESLCRDKDPILRRSGMYTVAMAYCGSGNNKAIRRLLHVAVSDVNDDVRRAAVESLGFILFRTPEQCPSVVSLLSESYNPHVRYGAAMALGICCAGTGNKEAINLLEPMTNDPVNYVRQGALIASALIMIQQTEITCPKVNQFRQLYSKVINDKHDDVMAKFGAILAQGILDAG

SEQ ID NO: 859252 - protein, 633 aa, Homo sapiens
MITSAAGIISLLDEDEPQLKEFALHKLNAVVNDFWAEISESVDKIEVLYEDEGFRSRQFAALVASKVFYHLGAFEESLNYALGAGDLFNVNDNSEYVETIIAKCIDHYTKQCVENADLPEGEKKPIDQRLEGIVNKMFQRCLDDHKYKQAIGIALETRRLDVFEKTILESNDVPGMLAYSLKLCMSLMQNKQFRNKVLRVLVKIYMNLEKPDFINVCQCLIFLDDPQAVSDILEKLVKEDNLLMAYQICFDLYESASQQFLSSVIQNLRTVGTPIASVPGSTNTGTVPGSEKDSDSMETEEKTSSAFVGKTPEASPEPKDQTLKMIKILSGEMAIELHLQFLIRNNNTDLMILKNTKDAVRNSVCHTATVIANSFMHCGTTSDQFLRDNLEWLARATNWAKFTATASLGVIHKGHEKEALQLMATYLPKDTSPGSAYQEGGGLYALGLIHANHGGDIIDYLLNQLKNASNDIVRHGGSLGLGLAAMGTARQDVYDLLKTNLYQDDAVTGEAAGLALGLVMLGSKNAQAIEDMVGYAQETQHEKILRGLAVGIALVMYGRMEEADALIESLCRDKDPILRRSGMYTVAMAYCGSGNNKAIRRLLHVAVSDVNDDVRRAAVESLGFILFSEEKRI

SEQ ID NO: 859253 - protein, 105 aa, Homo sapiens
IHHRVTRRRVAAADSTQNPEGPRRRFSPVRERDGVPLCHAGCQAGVQWRNLSSLQPPPPGFKRFSCLCLLSSWDYWHTPPCTGRYETSINICKMYISFVWKDGTT

SEQ ID NO: 859254 - protein, 132 aa, Homo sapiens
MFYTTGQTAALLYIWSTFWASPVAPFKCMVLKRSKFMSLRSAPPFLHYIINSSLFFFFGDGVPLCHAGCQAGVQWRNLSSLQPPPPGFKRFSCLCLLSSWDYWHTPPCTGRYETSINICKMYISFVWKDGTT

SEQ ID NO: 859255 - protein, 132 aa, Homo sapiens; identical to SEQ ID NO: 859254

SEQ ID NO: 859256 - protein, 132 aa, Homo sapiens; identical to SEQ ID NO: 859254

SEQ ID NO: 859257 - protein, 105 aa, Homo sapiens; identical to SEQ ID NO: 859253

SEQ ID NO: 859258 - protein, 105 aa, Homo sapiens; identical to SEQ ID NO: 859253

SEQ ID NO: 859259 - protein, 115 aa, Homo sapiens
AGITGVSHHTRPNKWNFSWTSSLLVMWEELGLCSKSAGIFLITQDFTCELDQPLLLSLSRSGHVWQPGLHNEDFHNLVFIYLFSFCPNDEGGSLHLAPWGQAETVCALPSYRDQI

SEQ ID NO: 859260 - protein, 105 aa, Homo sapiens; identical to SEQ ID NO: 859253

SEQ ID NO: 859261 - protein, 105 aa, Homo sapiens; identical to SEQ ID NO: 859253

SEQ ID NO: 859262 - protein, 132 aa, Homo sapiens; identical to SEQ ID NO: 859254

SEQ ID NO: 859263 - protein, 132 aa, Homo sapiens; identical to SEQ ID NO: 859254

SEQ ID NO: 859264 - protein, 132 aa, Homo sapiens; identical to SEQ ID NO: 859254

SEQ ID NO: 859265 - protein, 104 aa, Homo sapiens
MSSCWSRVDSEPSGTSVLIKKREIWTHTEQRPPCEDGGRDRRDAATRHKCLGLPETTRSLPQRLQQEHGSANTLILVFQPPERFPKIPFSTGVWCKMRHIFHGW

SEQ ID NO: 859266 - protein, 333 aa, Homo sapiens
MACSRPPSQCEPTSLPPGPPAGRRHLPLSRRRREMSSNKEQRSAVFVILFALITILILYSSNSANEVFHYGSLRGRSRRPVNLKKWSITDGYVPILGNKTLPSRCHQCVIVSSSSHLLGTKLGPEIERAECTIRMNDAPTTGYSADVGNKTTYRVVAHSSVFRVLRRPQEFVNRTPETVFIFWGPPSKMQKPQGSLVRVIQRAGLVFPNMEAYAVSPGRMRQFDDLFRGETGKDREKSHSWLSTGWFTMVIAVELCDHVHVYGMVPPNYCSQRPRLQRMPYHYYEPKGPDECVTYIQNEHSRKGNHHRFITEKRVFSSWAQLYGITFSHPSWT

SEQ ID NO: 859267 - protein, 299 aa, Homo sapiens
MSSNKEQRSAVFVILFALITILILYSSNSANEVFHYGSLRGRSRRPVNLKKWSITDGYVPILGNKTLPSRCHQCVIVSSSSHLLGTKLGPEIERAECTIRMNDAPTTGYSADVGNKTTYRVVAHSSVFRVLRRPQEFVNRTPETVFIFWGPPSKMQKPQGSLVRVIQRAGLVFPNMEAYAVSPGRMRQFDDLFRGETGKDREKSHSWLSTGWFTMVIAVELCDHVHVYGMVPPNYCSQRPRLQRMPYHYYEPKGPDECVTYIQNEHSRKGNHHRFITEKRVFSSWAQLYGITFSHPSWT

SEQ ID NO: 859268 - protein, 299 aa, Homo sapiens; identical to SEQ ID NO: 859267

SEQ ID NO: 859269 - protein, 333 aa, Homo sapiens; identical to SEQ ID NO: 859266

SEQ ID NO: 859270 - protein, 199 aa, Homo sapiens [sequence omitted]

SEQ ID NO: 859271 - protein, 333 aa, Homo sapiens; identical to SEQ ID NO: 859266

SEQ ID NO: 859272 - protein, 333 aa, Homo sapiens; identical to SEQ ID NO: 859266

SEQ ID NO: 859273 - protein, 333 aa, Homo sapiens; identical to SEQ ID NO: 859266

SEQ ID NO: 859274 - protein, 299 aa, Homo sapiens; identical to SEQ ID NO: 859267

SEQ ID NO: 859275 - protein, 333 aa, Homo sapiens; identical to SEQ ID NO: 859266

SEQ ID NO: 859276 - protein, 199 aa, Homo sapiens [sequence omitted]

SEQ ID NO: 859277 - protein, 333 aa, Homo sapiens; identical to SEQ ID NO: 859266

SEQ ID NO: 859278 - protein, 235 aa, Homo sapiens
MACSRPPSQCEPTSLPPGPPAGRRHLPLSRRRREMSSNKEQRSAVFVILFALITILILYSSNSANEVFHYGSLRGRSRRPVNLKKWSITDGYVPILGNKTLPSRCHQCVIVSSSSHLLGTKLGPEIERAECTIRMNDAPTTGYSADVGNKTTYRVVAHSSVFRVLRRPQEFVNRTPETVFIFWGPPSKMQKPQGSLVRVIQRAGLVFPNMEAYAVSPGRMRQFDDLFRGRSLIRG

SEQ ID NO: 859279 - protein, 201 aa, Homo sapiens [sequence omitted]

SEQ ID NO: 859280 - protein, 106 aa, Homo sapiens
MSPFSATREKSHSWLSTGWFTMVIAVELCDHVHVYGMVPPNYCSQRPRLQRMPYHYYEPKGPDECVTYIQNEHSRKGNHHRFITEKRVFSSWAQLYGITFSHPSWT

SEQ ID NO: 859281 - protein, 212 aa, Homo sapiens
MPLLGLLPRRAWASLLSQLLRPPCASCTGAVRCQSQVAEAVLTSQLKAHQEKPNFIIKTPKGTRDLSPQHMVVREKILDLVISCFKRHGAKGMDTPAFELKETLTEKYGEDSGLMYDLKDQGGELLSLRYDLTVPFARYLAMNKVKKMKRYHVGKVWRRESPTIVQGRYREFCQCDFDIAGQFDPMIPDAECLKIMCEILSGLQLGDFLIKK

SEQ ID NO: 859282 - protein, 473 aa, Homo sapiens
MPLLGLLPRRAWASLLSQLLRPPCASCTGAVRCQSQVAEAVLTSQLKAHQEKPNFIIKTPKGTRDLSPQHMVVREKILDLVISCFKRHGAKGMDTPAFELKETLTEKYGEDSGLMYDLKDQGGELLSLRYDLTVPFARYLAMNKVKKMKRYHVGKVWRRESPTIVQGRYREFCQCDFDIAGQFDPMIPDAECLKIMCEILSGLQLGDFLIKMAWKDVRHEMVVKKGLAPEVADRIGDYVQCHGGVSLVEQMFQDPRLSQNKQALEGLGDLKLLFEYLTLFGIADKISFDLSLARGLDYYTGVIYEAVLLQTPTQAGEEPLNVGSVAAGGRYDGLVGMFDPKGHKVPCVGLSIGVERIFYIVEQRMKTKGEKVRTTETQVFVATPQKNFLQERLKLIAELWDSGIKAEMLYKNNPKLLTQLHYCESTGIPLVVIIGEQELKEGVIKIRSVASREEVAIKRENFVAEIQKRLSES

SEQ ID NO: 859283 - protein, 541 aa, Homo sapiens
MPLLGLLPRRAWASLLSQLLRPPCASCTGAVRCQSQVAEAVLTSQLKAHQEKPNFIIKTPKGTRDLSPQHMVVREKILDLVISCFKRHGAKGMDTPAFELKETLTEKYGEDSGLMYDLKDQGGELLSLRYDLTVPFARYLAMNKVKKMKRYHVGKVWRRESPTIVQGRYREFCQCVSDLMGAAQFDSSRGHNLETGWIMDVFSHLFLCCEDFDIAGQFDPMIPDAECLKIMCEILSGLQLGDFLIKVNDRRIVDGMFAVCGVPESKFRAICSSIDKLDKMAWKDVRHEMVVKKGLAPEVADRIGDYVQCHGGVSLVEQMFQDPRLSQNKQALEGLGDLKLLFEYLTLFGIADKISFDLSLARGLDYYTGVIYEAVLLQTPTQAGEEPLNVGSVAAGGRYDGLVGMFDPKGHKVPCVGLSIGVERIFYIVEQRMKTKGEKVRTTETQVFVATPQKNFLQERLKLIAELWDSGIKAEMLYKNNPKLLTQLHYCESTGIPLVVIIGEQELKEGVIKIRSVASREEVAIKRENFVAEIQKRLSES

SEQ ID NO: 859284 - protein, 307 aa, Homo sapiens
LQALGSLTLSSQVNDRRIVDGMFAVCGVPESKFRAICSSIDKLDKMAWKDVRHEMVVKKGLAPEVADRIGDYVQCHGGVSLVEQMFQDPRLSQNKQALEGLGDLKLLFEYLTLFGIADKISFDLSLARGLDYYTGVIYEAVLLQTPTQAGEEPLNVGSVAAGGRYDGLVGMFDPKGHKVPCVGLSIGVERIFYIVEQRMKTKGEKVRTTETQVFVATPQKNFLQERLKLIAELWDSGIKAEMLYKNNPKLLTQLHYCESTGIPLVVIIGEQELKEGVIKIRSVASREEVAIKRENFVAEIQKRLSES

SEQ ID NO: 859285 - protein, 251 aa, Homo sapiens
MPLLGLLPRRAWASLLSQLLRPPCASCTGAVRCQSQVAEAVLTSQLKAHQEKPNFIIKTPKGTRDLSPQHMVVREKILDLVISCFKRHGAKGMDTPAFELKETLTEKYGEDSGLMYDLKDQGGELLSLRYDLTVPFARYLAMNKVKKMKRYHVGKVWRRESPTIVQGRYREFCQCDFDIAGQFDPMIPDAECLKIMCEILSGLQLGDFLIKVNDRRIVDGMFAVCGVPESKFRAICSSIDKLDKRLRILNH

SEQ ID NO: 859286 - protein, 506 aa, Homo sapiens
MPLLGLLPRRAWASLLSQLLRPPCASCTGAVRCQSQVAEAVLTSQLKAHQEKPNFIIKTPKGTRDLSPQHMVVREKILDLVISCFKRHGAKGMDTPAFELKETLTEKYGEDSGLMYDLKDQGGELLSLRYDLTVPFARYLAMNKVKKMKRYHVGKVWRRESPTIVQGRYREFCQCDFDIAGQFDPMIPDAECLKIMCEILSGLQLGDFLIKVNDRRIVDGMFAVCGVPESKFRAICSSIDKLDKMAWKDVRHEMVVKKGLAPEVADRIGDYVQCHGGVSLVEQMFQDPRLSQNKQALEGLGDLKLLFEYLTLFGIADKISFDLSLARGLDYYTGVIYEAVLLQTPTQAGEEPLNVGSVAAGGRYDGLVGMFDPKGHKVPCVGLSIGVERIFYIVEQRMKTKGEKVRTTETQVFVATPQKNFLQERLKLIAELWDSGIKAEMLYKNNPKLLTQLHYCESTGIPLVVIIGEQELKEGVIKIRSVASREEVAIKRENFVAEIQKRLSES

SEQ ID NO: 859287 - protein, 509 aa, Homo sapiens
LWLPVAQGEESLQVGGQQGQRCHRSGQCPEKPHLTFILLVAEAVLTSQLKAHQEKPNFIIKTPKGTRDLSPQHMVVREKILDLVISCFKRHGAKGMDTPAFELKETLTEKYGEDSGLMYDLKDQGGELLSLRYDLTVPFARYLAMNKVKKMKRYHVGKVWRRESPTIVQGRYREFCQCDFDIAGQFDPMIPDAECLKIMCEILSGLQLGDFLIKVNDRRIVDGMFAVCGVPESKFRAICSSIDKLDKMAWKDVRHEMVVKKGLAPEVADRIGDYVQCHGGVSLVEQMFQDPRLSQNKQALEGLGDLKLLFEYLTLFGIADKISFDLSLARGLDYYTGVIYEAVLLQTPTQAGEEPLNVGSVAAGGRYDGLVGMFDPKGHKVPCVGLSIGVERIFYIVEQRMKTKGEKVRTTETQVFVATPQKNFLQERLKLIAELWDSGIKAEMLYKNNPKLLTQLHYCESTGIPLVVIIGEQELKEGVIKIRSVASREEVAIKRENFVAEIQKRLSES

SEQ ID NO: 859288 - protein, 582 aa, Homo sapiens
FRLLPEVPKLATKGTWEDPTSAFVTSEAFCSCPGKPASCRAMPLLGLLPRRAWASLLSQLLRPPCASCTGAVRCQSQVAEAVLTSQLKAHQEKPNFIIKTPKGTRDLSPQHMVVREKILDLVISCFKRHGAKGMDTPAFELKETLTEKYGEDSGLMYDLKDQGGELLSLRYDLTVPFARYLAMNKVKKMKRYHVGKVWRRESPTIVQGRYREFCQCVSDLMGAAQFDSSRGHNLETGWIMDVFSHLFLCCEDFDIAGQFDPMIPDAECLKIMCEILSGLQLGDFLIKVNDRRIVDGMFAVCGVPESKFRAICSSIDKLDKMAWKDVRHEMVVKKGLAPEVADRIGDYVQCHGGVSLVEQMFQDPRLSQNKQALEGLGDLKLLFEYLTLFGIADKISFDLSLARGLDYYTGVIYEAVLLQTPTQAGEEPLNVGSVAAGGRYDGLVGMFDPKGHKVPCVGLSIGVERIFYIVEQRMKTKGEKVRTTETQVFVATPQKNFLQERLKLIAELWDSGIKAEMLYKNNPKLLTQLHYCESTGIPLVVIIGEQELKEGVIKIRSVASREEVAIKRENFVAEIQKRLSES

SEQ ID NO: 859289 - protein, 506 aa, Homo sapiens; identical to SEQ ID NO: 859286

SEQ ID NO: 859290 - protein, 1816 aa, Homo sapiens
MALSSAWRSVLPLWLLWSAACSRAASGDDNAFPFDIEGSSAVGRQDPPETSEPRVALGRLPPAAEKCNAGFFHTLSGECVPCDCNGNSNECLDGSGYCVHCQRNTTGEHCEKCLDGYIGDSIRGAPQFCQPCPCPLPHLANFAESCYRKNGAVRCICNENYAGPNCERCAPGYYGNPLLIGSTCKKCDCSGNSDPNLIFEDCDEVTGQCRNCLRNTTGFKCERCAPGYYGDARIAKNCAVCNCGGGPCDSVTGECLEEGFEPPTGCDKCVWDLTDDLRLAALSIEEGKSGVLSVSSGAAAHRHVNEINATIYLLKTKLSERENQYALRKIQINNAENTMKSLLSDVEELVEKENQASRKGQLVQKESMDTINHASQLVEQAHDMRDKIQEINNKMLYYGEEHELSPKEISEKLVLAQKMLEEIRSRQPFFTQRELVDEEADEAYELLSQAESWQRLHNETRTLFPVVLEQLDDYNAKLSDLQEALDQALNHVRDAEDMNRATAARQRDHEKQQERVREQMEVVNMSLSTSADSLTTPRLTLSELDDIIKNASGIYAEIDGAKSELQVKLSNLSNLSHDLVQEAIDHAQDLQQEANELSRKLHSSDMNGLVQKALDASNVYENIVNYVSEANETAEFALNTTDRIYDAVSGIDTQIIYHKDESENLLNQARELQAKAESSSDEAVADTSRRVGGALARKSALKTRLSDAVKQLQAAERGDAQQRLGQSRLITEEANRTTMEVQQATAPMANNLTNWSQNLQHFDSSAYNTAVNSARDAVRNLTEVVPQLLDQLRTVEQKRPASNVSASIQRIRELIAQTRSVASKIQVSMMFDGQSAVEVHSRTSMDDLKAFTSLSLYMKPPVKRPELTETADQFILYLGSKNAKKEYMGLAIKNDNLVYVYNLGTKDVEIPLDSKPVSSWPAYFSIVKIERVGKHGKVFLTVPSLSSTAEEKFIKKGEFSGDDSLLDLDPEDTVFYVGGVPSNFKLPTSLNLPGFVGCLELATLNNDVISLYNFKHIYNMDPSTSVPCARDKLAFTQSRAASYFFDGSGYAVVRDITRRGKFGQVTRFDIEVRTPADNGLILLMVNGSMFFRLEMRNGYLHVFYDFGFSSGRVHLEDTLKKAQINDAKYHEISIIYHNDKKMILVVDRRHVKSMDNEKMKIPFTDIYIGGAPPEILQSRALRAHLPLDINFRGCMKGFQFQKKDFNLLEQTETLGVGYGCPEDSLISRRAYFNGQSFIASIQKISFFDGFEGGFNFRTLQPNGLLFYYASGSDVFSISLDNGTVIMDVKGIKVQSVDKQYNDGLSHFVISSVSPTRYELIVDKSRVGSKNPTKGKIEQTQASEKKFYFGGSPISAQYANFTGCISNAYFTRVDRDVEVEDFQRYTEKVHTSLYECPIESSPLFLLHKKGKNLSKPKASQNKKGGKSKDAPSWDPVALKLPERNTPRNSHCHLSNSPRAIEHAYQYGGTANSRQEFEHLKGDFGAKSQFSIRLRTRSSHGMIFYVSDQEENDFMTLFLAHGRLVYMFNVGHKKLKIRSQEKYNDGLWHDVIFIRERSSGRLVIDGLRVLEESLPPTEATWKIKGPIYLGGVAPGKAVKNVQINSIYSFSGCLSNLQLNGASITSASQTFSVTPCFEGPMETGTYFSTEGGYVVLDESFNIGLKFEIAFEVRPRSSSGTLVHGHSVNGEYLNVHMKNGQVIVKVNNGIRDFSTSVTPKQSLCDGRWHRITVIRDSNVVQLDVDSEVNHVVGPLNPKPIDHREPVFVGGVPESLLTPRLAPSKPFTGCIRHFVIDGHPVSFSKAALVSGAVSINSCPAA

SEQ ID NO: 859291 - protein, 129 aa, Homo sapiens
MALSSAWRSVLPLWLLWSAACSRAASGDDNAFPFDIEGSSAVGRQDPPETSEPRVALGRLPPAAEKCNAGFFHTLSGECVPCDCNGNSNECLDGSGYCVTTDGEDPGFSASALSFILSSQGAREARAPT

SEQ ID NO: 859292 - protein, 1816 aa, Homo sapiens; identical to SEQ ID NO: 859290

SEQ ID NO: 859293 - protein, 1211 aa, Homo sapiens
MNGLVQKALDASNVYENIVNYVSEANETAEFALNTTDRIYDAVSGIDTQIIYHKDESENLLNQARELQAKAESSSDEAVADTSRRVGGALARKSALKTRLSDAVKQLQAAERGDAQQRLGQSRLITEEANRTTMEVQQATAPMANNLTNWSQNLQHFDSSAYNTAVNSARDAVRNLTEVVPQLLDQLRTVEQKRPASNVSASIQRIRELIAQTRSVASKIQVSMMFDGQSAVEVHSRTSMDDLKAFTSLSLYMKPPVKRPELTETADQFILYLGSKNAKKEYMGLAIKNDNLVYVYNLGTKDVEIPLDSKPVSSWPAYFSIVKIERVGKHGKVFLTVPSLSSTAEEKFIKKGEFSGDDSLLDLDPEDTVFYVGGVPSNFKLPTSLNLPGFVGCLELATLNNDVISLYNFKHIYNMDPSTSVPCARDKLAFTQSRAASYFFDGSGYAVVRDITRRGKFGQVTRFDIEVRTPADNGLILLMVNGSMFFRLEMRNGYLHVFYDFGFSSGRVHLEDTLKKAQINDAKYHEISIIYHNDKKMILVVDRRHVKSMDNEKMKIPFTDIYIGGAPPEILQSRALRAHLPLDINFRGCMKGFQFQKKDFNLLEQTETLGVGYGCPEDSLISRRAYFNGQSFIASIQKISFFDGFEGGFNFRTLQPNGLLFYYASGSDVFSISLDNGTVIMDVKGIKVQSVDKQYNDGLSHFVISSVSPTRYELIVDKSRVGSKNPTKGKIEQTQASEKKFYFGGSPISAQYANFTGCISNAYFTRVDRDVEVEDFQRYTEKVHTSLYECPIESSPLFLLHKKGKNLSKPKASQNKKGGKSKDAPSWDPVALKLPERNTPRNSHCHLSNSPRAIEHAYQYGGTANSRQEFEHLKGDFGAKSQFSIRLRTRSSHGMIFYVSDQEENDFMTLFLAHGRLVYMFNVGHKKLKIRSQEKYNDGLWHDVIFIRERSSGRLVIDGLRVLEESLPPTEATWKIKGPIYLGGVAPGKAVKNVQINSIYSFSGCLSNLQLNGASITSASQTFSVTPCFEGPMETGTYFSTEGGYVVLDESFNIGLKFEIAFEVRPRSSSGTLVHGHSVNGEYLNVHMKNGQVIVKVNNGIRDFSTSVTPKQSLCDGRWHRITVIRDSNVVQLDVDSEVNHVVGPLNPKPIDHREPVFVGGVPESLLTPRLAPSKPFTGCIRHFVIDGHPVSFSKAALVSGAVSINSCPAA

SEQ ID NO: 859294 - protein, 1092 aa, Homo sapiens
IQARLTTLTGNAITSDIQTATAPMANNLTNWSQNLQHFDSSAYNTAVNSARDAVRNLTEVVPQLLDQLRTVEQKRPASNVSASIQRIRELIAQTRSVASKIQVSMMFDGQSAVEVHSRTSMDDLKAFTSLSLYMKPPVKRPELTETADQFILYLGSKNAKKEYMGLAIKNDNLVYVYNLGTKDVEIPLDSKPVSSWPAYFSIVKIERVGKHGKVFLTVPSLSSTAEEKFIKKGEFSGDDSLLDLDPEDTVFYVGGVPSNFKLPTSLNLPGFVGCLELATLNNDVISLYNFKHIYNMDPSTSVPCARDKLAFTQSRAASYFFDGSGYAVVRDITRRGKFGQVTRFDIEVRTPADNGLILLMVNGSMFFRLEMRNGYLHVFYDFGFSSGRVHLEDTLKKAQINDAKYHEISIIYHNDKKMILVVDRRHVKSMDNEKMKIPFTDIYIGGAPPEILQSRALRAHLPLDINFRGCMKGFQFQKKDFNLLEQTETLGVGYGCPEDSLISRRAYFNGQSFIASIQKISFFDGFEGGFNFRTLQPNGLLFYYASGSDVFSISLDNGTVIMDVKGIKVQSVDKQYNDGLSHFVISSVSPTRYELIVDKSRVGSKNPTKGKIEQTQASEKKFYFGGSPISAQYANFTGCISNAYFTRVDRDVEVEDFQRYTEKVHTSLYECPIESSPLFLLHKKGKNLSKPKASQNKKGGKSKDAPSWDPVALKLPERNTPRNSHCHLSNSPRAIEHAYQYGGTANSRQEFEHLKGDFGAKSQFSIRLRTRSSHGMIFYVSDQEENDFMTLFLAHGRLVYMFNVGHKKLKIRSQEKYNDGLWHDVIFIRERSSGRLVIDGLRVLEESLPPTEATWKIKGPIYLGGVAPGKAVKNVQINSIYSFSGCLSNLQLNGASITSASQTFSVTPCFEGPMETGTYFSTEGGYVVLDESFNIGLKFEIAFEVRPRSSSGTLVHGHSVNGEYLNVHMKNGQVIVKVNNGIRDFSTSVTPKQSLCDGRWHRITVIRDSNVVQLDVDSEVNHVVGPLNPKPIDHREPVFVGGVPESLLTPRLAPSKPFTGCIRHFVIDGHPVSFSKAALVSGAVSINSCPAA

SEQ ID NO: 859295 - protein, 1392 aa, Homo sapiens
MALSSAWRSVLPLWLLWSAACSRAASGDDNAFPFDIEGSSAVGRQDPPETSEPRVALGRLPPAAEKCNAGFFHTLSGECVPCDCNGNSNECLDGSGYCVHCQRNTTGEHCEKCLDGYIGDSIRGAPQFCQPCPCPLPHLANFAESCYRKNGAVRCICNENYAGPNCERCAPGYYGNPLLIGSTCKKCDCSGNSDPNLIFEDCDEVTGQCRNCLRNTTGFKCERCAPGYYGDARIAKNCAVCNCGGGPCDSVTGECLEEGFEPPTGMDCPTISCDKCVWDLTDDLRLAALSIEEGKSGVLSVSSGAAAHRHVNEINATIYLLKTKLSERENQYALRKIQINNAENTMKSLLSDVEELVEKENQASRKGQLVQKESMDTINHASQLVEQAHDMRDKIQEINNKMLYYGEEHELSPKEISEKLVLAQKMLEEIRSRQPFFTQRELVDEEADEAYELLSQAESWQRLHNETRTLFPVVLEQLDDYNAKLSDLQEALDQALNHVRDAEDMNRATAARQRDHEKQQERVREQMEVVNMSLSTSADSLTTPRLTLSELDDIIKNASGIYAEIDGAKSELQVKLSNLSNLSHDLVQEAIDHAQDLQQEANELSRKLHSSDMNGLVQKALDASNVYENIVNYVSEANETAEFALNTTDRIYDAVSGIDTQIIYHKDESENLLNQARELQAKAESSSDEAVADTSRRVGGALARKSALKTRLSDAVKQLQAAERGDAQQRLGQSRLITEEANRTTMEVQQATAPMANNLTNWSQNLQHFDSSAYNTAVNSARDAVRNLTEVVPQLLDQLRTVEQKRPASNVSASIQRIRELIAQTRSVASKIQVSMMFDGQSAVEVHSRTSMDDLKAFTSLSLYMKPPVKRPELTETADQFILYLGSKNAKKEYMGLAIKNDNLVYVYNLGTKDVEIPLDSKPVSSWPAYFSIVKIERVGKHGKVFLTVPSLSSTAEEKFIKKGEFSGDDSLLDLDPEDTVFYVGGVPSNFKLPTSLNLPGFVGCLELATLNNDVISLYNFKHIYNMDPSTSVPCARDKLAFTQSRAASYFFDGSGYAVVRDITRRGKFGQVTRFDIEVRTPADNGLILLMVNGSMFFRLEMRNGYLHVFYDFGFSSGRVHLEDTLKKAQINDAKYHEISIIYHNDKKMILVVDRRHVKSMDNEKMKIPFTDIYIGGAPPEILQSRALRAHLPLDINFRGCMKGFQFQKKDFNLLEQTETLGVGYGCPEDSLISRRAYFNGQSFIASIQKISFFDGFEGGFNFRTLQPNGLLFYYASGSDVFSISLDNGTVIMDVKGIKVQSVDKQYNDGLSHFVISSVSPTRYELIVDKSRVGSKNPTKGKIEQTQASEKKFYFGGSPISAQYANFTGCISNAYFTREGKVKMHLHGILLL

SEQ ID NO: 859296 - protein, 657 aa, Homo sapiens
MALSSAWRSVLPLWLLWSAACSRAASGDDNAFPFDIEGSSAVGRQDPPETSEPRVALGRLPPAAEKCNAGFFHTLSGECVPCDCNGNSNECLDGSGYCVHCQRNTTGEHCEKCLDGYIGDSIRGAPQFCQPCPCPLPHLANFAESCYRKNGAVRCICNENYAGPNCERCAPGYYGNPLLIGSTCKKCDCSGNSDPNLIFEDCDEVTGQCRNCLRNTTGFKCERCAPGYYGDARIAKNCAVCNCGGGPCDSVTGECLEEGFEPPTGMDCPTISCDKCVWDLTDDLRLAALSIEEGKSGVLSVSSGAAAHRHVNEINATIYLLKTKLSERENQYALRKIQINNAENTMKSLLSDVEELVEKENQASRKGQLVQKESMDTINHASQLVEQAHDMRDKIQEINNKMLYYGEEHELSPKEISEKLVLAQKMLEEIRSRQPFFTQRELVDEEADEAYELLSQAESWQRLHNETRTLFPVVLEQLDDYNAKLSDLQEALDQALNHVRDAEDMNRATAARQRDHEKQQERVREQMEVVNMSLSTSADSLTTPRLTLSELDDIIKNASGIYAEIDGAKSELQVKLSNLSNLSHDLVQEAIDHAQDLQQEANELSRKLHSSDMNGLVQKALDASNVYENIVNYVSEANETAEFALNTTDRIYDVSIP

SEQ ID NO: 859297 - protein, 1692 aa, Homo sapiens
MALSSAWRSVLPLWLLWSAACSRAASGDDNAFPFDIEGSSAVGRQDPPETSEPRVALGRLPPAAEKCNAGFFHTLSGECVPCDCNGNSNECLDGSGYCVHCQRNTTGEHCEKCLDGYIGDSIRGAPQFCQPCPCPLPHLANFAESCYRKNGAVRCICNENYAGPNCERCAPGYYGNPLLIGSTCKKCDCSGNSDPNLIFEDCDEVTGQCRNCLRNTTGFKCERCAPGYYGDARIAKNCAVCNCGGGPCDSVTGECLEEGFEPPTGMDCPTISCDKCVWDLTDDLRLAALSIEEGKSGVLSVSSGAAAHRHVNEINATIYLLKTKLSERENQYALRKIQINNAENTMKSLLSDVEELVEKENQASRKGQLVQKESMDTINHASQLVEQAHDMRDKIQEINNKMLYYGEEHELSPKEISEKLVLAQKMLEEIRSRQPFFTQRELVDEEADEAYELLSQAESWQRLHNETRTLFPVVLEQLDDYNAKLSDLQEALDQALNHVRDAEDMNRATAARQRDHEKQQERVREQMEVVNMSLSTSADSLTTPRLTLSELDDIIKNASGIYAEIDGAKSELQVKLSNLSNLSHDLVQEAIDHAQDLQQEANELSRKLHSSDMNGLVQKALDASNVYENIVNYVSEANETAEFALNTTDRIYDAVSGIDTQIIYHKDESENLLNQARELQAKAESSSDEAVADTSRRVGGALARKSALKTRLSDAVKQLQAAERGDAQQRLGQSRLITEEANRTTMEVQQATAPMANNLTNWSQNLQHFDSSAYNTAVNSARDAVRNLTEVVPQLLDQLRTVEQKRPASNVSASIQRIRELIAQTRSVASKIQVSMMFDGQSAVEVHSRTSMDDLKAFTSLSLYMKPPVKRPELTETADQFILYLGSKNAKKEYMGLAIKNDNLVYVYNLGTKDVEIPLDSKPVSSWPAYFSIVKIERVGKHGKVFLTVPSLSSTAEEKFIKKGEFSGDDSLLDLDPEDTVFYVGGVPSNFKLPTSLNLPGFVGCLELATLNNDVISLYNFKHIYNMDPSTSVPCARDKLAFTQSRAASYFFDGSGYAVVRDITRRGKFGQVTRFDIEVRTPADNGLILLMVNGSMFFRLEMRNGYLHVFYDFGFSSGRVHLEDTLKKAQINDAKYHEISIIYHNDKKMILVVDRRHVKSMDNEKMKIPFTDIYIGGAPPEILQSRALRAHLPLDINFRGCMKGFQFQKKDFNLLEQTETLGVGYGCPEDSLISRRAYFNGQSFIASIQKISFFDGFEGGFNFRTLQPNGLLFYYASGSDVFSISLDNGTVIMDVKGIKVQSVDKQYNDGLSHFVISSVSPTRYELIVDKSRVGSKNPTKGKIEQTQASEKKFYFGGSPISAQYANFTGCISNAYFTRVDRDVEVEDFQRYTEKVHTSLYECPIESSPLFLLHKKGKNLSKPKASQNKKGGKSKDAPSWDPVALKLPERNTPRNSHCHLSNSPRAIEHAYQYGGTANSRQEFEHLKGDFGAKSQFSIRLRTRSSHGMIFYVSDQEENDFMTLFLAHGRLVYMFNVGHKKLKIRSQEKYNDGLWHDVIFIRERSSGRLVIDGLRVLEESLPPTEATWKIKGPIYLGGVAPGKAVKNVQINSIYSFSGCLSNLQLNGASITSASQTFSVTPCFEGPMETGTYFSTEGGYVVLDESFNIGLKFERNTKPARRNSNSSFGWKLSSS

SEQ ID NO: 859298 - protein, 1492 aa, Homo sapiens
MALSSAWRSVLPLWLLWSAACSRAASGDDNAFPFDIEGSSAVGRQDPPETSEPRVALGRLPPAAEKCNAGFFHTLSGECVPCDCNGNSNECLDGSGYCVHCQRNTTGEHCEKCLDGYIGDSIRGAPQFCQPCPCPLPHLANFAESCYRKNGAVRCICNENYAGPNCERCAPGYYGNPLLIGSTCKKCDCSGNSDPNLIFEDCDEVTGQCRNCLRNTTGFKCERCAPGYYGDARIAKNCAVCNCGGGPCDSVTGECLEEGFEPPTGMDCPTISCDKCVWDLTDDLRLAALSIEEGKSGVLSVSSGAAAHRHVNEINATIYLLKTKLSERENQYALRKIQINNAENTMKSLLSDVEELVEKENQASRKGQLVQKESMDTINHASQLVEQAHDMRDKIQEINNKMLYYGEEHELSPKEISEKLVLAQKMLEEIRSRQPFFTQRELVDEEADEAYELLSQAESWQRLHNETRTLFPVVLEQLDDYNAKLSDLQEALDQALNHVRDAEDMNRATAARQRDHEKQQERVREQMEVVNMSLSTSADSLTTPRLTLSELDDIIKNASGIYAEIDGAKSELQVKLSNLSNLSHDLVQEAIDHAQDLQQEANELSRKLHSSDMNGLVQKALDASNVYENIVNYVSEANETAEFALNTTDRIYDAVSGIDTQIIYHKDESENLLNQARELQAKAESSSDEAVADTSRRVGGALARKSALKTRLSDAVKQLQAAERGDAQQRLGQSRLITEEANRTTMEVQQATAPMANNLTNWSQNLQHFDSSAYNTAVNSARDAVRNLTEVVPQLLDQLRTVEQKRPASNVSASIQRIRELIAQTRSVASKIQVSMMFDGQSAVEVHSRTSMDDLKAFTSLSLYMKPPVKRPELTETADQFILYLGSKNAKKEYMGLAIKNDNLVYVYNLGTKDVEIPLDSKPVSSWPAYFSIVKIERVGKHGKVFLTVPSLSSTAEEKFIKKGEFSGDDSLLDLDPEDTVFYVGGVPSNFKLPTSLNLPGFVGCLELATLNNDVISLYNFKHIYNMDPSTSVPCARDKLAFTQSRAASYFFDGSGYAVVRDITRRGKFGQVTRFDIEVRTPADNGLILLMVNGSMFFRLEMRNGYLHVFYDFGFSSGRVHLEDTLKKAQINDAKYHEISIIYHNDKKMILVVDRRHVKSMDNEKMKIPFTDIYIGGAPPEILQSRALRAHLPLDINFRGCMKGFQFQKKDFNLLEQTETLGVGYGCPEDSLISRRAYFNGQSFIASIQKISFFDGFEGGFNFRTLQPNGLLFYYASGSDVFSISLDNGTVIMDVKGIKVQSVDKQYNDGLSHFVISSVSPTRYELIVDKSRVGSKNPTKGKIEQTQASEKKFYFGGSPISAQYANFTGCISNAYFTRVDRDVEVEDFQRYTEKVHTSLYECPIESSPLFLLHKKGKNLSKPKASQNKKGGKSKDAPSWDPVALKLPERNTPRNSHCHLSNSPRAIEHAYQYGGTANSRQEFEHLKGDFGAK

SEQ ID NO: 859299 - protein, 1333 aa, Homo sapiens
MALSSAWRSVLPLWLLWSAACSRAASGDDNAFPFDIEGSSAVGRQDPPETSEPRVALGRLPPAAEKCNAGFFHTLSGECVPCDCNGNSNECLDGSGYCVHCQRNTTGEHCEKCLDGYIGDSIRGAPQFCQPCPCPLPHLANFAESCYRKNGAVRCICNENYAGPNCERCAPGYYGNPLLIGSTCKKCDCSGNSDPNLIFEDCDEVTGQCRNCLRNTTGFKCERCAPGYYGDARIAKNCAVCNCGGGPCDSVTGECLEEGFEPPTGMDCPTISCDKCVWDLTDDLRLAALSIEEGKSGVLSVSSGAAAHRHVNEINATIYLLKTKLSERENQYALRKIQINNAENTMKSLLSDVEELVEKENQASRKGQLVQKESMDTINHASQLVEQAHDMRDKIQEINNKMLYYGEEHELSPKEISEKLVLAQKMLEEIRSRQPFFTQRELVDEEADEAYELLSQAESWQRLHNETRTLFPVVLEQLDDYNAKLSDLQEALDQALNHVRDAEDMNRATAARQRDHEKQQERVREQMEVVNMSLSTSADSLTTPRLTLSELDDIIKNASGIYAEIDGAKSELQVKLSNLSNLSHDLVQEAIDHAQDLQQEANELSRKLHSSDMNGLVQKALDASNVYENIVNYVSEANETAEFALNTTDRIYDAVSGIDTQIIYHKDESENLLNQARELQAKAESSSDEAVADTSRRVGGALARKSALKTRLSDAVKQLQAAERGDAQQRLGQSRLITEEANRTTMEVQQATAPMANNLTNWSQNLQHFDSSAYNTAVNSARDAVRNLTEVVPQLLDQLRTVEQKRPASNVSASIQRIRELIAQTRSVASKIQVSMMFDGQSAVEVHSRTSMDDLKAFTSLSLYMKPPVKRPELTETADQFILYLGSKNAKKEYMGLAIKNDNLVYVYNLGTKDVEIPLDSKPVSSWPAYFSIVKIERVGKHGKVFLTVPSLSSTAEEKFIKKGEFSGDDSLLDLDPEDTVFYVGGVPSNFKLPTSLNLPGFVGCLELATLNNDVISLYNFKHIYNMDPSTSVPCARDKLAFTQSRAASYFFDGSGYAVVRDITRRGKFGQVTRFDIEVRTPADNGLILLMVNGSMFFRLEMRNGYLHVFYDFGFSSGRVHLEDTLKKAQINDAKYHEISIIYHNDKKMILVVDRRHVKSMDNEKMKIPFTDIYIGGAPPEILQSRALRAHLPLDINFRGCMKGFQFQKKDFNLLEQTETLGVGYGCPEDSLISRRAYFNGQSFIASIQKISFFDGFEGGFNFRTLQPNGLLFYYASGSDVFSISLDNGTVIMDVKGIKVQSVDKQYNDGLSHFVISSVSPTRLNRIACRYPL

SEQ ID NO: 859300 - protein, 734 aa, Homo sapiens
MALSSAWRSVLPLWLLWSAACSRAASGDDNAFPFDIEGSSAVGRQDPPETSEPRVALGRLPPAAEKCNAGFFHTLSGECVPCDCNGNSNECLDGSGYCVHCQRNTTGEHCEKCLDGYIGDSIRGAPQFCQPCPCPLPHLANFAESCYRKNGAVRCICNENYAGPNCERCAPGYYGNPLLIGSTCKKCDCSGNSDPNLIFEDCDEVTGQCRNCLRNTTGFKCERCAPGYYGDARIAKNCAVCNCGGGPCDSVTGECLEEGFEPPTGMDCPTISCDKCVWDLTDDLRLAALSIEEGKSGVLSVSSGAAAHRHVNEINATIYLLKTKLSERENQYALRKIQINNAENTMKSLLSDVEELVEKENQASRKGQLVQKESMDTINHASQLVEQAHDMRDKIQEINNKMLYYGEEHELSPKEISEKLVLAQKMLEEIRSRQPFFTQRELVDEEADEAYELLSQAESWQRLHNETRTLFPVVLEQLDDYNAKLSDLQEALDQALNHVRDAEDMNRATAARQRDHEKQQERVREQMEVVNMSLSTSADSLTTPRLTLSELDDIIKNASGIYAEIDGAKSELQVKLSNLSNLSHDLVQEAIDHAQDLQQEANELSRKLHSSDMNGLVQKALDASNVYENIVNYVSEANETAEFALNTTDRIYDAVSGIDTQIIYHKDESENLLNQARELQAKAESSSDEAVADTSRRVGGALARKSALKTQLSSDLYNQAIPIRVDLEGGHYPM

SEQ ID NO: 859301 - protein, 277 aa, Homo sapiens [sequence omitted]

SEQ ID NO: 859302 - protein, 230 aa, Homo sapiens
MALSSAWRSVLPLWLLWSAACSRAASGDDNAFPFDIEGSSAVGRQDPPETSEPRVALGRLPPAAEKCNAGFFHTLSGECVPCDCNGNSNECLDGSGYCVHCQRNTTGEHCEKCLDGYIGDSIRGAPQFCQPCPCPLPHLANFAESCYRKNGAVRCICNENYAGPNCERPSPQSTRGFPLNDSKSNAGFFHTLSGECVPCDCNGNSNECLDRLQDTVCTARRTQQETTVKS

SEQ ID NO: 859303 - protein, 166 aa, Homo sapiens
MDTINHASQLVEQAHDMRDKIQEINNKMLYYGEEHELSPKEISEKLVLAQKMLEEIRSRQPFFTQRELVDEEADEAYELLSQAESWQRLHNETRTLFPVVLEQLDDYNAKLSDLQEALDQALNHVRDAEDMNRATAARQRDHEVQRTLTINAFQHQQCDGTPRRGC

SEQ ID NO: 859304 - protein, 515 aa, Homo sapiens
MLALWYVKKPFSFDRYELIVDKSRVGSKNPTKGKIEQTQASEKKFYFGGSPISAQYANFTGCISNAYFTRVDRDVEVEDFQRYTEKVHTSLYECPIESSPLFLLHKKGKNLSKPKASQNKKGGKSKDAPSWDPVALKLPERNTPRNSHCHLSNSPRAIEHAYQYGGTANSRQEFEHLKGDFGAKSQFSIRLRTRSSHGMIFYVSDQEENDFMTLFLAHGRLVYMFNVGHKKLKIRSQEKYNDGLWHDVIFIRERSSGRLVIDGLRVLEESLPPTEATWKIKGPIYLGGVAPGKAVKNVQINSIYSFSGCLSNLQLNGASITSASQTFSVTPCFEGPMETGTYFSTEGGYVVLDESFNIGLKFEIAFEVRPRSSSGTLVHGHSVNGEYLNVHMKNGQVIVKVNNGIRDFSTSVTPKQSLCDGRWHRITVIRDSNVVQLDVDSEVNHVVGPLNPKPIDHREPVFVGGVPESLLTPRLAPSKPFTGCIRHFVIDGHPVSFSKAALVSGAVSINSCPAA

SEQ ID NO: 859305 - protein, 179 aa, Homo sapiens
METGTYFSTEGGYVVLDESFNIGLKFEIAFEVRPRSSSGTLVHGHSVNGEYLNVHMKNGQVIVKVNNGIRDFSTSVTPKQSLCDGRWHRITVIRDSNVVQLDVDSEVNHVVGPLNPKPIDHREPVFVGGVPESLLTPRLAPSKPFTGCIRHFVIDGHPVSFSKAALVSGAVSINSCPAA

SEQ ID NO: 859306 - protein, 1692 aa, Homo sapiens
MALSSAWRSVLPLWLLWSAACSRAASGDDNAFPFDIEGSSAVGRQDPPETSEPRVALGRLPPAAEKCNAGFFHTLSGECVPCDCNGNSNECLDGSGYCVHCQRNTTGEHCEKCLDGYIGDSIRGAPQFCQPCPCPLPHLANFAESCYRKNGAVRCICNENYAGPNCERCAPGYYGNPLLIGSTCKKCDCSGNSDPNLIFEDCDEVTGQCRNCLRNTTGFKCERCAPGYYGDARIAKNCAVCNCGGGPCDSVTGECLEEGFEPPTGMDCPTISCDKCVWDLTDDLRLAALSIEEGKSGVLSVSSGAAAHRHVNEINATIYLLKTKLSERENQYALRKIQINNAENTMKSLLSDVEELVEKENQASRKGQLVQKESMDTINHASQLVEQAHDMRDKIQEINNKMLYYGEEHELSPKEISEKLVLAQKMLEEIRSRQPFFTQRELVDEEADEAYELLSQAESWQRLHNETRTLFPVVLEQLDDYNAKLSDLQEALDQALNHVRDAEDMNRATAARQRDHEKQQERVREQMEVVNMSLSTSADSLTTPRLTLSELDDIIKNASGIYAEIDGAKSELQVKLSNLSNLSHDLVQEAIDHAQDLQQEANELSRKLHSSDMNGLVQKALDASNVYENIVNYVSEANETAEFALNTTDRIYDAVSGIDTQIIYHKDESENLLNQARELQAKAESSSDEAVADTSRRVGGALARKSALKTRLSDAVKQLQAAERGDAQQRLGQSRLITEEANRTTMEVQQATAPMANNLTNWSQNLQHFDSSAYNTAVNSARDAVRNLTEVVPQLLDQLRTVEQKRPASNVSASIQRIRELIAQTRSVASKIQVSMMFDGQSAVEVHSRTSMDDLKAFTSLSLYMKPPVKRPELTETADQFILYLGSKNAKKEYMGLAIKNDNLVYVYNLGTKDVEIPLDSKPVSSWPAYFSIVKIERVGKHGKVFLTVPSLSSTAEEKFIKKGEFSGDDSLLDLDPEDTVFYVGGVPSNFKLPTSLNLPGFVGCLELATLNNDVISLYNFKHIYNMDPSTSVPCARDKLAFTQSRAASYFFDGSGYAVVRDITRRGKFGQVTRFDIEVRTPADNGLILLMVNGSMFFRLEMRNGYLHVFYDFGFSSGRVHLEDTLKKAQINDAKYHEISIIYHNDKKMILVVDRRHVKSMDNEKMKIPFTDIYIGGAPPEILQSRALRAHLPLDINFRGCMKGFQFQKKDFNLLEQTETLGVGYGCPEDSLISRRAYFNGQSFIASIQKISFFDGFEGGFNFRTLQPNGLLFYYASGSDVFSISLDNGTVIMDVKGIKVQSVDKQYNDGLSHFVISSVSPTRYELIVDKSRVGSKNPTKGKIEQTQASEKKFYFGGSPISAQYANFTGCISNAYFTRVDRDVEVEDFQRYTEKVHTSLYECPIESSPLFLLHKKGKNLSKPKASQNKKGGKSKDAPSWDPVALKLPERNTPRNSHCHLSNSPRAIEHAYQYGGTANSRQEFEHLKGDFGAKSQFSIRLRTRSSHGMIFYVSDQEENDFMTLFLAHGRLVYMFNVGHKKLKIRSQEKYNDGLWHDVIFIRERSSGRLVIDGLRVLEESLPPTEATWKIKGPIYLGGVAPGKAVKNVQINSIYSFSGCLSNLQLNGASITSASQTFSVTPCFEGPMETGTYLPSGGSFHRVEQDLNESSGTGYFLFLIWILNLESKVSAMDNN

SEQ ID NO: 859307 - protein, 1145 aa, Homo sapiens
MALSSAWRSVLPLWLLWSAACSRAASGDDNAFPFDIEGSSAVGRQDPPETSEPRVALGRLPPAAEKCNAGFFHTLSGECVPCDCNGNSNECLDGSGYCVHCQRNTTGEHCEKCLDGYIGDSIRGAPQFCQPCPCPLPHLANFAESCYRKNGAVRCICNENYAGPNCERCAPGYYGNPLLIGSTCKKCDCSGNSDPNLIFEDCDEVTGQCRNCLRNTTGFKCERCAPGYYGDARIAKNCAVCNCGGGPCDSVTGECLEEGFEPPTGMDCPTISCDKCVWDLTDDLRLAALSIEEGKSGVLSVSSGAAAHRHVNEINATIYLLKTKLSERENQYALRKIQINNAENTMKSLLSDVEELVEKENQASRKGQLVQKESMDTINHASQLVEQAHDMRDKIQEINNKMLYYGEEHELSPKEISEKLVLAQKMLEEIRSRQPFFTQRELVDEEADEAYELLSQAESWQRLHNETRTLFPVVLEQLDDYNAKLSDLQEALDQALNHVRDAEDMNRATAARQRDHEKQQERVREQMEVVNMSLSTSADSLTTPRLTLSELDDIIKNASGIYAEIDGAKSELQVKLSNLSNLSHDLVQEAIDHAQDLQQEANELSRKLHSSDMNGLVQKALDASNVYENIVNYVSEANETAEFALNTTDRIYDAVSGIDTQIIYHKDESENLLNQARELQAKAESSSDEAVADTSRRVGGALARKSALKTRLSDAVKQLQAAERGDAQQRLGQSRLITEEANRTTMEVQQATAPMANNLTNWSQNLQHFDSSAYNTAVNSARDAVRNLTEVVPQLLDQLRTVEQKRPASNVSASIQRIRELIAQTRSVASKIQVSMMFDGQSAVEVHSRTSMDDLKAFTSLSLYMKPPVKRPELTETADQFILYLGSKNAKKEYMGLAIKNDNLVYVYNLGTKDVEIPLDSKPVSSWPAYFSIVKIERVGKHGKVFLTVPSLSSTAEEKFIKKGEFSGDDSLLDLDPEDTVFYVGGVPSNFKLPTSLNLPGFVGCLELATLNNDVISLYNFKHIYNMDPSTSVPCARDKLAFTQSRAASYFFDGSGYAVVRDITRRGKFGQVTRFDIEVRTPADNGLILLMVNGSMFFRLEMRNGYLHVFYDFGFRWCAHHLSPKVVPEKEVNRMLTPSEFLKEV

SEQ ID NO: 859308 - protein, 367 aa, Homo sapiens
MALSSAWRSVLPLWLLWSAACSRAASGDDNAFPFDIEGSSAVGRQDPPETSEPRVALGRLPPAAEKCNAGFFHTLSGECVPCDCNGNSNECLDGSGYCVHCQRNTTGEHCEKCLDGYIGDSIRGAPQFCQPCPCPLPHLANFAESCYRKNGAVRCICNENYAGPNCERCAPGYYGNPLLIGSTCKKCDCSGNSDPNLIFEDCDEVTGQCRNCLRNTTGFKCERCAPGYYGDARIAKNCAVCNCGGGPCDSVTGECLEEGFEPPTGCDKCVWDLTDDLRLAALSIEEGKSGVLSVSSGAAAHRHVNEINATIYLLKTKLSERENQYALRKIQINNAENTMKSLLSDVEELVEKHWNKPRRRLELQEGV

SEQ ID NO: 859309 - protein, 374 aa, Homo sapiens
MALSSAWRSVLPLWLLWSAACSRAASGDDNAFPFDIEGSSAVGRQDPPETSEPRVALGRLPPAAEKCNAGFFHTLSGECVPCDCNGNSNECLDGSGYCVHCQRNTTGEHCEKCLDGYIGDSIRGAPQFCQPCPCPLPHLANFAESCYRKNGAVRCICNENYAGPNCERCAPGYYGNPLLIGSTCKKCDCSGNSDPNLIFEDCDEVTGQCRNCLRNTTGFKCERCAPGYYGDARIAKNCAVCNCGGGPCDSVTGECLEEGFEPPTGMDCPTISCDKCVWDLTDDLRLAALSIEEGKSGVLSVSSGAAAHRHVNEINATIYLLKTKLSERENQYALRKIQINNAENTMKSLLSDVEELVEKHWNKPRRRLELQEGV

SEQ ID NO: 859310 - protein, 120 aa, Homo sapiens
MALSSAWRSVLPLWLLWSAACSRAASGDDNAFPFDIEGSSAVGRQDPPETSEPRVALGRLPPAAEVQCPCHCHPAGAPAPPRAVPHSSFSLSPPLSSPQCLESFTWARSVRKLEIKSFPL

SEQ ID NO: 859311 - protein, 658 aa, Homo sapiens
CSGSSCRASRNRSRSEAQPDPAMEQPRKAVVVTGFGPFGEHTVNASWIAVQELEKLGLGDSVDLHVYEIPVEYQTVQRLIPALWEKHSPQLVVHVGVSGMATTVTLEKCGHNKGYKGLDNCRFCPGSQCCVEDGPESIDSIIDMDAVCKRVTTLGLDVSVTISQDAGSLGSQKSKVKVVAGLVPSGGAGGYLCDFTYYTSLYQSHGRSAFVHVPPLGKPYNADQLGRALRAIIEEMLDLLEQSEGKITIATNTEGRSGLLRPHPAGDPTRGHPPSGVWPGKDKLFSLGIRLDDLSELPPLEDMGQPPAEEAEQPGALAREFLAAMEPEPAPAPAPEEWLDILGNGLLRKKTLVPGPPGSSRPVKGQVVTVHLQTSLENGTRVQEEPELVFTLGDCDVIQALDLSVPLMDVGETAMVTADSKYCYGPQGSRSPYIPPHAALCLEVTLKTAVDGPDLEMLTGQERVALANRKRECGNAHYQRADFVLAANSYDLAIKAITSSAKVDMTFEEEAQLLQLKVKCLNNLAASQLKLDHYRAALRSCSLVLEHQPDNIKALFRKGKVLAQQGEYSEAIPILRAALKLEPSNKTIHAELSKLVKKHAAQRSTETALYRKMLGNPSRLPAKCPGKGAWSIPWKWLFGATAVALGGVALSVVIAARN

SEQ ID NO: 859312 - protein, 413 aa, Homo sapiens
MASCAEPSEPSAPLPAGVPPLEDFEVLDGVEDAEGEEEEEEEEEEEDDLSELPPLEDMGQPPAEEAEQPGALAREFLAAMEPEPAPAPAPEEWLDILGNGLLRKKTLVPGPPGSSRPVKGQVVTVHLQTSLENGTRVQEEPELVFTLGDCDVIQALDLSVPLMDVGETAMVTADSKYCYGPQGSRSPYIPPHAALCLEVTLKTAVDGPDLEMLTGQERVALANRKRECGNAHYQRADFVLAANSYDLAIKAITSSAKVDMTFEEEAQLLQLKVKCLNNLAASQLKLDHYRAALRSCSLVLEHQPDNIKALFRKGKVLAQQGEYSEAIPILRAALKLEPSNKTIHAELSKLVKKHAAQRSTETALYRKMLGNPSRLPAKCPGKGAWSIPWKWLFGATAVALGGVALSVVIAARN

SEQ ID NO: 859313 - protein, 441 aa, Homo sapiens
WYWSQVVDAQDPKWGSRSQRANSCPPSSMASCAEPSEPSAPLPAGVPPLEDFEVLDGVEDAEGEEEEEEEEEEEDDLSELPPLEDMGQPPAEEAEQPGALAREFLAAMEPEPAPAPAPEEWLDILGNGLLRKKTLVPGPPGSSRPVKGQVVTVHLQTSLENGTRVQEEPELVFTLGDCDVIQALDLSVPLMDVGETAMVTADSKYCYGPQGSRSPYIPPHAALCLEVTLKTAVDGPDLEMLTGQERVALANRKRECGNAHYQRADFVLAANSYDLAIKAITSSAKVDMTFEEEAQLLQLKVKCLNNLAASQLKLDHYRAALRSCSLVLEHQPDNIKALFRKGKVLAQQGEYSEAIPILRAALKLEPSNKTIHAELSKLVKKHAAQRSTETALYRKMLGNPSRLPAKCPGKGAWSIPWKWLFGATAVALGGVALSVVIAARN

SEQ ID NO: 859314 - protein, 402 aa, Homo sapiens
FPSPSASSTPSSTSKSSSGGTPAGEEEEEEEEEEEDDLSELPPLEDMGQPPAEEAEQPGALAREFLAAMEPEPAPAPAPEEWLDILGNGLLRKKTLVPGPPGSSRPVKGQVVTVHLQTSLENGTRVQEEPELVFTLGDCDVIQALDLSVPLMDVGETAMVTADSKYCYGPQGSRSPYIPPHAALCLEVTLKTAVDGPDLEMLTGQERVALANRKRECGNAHYQRADFVLAANSYDLAIKAITSSAKVDMTFEEEAQLLQLKVKCLNNLAASQLKLDHYRAALRSCSLVLEHQPDNIKALFRKGKVLAQQGEYSEAIPILRAALKLEPSNKTIHAELSKLVKKHAAQRSTETALYRKMLGNPSRLPAKCPGKGAWSIPWKWLFGATAVALGGVALSVVIAARN

SEQ ID NO: 859315 - protein, 413 aa, Homo sapiens; identical to SEQ ID NO: 859312

SEQ ID NO: 859316 - protein, 381 aa, Homo sapiens
KARSALRLGTRLGVDDLSELPPLEDMGQPPAEEAEQPGALAREFLAAMEPEPAPAPAPEEWLDILGNGLLRKKTLVPGPPGSSRPVKGQVVTVHLQTSLENGTRVQEEPELVFTLGDCDVIQALDLSVPLMDVGETAMVTADSKYCYGPQGSRSPYIPPHAALCLEVTLKTAVDGPDLEMLTGQERVALANRKRECGNAHYQRADFVLAANSYDLAIKAITSSAKVDMTFEEEAQLLQLKVKCLNNLAASQLKLDHYRAALRSCSLVLEHQPDNIKALFRKGKVLAQQGEYSEAIPILRAALKLEPSNKTIHAELSKLVKKHAAQRSTETALYRKMLGNPSRLPAKCPGKGAWSIPWKWLFGATAVALGGVALSVVIAARN

SEQ ID NO: 859317 - protein, 636 aa, Homo sapiens
CSGSSCRASRNRSRSEAQPDPAMEQPRKAVVVTGFGPFGEHTVNASWIAVQELEKLGLGDSVDLHVYEIPVEYQTVQRLIPALWEKHSPQLVVHVGVSGMATTVTLEKCGHNKGYKGLDNCRFCPGSQCCVEDGPESIDSIIDMDAVCKRVTTLGLDVSVTISQDAGRYLCDFTYYTSLYQSHGRSAFVHVPPLGKPYNADQLGRALRAIIEEMLDLLEQSEGKINYCTNTEGRSGLLRPHPAGDPTRGHPPSGVWPGKDKLFSLGIRLDDLSELPPLEDMGQPPAEEAEQPGALAREFLAAMEPEPAPAPAPEEWLDILGNGLLRKKTLVPGPPGSSRPVKGQVVTVHLQTSLENGTRVQEEPELVFTLGDCDVIQALDLSVPLMDVGETAMVTADSKYCYGPQGSRSPYIPPHAALCLEVTLKTAVDGPDLEMLTGQERVALANRKRECGNAHYQRADFVLAANSYDLAIKAITSSAKVDMTFEEEAQLLQLKVKCLNNLAASQLKLDHYRAALRSCSLVLEHQPDNIKALFRKGKVLAQQGEYSEAIPILRAALKLEPSNKTIHAELSKLVKKHAAQRSTETALYRKMLGNPSRLPAKCPGKGAWSIPWKWLFGATAVALGGVALSVVIAARN

SEQ ID NO: 859318 - protein, 359 aa, Homo sapiens
PELVFTLGDCDVIQALDLSVPLMDVGETAMVTADSKYCYGPQGRNGLLRKKTLVPGPPGSSRPVKGQVVTVHLQTSLENGTRVQEEPELVFTLGDCDVIQALDLSVPLMDVGETAMVTADSKYCYGPQGSRSPYIPPHAALCLEVTLKTAVDGPDLEMLTGQERVALANRKRECGNAHYQRADFVLAANSYDLAIKAITSSAKVDMTFEEEAQLLQLKVKCLNNLAASQLKLDHYRAALRSCSLVLEHQPDNIKALFRKGKVLAQQGEYSEAIPILRAALKLEPSNKTIHAELSKLVKKHAAQRSTETALYRKMLGNPSRLPAKCPGKGAWSIPWKWLFGATAVALGGVALSVVIAARN

SEQ ID NO: 859319 - protein, 357 aa, Homo sapiens
MTCKMSQLERNIETIINTFHQYSVKLGHPDTPAPEEWLDILGNGLLRKKTLVPGPPGSSRPVKGQVVTVHLQTSLENGTRVQEEPELVFTLGDCDVIQALDLSVPLMDVGETAMVTADSKYCYGPQGSRSPYIPPHAALCLEVTLKTAVDGPDLEMLTGQERVALANRKRECGNAHYQRADFVLAANSYDLAIKAITSSAKVDMTFEEEAQLLQLKVKCLNNLAASQLKLDHYRAALRSCSLVLEHQPDNIKALFRKGKVLAQQGEYSEAIPILRAALKLEPSNKTIHAELSKLVKKHAAQRSTETALYRKMLGNPSRLPAKCPGKGAWSIPWKWLFGATAVALGGVALSVVIAARN

SEQ ID NO: 859320 - protein, 429 aa, Homo sapiens
GHGRRGAKRPNLVPEARRPRLGAGRGAQDPKWGSRSQRANSCPPSSMASCAEPSEPSAPLPAGVPPLEDFEVLDGVEDAEGEEEEEEEEEEEDDLSELPPLEDMGQPPAEEAEQPGALAREFLAAMEPEPAPAPAPEEWLDILGNGLLRKKTLVPGPPGSSRPVKGQVVTVHLQTSLENGTRVQEEPELVFTLGDCDVIQALDLSVPLMDVGETAMVTADSKYCYGPQGSRSPYIPPHAALCLEVTLKTAVDGPDLEMLTGQERVALANRKRECGNAHYQRADFVLAANSYDLAIKAITSSAKVDMTFEEEAQLLQLKVKCLNNLAASQLKLDHYRAALRSCSLVLEHQPDNIKALFRKGKVLAQQGEYSEAIPILRAALKLEPSNKLPLPSADDPRRALKAGEEACGAAEHGDRLVPENAGQPQPAAC

SEQ ID NO: 859321 - protein, 459 aa, Homo sapiens
GHGRRGAKRPNLVPEARRPRLGAGRGAQDPKWGSRSQRANSCPPSSMASCAEPSEPSAPLPAGVPPLEDFEVLDGVEDAEGEEEEEEEEEEEDDLSELPPLEDMGQPPAEEAEQPGALAREFLAAMEPEPAPAPAPEEWLDILGNGLLRKKTLVPGPPGSSRPVKGQVVTVHLQTSLENGTRVQEEPELVFTLGDCDVIQALDLSVPLMDVGETAMVTADSKYCYGPQGSRSPYIPPHAALCLEVTLKTAVDGPDLEMLTGQERVALANRKRECGNAHYQRADFVLAANSYDLAIKAITSSAKVDMTFEEEAQLLQLKVKCLNNLAASQLKLDHYRAALRSCSLVLEHQPDNIKALFRKGKVLAQQGEYSEAIPILRAALKLEPSNKTIHAELSKLVKKHAAQRSTETALYRKMLGNPSRLPAKCPGKGAWSIPWKWLFGATAVALGGVALSVVIAARN

SEQ ID NO: 859322 - protein, 202 aa, Homo sapiens [sequence omitted]

SEQ ID NO: 859323 - protein, 258 aa, Homo sapiens
TGEVQLRVRYSYGGGTATGEVQLLQLKVKCLNNLAASQLKLDHYRAALRSCSLVLEMLTGQERVALANRKRECGNAHYQRADFVLAANSYDLAIKAITSSAKVDMTFEEEAQLLQLKVKCLNNLAASQLKLDHYRAALRSCSLVLEHQPDNIKALFRKGKVLAQQGEYSEAIPILRAALKLEPSNKTIHAELSKLVKKHAAQRSTETALYRKMLGNPSRLPAKCPGKGAWSIPWKWLFGATAVALGGVALSVVIAARN

SEQ ID NO: 859324 - protein, 390 aa, Homo sapiens
GHGRRGAKRPNLVPEARRPRLGAGRGAQDPKWGSRSQRANSCPPSSMASCAEPSEPSAPLPAGVPPLEDFEVLDGVEDAEGEEEEEEEEEEEDDLSELPPLEDMGQPPAEEAEQPGALAREFLAAMEPEPAPAPAPEEWLDILGNGLLRKKTLVPGPPGSSRPVKGQVVTVHLQTSLENGTRVQEEPELVFTLGDCDVIQALDLSVPLMDVGETAMVTADSKYCYGPQGSRSPYIPPHAALCLEVTLKTAVDGPDLEMLTGQERVALANRKRECGNAHYQRADFVLAANSYDLAIKAITSSAKVDMTFEEEAQLLQLKVKCLNNLAASQLKLDHYRAALRSCSLVLEHQPDNIKALFRKGKVLAQQGEYSERGPSFLQTQFSPTLLTPLG

SEQ ID NO: 859325 - protein, 92 aa, Homo sapiens
PRVAHASPTRRALKLEPSNKTIHAELSKLVKKHAAQRSTETALYRKMLGNPSRLPAKCPGKGAWSIPWKWLFGATAVALGGVALSVVIAARN

SEQ ID NO: 859326 - protein, 335 aa, Homo sapiens
GHGRRGAKRPNLVPEARRPRLGAGRGAQDPKWGSRSQRANSCPPSSMASCAEPSEPSAPLPAGVPPLEDFEVLDGVEDAEGEEEEEEEEEEEDDLSELPPLEDMGQPPAEEAEQPGALAREFLAAMEPEPAPAPAPEEWLDILGNGLLRKKTLVPGPPGSSRPVKGQVVTVHLQTSLENGTRVQEEPELVFTLGDCDVIQALDLSVPLMDVGETAMVTADSKYCYGPQGSRSPYIPPHAALCLEVTLKTAVDGPDLEMLTGQERVALANRKRECGNAHYQRADFVLAANSYDLAIKAITSSAKASLPRWARSPPGLASVSPQQAWGQPFPCLVPA

SEQ ID NO: 859327 - protein, 142 aa, Homo sapiens
  misc_feature (93)..(93): Xaa can be any naturally occurring amino acid
GHGRRGAKRPNLVPEARRPRLGAGRGAQDPKWGSRSQRANSCPPSSMASCAEPSEPSAPLPAGVPPLEDFEVLDGVEDAEGEEEEEEEEEEEXWDGGRGCAKLHYYCKTTVCWKLKVLMGLPSLRPPVTSKNSNRSKPHWLA

SEQ ID NO: 859328 - protein, 106 aa, Homo sapiens
TGEVQLRVRYSYGGGTATGEVQLLQLKVKCLNNLAASQLKLDHYRAALRSCSLVLEMLTGQERVALANRKRECGNAHYQRADFVLAANSYDLAIKAITSSAKVVPA

SEQ ID NO: 859329 - protein, 459 aa, Homo sapiens; identical to SEQ ID NO: 859321

SEQ ID NO: 859330 - protein, 413 aa, Homo sapiens; identical to SEQ ID NO: 859312

SEQ ID NO: 859331 - protein, 428 aa, Homo sapiens
SPGGAGRANSCPPSSMASCAEPSEPSAPLPAGVPPLEDFEVLDGVEDAEGEEEEEEEEEEEDDLSELPPLEDMGQPPAEEAEQPGALAREFLAAMEPEPAPAPAPEEWLDILGNGLLRKKTLVPGPPGSSRPVKGQVVTVHLQTSLENGTRVQEEPELVFTLGDCDVIQALDLSVPLMDVGETAMVTADSKYCYGPQGSRSPYIPPHAALCLEVTLKTAVDGPDLEMLTGQERVALANRKRECGNAHYQRADFVLAANSYDLAIKAITSSAKVDMTFEEEAQLLQLKVKCLNNLAASQLKLDHYRAALRSCSLVLEHQPDNIKALFRKGKVLAQQGEYSEAIPILRAALKLEPSNKTIHAELSKLVKKHAAQRSTETALYRKMLGNPSRLPAKCPGKGAWSIPWKWLFGATAVALGGVALSVVIAARN

SEQ ID NO: 859332 - protein, 413 aa, Homo sapiens; identical to SEQ ID NO: 859312

SEQ ID NO: 859333 - protein, 664 aa, Homo sapiens
LQRQQLSRQSQQKQVRGTARSRHGAAEEGGGSDGIWPFWGTHRERQLDCSSEMGSHYIALAGLELPGSNDPSTSASQRSWDYRCEPPSPAIQELEKLGLGDSVDLHVYEIPVEYQTVQRLIPALWEKHSPQLVVHVGVSGMATTVTLEKCGHNKGYKGLDNCRFCPGSQCCVEDGPESIDSIIDMDAVCKRVTTLGLDVSVTISQDAGRVTVDQPSSTCPHWGSRTTRTSWAGHWEPSLRRCWTSWSSQRAKSTIATNTEGRSGLLRPHPAGDPTRGHPPSGVWPGKDKLFSLGIRLDDLSELPPLEDMGQPPAEEAEQPGALAREFLAAMEPEPAPAPAPEEWLDILGNGLLRKKTLVPGPPGSSRPVKGQVVTVHLQTSLENGTRVQEEPELVFTLGDCDVIQALDLSVPLMDVGETAMVTADSKYCYGPQGSRSPYIPPHAALCLEVTLKTAVDGPDLEMLTGQERVALANRKRECGNAHYQRADFVLAANSYDLAIKAITSSAKVDMTFEEEAQLLQLKVKCLNNLAASQLKLDHYRAALRSCSLVLEHQPDNIKALFRKGKVLAQQGEYSEAIPILRAALKLEPSNKTIHAELSKLVKKHAAQRSTETALYRKMLGNPSRLPAKCPGKGAWSIPWKWLFGATAVALGGVALSVVIAARN

SEQ ID NO: 859334 - protein, 459 aa, Homo sapiens; identical to SEQ ID NO: 859321

SEQ ID NO: 859335 - protein, 459 aa, Homo sapiens; identical to SEQ ID NO: 859321

SEQ ID NO: 859336 - protein, 459 aa, Homo sapiens; identical to SEQ ID NO: 859321

SEQ ID NO: 859337 - protein, 459 aa, Homo sapiens; identical to SEQ ID NO: 859321

SEQ ID NO: 859338 - protein, 419 aa, Homo sapiens
GHGRRGAKRPNLVPEARRPRLGAGRGAQDPKWGSRSQRANSCPPSSMASCAEPSEPSAPLPAGVPPLEDFEVLDGVEDAEGEEEEEEEEEEEDDLSELPPLEDMGQPPAEEAEQPGALAREFLAAMEPEPAPAPAPEEWLDILGNGLLRKKTLVPGPPGSSRPVKGQVVTVHLQTSLENGTRVQEEPELVFTLGDCDVIQALDLSVPLMDVGETAMVTADSKYCYGPQGSRSPYIPPHAALCLEVTLKTAVDGPDLEMLTGQERVALANRKRECGNAHYQRADFVLAANSYDLAIKAITSSAKVDMTFEEEAQLLQLKVKCLNNLAASQLKLDHYRAALRSCSLVLEHQPDNIKALFRKGKVLAQQGEYSEAIPILRAARLPAKCPGKGAWSIPWKWLFGATAVALGGVALSVVIAARN

SEQ ID NO: 859339 - protein, 390 aa, Homo sapiens; identical to SEQ ID NO: 859324

SEQ ID NO: 859340 - protein, 364 aa, Homo sapiens
GHGRRGAKRPNLVPEARRPRLGAGRGAQDPKWGSRSQRANSCPPSSMASCAEPSEPSAPLPAGVPPLEDFEVLDGVEDAEGEEEEEEEEEEEDDLSELPPLEDMGQPPAEEAEQPGALAREFLAAMEPEPAPAPAPEEWLDILGNGLLRKKTLVPGPPGSSRPVKGQVVTVHLQTSLENGTRVQEEPELVFTLGDCDVIQALDLSVPLMDVGETAMVTADSKYCYGPQGSRSPYIPPHAALCLEVTLKTAVDGPDLEMLTGQERVALANRKRECGNAHYQRADFVLAANSYDLAIKAITSSAKVDMTFEEEAQLLQLKVKCLNNLAASQLKLDHYRAALRSCSLVLEHQPDNIKALFRKGKGES

SEQ ID NO: 859341 - protein, 91 aa, Homo sapiens
  misc_feature (8)..(8): Xaa can be any naturally occurring amino acid
  misc_feature (12)..(12): Xaa can be any naturally occurring amino acid
RTPKEAIXGQPXKLEPSNKTIHAELSKLVKKHAAQRSTETALYRKMLGNPSRLPAKCPGKGAWSIPWKWLFGATAVALGGVALSVVIAARN

SEQ ID NO: 859342 - protein, 111 aa, Homo sapiens
GHGRRGAKRPNLVPEARRPRLGAGRGAQDPKWGSRSQRANSCPPSSMASCAEPSEPSAPLPAGVPPLEDFEVLDGVEDAEGEEEEEEEEEEERGPSFLQTQFSPTLLTPLG

SEQ ID NO: 859343 - protein, 911 aa, Homo sapiens
MAASQTSQTVASHVPFADLCSTLERIQKSKGRAEKIRHFREFLDSWRKFHDALHKNHKDVTDSFYPAMRLILPQLERERMAYGIKETMLAKLYIELLNLPRDGKDALKLLNYRTPTGTHGDAGDFAMIAYFVLKPRCLQKGSLTIQQVNDLLDSIASNNSAKRKDLIKKSLLQLITQSSALEQKWLIRMIIKDLKLGVSQQTIFSVFHNDAAELHNVTTDLEKVCRQLHDPSVGLSDISITLFSAFKPMLAAIADIEHIEKDMKHQSFYIETKLDGERMQMHKDGDVYKYFSRNGYNYTDQFGASPTEGSLTPFIHNAFKADIQICILDGEMMAYNPNTQTFMQKGTKFDIKRMVEDSDLQTCYCVFDVLMVNNKKLGHETLRKRYEILSSIFTPIPGRIEIVQKTQAHTKNEVIDALNEAIDKREEGIMVKQPLSIYKPDKRGEGWLKIKPEYVSGLMDELDILIVGGYWGKGSRGGMMSHFLCAVAEKPPPGEKPSVFHTLSRVGSGCTMKELYDLGLKLAKYWKPFHRKAPPSSILCGTEKPEVYIEPCNSVIVQIKAAEIVPSDMYKTGCTLRFPRIEKIRDDKEWHECMTLDDLEQLRGKASGKLASKHLYIGGDDEPQEKKRKAAPKMKKVIGIIEHLKAPNLTNVNKISNIFEDVEFCVMSGTDSQPKPDLENRIAEFGGYIVQNPGPDTYCVIAGSENIRVKNIILSNKHDVVKPAWLLECFKTKSFVPWQPRFMIHMCPSTKEHFAREYDCYGDSYFIDTDLNQLKEVFSGIKNSNEQTPEEMASLIADLEYRYSWDCSPLSMFRRHTVYLDSYAVINDLSTKNEGTRLAIKALELRFHGAKVVSCLAEGVSHVIIGEDHSRVADFKAFRRTFKRKFKILKESWVTDSIDKCELQEENQYLI

SEQ ID NO: 859344 - protein, 911 aa, Homo sapiens; identical to SEQ ID NO: 859343

SEQ ID NO: 859345 - protein, 911 aa, Homo sapiens; identical to SEQ ID NO: 859343

SEQ ID NO: 859346 - protein, 893 aa, Homo sapiens
MAASQTSQTVASHVPFADLCSTLERIQKSKGRAEKIRHFREFLDSWRKFHDALHKNHKDVTDSFYPAMRLILPQLERERMAYGIKETMLAKLYIELLNLPRDGKDALKLLNYRTPTGTHGDAGDFAMIAYFVLKPRCLQKGSLTIQQVNDLLDSIASNNSAKRKDLIKKSLLQLITQSSALEQKWLIRMIIKDLKLGVSQQTIFSVFHNDAAELHNVTTDLDTLFSAFKPMLAAIADIEHIEKDMKHQSFYIETKLDGERMQMHKDGDVYKYFSRNGYNYTDQFGASPTEGSLTPFIHNAFKADIQICILDGEMMAYNPNTQTFMQKGTKFDIKRMVEDSDLQTCYCVFDVLMVNNKKLGHETLRKRYEILSSIFTPIPGRIEIVQKTQAHTKNEVIDALNEAIDKREEGIMVKQPLSIYKPDKRGEGWLKIKPEYVSGLMDELDILIVGGYWGKGSRGGMMSHFLCAVAEKPPPGEKPSVFHTLSRVGSGCTMKELYDLGLKLAKYWKPFHRKAPPSSILCGTEKPEVYIEPCNSVIVQIKAAEIVPSDMYKTGCTLRFPRIEKIRDDKEWHECMTLDDLEQLRGKASGKLASKHLYIGGDDEPQEKKRKAAPKMKKVIGIIEHLKAPNLTNVNKISNIFEDVEFCVMSGTDSQPKPDLENRIAEFGGYIVQNPGPDTYCVIAGSENIRVKNIILSNKHDVVKPAWLLECFKTKSFVPWQPRFMIHMCPSTKEHFAREYDCYGDSYFIDTDLNQLKEVFSGIKNSNEQTPEEMASLIADLEYRYSWDCSPLSMFRRHTVYLDSYAVINDLSTKNEGTRLAIKALELRFHGAKVVSCLAEGVSHVIIGEDHSRVADFKAFRRTFKRKFKILKESWVTDSIDKCELQEENQYLI

SEQ ID NO: 859347 - protein, 185 aa, Homo sapiens
HASRTRGSDAWVDDFLGDCGRIPGGYCRVLYGPRFVVRQRDKYRYFACLMRARFEEHKNEKDMAKATQLLKEAEEEFWYRQHPQPYIFPDSPGGTSYERYDCYKVPEWCLDDWHPSEKAMYPDYFAKREQWKKLRRESWEREVKQLQEETPPGGPLTEALPPARKEGDLPPLWWYIVTRPRERPM

SEQ ID NO: 859348 - protein, 179 aa, Homo sapiens
MAFLASGPYLTHQQKVLRLYKRALRHLESWCVQRDKYRYFACLMRARFEEHKNEKDMAKATQLLKEAEEEFWYRQHPQPYIFPDSPGGTSYERYDCYKVPEWCLDDWHPSEKAMYPDYFAKREQWKKLRRESWEREVKQLQEETPPGGPLTEALPPARKEGDLPPLWWYIVTRPRERPM

SEQ ID NO: 859349 - protein, 179 aa, Homo sapiens; identical to SEQ ID NO: 859348

SEQ ID NO: 859350 - protein, 179 aa, Homo sapiens; identical to SEQ ID NO: 859348

SEQ ID NO: 859351 - protein, 179 aa, Homo sapiens; identical to SEQ ID NO: 859348

SEQ ID NO: 859352 - protein, 123 aa, Homo sapiens
MAKATQLLKEAEEEFWYRQHPQPYIFPDSPGGTSYERYDCYKVPEWCLDDWHPSEKAMYPDYFAKREQWKKLRRESWEREVKQLQEETPPGGPLTEALPPARKEGDLPPLWWYIVTRPRERPM

SEQ ID NO: 859353 - protein, 95 aa, Homo sapiens
RRQLRPSGWPRSVTRSRRAVSRLSARPGKVSAVMAFLASGPYLTHQQKVLRLYKRALRHLESWCVQRDKYRYFACLMRARFEILVPSASTAIHLP

SEQ ID NO: 859354 - protein, 201 aa, Homo sapiens
MAFLASGPYLTHQQKVLRLYKRALRHLESWCVQRDKYRYFACLMRARFEEHKNEKDMAKATQLLKEAEEEFWYRQHPQPYIFPDSPGGTSYERYDCYKVPEWCLDDWHPSEKAMYPDYFAKREQWKKLRRESWERELSQPARRKRCIVIPYTQALTPAASTWYINRPMKMPFSKPPSLAFLDRWCVVALVSKTHLHSGTPE

SEQ ID NO: 859355 - protein, 174 aa, Homo sapiens
RRQLRPSGWPRSVTRSRRAVSRLSARPGKVSAVMAFLASGPYLTHQQKVLRLYKRALRHLESWCVQRDKYRYFACLMRARFEEHKNEKDMAKATQLLKEAEEEFWYRQHPQPYIFPDSPGGTSYERYDCYKVKQLQEETPPGGPLTEALPPARKEGDLPPLWWYIVTRPRERPM

SEQ ID NO: 859356 - protein, 85 aa, Homo sapiens
MRARFEEHKNEKDMAKATQLLKEAEEEFWYRQHPQPYIFPDSPGGTSYERYDCYKVGENYDDCLLRNRLCFFSPTPQPQKSLALQ

SEQ ID NO: 859357 - protein, 179 aa, Homo sapiens; identical to SEQ ID NO: 859348

SEQ ID NO: 859358 - protein, 185 aa, Homo sapiens; identical to SEQ ID NO: 859347

SEQ ID NO: 859359 - protein, 179 aa, Homo sapiens; identical to SEQ ID NO: 859348

SEQ ID NO: 859360 - protein, 224 aa, Homo sapiens
RRQLRPSGWPRSVTRSRRAVSRLSARPGKVSAVMAFLASGPYLTHQQKVLRLYKRALRHLESWCVQRDKYRYFACLMRARFEEHKNEKDMAKATQLLKEAEEEFWYRQHPQPYIFPDSPGGTSYERYDCYKVPEWCLDDWHPSEKAMYPDYFAKREQWKKLRRESWEREVKQLQEETPPGGPLTEALPPARKEGDLPPLWWYIVTRPRERPMYSGSDHRDTLER

SEQ ID NO: 859361 - protein, 139 aa, Homo sapiens
YWWCSLLAMYPDYFAKREQWKKLLKEAEEEFWYRQHPQPYIFPDSPGGTSYERYDCYKVPEWCLDDWHPSEKAMYPDYFAKREQWKKLRRESWEREVKQLQEETPPGGPLTEALPPARKEGDLPPLWWYIVTRPRERPM

SEQ ID NO: 859362 - protein, 112 aa, Homo sapiens
MLRFWYRQHPQPYIFPDSPGGTSYERYDCYKVPEWCLDDWHPSEKAMYPDYFAKREQWKKLRRESWEREVKQLQEETPPGGPLTEALPPARKEGDLPPLWWYIVTRPRERPM

SEQ ID NO: 859363 - protein, 135 aa, Homo sapiens
RRQLRPSGWPRSVTRSRRAVSRLSARPGKVSAVMAFLASGPYLTHQQKVLRLYKRALRHLESWCVQRDKYRYFACLMRARFEKLRRESWEREVKQLQEETPPGGPLTEALPPARKEGDLPPLWWYIVTRPRERPM

SEQ ID NO: 859364 - protein, 89 aa, Homo sapiens
GLRALCEPLSAKAMELCLESLVFGSGWGQSPGKTNAFGTRTQAPSSLPACGYNDSTWQATAFREGDRGPCLKHSPTTRNPQQPLKRKGS

SEQ ID NO: 859365 - protein, 155 aa, Homo sapiens
MVAWEQLMFEKAQAPASRGFEFTHAHIMGMNKPFFKKTRSSQGSYLLWAGAKAGCFSPHASRPRACFCSPAWKVQGTWKGATPNALYQRPPDTNSVLCACCSLSLSPPWTEGVKLAAPTGRGPLTSGLIVLDTQSGLDASSSPTLHPKVRKPDNF

SEQ ID NO: 859366 - protein, 155 aa, Homo sapiens; identical to SEQ ID NO: 859365

SEQ ID NO: 859367 - protein, 185 aa, Homo sapiens
GRGNECELVSGRRRHRPRRRRLGSSLRHAGVFSSTGAMSEREERRFVEIPRESVRLMAESTGLELSDEVAALLAEDVCYRLREATQNSSQFMKHTKRRKLTVEDFNRALRWSSVEAVCGYGSQEALPMRPAREGELYFPEDREVNLVELALATNIPKGCAETAVRVHVSYLDGKGNLAPQGSGKG

SEQ ID NO: 859368 - protein, 290 aa, Homo sapiens [sequence omitted]

SEQ ID NO: 859369 - protein, 290 aa, Homo sapiens [sequence omitted]

SEQ ID NO: 859370 - protein, 290 aa, Homo sapiens [sequence omitted]

SEQ ID NO: 859371 - protein, 290 aa, Homo sapiens [sequence omitted]

SEQ ID NO: 859372 - protein, 548 aa, Homo sapiens
MVVEGEEAGEARRGPALHLSLLPACPLAVPSAVSSLTDDLLKYYHQVTRAVLGDDPQLMKVALQDLQTNSKIGALLPYFVYVVSGVKSVSHDLEQLHRLLQVARSLFRNPHLCLGPYVRCLVGSVLYCVLEPLAASINPLNDHWTLRDGAALLLSHIFWTHGDLVSGLYQHILLSLQKILADPVRPLCCHYGAVVGLHALGWKAVERVLYPHLSTYWTNLQAVLDDYSVSNAQVKADGHKVYGAILSEYRPLPASLPCMSLAAKQAYFGIFDGPRFLEFFAYLSPWLLQVAVERLLKMKAQAAEPNRGGPGGRGCRRLDDLPWDSLLFQESSSGGGAEPSFGSGLPLPPGGAGPEDPSLSVTLADIYRELYAFFGDSLATRFGTGQPAPTAPRPPGDKKEPAAAPDSVRKMPQLTASAIVSPHGDESPRGSGGGGPASASGPAASESRPLPRVHRARGAPRQQGPGTGTRDVFQKSRFAPRGAPHFRFIIAGRQAGRRCRGRLFQTAFPAPYGPSPASRYVQKLPMIGRTSRPARRWALSDYSLYLPL

SEQ ID NO: 859373 - protein, 290 aa, Homo sapiens [sequence omitted]

SEQ ID NO: 859374 - protein, 327 aa, Homo sapiens
GRGNECELVSGRRRHRPRRRRLGSSLRHAGVFSSTGAMSEREERRFVEIPRESVRLMAESTGLELSDEVAALLAEDVCYRLREATQNSSQFMKHTKRRKLTVENHVRARRAAVCGDPSGVLSGLPLPPGGAGPEDPSLSVTLADIYRELYAFFGDSLATRFGTGQPAPTAPRPPGDKKEPAAAPDSVRKMPQLTASAIVSPHGDESPRGSGGGGPASASGPAASESRPLPRVHRARGAPRQQGPGTGTRDVFQKSRFAPRGAPHFRFIIAGRQAGRRCRGRLFQTAFPAPYGPSPASRYVQKLPMIGRTSRPARRWALSDYSLYLPL

SEQ ID NO: 859375 - protein, 659 aa, Homo sapiens
GRGNECELVSGRRRHRPRRRRLGSSLRHAGVFSSTGAMSEREERRFVEIPRESVRLMAESTGLELSDEVAALLAEDVCYRLREATQNSSQFMKHTKRRKLTVEDFNRALRWSSVEAVCGYGSQEALPMRPAREGELYFPEDREVNLVELALATNIPKGCAETAVRVHVSYLDGKGNLAPQGSVPSAVSSLTDDLLKYYHQVTRAVLGDDPQLMKVALQDLQTNSKIGALLPYFVYVVSGVKSVSHDLEQLHRLLQVARSLFRNPHLCLGPYVRCLVGSVLYCVLEPLAASINPLNDHWTLRDGAALLLSHIFWTHGDLVSGLYQHILLSLQKILADPVRPLCCHYGAVVGLHALGWKAVERVLYPHLSTYWTNLQAVLDDYSVSNAQVKADGHKVYGAILVAVERLLKMKAQAAEPNRGGPGGRGCRRLDDLPWDSLLFQESSSGGGAEPSFGSGLPLPPGGAGPEDPSLSVTLADIYRELYAFFGDSLATRFGTGQPAPTAPRPPGDKKEPAAAPDSVRKMPQLTASAIVSPHGDESPRGSGGGGPASASGPAASESRPLPRVHRARGAPRQQGPGTGTRDVFQKSRFAPRGAPHFRFIIAGRQAGRRCRGRLFQTAFPAPYGPSPASRYVQKLPMIGRTSRPARRWALSDYSLYLPL

SEQ ID NO: 859376 - protein, 702 aa, Homo sapiens
GRGNECELVSGRRRHRPRRRRLGSSLRHAGVFSSTGAMSEREERRFVEIPRESVRLMAESTGLELSDEVAALLAEDVCYRLREATQNSSQFMKHTKRRKLTVEDFNRALRWSSVEAVCGYGSQEALPMRPAREGELYFPEDREVNLVELALATNIPKGCAETAVRVHVSYLDGKGNLAPQGSVPSAVSSLTDDLLKYYHQVTRAVLGDDPQLMKVALQDLQTNSKIGALLPYFVYVVSGVKSVSHDLEQLHRLLQVARSLFRNPHLCLGPYVRCLVGSVLYCVLEPLAASINPLNDHWTLRDGAALLLSHIFWTHGDLVSGLYQHILLSLQKILADPVRPLCCHYGAVVGLHALGWKAVERVLYPHLSTYWTNLQAVLDDYSVSNAQVKADGHKVYGAILSEYRPLPASLPCMSLAAKQAYFGIFDGPRFLEFFAYLSPWLLQVAVERLLKMKAQAAEPNRGGPGGRGCRRLDDLPWDSLLFQESSSGGGAEPSFGSGLPLPPGGAGPEDPSLSVTLADIYRELYAFFGDSLATRFGTGQPAPTAPRPPGDKKEPAAAPDSVRKMPQLTASAIVSPHGDESPRGSGGGGPASASGPAASESRPLPRVHRARGAPRQQGPGTGTRDVFQKSRFAPRGAPHFRFIIAGRQAGRRCRGRLFQTAFPAPYGPSPASRYVQKLPMIGRTSRPARRWALSDYSLYLPL

SEQ ID NO: 859377 - protein, 290 aa, Homo sapiens [sequence omitted]

SEQ ID NO: 859378 - protein, 937 aa, Homo sapiens
MTDSKYFTTNKKGEIFELKAELNNEKKEKRKEAVKKVIAAMTVGKDVSSLFPDVVNCMQTDNLELKKLVYLYLMNYAKSQPDMAIMAVNSFVKDCEDPNPLIRALAVRTMGCIRVDKITEYLCEPLRKCLKDEDPYVRKTAAVCVAKLHDINAQMVEDQGFLDSLRDLIADSNPMVVANAVAALSEISESHPNSNLLDLNPQNINKLLTALNECTEWGQIFILDCLSNYNPKDDREAQSICERVTPRLSHANSAVVLSAVKVLMKFLELLPKDSDYYNMLLKKLAPPLVTLLSGEPEVQYVALRNINLIVQKRPEILKQEIKVFFVKYNDPIYVKLEKLDIMIRLASQANIAQVLAELKEYATEVDVDFVRKAVRAIGRCAIKVEQSAERCVSTLLDLIQTKVNYVVQEAIVVIRDIFRKYPNKYESIIATLCENLDSLDEPDARAAMIWIVGEYAERIDNADELLESFLEGFHDESTQVQLTLLTAIVKLFLKKPSETQELVQQVLSLATQDSDNPDLRDRGYIYWRLLSTDPVTAKEVVLSEKPLISEETDLIEPTLLDELICHIGSLASVYHKPPNAFVEGSHGIHRKHLPIHHGSTDAGDSPVGTTTATNLEQPQVIPSQGDLLGDLLNLDLGPPVNVPQVSSMQMGAVDLLGGGLDSLVGQSFIPSSVPATFAPSPTPAVVSSGLNDLFELSTGIGMAPGGYVAPKAVWLPAVKAKGLEISGTFTHRQGHIYMEMNFTNKALQHMTDFAIQFNKNSFGVIPSTPLAIHTPLMPNQSIDVSLPLNTLGPVMKMEPLNNLQVAVKNNIDVFYFSCLIPLNVLFVEDGKMERQVFLATWKDIPNENELQFQIKECHLNADTVSSKLQNNNVYTIAKRNVEGQDMLYQSLKLTNGIWILAELRIQPGNPNYTLSLKCRAPEVSQYIYQVYDSILKN

SEQ ID NO: 859379 - protein, 951 aa, Homo sapiens
MTDSKYFTTNKKGEIFELKAELNNEKKEKRKEAVKKVIAAMTVGKDVSSLFPDVVNCMQTDNLELKKLVYLYLMNYAKSQPDMAIMAVNSFVKDCEDPNPLIRALAVRTMGCIRVDKITEYLCEPLRKCLKDEDPYVRKTAAVCVAKLHDINAQMVEDQGFLDSLRDLIADSNPMVVANAVAALSEISESHPNSNLLDLNPQNINKLLTALNECTEWGQIFILDCLSNYNPKDDREAQSICERVTPRLSHANSAVVLSAVKVLMKFLELLPKDSDYYNMLLKKLAPPLVTLLSGEPEVQYVALRNINLIVQKRPEILKQEIKVFFVKYNDPIYVKLEKLDIMIRLASQANIAQVLAELKEYATEVDVDFVRKAVRAIGRCAIKVEQSAERCVSTLLDLIQTKVNYVVQEAIVVIRDIFRKYPNKYESIIATLCENLDSLDEPDARAAMIWIVGEYAERIDNADELLESFLEGFHDESTQVQLTLLTAIVKLFLKKPSETQELVQQVLSLATQDSDNPDLRDRGYIYWRLLSTDPVTAKEVVLSEKPLISEETDLIEPTLLDELICHIGSLASVYHKPPNAFVEGSHGIHRKHLPIHHGSTDAGDSPVGTTTATNLEQPQVIPSQGDLLGDLLNLDLGPPVNVPQVSSMQMGAVDLLGGGLDSLLGSDLGGGIGGSPAVGQSFIPSSVPATFAPSPTPAVVSSGLNDLFELSTGIGMAPGGYVAPKAVWLPAVKAKGLEISGTFTHRQGHIYMEMNFTNKALQHMTDFAIQFNKNSFGVIPSTPLAIHTPLMPNQSIDVSLPLNTLGPVMKMEPLNNLQVAVKNNIDVFYFSCLIPLNVLFVEDGKMERQVFLATWKDIPNENELQFQIKECHLNADTVSSKLQNNNVYTIAKRNVEGQDMLYQSLKLTNGIWILAELRIQPGNPNYTLSLKCRAPEVSQYIYQVYDSILKN

SEQ ID NO: 859380 - protein, 951 aa, Homo sapiens; identical to SEQ ID NO: 859379

SEQ ID NO: 859381 - protein, 911 aa, Homo sapiens
MTVGKDVSSLFPDVVNCMQTDNLELKKLVYLYLMNYAKSQPDMAIMAVNSFVKDCEDPNPLIRALAVRTMGCIRVDKITEYLCEPLRKCLKDEDPYVRKTAAVCVAKLHDINAQMVEDQGFLDSLRDLIADSNPMVVANAVAALSEISESHPNSNLLDLNPQNINKLLTALNECTEWGQIFILDCLSNYNPKDDREAQSICERVTPRLSHANSAVVLSAVKVLMKFLELLPKDSDYYNMLLKKLAPPLVTLLSGEPEVQYVALRNINLIVQKRPEILKQEIKVFFVKYNDPIYVKLEKLDIMIRLASQANIAQVLAELKEYATEVDVDFVRKAVRAIGRCAIKVEQSAERCVSTLLDLIQTKVNYVVQEAIVVIRDIFRKYPNKYESIIATLCENLDSLDEPDARAAMIWIVGEYAERIDNADELLESFLEGFHDESTQVQLTLLTAIVKLFLKKPSETQELVQQVLSLATQDSDNPDLRDRGYIYWRLLSTDPVTAKEVVLSEKPLISEETDLIEPTLLDELICHIGSLASVYHKPPNAFVEGSHGIHRKHLPIHHGSTDAGDSPVGTTTATNLEQPQVIPSQGDLLGDLLNLDLGPPVNVPQVSSMQMGAVDLLGGGLDSLLGSDLGGGIGGSPAVGQSFIPSSVPATFAPSPTPAVVSSGLNDLFELSTGIGMAPGGYVAPKAVWLPAVKAKGLEISGTFTHRQGHIYMEMNFTNKALQHMTDFAIQFNKNSFGVIPSTPLAIHTPLMPNQSIDVSLPLNTLGPVMKMEPLNNLQVAVKNNIDVFYFSCLIPLNVLFVEDGKMERQVFLATWKDIPNENELQFQIKECHLNADTVSSKLQNNNVYTIAKRNVEGQDMLYQSLKLTNGIWILAELRIQPGNPNYTLSLKCRAPEVSQYIYQVYDSILKN

SEQ ID NO: 859382 - protein, 515 aa, Homo sapiens
MTDSKYFTTNKKGEIFELKAELNNEKKEKRKEAVKKVIAAMTVGKDVSSLFPDVVNCMQTDNLELKKLVYLYLMNYAKSQPDMAIMAVNSFVKDCEDPNPLIRALAVRTMGCIRVDKITEYLCEPLRKCLKDEDPYVRKTAAVCVAKLHDINAQMVEDQGFLDSLRDLIADSNPMVVANAVAALSEISESHPNSNLLDLNPQNINKLLTALNECTEWGQIFILDCLSNYNPKDDREAQSICERVTPRLSHANSAVVLSAVKVLMKFLELLPKDSDYYNMLLKKLAPPLVTLLSGEPEVQYVALRNINLIVQKRPEILKQEIKVFFVKYNDPIYVKLEKLDIMIRLASQANIAQVLAELKEYATEVDVDFVRKAVRAIGRCAIKVEQSAERCVSTLLDLIQTKVNYVVQEAIVVIRDIFRKYPNKYESIIATLCENLDSLDEPDARAAMIWIVGEYAERIDNADELLESFLEGFHDESTQVQLTLLTAIVKLFLKKPSETQELVQQVLSLATQLKK

SEQ ID NO: 859383 - protein, 294 aa, Homo sapiens
LLSLFQLGSDLGGGIGGSPAVGQSFIPSSVPATFAPSPTPAVVSSGLNDLFELSTGIGMAPGGYVAPKAVWLPAVKAKGLEISGTFTHRQGHIYMEMNFTNKALQHMTDFAIQFNKNSFGVIPSTPLAIHTPLMPNQSIDVSLPLNTLGPVMKMEPLNNLQVAVKNNIDVFYFSCLIPLNVLFVEDGKMERQVFLATWKDIPNENELQFQIKECHLNADTVSSKLQNNNVYTIAKRNVEGQDMLYQSLKLTNGIWILAELRIQPGNPNYTLSLKCRAPEVSQYIYQVYDSILKN

SEQ ID NO: 859384 - protein, 951 aa, Homo sapiens; identical to SEQ ID NO: 859379

SEQ ID NO: 859385 - protein, 144 aa, Homo sapiens
MSSFALLLSWQVAVKNNIDVFYFSCLIPLNVLFVEDGKMERQVFLATWKDIPNENELQFQIKECHLNADTVSSKLQNNNVYTIAKRNVEGQDMLYQSLKLTNGIWILAELRIQPGNPNYTLSLKCRAPEVSQYIYQVYDSILKN

SEQ ID NO: 859386 - protein, 733 aa, Homo sapiens
MTDSKYFTTNKKGEIFELKAELNNEKKEKRKEAVKKVIAAMTVGKDVSSLFPDVVNCMQTDNLELKKLVYLYLMNYAKSQPDMAIMAVNSFVKDCEDPNPLIRALAVRTMGCIRVDKITEYLCEPLRKCLKDEDPYVRKTAAVCVAKLHDINAQMVEDQGFLDSLRDLIADSNPMVVANAVAALSEISESHPNSNLLDLNPQNINKLLTALNECTEWGQIFILDCLSNYNPKDDREAQSICERVTPRLSHANSAVVLSAVKVLMKFLELLPKDSDYYNMLLKKLAPPLVTLLSGEPEVQYVALRNINLIVQKRPEILKQEIKVFFVKYNDPIYVKLEKLDIMIRLASQANIAQVLAELKEYATEVDVDFVRKAVRAIGRCAIKVEQSAERCVSTLLDLIQTKVNYVVQEAIVVIRDIFRKYPNKYESIIATLCENLDSLDEPDARAAMIWIVGEYAERIDNADELLESFLEGFHDESTQVQLTLLTAIVKLFLKKPSETQELVQQVLSLATQDSDNPDLRDRGYIYWRLLSTDPVTAKEVVLSEKPLISEETDLIEPTLLDELICHIGSLASVYHKPPNAFVEGSHGIHRKHLPIHHGSTDAGDSPVGTTTATNLEQPQVIPSQGDLLGDLLNLDLGPPVNVPQVSSMQMGAVDLLGGGLDSLPQKLFTVQFSSAYSEIERYPRNQDEKKLKPLFLLWIRMWLNIYSLRESRFLFREHHKEDLNLPVWKKMSF

SEQ ID NO: 859387 - protein, 951 aa, Homo sapiens; identical to SEQ ID NO: 859379

SEQ ID NO: 859388 - protein, 951 aa, Homo sapiens; identical to SEQ ID NO: 859379

SEQ ID NO: 859389 - protein, 969 aa, Homo sapiens
MTDSKYFTTNKKGEIFELKAELNNEKKEKRKEAVKKVIAAMTVGKDVSSLFPDVVNCMQTDNLELKKLVYLYLMNYAKSQPDMAIMAVNSFVKDCEDPNPLIRALAVRTMGCIRVDKITEYLCEPLRKCLKDEDPYVRKTAAVCVAKLHDINAQMVEDQGFLDSLRDLIADSNPMVVANAVAALSEISESHPNSNLLDLNPQNINKLLTALNECTEWGQIFILDCLSNYNPKDDREAQSICERVTPRLSHANSAVVLSAVKVLMKFLELLPKDSDYYNMLLKKLAPPLVTLLSGEPEVQYVALRNINLIVQKRPEILKQEIKVFFVKYNDPIYVKLEKLDIMIRLASQANIAQVLAELKEYATEVDVDFVRKAVRAIGRCAIKVEQSAERCVSTLLDLIQTKVNYVVQEAIVVIRDIFRKYPNKYESIIATLCENLDSLDEPDARAAMIWIVGEYAERIDNADELLESFLEGFHDESTQVQLTLLTAIVKLFLKKPSETQELVQQVLSLATQDSDNPDLRDRGYIYWRLLSTDPVTAKEVVLSEKPLISEETDLIEPTLLDELICHIGSLASVYHKPPNAFVEGSHGIHRKHLPIHHGSTDAGDSPVGTTTATNLEQPQVIPSQGDLLGDLLNLDLGPPVNVPQVSSMQMGAVDLLGGGLDSLVGQSFIPSSVPATFAPSPTPAVVSSGLNDLFELSTGIGMAPGGYVAPKAVWLPAVKAKGLEISGTFTHRQGHIYMEMNFTNKALQHMTDFAIQFNKNSFGVIPSTPLAIHTPLMPNQSIDVSLPLNTLGPVMKMEPLNNLQVKSKENNWMDTSGRENANIMEKGIQAPFKVRKVAVKNNIDVFYFSCLIPLNVLFVEDGKMERQVFLATWKDIPNENELQFQIKECHLNADTVSSKLQNNNVYTIAKRNVEGQDMLYQSLKLTNGIWILAELRIQPGNPNYTLSLKCRAPEVSQYIYQVYDSILKN

SEQ ID NO: 859390 - protein, 951 aa, Homo sapiens; identical to SEQ ID NO: 859379

SEQ ID NO: 859391 - protein, 951 aa, Homo sapiens; identical to SEQ ID NO: 859379

SEQ ID NO: 859392 - protein, 951 aa, Homo sapiens; identical to SEQ ID NO: 859379

SEQ ID NO: 859393 - protein, 951 aa, Homo sapiens; identical to SEQ ID NO: 859379

SEQ ID NO: 859394 - protein, 702 aa, Homo sapiens
MTDSKYFTTNKKGEIFELKAELNNEKKEKRKEAVKKVIAAMTVGKDVSSLFPDVVNCMQTDNLELKKLVYLYLMNYAKSQPDMAIMAVNSFVKDCEDPNPLIRALAVRTMGCIRVDKITEYLCEPLRKCLKDEDPYVRKTAAVCVAKLHDINAQMVEDQGFLDSLRDLIADSNPMVVANAVAALSEISESHPNSNLLDLNPQNINKLLTALNECTEWGQIFILDCLSNYNPKDDREAQSICERVTPRLSHANSAVVLSAVKVLMKFLELLPKDSDYYNMLLKKLAPPLVTLLSGEPEVQYVALRNINLIVQKRPEILKQEIKVFFVKYNDPIYVKLEKLDIMIRLASQANIAQVLAELKEYATEVDVDFVRKAVRAIGRCAIKVEQSAERCVSTLLDLIQTKVNYVVQEAIVVIRDIFRKYPNKYESIIATLCENLDSLDEPDARAAMIWIVGEYAERIDNADELLESFLEGFHDESTQVQLTLLTAIVKLFLKKPSETQELVQQVLSLATQDSDNPDLRDRGYIYWRLLSTDPVTAKEVVLSEKPLISEETDLIEPTLLDELICHIGSLASVYHKPPNAFVEGSHGIHRKHLPIHHGSTDAGDSPVGTTTATNLEQPQVIPSQGDLLGDLLNLDLGPPVNVPQVSSMQMGAVDLLGGGLDSLVSIFLPLFFWLFLVLDMLESFKLFSFLELDLSLMSSSVL

SEQ ID NO: 859395 - protein, 77 aa, Homo sapiens
LGSDLGGGIGGSPAVSAICFFHHEKHCPLFDAFPMYTLSDQPLLLSSTAHQNLYNSIWVVESSIGLLGIVGVMHHMV

SEQ ID NO: 859396 - protein, 145 aa, Homo sapiens
MHTCRDEEELRRSLSELADPNPKVIKRISGGSGSGSSPFLDLTPEPGAAVYKHGALVRKVHADPDCRKTPRGKRGWKSFHGILKGMILYLQKEEYKPGKALSETELKNAISIHHALATRASDYSKRPHVFYLRTADWRVFLFQAP

SEQ ID NO: 859397 - protein, 994 aa, Homo sapiens
MVKPLSIKNTKTSCEWWRTPVVPATRGRELGRVTAPCTPLRGPPSPRVAPSPWAPSSPTGQPPPGAQSSVVIFRFVEKASVRPLNGLPAPGGLSRSWDLGGVSPPRPTPALGPGSNRKLRLEASTSDPLPARGGSALPGSRNLVHGPPAPPQVGADGLYSSLPNGLGGPPERLATLFGGPADTGFLNQGDTWSSPREVSSHAQRIARAKWEFFYGSLDPPSSGAKPPEQAPPSPPGVGSRQGSGVAVGRAAKYSETDLDTVPLRCYRETDIDEVLAEREEADSAIESQPSSEGPPGTAYPPAPRPGPLPGPHPSLGSGNEDEDDDEAGGEEDVDDEVFEASEGARPGSRMPLKSPVPFLPGTSPSADGPDSFSCVFEAILESHRAKGTSYTSLASLEALASPGPTQSPFFTFELPPQPPAPRPDPPAPAPLAPLEPDSGTSSAADGPWTQRGEEEEAEARAKLAPGREPPSPCHSEDSLGLGAAPLGSEPPLSQLVSDSDSELDSTERLALGSTDTLSNGQKADLEAAQRLAKRLYRLDGFRKADVARHLGKNNDFSKLVAGEYLKFFVFTGMTLDQALRVFLKELALMGETQERERVLAHFSQRYFQCNPEALSSEDGAHTLDLCAHAAQHGSPRHNIGKRMTCGDFIGNLEGLNDGGDFPRELLKALYSSIKNEKLQWAIDEEELRRSLSELADPNPKVIKRISGGSGSGSSPFLDLTPEPGAAVYKHGALVRKVHADPDCRKTPRGKRGWKSFHGILKGMILYLQKEEYKPGKALSETELKNAISIHHALATRASDYSKRPHVFYLRTADWRVFLFQAPSLEQMQSWITRINVVAAMFSAPPFPAAVSSQKKFSRPLLPSAATRLSQEEQVRTHEAKLKAMASELREHRAAQLGKKGRGKEAEEQRQKEAYLEFEKSRYSTYAALLRVKLKAGSEELDAVEAALAQAGSTEDGLPPSHSSPSLQPKPSSQPRAQRHSSEPRPGAGSGRRKP

SEQ ID NO: 859398 - protein, 393 aa, Homo sapiens
MIGVNSIHSSAGRLRSRSLCSVRYGRTHRGAETLCYGWPQRSRSLKPVLYTDLVVSRLQSRKKKKAALYSSIKNEKLQWAIDEEELRRSLSELADPNPKVIKRISGGSGSGSSPFLDLTPEPGAAVYKHGALVRKVHADPDCRKTPRGKRGWKSFHGILKGMILYLQKEEYKPGKALSETELKNAISIHHALATRASDYSKRPHVFYLRTADWRVFLFQAPSLEQMQSWITRINVVAAMFSAPPFPAAVSSQKKFSRPLLPSAATRLSQEEQVRTHEAKLKAMASELREHRAAQLGKKGRGKEAEEQRQKEAYLEFEKSRYSTYAALLRVKLKAGSEELDAVEAALAQAGSTEDGLPPSHSSPSLQPKPSSQPRAQRHSSEPRPGAGSGRRKP

SEQ ID NO: 859399 - protein, 232 aa, Homo sapiens [sequence omitted]

SEQ ID NO: 859400 - protein, 1092 aa, Homo sapiens
CDKSGAVPFSTTRSPRRPSPRSAGPSLSSVSPRSQLWASSGLSEEHAAPLLPAWPRHPCPPSLTPGPSMAQGAMRFCSEGDCAISPPRCPRRWLPEGPVPQSPPASMYGSTGSLLRRVAGPGPRGRELGRVTAPCTPLRGPPSPRVAPSPWAPSSPTGQPPPGAQSSVVIFRFVEKASVRPLNGLPAPGGLSRSWDLGGVSPPRPTPALGPGSNRKLRLEASTSDPLPARGGSALPGSRNLVHGPPAPPQVGADGLYSSLPNGLGGPPERLATLFGGPADTGFLNQGDTWSSPREVSSHAQRIARAKWEFFYGSLDPPSSGAKPPEQAPPSPPGVGSRQGSGVAVGRAAKYSETDLDTVPLRCYRETDIDEVLAEREEADSAIESQPSSEGPPGTAYPPAPRPGPLPGPHPSLGSGNEDEDDDEAGGEEDVDDEVFEASEGARPGSRMPLKSPVPFLPGTSPSADGPDSFSCVFEAILESHRAKGTSYTSLASLEALASPGPTQSPFFTFELPPQPPAPRPDPPAPAPLAPLEPDSGTSSAADGPWTQRGEEEEAEARAKLAPGREPPSPCHSEDSLGLGAAPLGSEPPLSQLVSDSDSELDSTERLALGSTDTLSNGQKADLEAAQRLAKRLYRLDGFRKADVARHLGKNNDFSKLVAGEYLKFFVFTGMTLDQALRVFLKELALMGETQERERVLAHFSQRYFQCNPEALSSEDGAHTLDLCAHAAQHGSPRHNIGKRMTCGDFIGNLEGLNDGGDFPRELLKALYSSIKNEKLQWAIDEEELRRSLSELADPNPKVIKRISGGSGSGSSPFLDLTPEPGAAVYKHGALVRKVHADPDCRKTPRGKRGWKSFHGILKGMILYLQKEEYKPGKALSETELKNAISIHHALATRASDYSKRPHVFYLRTADWRVFLFQAPSLEQMQSWITRINVVAAMFSAPPFPAAVSSQKKFSRPLLPSAATRLSQEEQVRTHEAKLKAMASELREHRAAQLGKKGRGKEAEEQRQKEAYLEFEKSRYSTYAALLRVKLKAGSEELDAVEAALAQAGSTEDGLPPSHSSPSLQPKPSSQPRAQRHSSEPRPGAGSGRRKP

SEQ ID NO: 859401 - protein, 1091 aa, Homo sapiens
REGLRGGRAWSKREPRCLHSSAGPSLSSVSPRSQLWASSGLSEEHAAPLLPAWPRHPCPPSLTPGPSMAQGAMRFCSEGDCAISPPRCPRRWLPEGPVPQSPPASMYGSTGSLLRRVAGPGPRGRELGRVTAPCTPLRGPPSPRVAPSPWAPSSPTGQPPPGAQSSVVIFRFVEKASVRPLNGLPAPGGLSRSWDLGGVSPPRPTPALGPGSNRKLRLEASTSDPLPARGGSALPGSRNLVHGPPAPPQVGADGLYSSLPNGLGGPPERLATLFGGPADTGFLNQGDTWSSPREVSSHAQRIARAKWEFFYGSLDPPSSGAKPPEQAPPSPPGVGSRQGSGVAVGRAAKYSETDLDTVPLRCYRETDIDEVLAEREEADSAIESQPSSEGPPGTAYPPAPRPGPLPGPHPSLGSGNEDEDDDEAGGEEDVDDEVFEASEGARPGSRMPLKSPVPFLPGTSPSADGPDSFSCVFEAILESHRAKGTSYTSLASLEALASPGPTQSPFFTFELPPQPPAPRPDPPAPAPLAPLEPDSGTSSAADGPWTQRGEEEEAEARAKLAPGREPPSPCHSEDSLGLGAAPLGSEPPLSQLVSDSDSELDSTERLALGSTDTLSNGQKADLEAAQRLAKRLYRLDGFRKADVARHLGKNNDFSKLVAGEYLKFFVFTGMTLDQALRVFLKELALMGETQERERVLAHFSQRYFQCNPEALSSEDGAHTLDLCAHAAQHGSPRHNIGKRMTCGDFIGNLEGLNDGGDFPRELLKALYSSIKNEKLQWAIDEEELRRSLSELADPNPKVIKRISGGSGSGSSPFLDLTPEPGAAVYKHGALVRKVHADPDCRKTPRGKRGWKSFHGILKGMILYLQKEEYKPGKALSETELKNAISIHHALATRASDYSKRPHVFYLRTADWRVFLFQAPSLEQMQSWITRINVVAAMFSAPPFPAAVSSQKKFSRPLLPSAATRLSQEEQVRTHEAKLKAMASELREHRAAQLGKKGRGKEAEEQRQKEAYLEFEKSRYSTYAALLRVKLKAGSEELDAVEAALAQAGSTEDGLPPSHSSPSLQPKPSSQPRAQRHSSEPRPGAGSGRRKP

SEQ ID NO: 859402 - protein, 929 aa, Homo sapiens
VRQIWRCPLQHHAESAPPLPALSWAQPLLCLSSVSALGEQRPTPALGPGSNRKLRLEASTSDPLPARGGSALPGSRNLVHGPPAPPQVGADGLYSSLPNGLGGPPERLATLFGGPADTGFLNQGDTWSSPREVSSHAQRIARAKWEFFYGSLDPPSSGAKPPEQAPPSPPGVGSRQGSGVAVGRAAKYSETDLDTVPLRCYRETDIDEVLAEREEADSAIESQPSSEGPPGTAYPPAPRPGPLPGPHPSLGSGNEDEDDDEAGGEEDVDDEVFEASEGARPGSRMPLKSPVPFLPGTSPSADGPDSFSCVFEAILESHRAKGTSYTSLASLEALASPGPTQSPFFTFELPPQPPAPRPDPPAPAPLAPLEPDSGTSSAADGPWTQRGEEEEAEARAKLAPGREPPSPCHSEDSLGLGAAPLGSEPPLSQLVSDSDSELDSTERLALGSTDTLSNGQKADLEAAQRLAKRLYRLDGFRKADVARHLGKNNDFSKLVAGEYLKFFVFTGMTLDQALRVFLKELALMGETQERERVLAHFSQRYFQCNPEALSSEDGAHTLDLCAHAAQHGSPRHNIGKRMTCGDFIGNLEGLNDGGDFPRELLKALYSSIKNEKLQWAIDEEELRRSLSELADPNPKVIKRISGGSGSGSSPFLDLTPEPGAAVYKHGALVRKVHADPDCRKTPRGKRGWKSFHGILKGMILYLQKEEYKPGKALSETELKNAISIHHALATRASDYSKRPHVFYLRTADWRVFLFQAPSLEQMQSWITRINVVAAMFSAPPFPAAVSSQKKFSRPLLPSAATRLSQEEQVRTHEAKLKAMASELREHRAAQLGKKGRGKEAEEQRQKEAYLEFEKSRYSTYAALLRVKLKAGSEELDAVEAALAQAGSTEDGLPPSHSSPSLQPKPSSQPRAQRHSSEPRPGAGSGRRKP

SEQ ID NO: 859403 - protein, 1117 aa, Homo sapiens
CDKSGAVPFSTTRSPRRPSPRSAGPSLSSVSPRSQLWASSGLSEEHAAPLLPAWPRHPCPPSLTPGPSMAQGAMRFCSEGDCAISPPRCPRRWLPEGPVPQSPPASMYGSTGSLLRRVAGPGPRGRELGRVTAPCTPLRGPPSPRVAPSPWAPSSPTGQPPPGAQSSVVIFRFVEKASVRPLNGLPAPGGLSRSWDLGGVSPPRPTPALGPGSNRKLRLEASTSDPLPARGGSALPGSRNLVHGPPAPPQVGADGLYSSLPNGLGGPPERLATLFGGPADTGFLNQGDTWSSPREVSSHAQRIARAKWEFFYGSLDPPSSGAKPPEQAPPSPPGVGSRQGSGVAVGRAAKYSETDLDTVPLRCYRETDIDEVLAEREEADSAIESQPSSEGPPGTAYPPAPRPGPLPGPHPSLGSGNEDEDDDEAGGEEDVDDEVFEASEGARPGSRMPLKSPVPFLPGTSPSADGPDSFSCVFEAILESHRAKGTSYTSLASLEALASPGPTQSPFFTFELPPQPPAPRPDPPAPAPLAPLEPDSGTSSAADGPWTQRGEEEEAEARAKLAPGREPPSPCHSEDSLGLGAAPLGSEPPLSQLVSDSDSELDSTERLALGSTDTLSNGQKADLEAAQRLAKRLYRLDGFRKADVARHLGKNNDFSKLVAGEYLKFFVFTGMTLDQALRVFLKELALMGETQERERVLAHFSQRYFQCNPEALSSEDGAHTLDLCAHAAQHGSPRHNIGKRMTCGDFIGNLEGLNDGGDFPRELLKALYSSIKNEKLQWAMATEARTEAGAAAPWPAPSEVITTCRDEEELRRSLSELADPNPKVIKRISGGSGSGSSPFLDLTPEPGAAVYKHGALVRKVHADPDCRKTPRGKRGWKSFHGILKGMILYLQKEEYKPGKALSETELKNAISIHHALATRASDYSKRPHVFYLRTADWRVFLFQAPSLEQMQSWITRINVVAAMFSAPPFPAAVSSQKKFSRPLLPSAATRLSQEEQVRTHEAKLKAMASELREHRAAQLGKKGRGKEAEEQRQKEAYLEFEKSRYSTYAALLRVKLKAGSEELDAVEAALAQAGSTEDGLPPSHSSPSLQPKPSSQPRAQRHSSEPRPGAGSGRRKP

SEQ ID NO: 859404 - protein, 232 aa, Homo sapiens [sequence omitted]

SEQ ID NO: 859405 - protein, 232 aa, Homo sapiens [sequence omitted]

SEQ ID NO: 859406 - protein, 76 aa, Homo sapiens
MPCMFHLSSAVRPKPEVGLHLSIWGDSAWPNSGGDCSRRERCSRKKGLAEQTGPKEGCAQYTVPSLHMPRDLTPFY

SEQ ID NO: 859407 - protein, 111 aa, Homo sapiens
MPCMFHLSSAVRPKPEVGLHLSIWGDSAWPNSGGDCSRRERCSRKKGLAEQTGPKEGCARSGNNKWFSNSIVPSSNQQTAGWLQIFHPPTKAASNPCLCSGGGNLCLLQSL

SEQ ID NO: 859408 - protein, 66 aa, Homo sapiens
RLSCCSGERVGTGLEEMLQAFSTQSGMNLEWSQKCLQDNNWDYTRSAQAFTHLKAKGEIPEVAFMK

SEQ ID NO: 859409 - protein, 619 aa, Homo sapiens
MADEGKSYSEHDDERVNFPQRKKKGRGPFRWKYGEGNRRSGRGGSGIRSSRLEEDDGDVAMSDAQDGPRVRYNPYTTRPNRRGDTWHDRDRIHVTVRRDRAPPERGGAGTSQDGTSKNWFKITIPYGRKYDKAWLLSMIQSKCSVPFTPIEFHYENTRAQFFVEDASTASALKAVNYKILDRENRRISIIINSSAPPHTILNELKPEQVEQLKLIMSKRYDGSQQALDLKGLRSDPDLVAQNIDVVLNRRSCMAATLRIIEENIPELLSLNLSNNRLYRLDDMSSIVQKAPNLKILNLSGNELKSERELDKIKGLKLEELWLDGNSLCDTFRDQSTYISAIRERFPKLLRLDGHELPPPIAFDVEAPTTLPPCKGSYFGTENLKSLVLHFLQQYYAIYDSGDRQGLLDAYHDGACCSLSIPFIPQNPARSSLAEYFKDSRNVKKLKDPTLRFRLLKHTRLNVVAFLNELPKTQHDVNSFVVDISAQTSTLLCFSVNGVFKEVDGKSRDSLRAFTRTFIAVPASNSGLCIVNDELFVRNASSEEIQRAFAMPAPTPSSSPVPTLSPEQQEMLQAFSTQSGMNLEWSQKCLQDNNWDYTRSAQAFTHLKAKGEIPEVAFMK

SEQ ID NO: 859410 - protein, 619 aa, Homo sapiens; identical to SEQ ID NO: 859409

SEQ ID NO: 859411 - protein, 619 aa, Homo sapiens; identical to SEQ ID NO: 859409

SEQ ID NO: 859412 - protein, 619 aa, Homo sapiens; identical to SEQ ID NO: 859409

SEQ ID NO: 859413 - protein, 526 aa, Homo sapiens [sequence omitted]

SEQ ID NO: 859414 - protein, 605 aa, Homo sapiens
MADEGKSYSEHDDERVNFPQRKKKGRGPFRWKYGEGNRRSGRGGSGIRSSRLEEDDGDVAMSDAQDGPRVRYNPYTTRPNRRGDTWHDRDRIHVTVRRDRAPPERGGAGTSQDGTSKNWFKITIPYGRKYDKAWLLSMIQSKCSVPFTPIEFHYENTRAQFFVEDASTASALKAVNYKILDRENRRISIIINSSAPPHTILNELKPEQVEQLKLIMSKRYDGSQQALDLKGLRSDPDLVAQNIDVVLNRRSCMAATLRIIEENIPELLSLNLSNNRLYRLDDMSSIVQKAPNLKILNLSGNELKSERELDKIKGLKLEELWLDGNSLCDTFRDQSTYISAIRERFPKLLRLDGHELPPPIAFDVEAPTTLPPCKGSYFGTENLKSLVLHFLQQYYAIYDSGDRQGLLDAYHDGACCSLSIPFIPQNPARSSLAEYFKDSRNVKKLKDPTLRFRLLKHTRLNVVAFLNELPKTQHDVNSFVVDISAQTSTLLCFSVNGVFKEVDGKSRDSLRAFTRTFIAVPASNSGSEEIQRAFAMPAPTPSSSPVPTLSPEQQEMLQAFSTQSGMNLEWSQKCLQDNNWDYTRSAQAFTHLKAKGEIPEVAFMK

SEQ ID NO: 859415 - protein, 374 aa, Homo sapiens
ALRPDGESTLLAPVNNAFSDDTLSMDQRLLKLILQNHILKVKVGLNELYNWANTGNELKSERELDKIKGLKLEELWLDGNSLCDTFRDQSTYISAIRERFPKLLRLDGHELPPPIAFDVEAPTTLPPCKGSYFGTENLKSLVLHFLQQYYAIYDSGDRQGLLDAYHDGACCSLSIPFIPQNPARSSLAEYFKDSRNVKKLKDPTLRFRLLKHTRLNVVAFLNELPKTQHDVNSFVVDISAQTSTLLCFSVNGVFKEVDGKSRDSLRAFTRTFIAVPASNSGLCIVNDELFVRNASSEEIQRAFAMPAPTPSSSPVPTLSPEQQEMLQAFSTQSGMNLEWSQKCLQDNNWDYTRSAQAFTHLKAKGEIPEVAFMK

SEQ ID NO: 859416 - protein, 275 aa, Homo sapiens
SSVPPEVDGHELPPPIAFDVEAPTTLPPCKGSYFGTENLKSLVLHFLQQYYAIYDSGDRQGLLDAYHDGACCSLSIPFIPQNPARSSLAEYFKDSRNVKKLKDPTLRFRLLKHTRLNVVAFLNELPKTQHDVNSFVVDISAQTSTLLCFSVNGVFKEVDGKSRDSLRAFTRTFIAVPASNSGLCIVNDELFVRNASSEEIQRAFAMPAPTPSSSPVPTLSPEQQEMLQAFSTQSGMNLEWSQKCLQDNNWDYTRSAQAFTHLKAKGEIPEVAFMK

SEQ ID NO: 859417 - protein, 587 aa, Homo sapiens
MADEGKSYSEHDDERVNFPQRKKKGRGPFRWKYGEGNRRSGRGGSGIRSSRLEEDDGDVAMSDAQDGPRVRYNPYTTRPNRRGDTWHDRDRIHVTVRRDRAPPERGGAGTSQDGTSKNWFKITIPYGRKYDKAWLLSMIQSKCSVPFTPIEFHYENTRAQFFVEDASTASALKAVNYKILDRENRRISIIINSSAPPHTILNELKPEQVEQLKLIMSKRYDGSQQALDLKGLRSDPDLVAQNIDVVLNRRSCMAATLRIIEENIPELLSLNLSNNRLYRLDDMSSIVQKAPNLKILNLSGNELKSERELDKIKGLKLEELWLDGNSLCDTFRDQSTYISAIRERFPKLLRLDGHELPPPIAFDVEAPTTLPPCKGSYFGTENLKSLVLHFLQQYYAIYDSGDRQGLLDAYHDGACCSLSIPFIPQNPARSSLAEYFKDSRNVKKLKDPTLRFRLLKHTRLNVVAFLNELPKTQHDVNSFVVDISAQTSTLLCFSVNGVFKEVDGKSRDSLRAFTRTFIAVPASNSGLCIVNDELFVRNASSEEIQRAFAMPAPTPSSSPVPTLSPEQQEMLQAFSTQSGMNLEWSQK

SEQ ID NO: 859418 - protein, 106 aa, Homo sapiens
MLTFIAVPASNSGLCIVNDELFVRNASSEEIQRAFAMPAPTPSSSPVPTLSPEQQEMLQAFSTQSGMNLEWSQKCLQDNNWDYTRSAQAFTHLKAKGEIPEVAFMK

SEQ ID NO: 859419 - protein, 79 aa, Homo sapiens
PRPSLLAKLPSAPTPSSSPVPTLSPEQQEMLQAFSTQSGMNLEWSQKCLQDNNWDYTRSAQAFTHLKAKGEIPEVAFMK

SEQ ID NO: 859420 - protein, 176 aa, Homo sapiens
MADEGKSYSEHDDERVNFPQRKKKGRGPFRWKYGEGNRRSGRGGSGIRSSRLEEDDGDVAMSDAQDGPRVRYNPYTTRPNRRGDTWHDRDRIHVTVRRDRAPPERGGAGTSQDGTSKNWFKITIPYGRKYDKAWLLSMIQSKCSVPFTPIEFHYEITSWLNHYVNSRRLQVDNMEA

SEQ ID NO: 859421 - protein, 619 aa, Homo sapiens; identical to SEQ ID NO: 859409

SEQ ID NO: 859422 - protein, 619 aa, Homo sapiens; identical to SEQ ID NO: 859409

SEQ ID NO: 859423 - protein, 619 aa, Homo sapiens; identical to SEQ ID NO: 859409

SEQ ID NO: 859424 - protein, 512 aa, Homo sapiens
MADEGKSYSEHDDERVNFPQRKKKGRGPFRWKYGEGNRRSGRGGSGIRSSRLEEDDGDVAMSDAQDGPRVRYNPYTTRPNRRGDTWHDRDRIHVTVRRDRAPPERGGAGTSQDGTSKNWFKITIPYGRKYDKAWLLSMIQSKCSVPFTPIEFHYENTRAQFFVEDASTASALKAVNYKILDRENRRISIIINSSAPPHTILNELKPEQVEQLKLIMSKRYDGSQQALDLKGLRSDPDLVAQNIDVVLNRRSCMAATLRIIEENIPELLSLNLSNNRLYRLDDMSSIVQKAPNLKILNLSGNELKSERELDKIKGLKLEELWLDGNSLCDTFRDQSTYISAIRERFPKLLRLDGHELPPPIAFDVEAPTTLPPCKGSYFGTENLKSLVLHFLQQYYAIYDSGDRQGLLDAYHDGACCSLSIPFIPQNPARSSLAEYFKDSRNVKKLKDPTLRFRLLKHTRLNVVAFLNELPAHCCVFLSMESSRKWTESPGILCEPSPGHSLLFLLAIQGYVL

SEQ ID NO: 859425 - protein, 605 aa, Homo sapiens; identical to SEQ ID NO: 859414

SEQ ID NO: 859426 - protein, 254 aa, Homo sapiens
MSYPHQLPLMLKPPRRYRPARRKLFWTQYYAIYDSGDRQGLLDAYHDGACCSLSIPFIPQNPARSSLAEYFKDSRNVKKLKDPTLRFRLLKHTRLNVVAFLNELPKTQHDVNSFVVDISAQTSTLLCFSVNGVFKEVDGKSRDSLRAFTRTFIAVPASNSGLCIVNDELFVRNASSEEIQRAFAMPAPTPSSSPVPTLSPEQQEMLQAFSTQSGMNLEWSQKCLQDNNWDYTRSAQAFTHLKAKGEIPEVAFMK

SEQ ID NO: 859427 - protein, 265 aa, Homo sapiens
LTVSPRLECNGVILAHCNLCLPGFKGFSCLSLPSSWDYRYYAIYDSGDRQGLLDAYHDGACCSLSIPFIPQNPARSSLAEYFKDSRNVKKLKDPTLRFRLLKHTRLNVVAFLNELPKTQHDVNSFVVDISAQTSTLLCFSVNGVFKEVDGKSRDSLRAFTRTFIAVPASNSGLCIVNDELFVRNASSEEIQRAFAMPAPTPSSSPVPTLSPEQQEMLQAFSTQSGMNLEWSQKCLQDNNWDYTRSAQAFTHLKAKGEIPEVAFMK

SEQ ID NO: 859428 - protein, 356 aa, Homo sapiens
MADEGKSYSEHDDERVNFPQRKKKGRGPFRWKYGEGNRRSGRGGSGIRSSRLEEDDGDVAMSDAQDGPRVRYNPYTTRPNRRGDTWHDRDRIHVTVRRDRAPPERGGAGTSQDGTSKNWFKITIPYGRKYDKAWLLSMIQSKCSVPFTPIEFHYENTRAQFFVEDASTASALKAVNYKILDRENRRISIIINSSAPPHTILNELKPEQVEQLKLIMSKRYDGSQQALDLKGLRSDPDLVAQNIDVVLNRRSCMAATLRIIEENIPELLSLNLSNNRLYRLDDMSSIVQKAPNLKILNLSGNELKSERELDKIKGLKLEELWLDGNSLCDTFRDQSTYIRSVVACVSPPGDLHPLGG

SEQ ID NO: 859429 - protein, 106 aa, Homo sapiens; identical to SEQ ID NO: 859418

SEQ ID NO: 859430 - protein, 110 aa, Homo sapiens
ARYPLVHGWLLVHGWLLVHGWLLVHGCLPENICLPTKLRLPTNPCLPISPGLPASPGLPASARLPTSPRLPASLCLPASSCLPTTTQSSINWLNIHSSVLPRHLSQPWTS

SEQ ID NO: 859431 - protein, 209 aa, Homo sapiens
TFPQVTGLPTNSGSSSDFKSSSNGVTGFQAKPMSSKTIHVFQKILVFPQIHSFRKIQVFQEIRVFQQIHVFQQSHVFHQINVFQPTCVFQQRYVFQQRYVFQQRYVFQQRYVFQKIHVFQPSHVFQKIHVFQKIYVFQLSYVFQQIHVFLYLQVFQHLQGFQHLLVFQHLHVFQHLCVFQHLHVFQQLPSLPSTGSISMSSNVSSVLIF

SEQ ID NO: 859432 - protein, 209 aa, Homo sapiens; identical to SEQ ID NO: 859431

SEQ ID NO: 859433 - protein, 146 aa, Homo sapiens
TFPQVTGLPTNSGSSSDFKSSSKVSLASKQSLCLPGLSMSSRKSLSSLKSIASEKSRSSRKSVSSSKSTSSNKAMSSIKLMSSSLLVSSNKGRSSSISRASSICSSSNISTSSSISVSSSIFMSSNNYPVFHQLAQYPCLPTSPVC

SEQ ID NO: 859434 - protein, 161 aa, Homo sapiens
TFPQVTGLPTNSGSSSDFKSSSNGVTGFQAKPMSSKTIHVFQKILVFPQIHSFRKIQVFQEIRVFQQIHVFQQSHVFHQINVFQPTCVFQQRYVFQQRYVFQQRYVFQQRYVFQKIHVFQPSHVFQKIHVFQKIYVFQLLPSLPSTGSISMSSNVSSVLIF

SEQ ID NO: 859435 - protein, 209 aa, Homo sapiens; identical to SEQ ID NO: 859431

SEQ ID NO: 859436 - protein, 204 aa, Homo sapiens
MSSRKSMSSSNLPVFQKIHVFPTIQVFRIIWVFLKIYVFQKSHVFQKHIPHLPMASRSSRLSMSSRKSLSSLKSIASKKSGSSRKSVSSSKSTSSNKAMSSRLSMSSRKSLSSLKSIASEKSRSSRKSVSSSKSTSSNKAMSSIKLMSSSLLVSSNKGTSSNKGTSSNKGMSSNKGTSSRKSTSSNQAMSSRKSTSSRKYMSSN

SEQ ID NO: 859437 - protein, 204 aa, Homo sapiens; identical to SEQ ID NO: 859436

SEQ ID NO: 859438 - protein, 209 aa, Homo sapiens; identical to SEQ ID NO: 859431

SEQ ID NO: 859439 - protein, 204 aa, Homo sapiens; identical to SEQ ID NO: 859436

SEQ ID NO: 859440 - protein, 200 aa, Homo sapiens
  misc_feature (13)..(13): Xaa can be any naturally occurring amino acid
YCCVMEKELQLRXLCYASLTGEYKPLISATLGISSSKKAMSSRNNPHLPMASRSSRLSMSSRKSLSSLKSIASKKSGSSRKSVSSSKSTSSNKAMSSRLSMSSRKSLSSLKSIASEKSRSSRKSVSSSKSTSSNKAMSSIKLMSSSLLVSSNKGTSSNKGTSSNKGMSSNKGTSSRKSTSSNQAMSSRKSTSSRKYMSSN

SEQ ID NO: 859441 - protein, 209 aa, Homo sapiens; identical to SEQ ID NO: 859431

SEQ ID NO: 859442 - protein, 242 aa, Homo sapiens
EEDLDLFLEDMMDWKIQILLEELDILEDWDWVEDRDFSGRHGLAGRSVLDGRPGNYWKRWISCKICVFHLIHVFQKILVFPQIHSFRKIQVFQEIRVFQQIHVFQQSHVFHQINVFQPTCVFQQRYVFQQRYVFQQRYVFQQRYVFQKIHVFQPSHVFQKIHVFQKIYVFQLSYVFQQIHVFLYLQVFQHLQGFQHLLVFQHLHVFQHLCVFQHLHVFQQLPSLPSTGSISMSSNVSSVLIF

SEQ ID NO: 859443 - protein, 209 aa, Homo sapiens; identical to SEQ ID NO: 859431

SEQ ID NO: 859444 - protein, 209 aa, Homo sapiens; identical to SEQ ID NO: 859431

SEQ ID NO: 859445 - protein, 252 aa, Homo sapiens
TFPQVTGLPTNSGSSSDFKSSSNGVTGFQAKPMSSKTIHVFQKILVFPQIHSFRKIQVFQEIRVFQQIHVFQQSHVFHQINVFQPTCVFQQRYVFQQRYVFQQRYVFQQRYVFQKIHVFQPSHVFQKIHVFQKIYVFQLSYVFQQIHVFLYLQVFQHLQGFQHLLVFQHLHVFQHLCVFQHLHVFQQLPSLPSTGSISMSSNVSSVLIFQEAPSLPVNQVFQQIQSSSNYWSSTKSRSSRKIHVFQEIHVFQ

SEQ ID NO: 859446 - protein, 209 aa, Homo sapiens; identical to SEQ ID NO: 859431

SEQ ID NO: 859447 - protein, 209 aa, Homo sapiens; identical to SEQ ID NO: 859431

SEQ ID NO: 859448 - protein, 209 aa, Homo sapiens; identical to SEQ ID NO: 859431

SEQ ID NO: 859449 - protein, 206 aa, Homo sapiens
ARYPLVHGWLLRVFQEIRVFQQVHVFQQSHVFQTIHVFQKILVFPQIHSFRKIQVFQEIRVFQQIHVFQQSHVFHQINVFQPTCVFQQRYVFQQRYVFQQRYVFQQRYVFQKIHVFQPSHVFQKIHVFQKIYVFQLSYVFQQIHVFLYLQVFQHLQGFQHLLVFQHLHVFQHLCVFQHLHVFQQLPSLPSTGSISMSSNVSSVLIF

SEQ ID NO: 859450 - protein, 190 aa, Homo sapiens
  misc_feature (187)..(187): Xaa can be any naturally occurring amino acid
MEGGGGSGNKTTGGLAGFFGAGGAGYSHADLAGVPLTGMNPLSPYLNVDPRYLVQDTDEFILPTGANKTRGRFELAFFTIGGCCMTGAAFGAMNGLRLGLKETQNMAWSKPRNVQILNMVTRQGALWANTLGSLALLYSAFGVIIEKTRGAEDDLNTVAAGTMTGMLYKCTETGFHHGAQAGLTGGXSRQ

SEQ ID NO: 859451 - protein, 142 aa, Homo sapiens
MNPLSPYLNVDPRYLVQDTDEFILPTGANKTRGRFELAFFTIGGCCMTGAAFGAMNGLRLGLKETQNMAWSKPRNVQILNMVTRQGALWANTLGSLALLYSAFGVIIEKTRGAEDDLNTVAAGTMTGMLYKCTAGVQWRDLG

SEQ ID NO: 859452 - protein, 209 aa, Homo sapiens
MEGGGGSGNKTTGGLAGFFGAGGAGYSHADLAGVPLTGMNPLSPYLNVDPRYLVQDTDEFILPTGANKTRGRFELAFFTIGGCCMTGAAFGAMNGLRLGLKETQNMAWSKPRNVQILNMVTRQGALWANTLGSLALLYSAFGVIIEKTRGAEDDLNTVAAGTMTGMLYKCTGGLRGIARGGLTGLTLTSLYALYNNWEHMKGSLLQQSL

SEQ ID NO: 859453 - protein, 261 aa, Homo sapiens
MEGGGGSGNKTTGGLAGFFGAGGAGYSHADLAGVPLTGMNPLSPYLNVDPRYLVQDTDEFILPTGANKTRGRFELAFFTIGGCCMTGAAFGAMNGLRLGLKETQNMAWSKPRNVQILNMVTRQGALWANTLGSLALLYSAFGVIIEKTRGAEDDLNTVAAGTMTGMLYKCTDRVLPCCLGCSQTPELKPASASQSAGITCVSHHAWPSLIFKVNIWRTHPESKGGLRGIARGGLTGLTLTSLYALYNNWEHMKGSLLQQSL

SEQ ID NO: 859454 - protein, 222 aa, Homo sapiens
MEGGGGSGNKTTGGLAGFFGAGGAGYSHADLAGVPLTGMNPLSPYLNVDPRYLVQDTDEFILPTGANKTRGRFELAFFTIGGCCMTGAAFGAMNGLRLGLKETQNMAWSKPRNVQILNMVTRQGALWANTLGSLALLYSAFGVIIEGMLYKCTETGFHHGAQASLKLLSSSDPPCLGLPSIGITGGLRGIARGGLTGLTLTSLYALYNNWEHMKGSLLQQSL

SEQ ID NO: 859455 - protein, 190 aa, Homo sapiens
MEGGGGSGNKTTGGLAGFFGAGGAGYSHADLAGVPLTGMNPLSPYLNVDPRYLVQDTDEFILPTGANRAAFGAMNGLRLGLKETQNMAWSKPRNVQILNMVTRQGALWANTLGSLALLYSAFGVIIEKTRGAEDDLNTVAAGTMTGMLYKCTGGLRGIARGGLTGLTLTSLYALYNNWEHMKGSLLQQSL

SEQ ID NO: 859456 - protein, 105 aa, Homo sapiens
MEGGGGSGNKTTGGLAGFFGAGGAGYSHADLAGVPLTGMNPLSPYLNVDPRYLVQDTDEFILPTGANKTRGRFELAFFTIGGCCMTGAAFGAMNGLRLGLKETRF

SEQ ID NO: 859457 - protein, 172 aa, Homo sapiens
MEGGGGSGNKTTGGLAGFFGAGGAGYSHADLAGVPLTGMNPLSPYLNVDPRYLVQDTDEFILPTGANKTRGRFELAFFTIGGCCMTGALWANTLGSLALLYSAFGVIIEKTRGAEDDLNTVAAGTMTGMLYKCTGGLRGIARGGLTGLTLTSLYALYNNWEHMKGSLLQQSL

SEQ ID NO: 859458 - protein, 175 aa, Homo sapiens
MEGGGGSGNKTTGGLAGFFGAGGAGYSHADLAGVPLTGMNPLSPYLNVDPRYLVQDTDEFILPTGANKTRGRFELAFFTIGGCCMTGAAFGAMNGLRLGLKETQNMAWSKPRNVQILNMVTRQGALWANTLGSLALLYSAFGVIIEKTRGAEDDLNTVAAGTMTGMLYKCTGEYC

SEQ ID NO: 859459 - protein, 130 aa, Homo sapiens
MEGGGGSGNKTTGGLAGFFGAGGAGYSHADLAGVPLTGMNPLSPYLNVDPRYLVQDTDEFILPTGANKTRGRFELAFFTIGGCCMTGAAFGAMNGLRLGLKETQNHLLPEFRSCLLVLYHQVHSFNDPKL

SEQ ID NO: 859460 - protein, 188 aa, Homo sapiens
MEGGGGSGNKTTGGLAGFFGAGGAGYSHADLAGVPLTGMNPLSPYLNVDPRYLVQDTDEFILPTGANKTRGRFELAFFTIGGCCMTGAAFGAMNGLRLGLKETQNMAWSKPRNVQILNMVTRQGALWANTLGSLALLYSAFGVIIEKTRGAEDDLNTVAAGTMTGMLYKCTVSEMALDSPFCVLLSGS

SEQ ID NO: 859461 - protein, 209 aa, Homo sapiens; identical to SEQ ID NO: 859452

SEQ ID NO: 859462 - protein, 240 aa, Homo sapiens
MEGGGGSGNKTTGGLAGFFGAGGAGYSHADLAGVPLTGMNPLSPYLNVDPRYLVQDTDEFILPTGANKTRGRFELAFFTIGGCCMTGAAFGAMNGLRLGLKETQNMAWSKPRNVQILNMVTRQGALWANTLGSLALLYSAFGVIIEKTRGAEDDLNTVAAGTMTGMLYKCTETGFHHGAQASLKLLSSSDPPCLGLPSIGITGGLRGIARGGLTGLTLTSLYALYNNWEHMKGSLLQQSL

SEQ ID NO: 859463 - protein, 125 aa, Homo sapiens
MTGAAFGAMNGLRLGLKETQNMAWSKPRNVQILNMVTRQGALWANTLGSLALLYSAFGVIIEKTRGAEDDLNTVAAGTMTGMLYKCTGGLRGIARGGLTGLTLTSLYALYNNWEHMKGSLLQQSL

SEQ ID NO: 859464 - protein, 141 aa, Homo sapiens
MTNLKWELAFFTIGGCCMRAAFGAMNGLRLGLKETQNMAWSKPRNVQILNMVTRQGALWANTLGSLALLYSAFGVIIEKTRGAEDDLNTVAAGTMTGMLYKCTGGLRGIARGGLTGLTLTSLYALYNNWEHMKGSLLQQSL

SEQ ID NO: 859465 - protein, 118 aa, Homo sapiens
MEGGGGSGNKTTGGLAGFFGAGGAGYSHADLAGVPLTGMNPLSPYLNVDPRYLVQDTDEFILPTGANKTRGRFELAFFTIGGCCMTGAAFGAMNGLRLGLKETQNMAWSKPRNVHFAL

SEQ ID NO: 859466 - protein, 225 aa, Homo sapiens
MEGGGGSGNKTTGGLAGFFGAGGAGYSHADLAGVPLTGMNPLSPYLNVDPRYLVQDTDEFILPTGANKTRGRFELAFFTIGGCCMTGAAFGAMNGLRLGLKETQNMAWSKPRNVQILNMVTRQGALWANTLGSLALLYSAFGVIIEKTRGAEDDLNTVAAGTMTGMLYKCTDRVLPCCLGCSQTPELKPASASQSAGITCVSHHAWPSLIFKVNIWRTHPESKGC

SEQ ID NO: 859467 - protein, 115 aa, Homo sapiens
MEGGGGSGNKTTGGLAGFFGAGGAGYSHADLAGVPLTGMNPLSPYLNVDPRYLVQDTDEFILPTGANKTRGRFELAFFTIGGCCMTGAAFGAMNGLRLGLKETQNMAWSKPRNVQ

SEQ ID NO: 859468 - protein, 263 aa, Homo sapiens
MPGLLLCEPTELYNILNQATKLSRLTDPNYLCLLDVRSKWEYDESHVITALRVKKKNNEYLLPESVDLECVKYCVVYDNNSSTLEILLKDDDDDSDSDGDGKDLVPQAAIEYGRILTRLTHHPVYILKGGYERFSGTYHFLRTQKIIWMPQELDAFQPYPIEIVPGKVFVGNFSQACDPKIQKDLKIKAHVNVSMDTGPFFAGDADKLLHIRIEDSPEAQILPFLRHMCHFIEIHHHLGSVILIFSTQGYQPQLCRHHSLPHA

SEQ ID NO: 859469 - protein, 112 aa, Homo sapiens [sequence omitted]

SEQ ID NO: 859470 - protein, 166 aa, Homo sapiens
MPGLLLCEPTELYNILNQATKLSRLTDPNYLCLLDVRSKWEYDESHVITALRVKKKNNEYLLPESVDLECVKYCVVYDNNSSTLEILLKDDDDDSDSDGDGKDLVPQAAIEYGRILTRLTHHPVYILKGGYERFSGTYHFLRTQKIIWMPQKRRGFTVLARMVSIS

SEQ ID NO: 859471 - protein, 263 aa, Homo sapiens; identical to SEQ ID NO: 859468

SEQ ID NO: 859472 - protein, 227 aa, Homo sapiens
MPGLLLCEPTELYNILNQATKLSRLTDPNYLCLLDVRSKWEYDESHVITALRVKKGLNYFTFPPTVYLVPQAAIEYGRILTRLTHHPVYILKGGYERFSGTYHFLRTQKIIWMPQELDAFQPYPIEIVPGKVFVGNFSQACDPKIQKDLKIKAHVNVSMDTGPFFAGDADKLLHIRIEDSPEAQILPFLRHMCHFIEIHHHLGSVILIFSTQGYQPQLCRHHSLPHA

SEQ ID NO: 859473 - protein, 61 aa, Homo sapiens
MGEDYPWRFHHKHHGSALLIFSEAHRRVLKSLTWGHFVGGGPECVYPGLSGRRRPLLPESL

SEQ ID NO: 859474 - protein, 167 aa, Homo sapiens
MPGLLLCEPTELYNILNQATKLSRLTDPNYLCLLDVRSKWEYDESHVITALRVKKELDAFQPYPIEIVPGKVFVGNFSQACDPKIQKDLKIKAHVNVSMDTGPFFAGDADKLLHIRIEDSPEAQILPFLRHMCHFIEIHHHLGSVILIFSTQGYQPQLCRHHSLPHA

SEQ ID NO: 859475 - protein, 318 aa, Homo sapiens
MPGLLLCEPTELYNILNQATKLSRLTDPNYLCLLDVRSKWEYDESHVITALRVKKKNNEYLLPESVDLECVKYCVVYDNNSSTLEILLKDDDDDSDSDGDGKDLVPQAAIEYGRILTRLTHHPVYILKGGYERFSGTYHFLRTQKIIWMPQELDAFQPYPIEIVPGKVFVGNFSQACDPKIQKDLKIKAHVNVSMDTGPFFAGDADKLLHIRIEDSPEAQILPFLRHMCHFIEVLGLCQEVQKQHVSKSGIGEPAAGMGEDYPWRFHHKHHGSALLIFSEAHRRVLKSLTWGHFVGGGPECVYPGLSGRRRPLLPESL

SEQ ID NO: 859476 - protein, 180 aa, Homo sapiens
MMMMIQTLMVMAKELDAFQPYPIEIVPGKVFVGNFSQACDPKIQKDLKIKAHVNVSMDTGPFFAGDADKLLHIRIEDSPEAQILPFLRHMCHFIEVLGLCQEVQKQHVSKSGIGEPAAGMGEDYPWRFHHKHHGSALLIFSEAHRRVLKSLTWGHFVGGGPECVYPGLSGRRRPLLPESL

SEQ ID NO: 859477 - protein, 247 aa, Homo sapiens
MPGLLLCEPTELYNILNQATKLSRLTDPNYLCLLDVRSKWEYDESHVITALRVKKKNNEYLLPESVDLECVKYCVVYDNNSSTLEILLKDDDDDSDSDGDGKDLVPQAAIEYGRILTRLTHHPVYILKGGYERFSGTYHFLRTQKIIWMPQELDAFQPYPIEIVPGKVFVGNFSQACDPKIQKDLKIKAHVNVSMDTGPFFAGDADKLLHIRIEDSPEAQILPFLRHMCHFIGYQPQLCRHHSLPHA

SEQ ID NO: 859478 - protein, 115 aa, Homo sapiens
MPQELDAFQPYPIEIVPGKVFVGNFSQACDPKIQKDLKIKAHVNVSMDTGPFFAGDADKLLHIRIEDSPEAQILPFLRHMCHFIEIHHHLGSVILIFSTQGYQPQLCRHHSLPHA

SEQ ID NO: 859479 - protein, 124 aa, Homo sapiens
AGVQWHSHSSLQPRFPGIKPSSHLSLRSGWNCKHEAPRLFAPRTPGSGGCWTGLPGSVASTGSWRPWRMTTSRMTPTRDSLSSARDCLSLMTMRTLERKRRKPEVIILNFASEKTFRPCWRSRT

SEQ ID NO: 859480 - protein, 314 aa, Homo sapiens
AASDQPDSAATTEKAKKIKNLKKKLRQVEELQQRIQAGEVSQPSKEQLEKLARRRALEEELEDLELASEALGNREWTAEQTVGLSGVWGNTGNSSQEGYPPYWLPPPAAQLCPPEPSVSLNPSLFFPTSTFGLSPTHLIFFKQDTQISSKGTLGSSTRRPMVEKKTSVRSQDPGQRRVLDRAARQRRINRQLEALENDNFQDDPHAGLPQLGKRLPQFDDDADTGKKKKKTRGDHFKLRFRKNFQALLEEQNLSVAEGPNYLTACAGPPSRPQRPFCAVCGFPSPYTCVSCGARYCTVRCLGTHQETRCLKWTV

SEQ ID NO: 859481 - protein, 154 aa, Homo sapiens
MVEKKTSVRSQDPGQRRVLDRAARQRRINRQLEALENDNFQDDPHAGLPQLGKRLPQFDDDADTGKKKKKTRGDHFKLRFRKNFQALLEEQNLSVAEGPNYLTACAGPPSRPQRPFCAVCGFPSPYTCVSCGARYCTVRCLGTHQETRCLKWTV

SEQ ID NO: 859482 - protein, 154 aa, Homo sapiens; identical to SEQ ID NO: 859481

SEQ ID NO: 859483 - protein, 202 aa, Homo sapiens
LECSGIVIAHCSLDFLGSNHPPTSASGVAGTASMRPHAWLIFNLLCGDGLSLCCPVRSQDPGQRRVLDRAARQRRINRQLEALENDNFQDDPHAGLPQLGKRLPQFDDDADTGKKKKKTRGDHFKLRFRKNFQALLEEQNLSVAEGPNYLTACAGPPSRPQRPFCAVCGFPSPYTCVSCGARYCTVRCLGTHQETRCLKWTV

SEQ ID NO: 859484 - protein, 124 aa, Homo sapiens; identical to SEQ ID NO: 859479

SEQ ID NO: 859485 - protein, 154 aa, Homo sapiens; identical to SEQ ID NO: 859481

SEQ ID NO: 859486 - protein, 154 aa, Homo sapiens; identical to SEQ ID NO: 859481

SEQ ID NO: 859487 - protein, 154 aa, Homo sapiens; identical to SEQ ID NO: 859481

SEQ ID NO: 859488 - protein, 154 aa, Homo sapiens; identical to SEQ ID NO: 859481

SEQ ID NO: 859489 - protein, 314 aa, Homo sapiens; identical to SEQ ID NO: 859480

SEQ ID NO: 859490 - protein, 155 aa, Homo sapiens [sequence omitted]

SEQ ID NO: 859491 - protein, 154 aa, Homo sapiens; identical to SEQ ID NO: 859481

SEQ ID NO: 859492 - protein, 154 aa, Homo sapiens; identical to SEQ ID NO: 859481

SEQ ID NO: 859493 - protein, 1204 aa, Homo sapiens
MNTKDTTEVAENSHHLKIFLPKKLLECLPRCPLLPPERLRWNTNEEIASYLITFEKHDEWLSCAPKTRPQNGSIILYNRKKVKYRKDGYLWKKRKDGKTTREDHMKLKVQGMELQCLYGCYVHSSIVPTFHRRCYWLLQNPDIVLVHYLNVPALEDCGKGCSPIFCSISSDRREWLKWSREELLGQLKPMFHGIKWSCGNGTEEFSVEHLVQQILDTHPTKPAPRTHACLCSGGLGSGSLTHKCSSTKHRIISPKVEPRALTLTSIPHPHPPEPPPLIAPLPPELPKAHTSPSSSSSSSSSGFAEPLEIRPSPPTSRGGSSRGGTAILLLTGLEQRAGGLTPTRHLAPQADPRPSMSLAVVVGTEPSAPPAPPSPAFDPDRFLNSPQRGQTYGGGQGVSPDFPEAEAAHTPCSALEPAAALEPQAAARGPPPQSVAGGRRGNCFFIQDDDSGEELKGHGAAPPIPSPPPSPPPSPAPLEPSSRVGRGEALFGGPVGASELEPFSLSSFPDLMGELISDEAPSIPAPTPQLSPALSTITDFSPEWSYPEGGVKVLITGPWTEAAEHYSCVFDHIAVPASLVQPGVLRCYCPAHEVGLVSLQVAGREGPLSASVLFEYRARRFLSLPSTQLDWLSLDDNQFRMSILERLEQMEKRMAEIAAAGQVPCQGPDAPPVQDEGQGPGFEARVVVLVESMIPRSTWKGPERLAHGSPFRGMSLLHLAAAQGYARLIETLSQWRSVETGSLDLEQEVDPLNVDHFSCTPLMWACALGHLEAAVLLFRWNRQALSIPDSLGRLPLSVAHSRGHVRLARCLEELQRQEPSVEPPFALSPPSSSPDTGLSSVSSPSELSDGTFSVTSAYSSAPDGSPPPAPLPASEMTMEDMAPGQLSSGVPEAPLLLMDYEATNSKGPLSSLPALPPASDDGAAPEDADSPQAVDVIPVDMISLAKQIIEATPERIKREDFVGLPEAGASMRERTGAVGLSETMSWLASYLENVDHFPSSTPPSELPFERGRLAVPSAPSWAEFLSASTSGKMESDFALLTLSDHEQRELYEAARVIQTAFRKYKGRRLKEQQEVAAAVIQRCYRKYKQLTWIALKFALYKKMTQAAILIQSKFRSYYEQKRFQQSRRAAVLIQQHYRSYRRRPGPPHRTSATLPARNKGSFLTKKQDQAARKIMRFLRRCRHRMRELKQNQELEGLPQPGLAT

SEQ ID NO: 859494 - protein, 1220 aa, Homo sapiens
MGTDSPSPRPLRPGVTLPPGALTMNTKDTTEVAENSHHLKIFLPKKLLECLPRCPLLPPERLRWNTNEEIASYLITFEKHDEWLSCAPKTRPQNGSIILYNRKKVKYRKDGYLWKKRKDGKTTREDHMKLKVQGMELQCLYGCYVHSSIVPTFHRRCYWLLQNPDIVLVHYLNVPALEDCGKGCSPIFCSISSDRREWLKWSREELLGQLKPMFHGIKWSCGNGTEEFSVEHLVQQILDTHPTKPAPRTHACLCSGGLGSGSLTHKCSSTKHRIISPKVEPRALTLTSIPHPHPPEPPPLIAPLPPELPKAHTSPSSSSSSSSSGFAEPLEIRPSPPTSRGGSSRGGTAILLLTGLEQRAGGLTPTRHLAPQADPRPSMSLAVVVGTEPSAPPAPPSPAFDPDRFLNSPQRGQTYGGGQGVSPDFPEAEAAHTPCSALEPAAALEPQAAARGPPPQSVAGGRRGNCFFIQDDDSGEELKGHGAAPPIPSPPPSPPPSPAPLEPSSRVGRGEALFGGPVGASELEPFSLSSFPDLMGELISDEAPSIPAPTPQLSPALSTITDFSPEWSYPEGGVKVLITGPWTEAAEHYSCVFDHIAVPASLVQPGVLRCYCPAHEVGLVSLQVAGREGPLSASVLFEYRARRFLSLPSTQLDWLSLDDNQFRMSILERLEQMEKRMAEIAAAGQVPCQGPDAPPVQDEGQGPGFEARVVVLVESMIPRSTWKGPERLAHGSPFRGMSLLHLAAAQGYARLIETLSQWRSVETGSLDLEQEVDPLNVDHFSCTPLMWACALGHLEAAVLLFRWNRQALSIPDSLGRLPLSVAHSRGHVRLARCLEELQRQEPSVEPPFALSPPSSSPDTGLSSVSSPSELSDGTFSVTSAYSSAPDGSPPPAPLPASEMTMEDMAPGQLSSGVPEAPLLLMDYEATNSKGPLSSLPALPPASDDGAAPEDADSPQAVDVIPVDMISLAKQIIEATPERIKREDFVGLPEAGASMRERTGAVGLSETMSWLASYLENVDHFPSSTPPSELPFERGRLAVPSAPSWAEFLSASTSGKMESDFALLTLSDHEQRELYEAARVIQTAFRKYKGRRLKEQQEVAAAVIQRCYRKYKQFALYKKMTQAAILIQSKFRSYYEQKRFQQSRRAAVLIQQHYRSYRRRPGPPHRTSATLPARNKGSFLTKKQDQAARKIMRFLRRCRHRMRELKQNQELEGLPQPGLAT
